United States Patent Application Publication US 2026/0317762 A1 - sequence listing, part 2

SEQ ID NO: 3402 - DNA, 2831 bp, synthetic construct
  source 1..2831: mol_type = other DNA; note = Ana1.182
taatacgactcactatagggagaccctcgaaaaaaaacacaaacacctaacgtcaagacgagggtaaagagagagtccaattctcaaagccaataggcagtagcgaaagctgcaagagaatgaaaatccgtggctcgcagcaaacaccaaacaaaacaaacacaaaccaacaaaaattaaaacagcctgtgggttgatcccacccacaggcccattgggcgctagcactctggtatcacggtacctttgtgcgcctgttttataccccctcccccaactgtaacttagaagtaacacacaccgatcaacagtcagcgtggcacaccagccacgttttgatcaagcacttctgttaccccggactgagtatcaatagactgctcacgcggttgaaggagaaagcgttcgttatccggccaactacttcgaaaaacctagtaacaccgtggaagttgcagagtgtttcgctcagcactaccccagtgtagatcaggtcgatgagtcaccgcattccccacgggcgaccgtggcggtggctgcgttggcggcctgcccatggggaaacccatgggacgctctaatacagacatggtgcgaagagtctattgagctagttggtagtcctccggcccctgaatgcggctaatcctaactgcggagcacacaccctcaagccagagggcagtgtgtcgtaacgggcaactctgcagcggaaccgactactttgggtgtccgtgtttcattttattcctatactggctgcttatggtgacaattgagagatcgttaccatatagctattggattggccatccggtgactaatagagctattatatatccctttgttgggtttataccacttagcttgaaagaggttaaaacattacaattcattgttaagttgaatacagcaaaatggaagatgccaagaacatcaagaagggccctgctccattctaccctctggaagatggaacagccggcgagcagctgcacaaggccatgaagagatatgccctggtgcctggcacaatcgccttcacagatgcccacatcgaggtggacatcacctacgccgagtacttcgagatgtctgtgcggctggccgaagctatgaagcgctacggcctgaacaccaaccaccggatcgtcgtgtgcagcgagaacagcctgcagttcttcatgcctgtgctgggcgccctgttcatcggagttgctgtggcccctgccaacgacatctacaacgagcgcgagctgctgaacagcatgggcatctctcagcccaccgtggtgttcgtgtccaagaagggactgcagaaaatcctgaacgtgcagaagaagctgcccatcatccagaaaatcatcatcatggacagcaagaccgactaccagggcttccagagcatgtacaccttcgtgaccagccatctgccacctggcttcaacgagtacgacttcgtgcccgagagcttcgaccgggacaagacaatcgccctgatcatgaacagcagcggctctaccggactgcccaaaggtgttgccctgcctcatagaactgcctgcgtgcggtttagccacgccagagatcccatcttcggcaaccagatcatccccgacacagccatcctgagcgtggtgccttttcaccacggcttcggcatgttcaccacactgggctacctgatctgcggcttcagagtggtgctgatgtaccgcttcgaggaagaactgttcctgcggagcctgcaggactacaagatccagtctgctctgctggtgcctactctgttcagcttctttgccaagagcaccctgatcgataagtacgacctgagcaacctgcacgagatcgcctctggcggagcccctctgtctaaagaagtgggagaagccgtcgccaagcggttccatctgcctggcatcagacaaggctatggcctgaccgagacaaccagcgccattctgattacccctgagggcgacgataagcctggcgctgtgggaaaagtggtgccattcttcgaggccaaggtggtggatctggacaccggcaaaacactgggcgttaaccagaggggcgagctgtgtgttagaggccctatgatcatgagcggctacgtgaacaaccccgaggccacaaacgctctgatcgacaaggatggatggctgcacagcggcgacattgcctactgggacgaagatgagcacttcttcatcgtggaccggctgaagtccctgatcaagtacaagggctaccaggtggccccagccgagctggaatctattctgctgcaacaccccaacatcttcgatgccggcgttgcaggactgcccgatgatgatgctggcgaactgccagctgctgtggtggtgctggaacacggcaagaccatgaccgagaaagaaatcgtggactacgtggccagccaagtgaccaccgccaagaaactgagaggcggcgtggtgtttgtggacgaggtgccaaaaggcctgacaggcaagctggacgcccggaagatcagagagatcctgattaaggccaagaaaggcggcaagatcgccgtgtaatagctaactagacaaaacaccaaacaaacaagctgcgagccacggacttaaataattgagccttaaagaagaaattctttaagtggatgctctcaaactcagggaaacctaaatctagttatagacaaggcaatcctgagccaagccgaagtagtaattagtaagttaacaatagatgacttacaactaatcggaaggtgcagagactcgacgggagctacccaaaaacaaccaaaaaaaatctagatatcggatcccggg

SEQ ID NO: 3403 - DNA, 2831 bp, synthetic construct
  source 1..2831: mol_type = other DNA; note = Ana1.183
taatacgactcactatagggagaccctcgaaaaaaaacacaaacaccaacgtcaagacgagggtaaagagagagtccaattctcaaagccaataggcagtagcgaaagctgcaagagaatgaaaatccgtggctcgcagcaaacaccaaacaaaacaaacacaaaccaacaaaaattaaaacagcctgtgggttgatcccacccacaggcccattgggcgctagcactctggtatcacggtacctttgtgcgcctgttttataccccctcccccaactgtaacttagaagtaacacacaccgatcaacagtcagcgtggcacaccagccacgttttgatcaagcacttctgttaccccggactgagtatcaatagactgctcacgcggttgaaggagaaagcgttcgttatccggccaactacttcgaaaaacctagtaacaccgtggaagttgcagagtgtttcgctcagcactaccccagtgtagatcaggtcgatgagtcaccgcattccccacgggcgaccgtggcggtggctgcgttggcggcctgcccatggggaaacccatgggacgctctaatacagacatggtgcgaagagtctattgagctagttggtagtcctccggcccctgaatgcggctaatcctaactgcggagcacacaccctcaagccagagggcagtgtgtcgtaacgggcaactctgcagcggaaccgactactttgggtgtccgtgtttcattttattcctatactggctgcttatggtgacaattgagagatcgttaccatatagctattggattggccatccggtgactaatagagctattatatatccctttgttgggtttataccacttagcttgaaagaggttaaaacattacaattcattgttaagttgaatacagcaaaatggaagatgccaagaacatcaagaagggccctgctccattctaccctctggaagatggaacagccggcgagcagctgcacaaggccatgaagagatatgccctggtgcctggcacaatcgccttcacagatgcccacatcgaggtggacatcacctacgccgagtacttcgagatgtctgtgcggctggccgaagctatgaagcgctacggcctgaacaccaaccaccggatcgtcgtgtgcagcgagaacagcctgcagttcttcatgcctgtgctgggcgccctgttcatcggagttgctgtggcccctgccaacgacatctacaacgagcgcgagctgctgaacagcatgggcatctctcagcccaccgtggtgttcgtgtccaagaagggactgcagaaaatcctgaacgtgcagaagaagctgcccatcatccagaaaatcatcatcatggacagcaagaccgactaccagggcttccagagcatgtacaccttcgtgaccagccatctgccacctggcttcaacgagtacgacttcgtgcccgagagcttcgaccgggacaagacaatcgccctgatcatgaacagcagcggctctaccggactgcccaaaggtgttgccctgcctcatagaactgcctgcgtgcggtttagccacgccagagatcccatcttcggcaaccagatcatccccgacacagccatcctgagcgtggtgccttttcaccacggcttcggcatgttcaccacactgggctacctgatctgcggcttcagagtggtgctgatgtaccgcttcgaggaagaactgttcctgcggagcctgcaggactacaagatccagtctgctctgctggtgcctactctgttcagcttctttgccaagagcaccctgatcgataagtacgacctgagcaacctgcacgagatcgcctctggcggagcccctctgtctaaagaagtgggagaagccgtcgccaagcggttccatctgcctggcatcagacaaggctatggcctgaccgagacaaccagcgccattctgattacccctgagggcgacgataagcctggcgctgtgggaaaagtggtgccattcttcgaggccaaggtggtggatctggacaccggcaaaacactgggcgttaaccagaggggcgagctgtgtgttagaggccctatgatcatgagcggctacgtgaacaaccccgaggccacaaacgctctgatcgacaaggatggatggctgcacagcggcgacattgcctactgggacgaagatgagcacttcttcatcgtggaccggctgaagtccctgatcaagtacaagggctaccaggtggccccagccgagctggaatctattctgctgcaacaccccaacatcttcgatgccggcgttgcaggactgcccgatgatgatgctggcgaactgccagctgctgtggtggtgctggaacacggcaagaccatgaccgagaaagaaatcgtggactacgtggccagccaagtgaccaccgccaagaaactgagaggcggcgtggtgtttgtggacgaggtgccaaaaggcctgacaggcaagctggacgcccggaagatcagagagatcctgattaaggccaagaaaggcggcaagatcgccgtgtaatagctaactagacaaaacaccaaacaaacaagctgcgagccacggacttaaataattgagccttaaagaagaaattctttaagtggatgctctcaaactcagggaaacctaaatctagttatagacaaggcaatcctgagccaagccgaagtagtaattagtaagttaacaatagatgacttacaactaatcggaaggtgcagagactcgacgggagctaccctaaaaacaaccaaaaaaaatctagatatcggatcccggg

SEQ ID NO: 3404 - DNA, 2831 bp, synthetic construct
  source 1..2831: mol_type = other DNA; note = Ana1.184
taatacgactcactatagggagaccctcgaaaaaaaacacaaacaccacgtcaagacgagggtaaagagagagtccaattctcaaagccaataggcagtagcgaaagctgcaagagaatgaaaatccgtggctcgcagcaaacaccaaacaaaacaaacacaaaccaacaaaaattaaaacagcctgtgggttgatcccacccacaggcccattgggcgctagcactctggtatcacggtacctttgtgcgcctgttttataccccctcccccaactgtaacttagaagtaacacacaccgatcaacagtcagcgtggcacaccagccacgttttgatcaagcacttctgttaccccggactgagtatcaatagactgctcacgcggttgaaggagaaagcgttcgttatccggccaactacttcgaaaaacctagtaacaccgtggaagttgcagagtgtttcgctcagcactaccccagtgtagatcaggtcgatgagtcaccgcattccccacgggcgaccgtggcggtggctgcgttggcggcctgcccatggggaaacccatgggacgctctaatacagacatggtgcgaagagtctattgagctagttggtagtcctccggcccctgaatgcggctaatcctaactgcggagcacacaccctcaagccagagggcagtgtgtcgtaacgggcaactctgcagcggaaccgactactttgggtgtccgtgtttcattttattcctatactggctgcttatggtgacaattgagagatcgttaccatatagctattggattggccatccggtgactaatagagctattatatatccctttgttgggtttataccacttagcttgaaagaggttaaaacattacaattcattgttaagttgaatacagcaaaatggaagatgccaagaacatcaagaagggccctgctccattctaccctctggaagatggaacagccggcgagcagctgcacaaggccatgaagagatatgccctggtgcctggcacaatcgccttcacagatgcccacatcgaggtggacatcacctacgccgagtacttcgagatgtctgtgcggctggccgaagctatgaagcgctacggcctgaacaccaaccaccggatcgtcgtgtgcagcgagaacagcctgcagttcttcatgcctgtgctgggcgccctgttcatcggagttgctgtggcccctgccaacgacatctacaacgagcgcgagctgctgaacagcatgggcatctctcagcccaccgtggtgttcgtgtccaagaagggactgcagaaaatcctgaacgtgcagaagaagctgcccatcatccagaaaatcatcatcatggacagcaagaccgactaccagggcttccagagcatgtacaccttcgtgaccagccatctgccacctggcttcaacgagtacgacttcgtgcccgagagcttcgaccgggacaagacaatcgccctgatcatgaacagcagcggctctaccggactgcccaaaggtgttgccctgcctcatagaactgcctgcgtgcggtttagccacgccagagatcccatcttcggcaaccagatcatccccgacacagccatcctgagcgtggtgccttttcaccacggcttcggcatgttcaccacactgggctacctgatctgcggcttcagagtggtgctgatgtaccgcttcgaggaagaactgttcctgcggagcctgcaggactacaagatccagtctgctctgctggtgcctactctgttcagcttctttgccaagagcaccctgatcgataagtacgacctgagcaacctgcacgagatcgcctctggcggagcccctctgtctaaagaagtgggagaagccgtcgccaagcggttccatctgcctggcatcagacaaggctatggcctgaccgagacaaccagcgccattctgattacccctgagggcgacgataagcctggcgctgtgggaaaagtggtgccattcttcgaggccaaggtggtggatctggacaccggcaaaacactgggcgttaaccagaggggcgagctgtgtgttagaggccctatgatcatgagcggctacgtgaacaaccccgaggccacaaacgctctgatcgacaaggatggatggctgcacagcggcgacattgcctactgggacgaagatgagcacttcttcatcgtggaccggctgaagtccctgatcaagtacaagggctaccaggtggccccagccgagctggaatctattctgctgcaacaccccaacatcttcgatgccggcgttgcaggactgcccgatgatgatgctggcgaactgccagctgctgtggtggtgctggaacacggcaagaccatgaccgagaaagaaatcgtggactacgtggccagccaagtgaccaccgccaagaaactgagaggcggcgtggtgtttgtggacgaggtgccaaaaggcctgacaggcaagctggacgcccggaagatcagagagatcctgattaaggccaagaaaggcggcaagatcgccgtgtaatagctaactagacaaaacaccaaacaaacaagctgcgagccacggacttaaataattgagccttaaagaagaaattctttaagtggatgctctcaaactcagggaaacctaaatctagttatagacaaggcaatcctgagccaagccgaagtagtaattagtaagttaacaatagatgacttacaactaatcggaaggtgcagagactcgacgggagctaccctaaaaaacaaccaaaaaaaatctagatatcggatcccggg

SEQ ID NO: 3405 - DNA, 2831 bp, synthetic construct
  source 1..2831: mol_type = other DNA; note = Ana1.185
taatacgactcactatagggagaccctcgaaaaaaaacacaaacacccgtcaagacgagggtaaagagagagtccaattctcaaagccaataggcagtagcgaaagctgcaagagaatgaaaatccgtggctcgcagcaaacaccaaacaaaacaaacacaaaccaacaaaaattaaaacagcctgtgggttgatcccacccacaggcccattgggcgctagcactctggtatcacggtacctttgtgcgcctgttttataccccctcccccaactgtaacttagaagtaacacacaccgatcaacagtcagcgtggcacaccagccacgttttgatcaagcacttctgttaccccggactgagtatcaatagactgctcacgcggttgaaggagaaagcgttcgttatccggccaactacttcgaaaaacctagtaacaccgtggaagttgcagagtgtttcgctcagcactaccccagtgtagatcaggtcgatgagtcaccgcattccccacgggcgaccgtggcggtggctgcgttggcggcctgcccatggggaaacccatgggacgctctaatacagacatggtgcgaagagtctattgagctagttggtagtcctccggcccctgaatgcggctaatcctaactgcggagcacacaccctcaagccagagggcagtgtgtcgtaacgggcaactctgcagcggaaccgactactttgggtgtccgtgtttcattttattcctatactggctgcttatggtgacaattgagagatcgttaccatatagctattggattggccatccggtgactaatagagctattatatatccctttgttgggtttataccacttagcttgaaagaggttaaaacattacaattcattgttaagttgaatacagcaaaatggaagatgccaagaacatcaagaagggccctgctccattctaccctctggaagatggaacagccggcgagcagctgcacaaggccatgaagagatatgccctggtgcctggcacaatcgccttcacagatgcccacatcgaggtggacatcacctacgccgagtacttcgagatgtctgtgcggctggccgaagctatgaagcgctacggcctgaacaccaaccaccggatcgtcgtgtgcagcgagaacagcctgcagttcttcatgcctgtgctgggcgccctgttcatcggagttgctgtggcccctgccaacgacatctacaacgagcgcgagctgctgaacagcatgggcatctctcagcccaccgtggtgttcgtgtccaagaagggactgcagaaaatcctgaacgtgcagaagaagctgcccatcatccagaaaatcatcatcatggacagcaagaccgactaccagggcttccagagcatgtacaccttcgtgaccagccatctgccacctggcttcaacgagtacgacttcgtgcccgagagcttcgaccgggacaagacaatcgccctgatcatgaacagcagcggctctaccggactgcccaaaggtgttgccctgcctcatagaactgcctgcgtgcggtttagccacgccagagatcccatcttcggcaaccagatcatccccgacacagccatcctgagcgtggtgccttttcaccacggcttcggcatgttcaccacactgggctacctgatctgcggcttcagagtggtgctgatgtaccgcttcgaggaagaactgttcctgcggagcctgcaggactacaagatccagtctgctctgctggtgcctactctgttcagcttctttgccaagagcaccctgatcgataagtacgacctgagcaacctgcacgagatcgcctctggcggagcccctctgtctaaagaagtgggagaagccgtcgccaagcggttccatctgcctggcatcagacaaggctatggcctgaccgagacaaccagcgccattctgattacccctgagggcgacgataagcctggcgctgtgggaaaagtggtgccattcttcgaggccaaggtggtggatctggacaccggcaaaacactgggcgttaaccagaggggcgagctgtgtgttagaggccctatgatcatgagcggctacgtgaacaaccccgaggccacaaacgctctgatcgacaaggatggatggctgcacagcggcgacattgcctactgggacgaagatgagcacttcttcatcgtggaccggctgaagtccctgatcaagtacaagggctaccaggtggccccagccgagctggaatctattctgctgcaacaccccaacatcttcgatgccggcgttgcaggactgcccgatgatgatgctggcgaactgccagctgctgtggtggtgctggaacacggcaagaccatgaccgagaaagaaatcgtggactacgtggccagccaagtgaccaccgccaagaaactgagaggcggcgtggtgtttgtggacgaggtgccaaaaggcctgacaggcaagctggacgcccggaagatcagagagatcctgattaaggccaagaaaggcggcaagatcgccgtgtaatagctaactagacaaaacaccaaacaaacaagctgcgagccacggacttaaataattgagccttaaagaagaaattctttaagtggatgctctcaaactcagggaaacctaaatctagttatagacaaggcaatcctgagccaagccgaagtagtaattagtaagttaacaatagatgacttacaactaatcggaaggtgcagagactcgacgggagctaccctaaaaaaacaaccaaaaaaaatctagatatcggatcccggg

SEQ ID NO: 3406 - DNA, 2831 bp, synthetic construct
  source 1..2831: mol_type = other DNA; note = Ana1.186
taatacgactcactatagggagaccctcgaaaaaaaacacaaacaccgtcaagacgagggtaaagagagagtccaattctcaaagccaataggcagtagcgaaagctgcaagagaatgaaaatccgtggctcgcagcaaacaccaaacaaaacaaacacaaaccaacaaaaattaaaacagcctgtgggttgatcccacccacaggcccattgggcgctagcactctggtatcacggtacctttgtgcgcctgttttataccccctcccccaactgtaacttagaagtaacacacaccgatcaacagtcagcgtggcacaccagccacgttttgatcaagcacttctgttaccccggactgagtatcaatagactgctcacgcggttgaaggagaaagcgttcgttatccggccaactacttcgaaaaacctagtaacaccgtggaagttgcagagtgtttcgctcagcactaccccagtgtagatcaggtcgatgagtcaccgcattccccacgggcgaccgtggcggtggctgcgttggcggcctgcccatggggaaacccatgggacgctctaatacagacatggtgcgaagagtctattgagctagttggtagtcctccggcccctgaatgcggctaatcctaactgcggagcacacaccctcaagccagagggcagtgtgtcgtaacgggcaactctgcagcggaaccgactactttgggtgtccgtgtttcattttattcctatactggctgcttatggtgacaattgagagatcgttaccatatagctattggattggccatccggtgactaatagagctattatatatccctttgttgggtttataccacttagcttgaaagaggttaaaacattacaattcattgttaagttgaatacagcaaaatggaagatgccaagaacatcaagaagggccctgctccattctaccctctggaagatggaacagccggcgagcagctgcacaaggccatgaagagatatgccctggtgcctggcacaatcgccttcacagatgcccacatcgaggtggacatcacctacgccgagtacttcgagatgtctgtgcggctggccgaagctatgaagcgctacggcctgaacaccaaccaccggatcgtcgtgtgcagcgagaacagcctgcagttcttcatgcctgtgctgggcgccctgttcatcggagttgctgtggcccctgccaacgacatctacaacgagcgcgagctgctgaacagcatgggcatctctcagcccaccgtggtgttcgtgtccaagaagggactgcagaaaatcctgaacgtgcagaagaagctgcccatcatccagaaaatcatcatcatggacagcaagaccgactaccagggcttccagagcatgtacaccttcgtgaccagccatctgccacctggcttcaacgagtacgacttcgtgcccgagagcttcgaccgggacaagacaatcgccctgatcatgaacagcagcggctctaccggactgcccaaaggtgttgccctgcctcatagaactgcctgcgtgcggtttagccacgccagagatcccatcttcggcaaccagatcatccccgacacagccatcctgagcgtggtgccttttcaccacggcttcggcatgttcaccacactgggctacctgatctgcggcttcagagtggtgctgatgtaccgcttcgaggaagaactgttcctgcggagcctgcaggactacaagatccagtctgctctgctggtgcctactctgttcagcttctttgccaagagcaccctgatcgataagtacgacctgagcaacctgcacgagatcgcctctggcggagcccctctgtctaaagaagtgggagaagccgtcgccaagcggttccatctgcctggcatcagacaaggctatggcctgaccgagacaaccagcgccattctgattacccctgagggcgacgataagcctggcgctgtgggaaaagtggtgccattcttcgaggccaaggtggtggatctggacaccggcaaaacactgggcgttaaccagaggggcgagctgtgtgttagaggccctatgatcatgagcggctacgtgaacaaccccgaggccacaaacgctctgatcgacaaggatggatggctgcacagcggcgacattgcctactgggacgaagatgagcacttcttcatcgtggaccggctgaagtccctgatcaagtacaagggctaccaggtggccccagccgagctggaatctattctgctgcaacaccccaacatcttcgatgccggcgttgcaggactgcccgatgatgatgctggcgaactgccagctgctgtggtggtgctggaacacggcaagaccatgaccgagaaagaaatcgtggactacgtggccagccaagtgaccaccgccaagaaactgagaggcggcgtggtgtttgtggacgaggtgccaaaaggcctgacaggcaagctggacgcccggaagatcagagagatcctgattaaggccaagaaaggcggcaagatcgccgtgtaatagctaactagacaaaacaccaaacaaacaagctgcgagccacggacttaaataattgagccttaaagaagaaattctttaagtggatgctctcaaactcagggaaacctaaatctagttatagacaaggcaatcctgagccaagccgaagtagtaattagtaagttaacaatagatgacttacaactaatcggaaggtgcagagactcgacgggagctaccctaacaaaaacaaccaaaaaaaatctagatatcggatcccggg

SEQ ID NO: 3407 - DNA, 2831 bp, synthetic construct
  source 1..2831: mol_type = other DNA; note = Ana1.187
taatacgactcactatagggagaccctcgaaaaaaaacacaaacacctcaagacgagggtaaagagagagtccaattctcaaagccaataggcagtagcgaaagctgcaagagaatgaaaatccgtggctcgcagcaaacaccaaacaaaacaaacacaaaccaacaaaaattaaaacagcctgtgggttgatcccacccacaggcccattgggcgctagcactctggtatcacggtacctttgtgcgcctgttttataccccctcccccaactgtaacttagaagtaacacacaccgatcaacagtcagcgtggcacaccagccacgttttgatcaagcacttctgttaccccggactgagtatcaatagactgctcacgcggttgaaggagaaagcgttcgttatccggccaactacttcgaaaaacctagtaacaccgtggaagttgcagagtgtttcgctcagcactaccccagtgtagatcaggtcgatgagtcaccgcattccccacgggcgaccgtggcggtggctgcgttggcggcctgcccatggggaaacccatgggacgctctaatacagacatggtgcgaagagtctattgagctagttggtagtcctccggcccctgaatgcggctaatcctaactgcggagcacacaccctcaagccagagggcagtgtgtcgtaacgggcaactctgcagcggaaccgactactttgggtgtccgtgtttcattttattcctatactggctgcttatggtgacaattgagagatcgttaccatatagctattggattggccatccggtgactaatagagctattatatatccctttgttgggtttataccacttagcttgaaagaggttaaaacattacaattcattgttaagttgaatacagcaaaatggaagatgccaagaacatcaagaagggccctgctccattctaccctctggaagatggaacagccggcgagcagctgcacaaggccatgaagagatatgccctggtgcctggcacaatcgccttcacagatgcccacatcgaggtggacatcacctacgccgagtacttcgagatgtctgtgcggctggccgaagctatgaagcgctacggcctgaacaccaaccaccggatcgtcgtgtgcagcgagaacagcctgcagttcttcatgcctgtgctgggcgccctgttcatcggagttgctgtggcccctgccaacgacatctacaacgagcgcgagctgctgaacagcatgggcatctctcagcccaccgtggtgttcgtgtccaagaagggactgcagaaaatcctgaacgtgcagaagaagctgcccatcatccagaaaatcatcatcatggacagcaagaccgactaccagggcttccagagcatgtacaccttcgtgaccagccatctgccacctggcttcaacgagtacgacttcgtgcccgagagcttcgaccgggacaagacaatcgccctgatcatgaacagcagcggctctaccggactgcccaaaggtgttgccctgcctcatagaactgcctgcgtgcggtttagccacgccagagatcccatcttcggcaaccagatcatccccgacacagccatcctgagcgtggtgccttttcaccacggcttcggcatgttcaccacactgggctacctgatctgcggcttcagagtggtgctgatgtaccgcttcgaggaagaactgttcctgcggagcctgcaggactacaagatccagtctgctctgctggtgcctactctgttcagcttctttgccaagagcaccctgatcgataagtacgacctgagcaacctgcacgagatcgcctctggcggagcccctctgtctaaagaagtgggagaagccgtcgccaagcggttccatctgcctggcatcagacaaggctatggcctgaccgagacaaccagcgccattctgattacccctgagggcgacgataagcctggcgctgtgggaaaagtggtgccattcttcgaggccaaggtggtggatctggacaccggcaaaacactgggcgttaaccagaggggcgagctgtgtgttagaggccctatgatcatgagcggctacgtgaacaaccccgaggccacaaacgctctgatcgacaaggatggatggctgcacagcggcgacattgcctactgggacgaagatgagcacttcttcatcgtggaccggctgaagtccctgatcaagtacaagggctaccaggtggccccagccgagctggaatctattctgctgcaacaccccaacatcttcgatgccggcgttgcaggactgcccgatgatgatgctggcgaactgccagctgctgtggtggtgctggaacacggcaagaccatgaccgagaaagaaatcgtggactacgtggccagccaagtgaccaccgccaagaaactgagaggcggcgtggtgtttgtggacgaggtgccaaaaggcctgacaggcaagctggacgcccggaagatcagagagatcctgattaaggccaagaaaggcggcaagatcgccgtgtaatagctaactagacaaaacaccaaacaaacaagctgcgagccacggacttaaataattgagccttaaagaagaaattctttaagtggatgctctcaaactcagggaaacctaaatctagttatagacaaggcaatcctgagccaagccgaagtagtaattagtaagttaacaatagatgacttacaactaatcggaaggtgcagagactcgacgggagctaccctaacgaaaaacaaccaaaaaaaatctagatatcggatcccggg

SEQ ID NO: 3408 - DNA, 2831 bp, synthetic construct
  source 1..2831: mol_type = other DNA; note = Ana1.188
taatacgactcactatagggagaccctcgaaaaaaaacacaaacacccaagacgagggtaaagagagagtccaattctcaaagccaataggcagtagcgaaagctgcaagagaatgaaaatccgtggctcgcagcaaacaccaaacaaaacaaacacaaaccaacaaaaattaaaacagcctgtgggttgatcccacccacaggcccattgggcgctagcactctggtatcacggtacctttgtgcgcctgttttataccccctcccccaactgtaacttagaagtaacacacaccgatcaacagtcagcgtggcacaccagccacgttttgatcaagcacttctgttaccccggactgagtatcaatagactgctcacgcggttgaaggagaaagcgttcgttatccggccaactacttcgaaaaacctagtaacaccgtggaagttgcagagtgtttcgctcagcactaccccagtgtagatcaggtcgatgagtcaccgcattccccacgggcgaccgtggcggtggctgcgttggcggcctgcccatggggaaacccatgggacgctctaatacagacatggtgcgaagagtctattgagctagttggtagtcctccggcccctgaatgcggctaatcctaactgcggagcacacaccctcaagccagagggcagtgtgtcgtaacgggcaactctgcagcggaaccgactactttgggtgtccgtgtttcattttattcctatactggctgcttatggtgacaattgagagatcgttaccatatagctattggattggccatccggtgactaatagagctattatatatccctttgttgggtttataccacttagcttgaaagaggttaaaacattacaattcattgttaagttgaatacagcaaaatggaagatgccaagaacatcaagaagggccctgctccattctaccctctggaagatggaacagccggcgagcagctgcacaaggccatgaagagatatgccctggtgcctggcacaatcgccttcacagatgcccacatcgaggtggacatcacctacgccgagtacttcgagatgtctgtgcggctggccgaagctatgaagcgctacggcctgaacaccaaccaccggatcgtcgtgtgcagcgagaacagcctgcagttcttcatgcctgtgctgggcgccctgttcatcggagttgctgtggcccctgccaacgacatctacaacgagcgcgagctgctgaacagcatgggcatctctcagcccaccgtggtgttcgtgtccaagaagggactgcagaaaatcctgaacgtgcagaagaagctgcccatcatccagaaaatcatcatcatggacagcaagaccgactaccagggcttccagagcatgtacaccttcgtgaccagccatctgccacctggcttcaacgagtacgacttcgtgcccgagagcttcgaccgggacaagacaatcgccctgatcatgaacagcagcggctctaccggactgcccaaaggtgttgccctgcctcatagaactgcctgcgtgcggtttagccacgccagagatcccatcttcggcaaccagatcatccccgacacagccatcctgagcgtggtgccttttcaccacggcttcggcatgttcaccacactgggctacctgatctgcggcttcagagtggtgctgatgtaccgcttcgaggaagaactgttcctgcggagcctgcaggactacaagatccagtctgctctgctggtgcctactctgttcagcttctttgccaagagcaccctgatcgataagtacgacctgagcaacctgcacgagatcgcctctggcggagcccctctgtctaaagaagtgggagaagccgtcgccaagcggttccatctgcctggcatcagacaaggctatggcctgaccgagacaaccagcgccattctgattacccctgagggcgacgataagcctggcgctgtgggaaaagtggtgccattcttcgaggccaaggtggtggatctggacaccggcaaaacactgggcgttaaccagaggggcgagctgtgtgttagaggccctatgatcatgagcggctacgtgaacaaccccgaggccacaaacgctctgatcgacaaggatggatggctgcacagcggcgacattgcctactgggacgaagatgagcacttcttcatcgtggaccggctgaagtccctgatcaagtacaagggctaccaggtggccccagccgagctggaatctattctgctgcaacaccccaacatcttcgatgccggcgttgcaggactgcccgatgatgatgctggcgaactgccagctgctgtggtggtgctggaacacggcaagaccatgaccgagaaagaaatcgtggactacgtggccagccaagtgaccaccgccaagaaactgagaggcggcgtggtgtttgtggacgaggtgccaaaaggcctgacaggcaagctggacgcccggaagatcagagagatcctgattaaggccaagaaaggcggcaagatcgccgtgtaatagctaactagacaaaacaccaaacaaacaagctgcgagccacggacttaaataattgagccttaaagaagaaattctttaagtggatgctctcaaactcagggaaacctaaatctagttatagacaaggcaatcctgagccaagccgaagtagtaattagtaagttaacaatagatgacttacaactaatcggaaggtgcagagactcgacgggagctaccctaacgtaaaaacaaccaaaaaaaatctagatatcggatcccggg

SEQ ID NO: 3409 - DNA, 2831 bp, synthetic construct
  source 1..2831: mol_type = other DNA; note = Ana1.189
taatacgactcactatagggagaccctcgaaaaaaaacacaaacaccaagacgagggtaaagagagagtccaattctcaaagccaataggcagtagcgaaagctgcaagagaatgaaaatccgtggctcgcagcaaacaccaaacaaaacaaacacaaaccaacaaaaattaaaacagcctgtgggttgatcccacccacaggcccattgggcgctagcactctggtatcacggtacctttgtgcgcctgttttataccccctcccccaactgtaacttagaagtaacacacaccgatcaacagtcagcgtggcacaccagccacgttttgatcaagcacttctgttaccccggactgagtatcaatagactgctcacgcggttgaaggagaaagcgttcgttatccggccaactacttcgaaaaacctagtaacaccgtggaagttgcagagtgtttcgctcagcactaccccagtgtagatcaggtcgatgagtcaccgcattccccacgggcgaccgtggcggtggctgcgttggcggcctgcccatggggaaacccatgggacgctctaatacagacatggtgcgaagagtctattgagctagttggtagtcctccggcccctgaatgcggctaatcctaactgcggagcacacaccctcaagccagagggcagtgtgtcgtaacgggcaactctgcagcggaaccgactactttgggtgtccgtgtttcattttattcctatactggctgcttatggtgacaattgagagatcgttaccatatagctattggattggccatccggtgactaatagagctattatatatccctttgttgggtttataccacttagcttgaaagaggttaaaacattacaattcattgttaagttgaatacagcaaaatggaagatgccaagaacatcaagaagggccctgctccattctaccctctggaagatggaacagccggcgagcagctgcacaaggccatgaagagatatgccctggtgcctggcacaatcgccttcacagatgcccacatcgaggtggacatcacctacgccgagtacttcgagatgtctgtgcggctggccgaagctatgaagcgctacggcctgaacaccaaccaccggatcgtcgtgtgcagcgagaacagcctgcagttcttcatgcctgtgctgggcgccctgttcatcggagttgctgtggcccctgccaacgacatctacaacgagcgcgagctgctgaacagcatgggcatctctcagcccaccgtggtgttcgtgtccaagaagggactgcagaaaatcctgaacgtgcagaagaagctgcccatcatccagaaaatcatcatcatggacagcaagaccgactaccagggcttccagagcatgtacaccttcgtgaccagccatctgccacctggcttcaacgagtacgacttcgtgcccgagagcttcgaccgggacaagacaatcgccctgatcatgaacagcagcggctctaccggactgcccaaaggtgttgccctgcctcatagaactgcctgcgtgcggtttagccacgccagagatcccatcttcggcaaccagatcatccccgacacagccatcctgagcgtggtgccttttcaccacggcttcggcatgttcaccacactgggctacctgatctgcggcttcagagtggtgctgatgtaccgcttcgaggaagaactgttcctgcggagcctgcaggactacaagatccagtctgctctgctggtgcctactctgttcagcttctttgccaagagcaccctgatcgataagtacgacctgagcaacctgcacgagatcgcctctggcggagcccctctgtctaaagaagtgggagaagccgtcgccaagcggttccatctgcctggcatcagacaaggctatggcctgaccgagacaaccagcgccattctgattacccctgagggcgacgataagcctggcgctgtgggaaaagtggtgccattcttcgaggccaaggtggtggatctggacaccggcaaaacactgggcgttaaccagaggggcgagctgtgtgttagaggccctatgatcatgagcggctacgtgaacaaccccgaggccacaaacgctctgatcgacaaggatggatggctgcacagcggcgacattgcctactgggacgaagatgagcacttcttcatcgtggaccggctgaagtccctgatcaagtacaagggctaccaggtggccccagccgagctggaatctattctgctgcaacaccccaacatcttcgatgccggcgttgcaggactgcccgatgatgatgctggcgaactgccagctgctgtggtggtgctggaacacggcaagaccatgaccgagaaagaaatcgtggactacgtggccagccaagtgaccaccgccaagaaactgagaggcggcgtggtgtttgtggacgaggtgccaaaaggcctgacaggcaagctggacgcccggaagatcagagagatcctgattaaggccaagaaaggcggcaagatcgccgtgtaatagctaactagacaaaacaccaaacaaacaagctgcgagccacggacttaaataattgagccttaaagaagaaattctttaagtggatgctctcaaactcagggaaacctaaatctagttatagacaaggcaatcctgagccaagccgaagtagtaattagtaagttaacaatagatgacttacaactaatcggaaggtgcagagactcgacgggagctaccctaacgtcaaaaacaaccaaaaaaaatctagatatcggatcccggg

SEQ ID NO: 3410 - DNA, 2831 bp, synthetic construct
  source 1..2831: mol_type = other DNA; note = Ana1.190
taatacgactcactatagggagaccctcgaaaaaaaacacaaacaccagacgagggtaaagagagagtccaattctcaaagccaataggcagtagcgaaagctgcaagagaatgaaaatccgtggctcgcagcaaacaccaaacaaaacaaacacaaaccaacaaaaattaaaacagcctgtgggttgatcccacccacaggcccattgggcgctagcactctggtatcacggtacctttgtgcgcctgttttataccccctcccccaactgtaacttagaagtaacacacaccgatcaacagtcagcgtggcacaccagccacgttttgatcaagcacttctgttaccccggactgagtatcaatagactgctcacgcggttgaaggagaaagcgttcgttatccggccaactacttcgaaaaacctagtaacaccgtggaagttgcagagtgtttcgctcagcactaccccagtgtagatcaggtcgatgagtcaccgcattccccacgggcgaccgtggcggtggctgcgttggcggcctgcccatggggaaacccatgggacgctctaatacagacatggtgcgaagagtctattgagctagttggtagtcctccggcccctgaatgcggctaatcctaactgcggagcacacaccctcaagccagagggcagtgtgtcgtaacgggcaactctgcagcggaaccgactactttgggtgtccgtgtttcattttattcctatactggctgcttatggtgacaattgagagatcgttaccatatagctattggattggccatccggtgactaatagagctattatatatccctttgttgggtttataccacttagcttgaaagaggttaaaacattacaattcattgttaagttgaatacagcaaaatggaagatgccaagaacatcaagaagggccctgctccattctaccctctggaagatggaacagccggcgagcagctgcacaaggccatgaagagatatgccctggtgcctggcacaatcgccttcacagatgcccacatcgaggtggacatcacctacgccgagtacttcgagatgtctgtgcggctggccgaagctatgaagcgctacggcctgaacaccaaccaccggatcgtcgtgtgcagcgagaacagcctgcagttcttcatgcctgtgctgggcgccctgttcatcggagttgctgtggcccctgccaacgacatctacaacgagcgcgagctgctgaacagcatgggcatctctcagcccaccgtggtgttcgtgtccaagaagggactgcagaaaatcctgaacgtgcagaagaagctgcccatcatccagaaaatcatcatcatggacagcaagaccgactaccagggcttccagagcatgtacaccttcgtgaccagccatctgccacctggcttcaacgagtacgacttcgtgcccgagagcttcgaccgggacaagacaatcgccctgatcatgaacagcagcggctctaccggactgcccaaaggtgttgccctgcctcatagaactgcctgcgtgcggtttagccacgccagagatcccatcttcggcaaccagatcatccccgacacagccatcctgagcgtggtgccttttcaccacggcttcggcatgttcaccacactgggctacctgatctgcggcttcagagtggtgctgatgtaccgcttcgaggaagaactgttcctgcggagcctgcaggactacaagatccagtctgctctgctggtgcctactctgttcagcttctttgccaagagcaccctgatcgataagtacgacctgagcaacctgcacgagatcgcctctggcggagcccctctgtctaaagaagtgggagaagccgtcgccaagcggttccatctgcctggcatcagacaaggctatggcctgaccgagacaaccagcgccattctgattacccctgagggcgacgataagcctggcgctgtgggaaaagtggtgccattcttcgaggccaaggtggtggatctggacaccggcaaaacactgggcgttaaccagaggggcgagctgtgtgttagaggccctatgatcatgagcggctacgtgaacaaccccgaggccacaaacgctctgatcgacaaggatggatggctgcacagcggcgacattgcctactgggacgaagatgagcacttcttcatcgtggaccggctgaagtccctgatcaagtacaagggctaccaggtggccccagccgagctggaatctattctgctgcaacaccccaacatcttcgatgccggcgttgcaggactgcccgatgatgatgctggcgaactgccagctgctgtggtggtgctggaacacggcaagaccatgaccgagaaagaaatcgtggactacgtggccagccaagtgaccaccgccaagaaactgagaggcggcgtggtgtttgtggacgaggtgccaaaaggcctgacaggcaagctggacgcccggaagatcagagagatcctgattaaggccaagaaaggcggcaagatcgccgtgtaatagctaactagacaaaacaccaaacaaacaagctgcgagccacggacttaaataattgagccttaaagaagaaattctttaagtggatgctctcaaactcagggaaacctaaatctagttatagacaaggcaatcctgagccaagccgaagtagtaattagtaagttaacaatagatgacttacaactaatcggaaggtgcagagactcgacgggagctaccctaacgtcaaaaaacaaccaaaaaaaatctagatatcggatcccggg

SEQ ID NO: 3411 - DNA, 2831 bp, synthetic construct
  source 1..2831: mol_type = other DNA; note = Ana1.191
taatacgactcactatagggagaccctcgaaaaaaaacacaaacaccgacgagggtaaagagagagtccaattctcaaagccaataggcagtagcgaaagctgcaagagaatgaaaatccgtggctcgcagcaaacaccaaacaaaacaaacacaaaccaacaaaaattaaaacagcctgtgggttgatcccacccacaggcccattgggcgctagcactctggtatcacggtacctttgtgcgcctgttttataccccctcccccaactgtaacttagaagtaacacacaccgatcaacagtcagcgtggcacaccagccacgttttgatcaagcacttctgttaccccggactgagtatcaatagactgctcacgcggttgaaggagaaagcgttcgttatccggccaactacttcgaaaaacctagtaacaccgtggaagttgcagagtgtttcgctcagcactaccccagtgtagatcaggtcgatgagtcaccgcattccccacgggcgaccgtggcggtggctgcgttggcggcctgcccatggggaaacccatgggacgctctaatacagacatggtgcgaagagtctattgagctagttggtagtcctccggcccctgaatgcggctaatcctaactgcggagcacacaccctcaagccagagggcagtgtgtcgtaacgggcaactctgcagcggaaccgactactttgggtgtccgtgtttcattttattcctatactggctgcttatggtgacaattgagagatcgttaccatatagctattggattggccatccggtgactaatagagctattatatatccctttgttgggtttataccacttagcttgaaagaggttaaaacattacaattcattgttaagttgaatacagcaaaatggaagatgccaagaacatcaagaagggccctgctccattctaccctctggaagatggaacagccggcgagcagctgcacaaggccatgaagagatatgccctggtgcctggcacaatcgccttcacagatgcccacatcgaggtggacatcacctacgccgagtacttcgagatgtctgtgcggctggccgaagctatgaagcgctacggcctgaacaccaaccaccggatcgtcgtgtgcagcgagaacagcctgcagttcttcatgcctgtgctgggcgccctgttcatcggagttgctgtggcccctgccaacgacatctacaacgagcgcgagctgctgaacagcatgggcatctctcagcccaccgtggtgttcgtgtccaagaagggactgcagaaaatcctgaacgtgcagaagaagctgcccatcatccagaaaatcatcatcatggacagcaagaccgactaccagggcttccagagcatgtacaccttcgtgaccagccatctgccacctggcttcaacgagtacgacttcgtgcccgagagcttcgaccgggacaagacaatcgccctgatcatgaacagcagcggctctaccggactgcccaaaggtgttgccctgcctcatagaactgcctgcgtgcggtttagccacgccagagatcccatcttcggcaaccagatcatccccgacacagccatcctgagcgtggtgccttttcaccacggcttcggcatgttcaccacactgggctacctgatctgcggcttcagagtggtgctgatgtaccgcttcgaggaagaactgttcctgcggagcctgcaggactacaagatccagtctgctctgctggtgcctactctgttcagcttctttgccaagagcaccctgatcgataagtacgacctgagcaacctgcacgagatcgcctctggcggagcccctctgtctaaagaagtgggagaagccgtcgccaagcggttccatctgcctggcatcagacaaggctatggcctgaccgagacaaccagcgccattctgattacccctgagggcgacgataagcctggcgctgtgggaaaagtggtgccattcttcgaggccaaggtggtggatctggacaccggcaaaacactgggcgttaaccagaggggcgagctgtgtgttagaggccctatgatcatgagcggctacgtgaacaaccccgaggccacaaacgctctgatcgacaaggatggatggctgcacagcggcgacattgcctactgggacgaagatgagcacttcttcatcgtggaccggctgaagtccctgatcaagtacaagggctaccaggtggccccagccgagctggaatctattctgctgcaacaccccaacatcttcgatgccggcgttgcaggactgcccgatgatgatgctggcgaactgccagctgctgtggtggtgctggaacacggcaagaccatgaccgagaaagaaatcgtggactacgtggccagccaagtgaccaccgccaagaaactgagaggcggcgtggtgtttgtggacgaggtgccaaaaggcctgacaggcaagctggacgcccggaagatcagagagatcctgattaaggccaagaaaggcggcaagatcgccgtgtaatagctaactagacaaaacaccaaacaaacaagctgcgagccacggacttaaataattgagccttaaagaagaaattctttaagtggatgctctcaaactcagggaaacctaaatctagttatagacaaggcaatcctgagccaagccgaagtagtaattagtaagttaacaatagatgacttacaactaatcggaaggtgcagagactcgacgggagctaccctaacgtcaaaaaaacaaccaaaaaaaatctagatatcggatcccggg

SEQ ID NO: 3412 - DNA, 2831 bp, synthetic construct
  source 1..2831: mol_type = other DNA; note = Ana1.192
taatacgactcactatagggagaccctcgaaaaaaaacacaaacaccacgagggtaaagagagagtccaattctcaaagccaataggcagtagcgaaagctgcaagagaatgaaaatccgtggctcgcagcaaacaccaaacaaaacaaacacaaaccaacaaaaattaaaacagcctgtgggttgatcccacccacaggcccattgggcgctagcactctggtatcacggtacctttgtgcgcctgttttataccccctcccccaactgtaacttagaagtaacacacaccgatcaacagtcagcgtggcacaccagccacgttttgatcaagcacttctgttaccccggactgagtatcaatagactgctcacgcggttgaaggagaaagcgttcgttatccggccaactacttcgaaaaacctagtaacaccgtggaagttgcagagtgtttcgctcagcactaccccagtgtagatcaggtcgatgagtcaccgcattccccacgggcgaccgtggcggtggctgcgttggcggcctgcccatggggaaacccatgggacgctctaatacagacatggtgcgaagagtctattgagctagttggtagtcctccggcccctgaatgcggctaatcctaactgcggagcacacaccctcaagccagagggcagtgtgtcgtaacgggcaactctgcagcggaaccgactactttgggtgtccgtgtttcattttattcctatactggctgcttatggtgacaattgagagatcgttaccatatagctattggattggccatccggtgactaatagagctattatatatccctttgttgggtttataccacttagcttgaaagaggttaaaacattacaattcattgttaagttgaatacagcaaaatggaagatgccaagaacatcaagaagggccctgctccattctaccctctggaagatggaacagccggcgagcagctgcacaaggccatgaagagatatgccctggtgcctggcacaatcgccttcacagatgcccacatcgaggtggacatcacctacgccgagtacttcgagatgtctgtgcggctggccgaagctatgaagcgctacggcctgaacaccaaccaccggatcgtcgtgtgcagcgagaacagcctgcagttcttcatgcctgtgctgggcgccctgttcatcggagttgctgtggcccctgccaacgacatctacaacgagcgcgagctgctgaacagcatgggcatctctcagcccaccgtggtgttcgtgtccaagaagggactgcagaaaatcctgaacgtgcagaagaagctgcccatcatccagaaaatcatcatcatggacagcaagaccgactaccagggcttccagagcatgtacaccttcgtgaccagccatctgccacctggcttcaacgagtacgacttcgtgcccgagagcttcgaccgggacaagacaatcgccctgatcatgaacagcagcggctctaccggactgcccaaaggtgttgccctgcctcatagaactgcctgcgtgcggtttagccacgccagagatcccatcttcggcaaccagatcatccccgacacagccatcctgagcgtggtgccttttcaccacggcttcggcatgttcaccacactgggctacctgatctgcggcttcagagtggtgctgatgtaccgcttcgaggaagaactgttcctgcggagcctgcaggactacaagatccagtctgctctgctggtgcctactctgttcagcttctttgccaagagcaccctgatcgataagtacgacctgagcaacctgcacgagatcgcctctggcggagcccctctgtctaaagaagtgggagaagccgtcgccaagcggttccatctgcctggcatcagacaaggctatggcctgaccgagacaaccagcgccattctgattacccctgagggcgacgataagcctggcgctgtgggaaaagtggtgccattcttcgaggccaaggtggtggatctggacaccggcaaaacactgggcgttaaccagaggggcgagctgtgtgttagaggccctatgatcatgagcggctacgtgaacaaccccgaggccacaaacgctctgatcgacaaggatggatggctgcacagcggcgacattgcctactgggacgaagatgagcacttcttcatcgtggaccggctgaagtccctgatcaagtacaagggctaccaggtggccccagccgagctggaatctattctgctgcaacaccccaacatcttcgatgccggcgttgcaggactgcccgatgatgatgctggcgaactgccagctgctgtggtggtgctggaacacggcaagaccatgaccgagaaagaaatcgtggactacgtggccagccaagtgaccaccgccaagaaactgagaggcggcgtggtgtttgtggacgaggtgccaaaaggcctgacaggcaagctggacgcccggaagatcagagagatcctgattaaggccaagaaaggcggcaagatcgccgtgtaatagctaactagacaaaacaccaaacaaacaagctgcgagccacggacttaaataattgagccttaaagaagaaattctttaagtggatgctctcaaactcagggaaacctaaatctagttatagacaaggcaatcctgagccaagccgaagtagtaattagtaagttaacaatagatgacttacaactaatcggaaggtgcagagactcgacgggagctaccctaacgtcaagaaaaacaaccaaaaaaaatctagatatcggatcccggg

SEQ ID NO: 3413 - DNA, 2831 bp, synthetic construct
  source 1..2831: mol_type = other DNA; note = Ana1.193
taatacgactcactatagggagaccctcgaaaaaaaacacaaacacccgagggtaaagagagagtccaattctcaaagccaataggcagtagcgaaagctgcaagagaatgaaaatccgtggctcgcagcaaacaccaaacaaaacaaacacaaaccaacaaaaattaaaacagcctgtgggttgatcccacccacaggcccattgggcgctagcactctggtatcacggtacctttgtgcgcctgttttataccccctcccccaactgtaacttagaagtaacacacaccgatcaacagtcagcgtggcacaccagccacgttttgatcaagcacttctgttaccccggactgagtatcaatagactgctcacgcggttgaaggagaaagcgttcgttatccggccaactacttcgaaaaacctagtaacaccgtggaagttgcagagtgtttcgctcagcactaccccagtgtagatcaggtcgatgagtcaccgcattccccacgggcgaccgtggcggtggctgcgttggcggcctgcccatggggaaacccatgggacgctctaatacagacatggtgcgaagagtctattgagctagttggtagtcctccggcccctgaatgcggctaatcctaactgcggagcacacaccctcaagccagagggcagtgtgtcgtaacgggcaactctgcagcggaaccgactactttgggtgtccgtgtttcattttattcctatactggctgcttatggtgacaattgagagatcgttaccatatagctattggattggccatccggtgactaatagagctattatatatccctttgttgggtttataccacttagcttgaaagaggttaaaacattacaattcattgttaagttgaatacagcaaaatggaagatgccaagaacatcaagaagggccctgctccattctaccctctggaagatggaacagccggcgagcagctgcacaaggccatgaagagatatgccctggtgcctggcacaatcgccttcacagatgcccacatcgaggtggacatcacctacgccgagtacttcgagatgtctgtgcggctggccgaagctatgaagcgctacggcctgaacaccaaccaccggatcgtcgtgtgcagcgagaacagcctgcagttcttcatgcctgtgctgggcgccctgttcatcggagttgctgtggcccctgccaacgacatctacaacgagcgcgagctgctgaacagcatgggcatctctcagcccaccgtggtgttcgtgtccaagaagggactgcagaaaatcctgaacgtgcagaagaagctgcccatcatccagaaaatcatcatcatggacagcaagaccgactaccagggcttccagagcatgtacaccttcgtgaccagccatctgccacctggcttcaacgagtacgacttcgtgcccgagagcttcgaccgggacaagacaatcgccctgatcatgaacagcagcggctctaccggactgcccaaaggtgttgccctgcctcatagaactgcctgcgtgcggtttagccacgccagagatcccatcttcggcaaccagatcatccccgacacagccatcctgagcgtggtgccttttcaccacggcttcggcatgttcaccacactgggctacctgatctgcggcttcagagtggtgctgatgtaccgcttcgaggaagaactgttcctgcggagcctgcaggactacaagatccagtctgctctgctggtgcctactctgttcagcttctttgccaagagcaccctgatcgataagtacgacctgagcaacctgcacgagatcgcctctggcggagcccctctgtctaaagaagtgggagaagccgtcgccaagcggttccatctgcctggcatcagacaaggctatggcctgaccgagacaaccagcgccattctgattacccctgagggcgacgataagcctggcgctgtgggaaaagtggtgccattcttcgaggccaaggtggtggatctggacaccggcaaaacactgggcgttaaccagaggggcgagctgtgtgttagaggccctatgatcatgagcggctacgtgaacaaccccgaggccacaaacgctctgatcgacaaggatggatggctgcacagcggcgacattgcctactgggacgaagatgagcacttcttcatcgtggaccggctgaagtccctgatcaagtacaagggctaccaggtggccccagccgagctggaatctattctgctgcaacaccccaacatcttcgatgccggcgttgcaggactgcccgatgatgatgctggcgaactgccagctgctgtggtggtgctggaacacggcaagaccatgaccgagaaagaaatcgtggactacgtggccagccaagtgaccaccgccaagaaactgagaggcggcgtggtgtttgtggacgaggtgccaaaaggcctgacaggcaagctggacgcccggaagatcagagagatcctgattaaggccaagaaaggcggcaagatcgccgtgtaatagctaactagacaaaacaccaaacaaacaagctgcgagccacggacttaaataattgagccttaaagaagaaattctttaagtggatgctctcaaactcagggaaacctaaatctagttatagacaaggcaatcctgagccaagccgaagtagtaattagtaagttaacaatagatgacttacaactaatcggaaggtgcagagactcgacgggagctaccctaacgtcaagaaaaaacaaccaaaaaaaatctagatatcggatcccggg

SEQ ID NO: 3414 - DNA, 2831 bp, synthetic construct
  source 1..2831: mol_type = other DNA; note = Ana1.194
taatacgactcactatagggagaccctcgaaaaaaaacacaaacaccgagggtaaagagagagtccaattctcaaagccaataggcagtagcgaaagctgcaagagaatgaaaatccgtggctcgcagcaaacaccaaacaaaacaaacacaaaccaacaaaaattaaaacagcctgtgggttgatcccacccacaggcccattgggcgctagcactctggtatcacggtacctttgtgcgcctgttttataccccctcccccaactgtaacttagaagtaacacacaccgatcaacagtcagcgtggcacaccagccacgttttgatcaagcacttctgttaccccggactgagtatcaatagactgctcacgcggttgaaggagaaagcgttcgttatccggccaactacttcgaaaaacctagtaacaccgtggaagttgcagagtgtttcgctcagcactaccccagtgtagatcaggtcgatgagtcaccgcattccccacgggcgaccgtggcggtggctgcgttggcggcctgcccatggggaaacccatgggacgctctaatacagacatggtgcgaagagtctattgagctagttggtagtcctccggcccctgaatgcggctaatcctaactgcggagcacacaccctcaagccagagggcagtgtgtcgtaacgggcaactctgcagcggaaccgactactttgggtgtccgtgtttcattttattcctatactggctgcttatggtgacaattgagagatcgttaccatatagctattggattggccatccggtgactaatagagctattatatatccctttgttgggtttataccacttagcttgaaagaggttaaaacattacaattcattgttaagttgaatacagcaaaatggaagatgccaagaacatcaagaagggccctgctccattctaccctctggaagatggaacagccggcgagcagctgcacaaggccatgaagagatatgccctggtgcctggcacaatcgccttcacagatgcccacatcgaggtggacatcacctacgccgagtacttcgagatgtctgtgcggctggccgaagctatgaagcgctacggcctgaacaccaaccaccggatcgtcgtgtgcagcgagaacagcctgcagttcttcatgcctgtgctgggcgccctgttcatcggagttgctgtggcccctgccaacgacatctacaacgagcgcgagctgctgaacagcatgggcatctctcagcccaccgtggtgttcgtgtccaagaagggactgcagaaaatcctgaacgtgcagaagaagctgcccatcatccagaaaatcatcatcatggacagcaagaccgactaccagggcttccagagcatgtacaccttcgtgaccagccatctgccacctggcttcaacgagtacgacttcgtgcccgagagcttcgaccgggacaagacaatcgccctgatcatgaacagcagcggctctaccggactgcccaaaggtgttgccctgcctcatagaactgcctgcgtgcggtttagccacgccagagatcccatcttcggcaaccagatcatccccgacacagccatcctgagcgtggtgccttttcaccacggcttcggcatgttcaccacactgggctacctgatctgcggcttcagagtggtgctgatgtaccgcttcgaggaagaactgttcctgcggagcctgcaggactacaagatccagtctgctctgctggtgcctactctgttcagcttctttgccaagagcaccctgatcgataagtacgacctgagcaacctgcacgagatcgcctctggcggagcccctctgtctaaagaagtgggagaagccgtcgccaagcggttccatctgcctggcatcagacaaggctatggcctgaccgagacaaccagcgccattctgattacccctgagggcgacgataagcctggcgctgtgggaaaagtggtgccattcttcgaggccaaggtggtggatctggacaccggcaaaacactgggcgttaaccagaggggcgagctgtgtgttagaggccctatgatcatgagcggctacgtgaacaaccccgaggccacaaacgctctgatcgacaaggatggatggctgcacagcggcgacattgcctactgggacgaagatgagcacttcttcatcgtggaccggctgaagtccctgatcaagtacaagggctaccaggtggccccagccgagctggaatctattctgctgcaacaccccaacatcttcgatgccggcgttgcaggactgcccgatgatgatgctggcgaactgccagctgctgtggtggtgctggaacacggcaagaccatgaccgagaaagaaatcgtggactacgtggccagccaagtgaccaccgccaagaaactgagaggcggcgtggtgtttgtggacgaggtgccaaaaggcctgacaggcaagctggacgcccggaagatcagagagatcctgattaaggccaagaaaggcggcaagatcgccgtgtaatagctaactagacaaaacaccaaacaaacaagctgcgagccacggacttaaataattgagccttaaagaagaaattctttaagtggatgctctcaaactcagggaaacctaaatctagttatagacaaggcaatcctgagccaagccgaagtagtaattagtaagttaacaatagatgacttacaactaatcggaaggtgcagagactcgacgggagctaccctaacgtcaagacaaaaacaaccaaaaaaaatctagatatcggatcccggg

SEQ ID NO: 3415 - DNA, 2831 bp, synthetic construct
  source 1..2831: mol_type = other DNA; note = Ana1.195
taatacgactcactatagggagaccctcgaaaaaaaacacaaacaccagggtaaagagagagtccaattctcaaagccaataggcagtagcgaaagctgcaagagaatgaaaatccgtggctcgcagcaaacaccaaacaaaacaaacacaaaccaacaaaaattaaaacagcctgtgggttgatcccacccacaggcccattgggcgctagcactctggtatcacggtacctttgtgcgcctgttttataccccctcccccaactgtaacttagaagtaacacacaccgatcaacagtcagcgtggcacaccagccacgttttgatcaagcacttctgttaccccggactgagtatcaatagactgctcacgcggttgaaggagaaagcgttcgttatccggccaactacttcgaaaaacctagtaacaccgtggaagttgcagagtgtttcgctcagcactaccccagtgtagatcaggtcgatgagtcaccgcattccccacgggcgaccgtggcggtggctgcgttggcggcctgcccatggggaaacccatgggacgctctaatacagacatggtgcgaagagtctattgagctagttggtagtcctccggcccctgaatgcggctaatcctaactgcggagcacacaccctcaagccagagggcagtgtgtcgtaacgggcaactctgcagcggaaccgactactttgggtgtccgtgtttcattttattcctatactggctgcttatggtgacaattgagagatcgttaccatatagctattggattggccatccggtgactaatagagctattatatatccctttgttgggtttataccacttagcttgaaagaggttaaaacattacaattcattgttaagttgaatacagcaaaatggaagatgccaagaacatcaagaagggccctgctccattctaccctctggaagatggaacagccggcgagcagctgcacaaggccatgaagagatatgccctggtgcctggcacaatcgccttcacagatgcccacatcgaggtggacatcacctacgccgagtacttcgagatgtctgtgcggctggccgaagctatgaagcgctacggcctgaacaccaaccaccggatcgtcgtgtgcagcgagaacagcctgcagttcttcatgcctgtgctgggcgccctgttcatcggagttgctgtggcccctgccaacgacatctacaacgagcgcgagctgctgaacagcatgggcatctctcagcccaccgtggtgttcgtgtccaagaagggactgcagaaaatcctgaacgtgcagaagaagctgcccatcatccagaaaatcatcatcatggacagcaagaccgactaccagggcttccagagcatgtacaccttcgtgaccagccatctgccacctggcttcaacgagtacgacttcgtgcccgagagcttcgaccgggacaagacaatcgccctgatcatgaacagcagcggctctaccggactgcccaaaggtgttgccctgcctcatagaactgcctgcgtgcggtttagccacgccagagatcccatcttcggcaaccagatcatccccgacacagccatcctgagcgtggtgccttttcaccacggcttcggcatgttcaccacactgggctacctgatctgcggcttcagagtggtgctgatgtaccgcttcgaggaagaactgttcctgcggagcctgcaggactacaagatccagtctgctctgctggtgcctactctgttcagcttctttgccaagagcaccctgatcgataagtacgacctgagcaacctgcacgagatcgcctctggcggagcccctctgtctaaagaagtgggagaagccgtcgccaagcggttccatctgcctggcatcagacaaggctatggcctgaccgagacaaccagcgccattctgattacccctgagggcgacgataagcctggcgctgtgggaaaagtggtgccattcttcgaggccaaggtggtggatctggacaccggcaaaacactgggcgttaaccagaggggcgagctgtgtgttagaggccctatgatcatgagcggctacgtgaacaaccccgaggccacaaacgctctgatcgacaaggatggatggctgcacagcggcgacattgcctactgggacgaagatgagcacttcttcatcgtggaccggctgaagtccctgatcaagtacaagggctaccaggtggccccagccgagctggaatctattctgctgcaacaccccaacatcttcgatgccggcgttgcaggactgcccgatgatgatgctggcgaactgccagctgctgtggtggtgctggaacacggcaagaccatgaccgagaaagaaatcgtggactacgtggccagccaagtgaccaccgccaagaaactgagaggcggcgtggtgtttgtggacgaggtgccaaaaggcctgacaggcaagctggacgcccggaagatcagagagatcctgattaaggccaagaaaggcggcaagatcgccgtgtaatagctaactagacaaaacaccaaacaaacaagctgcgagccacggacttaaataattgagccttaaagaagaaattctttaagtggatgctctcaaactcagggaaacctaaatctagttatagacaaggcaatcctgagccaagccgaagtagtaattagtaagttaacaatagatgacttacaactaatcggaaggtgcagagactcgacgggagctaccctaacgtcaagacgaaaaacaaccaaaaaaaatctagatatcggatcccggg

SEQ ID NO: 3416 - DNA, 2831 bp, synthetic construct
  source 1..2831: mol_type = other DNA; note = Ana1.196
taatacgactcactatagggagaccctcgaaaaaaaacacaaacaccgggtaaagagagagtccaattctcaaagccaataggcagtagcgaaagctgcaagagaatgaaaatccgtggctcgcagcaaacaccaaacaaaacaaacacaaaccaacaaaaattaaaacagcctgtgggttgatcccacccacaggcccattgggcgctagcactctggtatcacggtacctttgtgcgcctgttttataccccctcccccaactgtaacttagaagtaacacacaccgatcaacagtcagcgtggcacaccagccacgttttgatcaagcacttctgttaccccggactgagtatcaatagactgctcacgcggttgaaggagaaagcgttcgttatccggccaactacttcgaaaaacctagtaacaccgtggaagttgcagagtgtttcgctcagcactaccccagtgtagatcaggtcgatgagtcaccgcattccccacgggcgaccgtggcggtggctgcgttggcggcctgcccatggggaaacccatgggacgctctaatacagacatggtgcgaagagtctattgagctagttggtagtcctccggcccctgaatgcggctaatcctaactgcggagcacacaccctcaagccagagggcagtgtgtcgtaacgggcaactctgcagcggaaccgactactttgggtgtccgtgtttcattttattcctatactggctgcttatggtgacaattgagagatcgttaccatatagctattggattggccatccggtgactaatagagctattatatatccctttgttgggtttataccacttagcttgaaagaggttaaaacattacaattcattgttaagttgaatacagcaaaatggaagatgccaagaacatcaagaagggccctgctccattctaccctctggaagatggaacagccggcgagcagctgcacaaggccatgaagagatatgccctggtgcctggcacaatcgccttcacagatgcccacatcgaggtggacatcacctacgccgagtacttcgagatgtctgtgcggctggccgaagctatgaagcgctacggcctgaacaccaaccaccggatcgtcgtgtgcagcgagaacagcctgcagttcttcatgcctgtgctgggcgccctgttcatcggagttgctgtggcccctgccaacgacatctacaacgagcgcgagctgctgaacagcatgggcatctctcagcccaccgtggtgttcgtgtccaagaagggactgcagaaaatcctgaacgtgcagaagaagctgcccatcatccagaaaatcatcatcatggacagcaagaccgactaccagggcttccagagcatgtacaccttcgtgaccagccatctgccacctggcttcaacgagtacgacttcgtgcccgagagcttcgaccgggacaagacaatcgccctgatcatgaacagcagcggctctaccggactgcccaaaggtgttgccctgcctcatagaactgcctgcgtgcggtttagccacgccagagatcccatcttcggcaaccagatcatccccgacacagccatcctgagcgtggtgccttttcaccacggcttcggcatgttcaccacactgggctacctgatctgcggcttcagagtggtgctgatgtaccgcttcgaggaagaactgttcctgcggagcctgcaggactacaagatccagtctgctctgctggtgcctactctgttcagcttctttgccaagagcaccctgatcgataagtacgacctgagcaacctgcacgagatcgcctctggcggagcccctctgtctaaagaagtgggagaagccgtcgccaagcggttccatctgcctggcatcagacaaggctatggcctgaccgagacaaccagcgccattctgattacccctgagggcgacgataagcctggcgctgtgggaaaagtggtgccattcttcgaggccaaggtggtggatctggacaccggcaaaacactgggcgttaaccagaggggcgagctgtgtgttagaggccctatgatcatgagcggctacgtgaacaaccccgaggccacaaacgctctgatcgacaaggatggatggctgcacagcggcgacattgcctactgggacgaagatgagcacttcttcatcgtggaccggctgaagtccctgatcaagtacaagggctaccaggtggccccagccgagctggaatctattctgctgcaacaccccaacatcttcgatgccggcgttgcaggactgcccgatgatgatgctggcgaactgccagctgctgtggtggtgctggaacacggcaagaccatgaccgagaaagaaatcgtggactacgtggccagccaagtgaccaccgccaagaaactgagaggcggcgtggtgtttgtggacgaggtgccaaaaggcctgacaggcaagctggacgcccggaagatcagagagatcctgattaaggccaagaaaggcggcaagatcgccgtgtaatagctaactagacaaaacaccaaacaaacaagctgcgagccacggacttaaataattgagccttaaagaagaaattctttaagtggatgctctcaaactcagggaaacctaaatctagttatagacaaggcaatcctgagccaagccgaagtagtaattagtaagttaacaatagatgacttacaactaatcggaaggtgcagagactcgacgggagctaccctaacgtcaagacgaaaaaacaaccaaaaaaaatctagatatcggatcccggg

SEQ ID NO: 3417 - DNA, 2831 bp, synthetic construct
  source 1..2831: mol_type = other DNA; note = Ana1.197
taatacgactcactatagggagaccctcgaaaaaaaacacaaacaccggtaaagagagagtccaattctcaaagccaataggcagtagcgaaagctgcaagagaatgaaaatccgtggctcgcagcaaacaccaaacaaaacaaacacaaaccaacaaaaattaaaacagcctgtgggttgatcccacccacaggcccattgggcgctagcactctggtatcacggtacctttgtgcgcctgttttataccccctcccccaactgtaacttagaagtaacacacaccgatcaacagtcagcgtggcacaccagccacgttttgatcaagcacttctgttaccccggactgagtatcaatagactgctcacgcggttgaaggagaaagcgttcgttatccggccaactacttcgaaaaacctagtaacaccgtggaagttgcagagtgtttcgctcagcactaccccagtgtagatcaggtcgatgagtcaccgcattccccacgggcgaccgtggcggtggctgcgttggcggcctgcccatggggaaacccatgggacgctctaatacagacatggtgcgaagagtctattgagctagttggtagtcctccggcccctgaatgcggctaatcctaactgcggagcacacaccctcaagccagagggcagtgtgtcgtaacgggcaactctgcagcggaaccgactactttgggtgtccgtgtttcattttattcctatactggctgcttatggtgacaattgagagatcgttaccatatagctattggattggccatccggtgactaatagagctattatatatccctttgttgggtttataccacttagcttgaaagaggttaaaacattacaattcattgttaagttgaatacagcaaaatggaagatgccaagaacatcaagaagggccctgctccattctaccctctggaagatggaacagccggcgagcagctgcacaaggccatgaagagatatgccctggtgcctggcacaatcgccttcacagatgcccacatcgaggtggacatcacctacgccgagtacttcgagatgtctgtgcggctggccgaagctatgaagcgctacggcctgaacaccaaccaccggatcgtcgtgtgcagcgagaacagcctgcagttcttcatgcctgtgctgggcgccctgttcatcggagttgctgtggcccctgccaacgacatctacaacgagcgcgagctgctgaacagcatgggcatctctcagcccaccgtggtgttcgtgtccaagaagggactgcagaaaatcctgaacgtgcagaagaagctgcccatcatccagaaaatcatcatcatggacagcaagaccgactaccagggcttccagagcatgtacaccttcgtgaccagccatctgccacctggcttcaacgagtacgacttcgtgcccgagagcttcgaccgggacaagacaatcgccctgatcatgaacagcagcggctctaccggactgcccaaaggtgttgccctgcctcatagaactgcctgcgtgcggtttagccacgccagagatcccatcttcggcaaccagatcatccccgacacagccatcctgagcgtggtgccttttcaccacggcttcggcatgttcaccacactgggctacctgatctgcggcttcagagtggtgctgatgtaccgcttcgaggaagaactgttcctgcggagcctgcaggactacaagatccagtctgctctgctggtgcctactctgttcagcttctttgccaagagcaccctgatcgataagtacgacctgagcaacctgcacgagatcgcctctggcggagcccctctgtctaaagaagtgggagaagccgtcgccaagcggttccatctgcctggcatcagacaaggctatggcctgaccgagacaaccagcgccattctgattacccctgagggcgacgataagcctggcgctgtgggaaaagtggtgccattcttcgaggccaaggtggtggatctggacaccggcaaaacactgggcgttaaccagaggggcgagctgtgtgttagaggccctatgatcatgagcggctacgtgaacaaccccgaggccacaaacgctctgatcgacaaggatggatggctgcacagcggcgacattgcctactgggacgaagatgagcacttcttcatcgtggaccggctgaagtccctgatcaagtacaagggctaccaggtggccccagccgagctggaatctattctgctgcaacaccccaacatcttcgatgccggcgttgcaggactgcccgatgatgatgctggcgaactgccagctgctgtggtggtgctggaacacggcaagaccatgaccgagaaagaaatcgtggactacgtggccagccaagtgaccaccgccaagaaactgagaggcggcgtggtgtttgtggacgaggtgccaaaaggcctgacaggcaagctggacgcccggaagatcagagagatcctgattaaggccaagaaaggcggcaagatcgccgtgtaatagctaactagacaaaacaccaaacaaacaagctgcgagccacggacttaaataattgagccttaaagaagaaattctttaagtggatgctctcaaactcagggaaacctaaatctagttatagacaaggcaatcctgagccaagccgaagtagtaattagtaagttaacaatagatgacttacaactaatcggaaggtgcagagactcgacgggagctaccctaacgtcaagacgagaaaaacaaccaaaaaaaatctagatatcggatcccggg

SEQ ID NO: 3418 - DNA, 2831 bp, synthetic construct
  source 1..2831: mol_type = other DNA; note = Ana1.198
taatacgactcactatagggagaccctcgaaaaaaaacacaaacaccgtaaagagagagtccaattctcaaagccaataggcagtagcgaaagctgcaagagaatgaaaatccgtggctcgcagcaaacaccaaacaaaacaaacacaaaccaacaaaaattaaaacagcctgtgggttgatcccacccacaggcccattgggcgctagcactctggtatcacggtacctttgtgcgcctgttttataccccctcccccaactgtaacttagaagtaacacacaccgatcaacagtcagcgtggcacaccagccacgttttgatcaagcacttctgttaccccggactgagtatcaatagactgctcacgcggttgaaggagaaagcgttcgttatccggccaactacttcgaaaaacctagtaacaccgtggaagttgcagagtgtttcgctcagcactaccccagtgtagatcaggtcgatgagtcaccgcattccccacgggcgaccgtggcggtggctgcgttggcggcctgcccatggggaaacccatgggacgctctaatacagacatggtgcgaagagtctattgagctagttggtagtcctccggcccctgaatgcggctaatcctaactgcggagcacacaccctcaagccagagggcagtgtgtcgtaacgggcaactctgcagcggaaccgactactttgggtgtccgtgtttcattttattcctatactggctgcttatggtgacaattgagagatcgttaccatatagctattggattggccatccggtgactaatagagctattatatatccctttgttgggtttataccacttagcttgaaagaggttaaaacattacaattcattgttaagttgaatacagcaaaatggaagatgccaagaacatcaagaagggccctgctccattctaccctctggaagatggaacagccggcgagcagctgcacaaggccatgaagagatatgccctggtgcctggcacaatcgccttcacagatgcccacatcgaggtggacatcacctacgccgagtacttcgagatgtctgtgcggctggccgaagctatgaagcgctacggcctgaacaccaaccaccggatcgtcgtgtgcagcgagaacagcctgcagttcttcatgcctgtgctgggcgccctgttcatcggagttgctgtggcccctgccaacgacatctacaacgagcgcgagctgctgaacagcatgggcatctctcagcccaccgtggtgttcgtgtccaagaagggactgcagaaaatcctgaacgtgcagaagaagctgcccatcatccagaaaatcatcatcatggacagcaagaccgactaccagggcttccagagcatgtacaccttcgtgaccagccatctgccacctggcttcaacgagtacgacttcgtgcccgagagcttcgaccgggacaagacaatcgccctgatcatgaacagcagcggctctaccggactgcccaaaggtgttgccctgcctcatagaactgcctgcgtgcggtttagccacgccagagatcccatcttcggcaaccagatcatccccgacacagccatcctgagcgtggtgccttttcaccacggcttcggcatgttcaccacactgggctacctgatctgcggcttcagagtggtgctgatgtaccgcttcgaggaagaactgttcctgcggagcctgcaggactacaagatccagtctgctctgctggtgcctactctgttcagcttctttgccaagagcaccctgatcgataagtacgacctgagcaacctgcacgagatcgcctctggcggagcccctctgtctaaagaagtgggagaagccgtcgccaagcggttccatctgcctggcatcagacaaggctatggcctgaccgagacaaccagcgccattctgattacccctgagggcgacgataagcctggcgctgtgggaaaagtggtgccattcttcgaggccaaggtggtggatctggacaccggcaaaacactgggcgttaaccagaggggcgagctgtgtgttagaggccctatgatcatgagcggctacgtgaacaaccccgaggccacaaacgctctgatcgacaaggatggatggctgcacagcggcgacattgcctactgggacgaagatgagcacttcttcatcgtggaccggctgaagtccctgatcaagtacaagggctaccaggtggccccagccgagctggaatctattctgctgcaacaccccaacatcttcgatgccggcgttgcaggactgcccgatgatgatgctggcgaactgccagctgctgtggtggtgctggaacacggcaagaccatgaccgagaaagaaatcgtggactacgtggccagccaagtgaccaccgccaagaaactgagaggcggcgtggtgtttgtggacgaggtgccaaaaggcctgacaggcaagctggacgcccggaagatcagagagatcctgattaaggccaagaaaggcggcaagatcgccgtgtaatagctaactagacaaaacaccaaacaaacaagctgcgagccacggacttaaataattgagccttaaagaagaaattctttaagtggatgctctcaaactcagggaaacctaaatctagttatagacaaggcaatcctgagccaagccgaagtagtaattagtaagttaacaatagatgacttacaactaatcggaaggtgcagagactcgacgggagctaccctaacgtcaagacgaggaaaaacaaccaaaaaaaatctagatatcggatcccggg

SEQ ID NO: 3419 - DNA, 2831 bp, synthetic construct
  source 1..2831: mol_type = other DNA; note = Ana1.199
taatacgactcactatagggagaccctcgaaaaaaaacacaaacacctaaagagagagtccaattctcaaagccaataggcagtagcgaaagctgcaagagaatgaaaatccgtggctcgcagcaaacaccaaacaaaacaaacacaaaccaacaaaaattaaaacagcctgtgggttgatcccacccacaggcccattgggcgctagcactctggtatcacggtacctttgtgcgcctgttttataccccctcccccaactgtaacttagaagtaacacacaccgatcaacagtcagcgtggcacaccagccacgttttgatcaagcacttctgttaccccggactgagtatcaatagactgctcacgcggttgaaggagaaagcgttcgttatccggccaactacttcgaaaaacctagtaacaccgtggaagttgcagagtgtttcgctcagcactaccccagtgtagatcaggtcgatgagtcaccgcattccccacgggcgaccgtggcggtggctgcgttggcggcctgcccatggggaaacccatgggacgctctaatacagacatggtgcgaagagtctattgagctagttggtagtcctccggcccctgaatgcggctaatcctaactgcggagcacacaccctcaagccagagggcagtgtgtcgtaacgggcaactctgcagcggaaccgactactttgggtgtccgtgtttcattttattcctatactggctgcttatggtgacaattgagagatcgttaccatatagctattggattggccatccggtgactaatagagctattatatatccctttgttgggtttataccacttagcttgaaagaggttaaaacattacaattcattgttaagttgaatacagcaaaatggaagatgccaagaacatcaagaagggccctgctccattctaccctctggaagatggaacagccggcgagcagctgcacaaggccatgaagagatatgccctggtgcctggcacaatcgccttcacagatgcccacatcgaggtggacatcacctacgccgagtacttcgagatgtctgtgcggctggccgaagctatgaagcgctacggcctgaacaccaaccaccggatcgtcgtgtgcagcgagaacagcctgcagttcttcatgcctgtgctgggcgccctgttcatcggagttgctgtggcccctgccaacgacatctacaacgagcgcgagctgctgaacagcatgggcatctctcagcccaccgtggtgttcgtgtccaagaagggactgcagaaaatcctgaacgtgcagaagaagctgcccatcatccagaaaatcatcatcatggacagcaagaccgactaccagggcttccagagcatgtacaccttcgtgaccagccatctgccacctggcttcaacgagtacgacttcgtgcccgagagcttcgaccgggacaagacaatcgccctgatcatgaacagcagcggctctaccggactgcccaaaggtgttgccctgcctcatagaactgcctgcgtgcggtttagccacgccagagatcccatcttcggcaaccagatcatccccgacacagccatcctgagcgtggtgccttttcaccacggcttcggcatgttcaccacactgggctacctgatctgcggcttcagagtggtgctgatgtaccgcttcgaggaagaactgttcctgcggagcctgcaggactacaagatccagtctgctctgctggtgcctactctgttcagcttctttgccaagagcaccctgatcgataagtacgacctgagcaacctgcacgagatcgcctctggcggagcccctctgtctaaagaagtgggagaagccgtcgccaagcggttccatctgcctggcatcagacaaggctatggcctgaccgagacaaccagcgccattctgattacccctgagggcgacgataagcctggcgctgtgggaaaagtggtgccattcttcgaggccaaggtggtggatctggacaccggcaaaacactgggcgttaaccagaggggcgagctgtgtgttagaggccctatgatcatgagcggctacgtgaacaaccccgaggccacaaacgctctgatcgacaaggatggatggctgcacagcggcgacattgcctactgggacgaagatgagcacttcttcatcgtggaccggctgaagtccctgatcaagtacaagggctaccaggtggccccagccgagctggaatctattctgctgcaacaccccaacatcttcgatgccggcgttgcaggactgcccgatgatgatgctggcgaactgccagctgctgtggtggtgctggaacacggcaagaccatgaccgagaaagaaatcgtggactacgtggccagccaagtgaccaccgccaagaaactgagaggcggcgtggtgtttgtggacgaggtgccaaaaggcctgacaggcaagctggacgcccggaagatcagagagatcctgattaaggccaagaaaggcggcaagatcgccgtgtaatagctaactagacaaaacaccaaacaaacaagctgcgagccacggacttaaataattgagccttaaagaagaaattctttaagtggatgctctcaaactcagggaaacctaaatctagttatagacaaggcaatcctgagccaagccgaagtagtaattagtaagttaacaatagatgacttacaactaatcggaaggtgcagagactcgacgggagctaccctaacgtcaagacgagggaaaaacaaccaaaaaaaatctagatatcggatcccggg

SEQ ID NO: 3420 - DNA, 2831 bp, synthetic construct
  source 1..2831: mol_type = other DNA; note = Ana1.200
taatacgactcactatagggagaccctcgaaaaaaaacacaaacaccaaagagagagtccaattctcaaagccaataggcagtagcgaaagctgcaagagaatgaaaatccgtggctcgcagcaaacaccaaacaaaacaaacacaaaccaacaaaaattaaaacagcctgtgggttgatcccacccacaggcccattgggcgctagcactctggtatcacggtacctttgtgcgcctgttttataccccctcccccaactgtaacttagaagtaacacacaccgatcaacagtcagcgtggcacaccagccacgttttgatcaagcacttctgttaccccggactgagtatcaatagactgctcacgcggttgaaggagaaagcgttcgttatccggccaactacttcgaaaaacctagtaacaccgtggaagttgcagagtgtttcgctcagcactaccccagtgtagatcaggtcgatgagtcaccgcattccccacgggcgaccgtggcggtggctgcgttggcggcctgcccatggggaaacccatgggacgctctaatacagacatggtgcgaagagtctattgagctagttggtagtcctccggcccctgaatgcggctaatcctaactgcggagcacacaccctcaagccagagggcagtgtgtcgtaacgggcaactctgcagcggaaccgactactttgggtgtccgtgtttcattttattcctatactggctgcttatggtgacaattgagagatcgttaccatatagctattggattggccatccggtgactaatagagctattatatatccctttgttgggtttataccacttagcttgaaagaggttaaaacattacaattcattgttaagttgaatacagcaaaatggaagatgccaagaacatcaagaagggccctgctccattctaccctctggaagatggaacagccggcgagcagctgcacaaggccatgaagagatatgccctggtgcctggcacaatcgccttcacagatgcccacatcgaggtggacatcacctacgccgagtacttcgagatgtctgtgcggctggccgaagctatgaagcgctacggcctgaacaccaaccaccggatcgtcgtgtgcagcgagaacagcctgcagttcttcatgcctgtgctgggcgccctgttcatcggagttgctgtggcccctgccaacgacatctacaacgagcgcgagctgctgaacagcatgggcatctctcagcccaccgtggtgttcgtgtccaagaagggactgcagaaaatcctgaacgtgcagaagaagctgcccatcatccagaaaatcatcatcatggacagcaagaccgactaccagggcttccagagcatgtacaccttcgtgaccagccatctgccacctggcttcaacgagtacgacttcgtgcccgagagcttcgaccgggacaagacaatcgccctgatcatgaacagcagcggctctaccggactgcccaaaggtgttgccctgcctcatagaactgcctgcgtgcggtttagccacgccagagatcccatcttcggcaaccagatcatccccgacacagccatcctgagcgtggtgccttttcaccacggcttcggcatgttcaccacactgggctacctgatctgcggcttcagagtggtgctgatgtaccgcttcgaggaagaactgttcctgcggagcctgcaggactacaagatccagtctgctctgctggtgcctactctgttcagcttctttgccaagagcaccctgatcgataagtacgacctgagcaacctgcacgagatcgcctctggcggagcccctctgtctaaagaagtgggagaagccgtcgccaagcggttccatctgcctggcatcagacaaggctatggcctgaccgagacaaccagcgccattctgattacccctgagggcgacgataagcctggcgctgtgggaaaagtggtgccattcttcgaggccaaggtggtggatctggacaccggcaaaacactgggcgttaaccagaggggcgagctgtgtgttagaggccctatgatcatgagcggctacgtgaacaaccccgaggccacaaacgctctgatcgacaaggatggatggctgcacagcggcgacattgcctactgggacgaagatgagcacttcttcatcgtggaccggctgaagtccctgatcaagtacaagggctaccaggtggccccagccgagctggaatctattctgctgcaacaccccaacatcttcgatgccggcgttgcaggactgcccgatgatgatgctggcgaactgccagctgctgtggtggtgctggaacacggcaagaccatgaccgagaaagaaatcgtggactacgtggccagccaagtgaccaccgccaagaaactgagaggcggcgtggtgtttgtggacgaggtgccaaaaggcctgacaggcaagctggacgcccggaagatcagagagatcctgattaaggccaagaaaggcggcaagatcgccgtgtaatagctaactagacaaaacaccaaacaaacaagctgcgagccacggacttaaataattgagccttaaagaagaaattctttaagtggatgctctcaaactcagggaaacctaaatctagttatagacaaggcaatcctgagccaagccgaagtagtaattagtaagttaacaatagatgacttacaactaatcggaaggtgcagagactcgacgggagctaccctaacgtcaagacgagggtaaaaacaaccaaaaaaaatctagatatcggatcccggg

SEQ ID NO: 3421 - DNA, 2831 bp, synthetic construct
  source 1..2831: mol_type = other DNA; note = Ana1.201
taatacgactcactatagggagaccctcgaaaaaaaacacaaacaccaagagagagtccaattctcaaagccaataggcagtagcgaaagctgcaagagaatgaaaatccgtggctcgcagcaaacaccaaacaaaacaaacacaaaccaacaaaaattaaaacagcctgtgggttgatcccacccacaggcccattgggcgctagcactctggtatcacggtacctttgtgcgcctgttttataccccctcccccaactgtaacttagaagtaacacacaccgatcaacagtcagcgtggcacaccagccacgttttgatcaagcacttctgttaccccggactgagtatcaatagactgctcacgcggttgaaggagaaagcgttcgttatccggccaactacttcgaaaaacctagtaacaccgtggaagttgcagagtgtttcgctcagcactaccccagtgtagatcaggtcgatgagtcaccgcattccccacgggcgaccgtggcggtggctgcgttggcggcctgcccatggggaaacccatgggacgctctaatacagacatggtgcgaagagtctattgagctagttggtagtcctccggcccctgaatgcggctaatcctaactgcggagcacacaccctcaagccagagggcagtgtgtcgtaacgggcaactctgcagcggaaccgactactttgggtgtccgtgtttcattttattcctatactggctgcttatggtgacaattgagagatcgttaccatatagctattggattggccatccggtgactaatagagctattatatatccctttgttgggtttataccacttagcttgaaagaggttaaaacattacaattcattgttaagttgaatacagcaaaatggaagatgccaagaacatcaagaagggccctgctccattctaccctctggaagatggaacagccggcgagcagctgcacaaggccatgaagagatatgccctggtgcctggcacaatcgccttcacagatgcccacatcgaggtggacatcacctacgccgagtacttcgagatgtctgtgcggctggccgaagctatgaagcgctacggcctgaacaccaaccaccggatcgtcgtgtgcagcgagaacagcctgcagttcttcatgcctgtgctgggcgccctgttcatcggagttgctgtggcccctgccaacgacatctacaacgagcgcgagctgctgaacagcatgggcatctctcagcccaccgtggtgttcgtgtccaagaagggactgcagaaaatcctgaacgtgcagaagaagctgcccatcatccagaaaatcatcatcatggacagcaagaccgactaccagggcttccagagcatgtacaccttcgtgaccagccatctgccacctggcttcaacgagtacgacttcgtgcccgagagcttcgaccgggacaagacaatcgccctgatcatgaacagcagcggctctaccggactgcccaaaggtgttgccctgcctcatagaactgcctgcgtgcggtttagccacgccagagatcccatcttcggcaaccagatcatccccgacacagccatcctgagcgtggtgccttttcaccacggcttcggcatgttcaccacactgggctacctgatctgcggcttcagagtggtgctgatgtaccgcttcgaggaagaactgttcctgcggagcctgcaggactacaagatccagtctgctctgctggtgcctactctgttcagcttctttgccaagagcaccctgatcgataagtacgacctgagcaacctgcacgagatcgcctctggcggagcccctctgtctaaagaagtgggagaagccgtcgccaagcggttccatctgcctggcatcagacaaggctatggcctgaccgagacaaccagcgccattctgattacccctgagggcgacgataagcctggcgctgtgggaaaagtggtgccattcttcgaggccaaggtggtggatctggacaccggcaaaacactgggcgttaaccagaggggcgagctgtgtgttagaggccctatgatcatgagcggctacgtgaacaaccccgaggccacaaacgctctgatcgacaaggatggatggctgcacagcggcgacattgcctactgggacgaagatgagcacttcttcatcgtggaccggctgaagtccctgatcaagtacaagggctaccaggtggccccagccgagctggaatctattctgctgcaacaccccaacatcttcgatgccggcgttgcaggactgcccgatgatgatgctggcgaactgccagctgctgtggtggtgctggaacacggcaagaccatgaccgagaaagaaatcgtggactacgtggccagccaagtgaccaccgccaagaaactgagaggcggcgtggtgtttgtggacgaggtgccaaaaggcctgacaggcaagctggacgcccggaagatcagagagatcctgattaaggccaagaaaggcggcaagatcgccgtgtaatagctaactagacaaaacaccaaacaaacaagctgcgagccacggacttaaataattgagccttaaagaagaaattctttaagtggatgctctcaaactcagggaaacctaaatctagttatagacaaggcaatcctgagccaagccgaagtagtaattagtaagttaacaatagatgacttacaactaatcggaaggtgcagagactcgacgggagctaccctaacgtcaagacgagggtaaaaaacaaccaaaaaaaatctagatatcggatcccggg

SEQ ID NO: 3422 - DNA, 2831 bp, synthetic construct
  source 1..2831: mol_type = other DNA; note = Ana1.202
taatacgactcactatagggagaccctcgaaaaaaaacacaaacaccagagagagtccaattctcaaagccaataggcagtagcgaaagctgcaagagaatgaaaatccgtggctcgcagcaaacaccaaacaaaacaaacacaaaccaacaaaaattaaaacagcctgtgggttgatcccacccacaggcccattgggcgctagcactctggtatcacggtacctttgtgcgcctgttttataccccctcccccaactgtaacttagaagtaacacacaccgatcaacagtcagcgtggcacaccagccacgttttgatcaagcacttctgttaccccggactgagtatcaatagactgctcacgcggttgaaggagaaagcgttcgttatccggccaactacttcgaaaaacctagtaacaccgtggaagttgcagagtgtttcgctcagcactaccccagtgtagatcaggtcgatgagtcaccgcattccccacgggcgaccgtggcggtggctgcgttggcggcctgcccatggggaaacccatgggacgctctaatacagacatggtgcgaagagtctattgagctagttggtagtcctccggcccctgaatgcggctaatcctaactgcggagcacacaccctcaagccagagggcagtgtgtcgtaacgggcaactctgcagcggaaccgactactttgggtgtccgtgtttcattttattcctatactggctgcttatggtgacaattgagagatcgttaccatatagctattggattggccatccggtgactaatagagctattatatatccctttgttgggtttataccacttagcttgaaagaggttaaaacattacaattcattgttaagttgaatacagcaaaatggaagatgccaagaacatcaagaagggccctgctccattctaccctctggaagatggaacagccggcgagcagctgcacaaggccatgaagagatatgccctggtgcctggcacaatcgccttcacagatgcccacatcgaggtggacatcacctacgccgagtacttcgagatgtctgtgcggctggccgaagctatgaagcgctacggcctgaacaccaaccaccggatcgtcgtgtgcagcgagaacagcctgcagttcttcatgcctgtgctgggcgccctgttcatcggagttgctgtggcccctgccaacgacatctacaacgagcgcgagctgctgaacagcatgggcatctctcagcccaccgtggtgttcgtgtccaagaagggactgcagaaaatcctgaacgtgcagaagaagctgcccatcatccagaaaatcatcatcatggacagcaagaccgactaccagggcttccagagcatgtacaccttcgtgaccagccatctgccacctggcttcaacgagtacgacttcgtgcccgagagcttcgaccgggacaagacaatcgccctgatcatgaacagcagcggctctaccggactgcccaaaggtgttgccctgcctcatagaactgcctgcgtgcggtttagccacgccagagatcccatcttcggcaaccagatcatccccgacacagccatcctgagcgtggtgccttttcaccacggcttcggcatgttcaccacactgggctacctgatctgcggcttcagagtggtgctgatgtaccgcttcgaggaagaactgttcctgcggagcctgcaggactacaagatccagtctgctctgctggtgcctactctgttcagcttctttgccaagagcaccctgatcgataagtacgacctgagcaacctgcacgagatcgcctctggcggagcccctctgtctaaagaagtgggagaagccgtcgccaagcggttccatctgcctggcatcagacaaggctatggcctgaccgagacaaccagcgccattctgattacccctgagggcgacgataagcctggcgctgtgggaaaagtggtgccattcttcgaggccaaggtggtggatctggacaccggcaaaacactgggcgttaaccagaggggcgagctgtgtgttagaggccctatgatcatgagcggctacgtgaacaaccccgaggccacaaacgctctgatcgacaaggatggatggctgcacagcggcgacattgcctactgggacgaagatgagcacttcttcatcgtggaccggctgaagtccctgatcaagtacaagggctaccaggtggccccagccgagctggaatctattctgctgcaacaccccaacatcttcgatgccggcgttgcaggactgcccgatgatgatgctggcgaactgccagctgctgtggtggtgctggaacacggcaagaccatgaccgagaaagaaatcgtggactacgtggccagccaagtgaccaccgccaagaaactgagaggcggcgtggtgtttgtggacgaggtgccaaaaggcctgacaggcaagctggacgcccggaagatcagagagatcctgattaaggccaagaaaggcggcaagatcgccgtgtaatagctaactagacaaaacaccaaacaaacaagctgcgagccacggacttaaataattgagccttaaagaagaaattctttaagtggatgctctcaaactcagggaaacctaaatctagttatagacaaggcaatcctgagccaagccgaagtagtaattagtaagttaacaatagatgacttacaactaatcggaaggtgcagagactcgacgggagctaccctaacgtcaagacgagggtaaaaaaacaaccaaaaaaaatctagatatcggatcccggg

SEQ ID NO: 3423 - DNA, 2831 bp, synthetic construct
  source 1..2831: mol_type = other DNA; note = Ana1.203
taatacgactcactatagggagaccctcgaaaaaaaacacaaacaccgagagagtccaattctcaaagccaataggcagtagcgaaagctgcaagagaatgaaaatccgtggctcgcagcaaacaccaaacaaaacaaacacaaaccaacaaaaattaaaacagcctgtgggttgatcccacccacaggcccattgggcgctagcactctggtatcacggtacctttgtgcgcctgttttataccccctcccccaactgtaacttagaagtaacacacaccgatcaacagtcagcgtggcacaccagccacgttttgatcaagcacttctgttaccccggactgagtatcaatagactgctcacgcggttgaaggagaaagcgttcgttatccggccaactacttcgaaaaacctagtaacaccgtggaagttgcagagtgtttcgctcagcactaccccagtgtagatcaggtcgatgagtcaccgcattccccacgggcgaccgtggcggtggctgcgttggcggcctgcccatggggaaacccatgggacgctctaatacagacatggtgcgaagagtctattgagctagttggtagtcctccggcccctgaatgcggctaatcctaactgcggagcacacaccctcaagccagagggcagtgtgtcgtaacgggcaactctgcagcggaaccgactactttgggtgtccgtgtttcattttattcctatactggctgcttatggtgacaattgagagatcgttaccatatagctattggattggccatccggtgactaatagagctattatatatccctttgttgggtttataccacttagcttgaaagaggttaaaacattacaattcattgttaagttgaatacagcaaaatggaagatgccaagaacatcaagaagggccctgctccattctaccctctggaagatggaacagccggcgagcagctgcacaaggccatgaagagatatgccctggtgcctggcacaatcgccttcacagatgcccacatcgaggtggacatcacctacgccgagtacttcgagatgtctgtgcggctggccgaagctatgaagcgctacggcctgaacaccaaccaccggatcgtcgtgtgcagcgagaacagcctgcagttcttcatgcctgtgctgggcgccctgttcatcggagttgctgtggcccctgccaacgacatctacaacgagcgcgagctgctgaacagcatgggcatctctcagcccaccgtggtgttcgtgtccaagaagggactgcagaaaatcctgaacgtgcagaagaagctgcccatcatccagaaaatcatcatcatggacagcaagaccgactaccagggcttccagagcatgtacaccttcgtgaccagccatctgccacctggcttcaacgagtacgacttcgtgcccgagagcttcgaccgggacaagacaatcgccctgatcatgaacagcagcggctctaccggactgcccaaaggtgttgccctgcctcatagaactgcctgcgtgcggtttagccacgccagagatcccatcttcggcaaccagatcatccccgacacagccatcctgagcgtggtgccttttcaccacggcttcggcatgttcaccacactgggctacctgatctgcggcttcagagtggtgctgatgtaccgcttcgaggaagaactgttcctgcggagcctgcaggactacaagatccagtctgctctgctggtgcctactctgttcagcttctttgccaagagcaccctgatcgataagtacgacctgagcaacctgcacgagatcgcctctggcggagcccctctgtctaaagaagtgggagaagccgtcgccaagcggttccatctgcctggcatcagacaaggctatggcctgaccgagacaaccagcgccattctgattacccctgagggcgacgataagcctggcgctgtgggaaaagtggtgccattcttcgaggccaaggtggtggatctggacaccggcaaaacactgggcgttaaccagaggggcgagctgtgtgttagaggccctatgatcatgagcggctacgtgaacaaccccgaggccacaaacgctctgatcgacaaggatggatggctgcacagcggcgacattgcctactgggacgaagatgagcacttcttcatcgtggaccggctgaagtccctgatcaagtacaagggctaccaggtggccccagccgagctggaatctattctgctgcaacaccccaacatcttcgatgccggcgttgcaggactgcccgatgatgatgctggcgaactgccagctgctgtggtggtgctggaacacggcaagaccatgaccgagaaagaaatcgtggactacgtggccagccaagtgaccaccgccaagaaactgagaggcggcgtggtgtttgtggacgaggtgccaaaaggcctgacaggcaagctggacgcccggaagatcagagagatcctgattaaggccaagaaaggcggcaagatcgccgtgtaatagctaactagacaaaacaccaaacaaacaagctgcgagccacggacttaaataattgagccttaaagaagaaattctttaagtggatgctctcaaactcagggaaacctaaatctagttatagacaaggcaatcctgagccaagccgaagtagtaattagtaagttaacaatagatgacttacaactaatcggaaggtgcagagactcgacgggagctaccctaacgtcaagacgagggtaaaaaaaacaaccaaaaaaaatctagatatcggatcccggg

SEQ ID NO: 3424 - DNA, 2831 bp, synthetic construct
  source 1..2831: mol_type = other DNA; note = Ana1.204
taatacgactcactatagggagaccctcgaaaaaaaacacaaacaccagagagtccaattctcaaagccaataggcagtagcgaaagctgcaagagaatgaaaatccgtggctcgcagcaaacaccaaacaaaacaaacacaaaccaacaaaaattaaaacagcctgtgggttgatcccacccacaggcccattgggcgctagcactctggtatcacggtacctttgtgcgcctgttttataccccctcccccaactgtaacttagaagtaacacacaccgatcaacagtcagcgtggcacaccagccacgttttgatcaagcacttctgttaccccggactgagtatcaatagactgctcacgcggttgaaggagaaagcgttcgttatccggccaactacttcgaaaaacctagtaacaccgtggaagttgcagagtgtttcgctcagcactaccccagtgtagatcaggtcgatgagtcaccgcattccccacgggcgaccgtggcggtggctgcgttggcggcctgcccatggggaaacccatgggacgctctaatacagacatggtgcgaagagtctattgagctagttggtagtcctccggcccctgaatgcggctaatcctaactgcggagcacacaccctcaagccagagggcagtgtgtcgtaacgggcaactctgcagcggaaccgactactttgggtgtccgtgtttcattttattcctatactggctgcttatggtgacaattgagagatcgttaccatatagctattggattggccatccggtgactaatagagctattatatatccctttgttgggtttataccacttagcttgaaagaggttaaaacattacaattcattgttaagttgaatacagcaaaatggaagatgccaagaacatcaagaagggccctgctccattctaccctctggaagatggaacagccggcgagcagctgcacaaggccatgaagagatatgccctggtgcctggcacaatcgccttcacagatgcccacatcgaggtggacatcacctacgccgagtacttcgagatgtctgtgcggctggccgaagctatgaagcgctacggcctgaacaccaaccaccggatcgtcgtgtgcagcgagaacagcctgcagttcttcatgcctgtgctgggcgccctgttcatcggagttgctgtggcccctgccaacgacatctacaacgagcgcgagctgctgaacagcatgggcatctctcagcccaccgtggtgttcgtgtccaagaagggactgcagaaaatcctgaacgtgcagaagaagctgcccatcatccagaaaatcatcatcatggacagcaagaccgactaccagggcttccagagcatgtacaccttcgtgaccagccatctgccacctggcttcaacgagtacgacttcgtgcccgagagcttcgaccgggacaagacaatcgccctgatcatgaacagcagcggctctaccggactgcccaaaggtgttgccctgcctcatagaactgcctgcgtgcggtttagccacgccagagatcccatcttcggcaaccagatcatccccgacacagccatcctgagcgtggtgccttttcaccacggcttcggcatgttcaccacactgggctacctgatctgcggcttcagagtggtgctgatgtaccgcttcgaggaagaactgttcctgcggagcctgcaggactacaagatccagtctgctctgctggtgcctactctgttcagcttctttgccaagagcaccctgatcgataagtacgacctgagcaacctgcacgagatcgcctctggcggagcccctctgtctaaagaagtgggagaagccgtcgccaagcggttccatctgcctggcatcagacaaggctatggcctgaccgagacaaccagcgccattctgattacccctgagggcgacgataagcctggcgctgtgggaaaagtggtgccattcttcgaggccaaggtggtggatctggacaccggcaaaacactgggcgttaaccagaggggcgagctgtgtgttagaggccctatgatcatgagcggctacgtgaacaaccccgaggccacaaacgctctgatcgacaaggatggatggctgcacagcggcgacattgcctactgggacgaagatgagcacttcttcatcgtggaccggctgaagtccctgatcaagtacaagggctaccaggtggccccagccgagctggaatctattctgctgcaacaccccaacatcttcgatgccggcgttgcaggactgcccgatgatgatgctggcgaactgccagctgctgtggtggtgctggaacacggcaagaccatgaccgagaaagaaatcgtggactacgtggccagccaagtgaccaccgccaagaaactgagaggcggcgtggtgtttgtggacgaggtgccaaaaggcctgacaggcaagctggacgcccggaagatcagagagatcctgattaaggccaagaaaggcggcaagatcgccgtgtaatagctaactagacaaaacaccaaacaaacaagctgcgagccacggacttaaataattgagccttaaagaagaaattctttaagtggatgctctcaaactcagggaaacctaaatctagttatagacaaggcaatcctgagccaagccgaagtagtaattagtaagttaacaatagatgacttacaactaatcggaaggtgcagagactcgacgggagctaccctaacgtcaagacgagggtaaagaaaaacaaccaaaaaaaatctagatatcggatcccggg

SEQ ID NO: 3425 - DNA, 2831 bp, synthetic construct
  source 1..2831: mol_type = other DNA; note = Ana1.205
taatacgactcactatagggagaccctcgaaaaaaaacacaaacaccgagagtccaattctcaaagccaataggcagtagcgaaagctgcaagagaatgaaaatccgtggctcgcagcaaacaccaaacaaaacaaacacaaaccaacaaaaattaaaacagcctgtgggttgatcccacccacaggcccattgggcgctagcactctggtatcacggtacctttgtgcgcctgttttataccccctcccccaactgtaacttagaagtaacacacaccgatcaacagtcagcgtggcacaccagccacgttttgatcaagcacttctgttaccccggactgagtatcaatagactgctcacgcggttgaaggagaaagcgttcgttatccggccaactacttcgaaaaacctagtaacaccgtggaagttgcagagtgtttcgctcagcactaccccagtgtagatcaggtcgatgagtcaccgcattccccacgggcgaccgtggcggtggctgcgttggcggcctgcccatggggaaacccatgggacgctctaatacagacatggtgcgaagagtctattgagctagttggtagtcctccggcccctgaatgcggctaatcctaactgcggagcacacaccctcaagccagagggcagtgtgtcgtaacgggcaactctgcagcggaaccgactactttgggtgtccgtgtttcattttattcctatactggctgcttatggtgacaattgagagatcgttaccatatagctattggattggccatccggtgactaatagagctattatatatccctttgttgggtttataccacttagcttgaaagaggttaaaacattacaattcattgttaagttgaatacagcaaaatggaagatgccaagaacatcaagaagggccctgctccattctaccctctggaagatggaacagccggcgagcagctgcacaaggccatgaagagatatgccctggtgcctggcacaatcgccttcacagatgcccacatcgaggtggacatcacctacgccgagtacttcgagatgtctgtgcggctggccgaagctatgaagcgctacggcctgaacaccaaccaccggatcgtcgtgtgcagcgagaacagcctgcagttcttcatgcctgtgctgggcgccctgttcatcggagttgctgtggcccctgccaacgacatctacaacgagcgcgagctgctgaacagcatgggcatctctcagcccaccgtggtgttcgtgtccaagaagggactgcagaaaatcctgaacgtgcagaagaagctgcccatcatccagaaaatcatcatcatggacagcaagaccgactaccagggcttccagagcatgtacaccttcgtgaccagccatctgccacctggcttcaacgagtacgacttcgtgcccgagagcttcgaccgggacaagacaatcgccctgatcatgaacagcagcggctctaccggactgcccaaaggtgttgccctgcctcatagaactgcctgcgtgcggtttagccacgccagagatcccatcttcggcaaccagatcatccccgacacagccatcctgagcgtggtgccttttcaccacggcttcggcatgttcaccacactgggctacctgatctgcggcttcagagtggtgctgatgtaccgcttcgaggaagaactgttcctgcggagcctgcaggactacaagatccagtctgctctgctggtgcctactctgttcagcttctttgccaagagcaccctgatcgataagtacgacctgagcaacctgcacgagatcgcctctggcggagcccctctgtctaaagaagtgggagaagccgtcgccaagcggttccatctgcctggcatcagacaaggctatggcctgaccgagacaaccagcgccattctgattacccctgagggcgacgataagcctggcgctgtgggaaaagtggtgccattcttcgaggccaaggtggtggatctggacaccggcaaaacactgggcgttaaccagaggggcgagctgtgtgttagaggccctatgatcatgagcggctacgtgaacaaccccgaggccacaaacgctctgatcgacaaggatggatggctgcacagcggcgacattgcctactgggacgaagatgagcacttcttcatcgtggaccggctgaagtccctgatcaagtacaagggctaccaggtggccccagccgagctggaatctattctgctgcaacaccccaacatcttcgatgccggcgttgcaggactgcccgatgatgatgctggcgaactgccagctgctgtggtggtgctggaacacggcaagaccatgaccgagaaagaaatcgtggactacgtggccagccaagtgaccaccgccaagaaactgagaggcggcgtggtgtttgtggacgaggtgccaaaaggcctgacaggcaagctggacgcccggaagatcagagagatcctgattaaggccaagaaaggcggcaagatcgccgtgtaatagctaactagacaaaacaccaaacaaacaagctgcgagccacggacttaaataattgagccttaaagaagaaattctttaagtggatgctctcaaactcagggaaacctaaatctagttatagacaaggcaatcctgagccaagccgaagtagtaattagtaagttaacaatagatgacttacaactaatcggaaggtgcagagactcgacgggagctaccctaacgtcaagacgagggtaaagaaaaaacaaccaaaaaaaatctagatatcggatcccggg

SEQ ID NO: 3426 - DNA, 2831 bp, synthetic construct
  source 1..2831: mol_type = other DNA; note = Ana1.206
taatacgactcactatagggagaccctcgaaaaaaaacacaaacaccagagtccaattctcaaagccaataggcagtagcgaaagctgcaagagaatgaaaatccgtggctcgcagcaaacaccaaacaaaacaaacacaaaccaacaaaaattaaaacagcctgtgggttgatcccacccacaggcccattgggcgctagcactctggtatcacggtacctttgtgcgcctgttttataccccctcccccaactgtaacttagaagtaacacacaccgatcaacagtcagcgtggcacaccagccacgttttgatcaagcacttctgttaccccggactgagtatcaatagactgctcacgcggttgaaggagaaagcgttcgttatccggccaactacttcgaaaaacctagtaacaccgtggaagttgcagagtgtttcgctcagcactaccccagtgtagatcaggtcgatgagtcaccgcattccccacgggcgaccgtggcggtggctgcgttggcggcctgcccatggggaaacccatgggacgctctaatacagacatggtgcgaagagtctattgagctagttggtagtcctccggcccctgaatgcggctaatcctaactgcggagcacacaccctcaagccagagggcagtgtgtcgtaacgggcaactctgcagcggaaccgactactttgggtgtccgtgtttcattttattcctatactggctgcttatggtgacaattgagagatcgttaccatatagctattggattggccatccggtgactaatagagctattatatatccctttgttgggtttataccacttagcttgaaagaggttaaaacattacaattcattgttaagttgaatacagcaaaatggaagatgccaagaacatcaagaagggccctgctccattctaccctctggaagatggaacagccggcgagcagctgcacaaggccatgaagagatatgccctggtgcctggcacaatcgccttcacagatgcccacatcgaggtggacatcacctacgccgagtacttcgagatgtctgtgcggctggccgaagctatgaagcgctacggcctgaacaccaaccaccggatcgtcgtgtgcagcgagaacagcctgcagttcttcatgcctgtgctgggcgccctgttcatcggagttgctgtggcccctgccaacgacatctacaacgagcgcgagctgctgaacagcatgggcatctctcagcccaccgtggtgttcgtgtccaagaagggactgcagaaaatcctgaacgtgcagaagaagctgcccatcatccagaaaatcatcatcatggacagcaagaccgactaccagggcttccagagcatgtacaccttcgtgaccagccatctgccacctggcttcaacgagtacgacttcgtgcccgagagcttcgaccgggacaagacaatcgccctgatcatgaacagcagcggctctaccggactgcccaaaggtgttgccctgcctcatagaactgcctgcgtgcggtttagccacgccagagatcccatcttcggcaaccagatcatccccgacacagccatcctgagcgtggtgccttttcaccacggcttcggcatgttcaccacactgggctacctgatctgcggcttcagagtggtgctgatgtaccgcttcgaggaagaactgttcctgcggagcctgcaggactacaagatccagtctgctctgctggtgcctactctgttcagcttctttgccaagagcaccctgatcgataagtacgacctgagcaacctgcacgagatcgcctctggcggagcccctctgtctaaagaagtgggagaagccgtcgccaagcggttccatctgcctggcatcagacaaggctatggcctgaccgagacaaccagcgccattctgattacccctgagggcgacgataagcctggcgctgtgggaaaagtggtgccattcttcgaggccaaggtggtggatctggacaccggcaaaacactgggcgttaaccagaggggcgagctgtgtgttagaggccctatgatcatgagcggctacgtgaacaaccccgaggccacaaacgctctgatcgacaaggatggatggctgcacagcggcgacattgcctactgggacgaagatgagcacttcttcatcgtggaccggctgaagtccctgatcaagtacaagggctaccaggtggccccagccgagctggaatctattctgctgcaacaccccaacatcttcgatgccggcgttgcaggactgcccgatgatgatgctggcgaactgccagctgctgtggtggtgctggaacacggcaagaccatgaccgagaaagaaatcgtggactacgtggccagccaagtgaccaccgccaagaaactgagaggcggcgtggtgtttgtggacgaggtgccaaaaggcctgacaggcaagctggacgcccggaagatcagagagatcctgattaaggccaagaaaggcggcaagatcgccgtgtaatagctaactagacaaaacaccaaacaaacaagctgcgagccacggacttaaataattgagccttaaagaagaaattctttaagtggatgctctcaaactcagggaaacctaaatctagttatagacaaggcaatcctgagccaagccgaagtagtaattagtaagttaacaatagatgacttacaactaatcggaaggtgcagagactcgacgggagctaccctaacgtcaagacgagggtaaagagaaaaacaaccaaaaaaaatctagatatcggatcccggg

SEQ ID NO: 3427 - DNA, 2831 bp, synthetic construct
  source 1..2831: mol_type = other DNA; note = Ana1.207
taatacgactcactatagggagaccctcgaaaaaaaacacaaacaccgagtccaattctcaaagccaataggcagtagcgaaagctgcaagagaatgaaaatccgtggctcgcagcaaacaccaaacaaaacaaacacaaaccaacaaaaattaaaacagcctgtgggttgatcccacccacaggcccattgggcgctagcactctggtatcacggtacctttgtgcgcctgttttataccccctcccccaactgtaacttagaagtaacacacaccgatcaacagtcagcgtggcacaccagccacgttttgatcaagcacttctgttaccccggactgagtatcaatagactgctcacgcggttgaaggagaaagcgttcgttatccggccaactacttcgaaaaacctagtaacaccgtggaagttgcagagtgtttcgctcagcactaccccagtgtagatcaggtcgatgagtcaccgcattccccacgggcgaccgtggcggtggctgcgttggcggcctgcccatggggaaacccatgggacgctctaatacagacatggtgcgaagagtctattgagctagttggtagtcctccggcccctgaatgcggctaatcctaactgcggagcacacaccctcaagccagagggcagtgtgtcgtaacgggcaactctgcagcggaaccgactactttgggtgtccgtgtttcattttattcctatactggctgcttatggtgacaattgagagatcgttaccatatagctattggattggccatccggtgactaatagagctattatatatccctttgttgggtttataccacttagcttgaaagaggttaaaacattacaattcattgttaagttgaatacagcaaaatggaagatgccaagaacatcaagaagggccctgctccattctaccctctggaagatggaacagccggcgagcagctgcacaaggccatgaagagatatgccctggtgcctggcacaatcgccttcacagatgcccacatcgaggtggacatcacctacgccgagtacttcgagatgtctgtgcggctggccgaagctatgaagcgctacggcctgaacaccaaccaccggatcgtcgtgtgcagcgagaacagcctgcagttcttcatgcctgtgctgggcgccctgttcatcggagttgctgtggcccctgccaacgacatctacaacgagcgcgagctgctgaacagcatgggcatctctcagcccaccgtggtgttcgtgtccaagaagggactgcagaaaatcctgaacgtgcagaagaagctgcccatcatccagaaaatcatcatcatggacagcaagaccgactaccagggcttccagagcatgtacaccttcgtgaccagccatctgccacctggcttcaacgagtacgacttcgtgcccgagagcttcgaccgggacaagacaatcgccctgatcatgaacagcagcggctctaccggactgcccaaaggtgttgccctgcctcatagaactgcctgcgtgcggtttagccacgccagagatcccatcttcggcaaccagatcatccccgacacagccatcctgagcgtggtgccttttcaccacggcttcggcatgttcaccacactgggctacctgatctgcggcttcagagtggtgctgatgtaccgcttcgaggaagaactgttcctgcggagcctgcaggactacaagatccagtctgctctgctggtgcctactctgttcagcttctttgccaagagcaccctgatcgataagtacgacctgagcaacctgcacgagatcgcctctggcggagcccctctgtctaaagaagtgggagaagccgtcgccaagcggttccatctgcctggcatcagacaaggctatggcctgaccgagacaaccagcgccattctgattacccctgagggcgacgataagcctggcgctgtgggaaaagtggtgccattcttcgaggccaaggtggtggatctggacaccggcaaaacactgggcgttaaccagaggggcgagctgtgtgttagaggccctatgatcatgagcggctacgtgaacaaccccgaggccacaaacgctctgatcgacaaggatggatggctgcacagcggcgacattgcctactgggacgaagatgagcacttcttcatcgtggaccggctgaagtccctgatcaagtacaagggctaccaggtggccccagccgagctggaatctattctgctgcaacaccccaacatcttcgatgccggcgttgcaggactgcccgatgatgatgctggcgaactgccagctgctgtggtggtgctggaacacggcaagaccatgaccgagaaagaaatcgtggactacgtggccagccaagtgaccaccgccaagaaactgagaggcggcgtggtgtttgtggacgaggtgccaaaaggcctgacaggcaagctggacgcccggaagatcagagagatcctgattaaggccaagaaaggcggcaagatcgccgtgtaatagctaactagacaaaacaccaaacaaacaagctgcgagccacggacttaaataattgagccttaaagaagaaattctttaagtggatgctctcaaactcagggaaacctaaatctagttatagacaaggcaatcctgagccaagccgaagtagtaattagtaagttaacaatagatgacttacaactaatcggaaggtgcagagactcgacgggagctaccctaacgtcaagacgagggtaaagagaaaaaacaaccaaaaaaaatctagatatcggatcccggg

SEQ ID NO: 3428 - DNA, 2831 bp, synthetic construct
  source 1..2831: mol_type = other DNA; note = Ana1.208
taatacgactcactatagggagaccctcgaaaaaaaacacaaacaccagtccaattctcaaagccaataggcagtagcgaaagctgcaagagaatgaaaatccgtggctcgcagcaaacaccaaacaaaacaaacacaaaccaacaaaaattaaaacagcctgtgggttgatcccacccacaggcccattgggcgctagcactctggtatcacggtacctttgtgcgcctgttttataccccctcccccaactgtaacttagaagtaacacacaccgatcaacagtcagcgtggcacaccagccacgttttgatcaagcacttctgttaccccggactgagtatcaatagactgctcacgcggttgaaggagaaagcgttcgttatccggccaactacttcgaaaaacctagtaacaccgtggaagttgcagagtgtttcgctcagcactaccccagtgtagatcaggtcgatgagtcaccgcattccccacgggcgaccgtggcggtggctgcgttggcggcctgcccatggggaaacccatgggacgctctaatacagacatggtgcgaagagtctattgagctagttggtagtcctccggcccctgaatgcggctaatcctaactgcggagcacacaccctcaagccagagggcagtgtgtcgtaacgggcaactctgcagcggaaccgactactttgggtgtccgtgtttcattttattcctatactggctgcttatggtgacaattgagagatcgttaccatatagctattggattggccatccggtgactaatagagctattatatatccctttgttgggtttataccacttagcttgaaagaggttaaaacattacaattcattgttaagttgaatacagcaaaatggaagatgccaagaacatcaagaagggccctgctccattctaccctctggaagatggaacagccggcgagcagctgcacaaggccatgaagagatatgccctggtgcctggcacaatcgccttcacagatgcccacatcgaggtggacatcacctacgccgagtacttcgagatgtctgtgcggctggccgaagctatgaagcgctacggcctgaacaccaaccaccggatcgtcgtgtgcagcgagaacagcctgcagttcttcatgcctgtgctgggcgccctgttcatcggagttgctgtggcccctgccaacgacatctacaacgagcgcgagctgctgaacagcatgggcatctctcagcccaccgtggtgttcgtgtccaagaagggactgcagaaaatcctgaacgtgcagaagaagctgcccatcatccagaaaatcatcatcatggacagcaagaccgactaccagggcttccagagcatgtacaccttcgtgaccagccatctgccacctggcttcaacgagtacgacttcgtgcccgagagcttcgaccgggacaagacaatcgccctgatcatgaacagcagcggctctaccggactgcccaaaggtgttgccctgcctcatagaactgcctgcgtgcggtttagccacgccagagatcccatcttcggcaaccagatcatccccgacacagccatcctgagcgtggtgccttttcaccacggcttcggcatgttcaccacactgggctacctgatctgcggcttcagagtggtgctgatgtaccgcttcgaggaagaactgttcctgcggagcctgcaggactacaagatccagtctgctctgctggtgcctactctgttcagcttctttgccaagagcaccctgatcgataagtacgacctgagcaacctgcacgagatcgcctctggcggagcccctctgtctaaagaagtgggagaagccgtcgccaagcggttccatctgcctggcatcagacaaggctatggcctgaccgagacaaccagcgccattctgattacccctgagggcgacgataagcctggcgctgtgggaaaagtggtgccattcttcgaggccaaggtggtggatctggacaccggcaaaacactgggcgttaaccagaggggcgagctgtgtgttagaggccctatgatcatgagcggctacgtgaacaaccccgaggccacaaacgctctgatcgacaaggatggatggctgcacagcggcgacattgcctactgggacgaagatgagcacttcttcatcgtggaccggctgaagtccctgatcaagtacaagggctaccaggtggccccagccgagctggaatctattctgctgcaacaccccaacatcttcgatgccggcgttgcaggactgcccgatgatgatgctggcgaactgccagctgctgtggtggtgctggaacacggcaagaccatgaccgagaaagaaatcgtggactacgtggccagccaagtgaccaccgccaagaaactgagaggcggcgtggtgtttgtggacgaggtgccaaaaggcctgacaggcaagctggacgcccggaagatcagagagatcctgattaaggccaagaaaggcggcaagatcgccgtgtaatagctaactagacaaaacaccaaacaaacaagctgcgagccacggacttaaataattgagccttaaagaagaaattctttaagtggatgctctcaaactcagggaaacctaaatctagttatagacaaggcaatcctgagccaagccgaagtagtaattagtaagttaacaatagatgacttacaactaatcggaaggtgcagagactcgacgggagctaccctaacgtcaagacgagggtaaagagagaaaaacaaccaaaaaaaatctagatatcggatcccggg

SEQ ID NO: 3429 - DNA, 2831 bp, synthetic construct
  source 1..2831: mol_type = other DNA; note = Ana1.209
taatacgactcactatagggagaccctcgaaaaaaaacacaaacaccgtccaattctcaaagccaataggcagtagcgaaagctgcaagagaatgaaaatccgtggctcgcagcaaacaccaaacaaaacaaacacaaaccaacaaaaattaaaacagcctgtgggttgatcccacccacaggcccattgggcgctagcactctggtatcacggtacctttgtgcgcctgttttataccccctcccccaactgtaacttagaagtaacacacaccgatcaacagtcagcgtggcacaccagccacgttttgatcaagcacttctgttaccccggactgagtatcaatagactgctcacgcggttgaaggagaaagcgttcgttatccggccaactacttcgaaaaacctagtaacaccgtggaagttgcagagtgtttcgctcagcactaccccagtgtagatcaggtcgatgagtcaccgcattccccacgggcgaccgtggcggtggctgcgttggcggcctgcccatggggaaacccatgggacgctctaatacagacatggtgcgaagagtctattgagctagttggtagtcctccggcccctgaatgcggctaatcctaactgcggagcacacaccctcaagccagagggcagtgtgtcgtaacgggcaactctgcagcggaaccgactactttgggtgtccgtgtttcattttattcctatactggctgcttatggtgacaattgagagatcgttaccatatagctattggattggccatccggtgactaatagagctattatatatccctttgttgggtttataccacttagcttgaaagaggttaaaacattacaattcattgttaagttgaatacagcaaaatggaagatgccaagaacatcaagaagggccctgctccattctaccctctggaagatggaacagccggcgagcagctgcacaaggccatgaagagatatgccctggtgcctggcacaatcgccttcacagatgcccacatcgaggtggacatcacctacgccgagtacttcgagatgtctgtgcggctggccgaagctatgaagcgctacggcctgaacaccaaccaccggatcgtcgtgtgcagcgagaacagcctgcagttcttcatgcctgtgctgggcgccctgttcatcggagttgctgtggcccctgccaacgacatctacaacgagcgcgagctgctgaacagcatgggcatctctcagcccaccgtggtgttcgtgtccaagaagggactgcagaaaatcctgaacgtgcagaagaagctgcccatcatccagaaaatcatcatcatggacagcaagaccgactaccagggcttccagagcatgtacaccttcgtgaccagccatctgccacctggcttcaacgagtacgacttcgtgcccgagagcttcgaccgggacaagacaatcgccctgatcatgaacagcagcggctctaccggactgcccaaaggtgttgccctgcctcatagaactgcctgcgtgcggtttagccacgccagagatcccatcttcggcaaccagatcatccccgacacagccatcctgagcgtggtgccttttcaccacggcttcggcatgttcaccacactgggctacctgatctgcggcttcagagtggtgctgatgtaccgcttcgaggaagaactgttcctgcggagcctgcaggactacaagatccagtctgctctgctggtgcctactctgttcagcttctttgccaagagcaccctgatcgataagtacgacctgagcaacctgcacgagatcgcctctggcggagcccctctgtctaaagaagtgggagaagccgtcgccaagcggttccatctgcctggcatcagacaaggctatggcctgaccgagacaaccagcgccattctgattacccctgagggcgacgataagcctggcgctgtgggaaaagtggtgccattcttcgaggccaaggtggtggatctggacaccggcaaaacactgggcgttaaccagaggggcgagctgtgtgttagaggccctatgatcatgagcggctacgtgaacaaccccgaggccacaaacgctctgatcgacaaggatggatggctgcacagcggcgacattgcctactgggacgaagatgagcacttcttcatcgtggaccggctgaagtccctgatcaagtacaagggctaccaggtggccccagccgagctggaatctattctgctgcaacaccccaacatcttcgatgccggcgttgcaggactgcccgatgatgatgctggcgaactgccagctgctgtggtggtgctggaacacggcaagaccatgaccgagaaagaaatcgtggactacgtggccagccaagtgaccaccgccaagaaactgagaggcggcgtggtgtttgtggacgaggtgccaaaaggcctgacaggcaagctggacgcccggaagatcagagagatcctgattaaggccaagaaaggcggcaagatcgccgtgtaatagctaactagacaaaacaccaaacaaacaagctgcgagccacggacttaaataattgagccttaaagaagaaattctttaagtggatgctctcaaactcagggaaacctaaatctagttatagacaaggcaatcctgagccaagccgaagtagtaattagtaagttaacaatagatgacttacaactaatcggaaggtgcagagactcgacgggagctaccctaacgtcaagacgagggtaaagagagaaaaaacaaccaaaaaaaatctagatatcggatcccggg

SEQ ID NO: 3430 - DNA, 2831 bp, synthetic construct
  source 1..2831: mol_type = other DNA; note = Ana1.210
taatacgactcactatagggagaccctcgaaaaaaaacacaaacacctccaattctcaaagccaataggcagtagcgaaagctgcaagagaatgaaaatccgtggctcgcagcaaacaccaaacaaaacaaacacaaaccaacaaaaattaaaacagcctgtgggttgatcccacccacaggcccattgggcgctagcactctggtatcacggtacctttgtgcgcctgttttataccccctcccccaactgtaacttagaagtaacacacaccgatcaacagtcagcgtggcacaccagccacgttttgatcaagcacttctgttaccccggactgagtatcaatagactgctcacgcggttgaaggagaaagcgttcgttatccggccaactacttcgaaaaacctagtaacaccgtggaagttgcagagtgtttcgctcagcactaccccagtgtagatcaggtcgatgagtcaccgcattccccacgggcgaccgtggcggtggctgcgttggcggcctgcccatggggaaacccatgggacgctctaatacagacatggtgcgaagagtctattgagctagttggtagtcctccggcccctgaatgcggctaatcctaactgcggagcacacaccctcaagccagagggcagtgtgtcgtaacgggcaactctgcagcggaaccgactactttgggtgtccgtgtttcattttattcctatactggctgcttatggtgacaattgagagatcgttaccatatagctattggattggccatccggtgactaatagagctattatatatccctttgttgggtttataccacttagcttgaaagaggttaaaacattacaattcattgttaagttgaatacagcaaaatggaagatgccaagaacatcaagaagggccctgctccattctaccctctggaagatggaacagccggcgagcagctgcacaaggccatgaagagatatgccctggtgcctggcacaatcgccttcacagatgcccacatcgaggtggacatcacctacgccgagtacttcgagatgtctgtgcggctggccgaagctatgaagcgctacggcctgaacaccaaccaccggatcgtcgtgtgcagcgagaacagcctgcagttcttcatgcctgtgctgggcgccctgttcatcggagttgctgtggcccctgccaacgacatctacaacgagcgcgagctgctgaacagcatgggcatctctcagcccaccgtggtgttcgtgtccaagaagggactgcagaaaatcctgaacgtgcagaagaagctgcccatcatccagaaaatcatcatcatggacagcaagaccgactaccagggcttccagagcatgtacaccttcgtgaccagccatctgccacctggcttcaacgagtacgacttcgtgcccgagagcttcgaccgggacaagacaatcgccctgatcatgaacagcagcggctctaccggactgcccaaaggtgttgccctgcctcatagaactgcctgcgtgcggtttagccacgccagagatcccatcttcggcaaccagatcatccccgacacagccatcctgagcgtggtgccttttcaccacggcttcggcatgttcaccacactgggctacctgatctgcggcttcagagtggtgctgatgtaccgcttcgaggaagaactgttcctgcggagcctgcaggactacaagatccagtctgctctgctggtgcctactctgttcagcttctttgccaagagcaccctgatcgataagtacgacctgagcaacctgcacgagatcgcctctggcggagcccctctgtctaaagaagtgggagaagccgtcgccaagcggttccatctgcctggcatcagacaaggctatggcctgaccgagacaaccagcgccattctgattacccctgagggcgacgataagcctggcgctgtgggaaaagtggtgccattcttcgaggccaaggtggtggatctggacaccggcaaaacactgggcgttaaccagaggggcgagctgtgtgttagaggccctatgatcatgagcggctacgtgaacaaccccgaggccacaaacgctctgatcgacaaggatggatggctgcacagcggcgacattgcctactgggacgaagatgagcacttcttcatcgtggaccggctgaagtccctgatcaagtacaagggctaccaggtggccccagccgagctggaatctattctgctgcaacaccccaacatcttcgatgccggcgttgcaggactgcccgatgatgatgctggcgaactgccagctgctgtggtggtgctggaacacggcaagaccatgaccgagaaagaaatcgtggactacgtggccagccaagtgaccaccgccaagaaactgagaggcggcgtggtgtttgtggacgaggtgccaaaaggcctgacaggcaagctggacgcccggaagatcagagagatcctgattaaggccaagaaaggcggcaagatcgccgtgtaatagctaactagacaaaacaccaaacaaacaagctgcgagccacggacttaaataattgagccttaaagaagaaattctttaagtggatgctctcaaactcagggaaacctaaatctagttatagacaaggcaatcctgagccaagccgaagtagtaattagtaagttaacaatagatgacttacaactaatcggaaggtgcagagactcgacgggagctaccctaacgtcaagacgagggtaaagagagagaaaaacaaccaaaaaaaatctagatatcggatcccggg

SEQ ID NO: 3431 - DNA, 2831 bp, synthetic construct
  source 1..2831: mol_type = other DNA; note = Ana1.211
taatacgactcactatagggagaccctcgaaaaaaaacacaaacaccccaattctcaaagccaataggcagtagcgaaagctgcaagagaatgaaaatccgtggctcgcagcaaacaccaaacaaaacaaacacaaaccaacaaaaattaaaacagcctgtgggttgatcccacccacaggcccattgggcgctagcactctggtatcacggtacctttgtgcgcctgttttataccccctcccccaactgtaacttagaagtaacacacaccgatcaacagtcagcgtggcacaccagccacgttttgatcaagcacttctgttaccccggactgagtatcaatagactgctcacgcggttgaaggagaaagcgttcgttatccggccaactacttcgaaaaacctagtaacaccgtggaagttgcagagtgtttcgctcagcactaccccagtgtagatcaggtcgatgagtcaccgcattccccacgggcgaccgtggcggtggctgcgttggcggcctgcccatggggaaacccatgggacgctctaatacagacatggtgcgaagagtctattgagctagttggtagtcctccggcccctgaatgcggctaatcctaactgcggagcacacaccctcaagccagagggcagtgtgtcgtaacgggcaactctgcagcggaaccgactactttgggtgtccgtgtttcattttattcctatactggctgcttatggtgacaattgagagatcgttaccatatagctattggattggccatccggtgactaatagagctattatatatccctttgttgggtttataccacttagcttgaaagaggttaaaacattacaattcattgttaagttgaatacagcaaaatggaagatgccaagaacatcaagaagggccctgctccattctaccctctggaagatggaacagccggcgagcagctgcacaaggccatgaagagatatgccctggtgcctggcacaatcgccttcacagatgcccacatcgaggtggacatcacctacgccgagtacttcgagatgtctgtgcggctggccgaagctatgaagcgctacggcctgaacaccaaccaccggatcgtcgtgtgcagcgagaacagcctgcagttcttcatgcctgtgctgggcgccctgttcatcggagttgctgtggcccctgccaacgacatctacaacgagcgcgagctgctgaacagcatgggcatctctcagcccaccgtggtgttcgtgtccaagaagggactgcagaaaatcctgaacgtgcagaagaagctgcccatcatccagaaaatcatcatcatggacagcaagaccgactaccagggcttccagagcatgtacaccttcgtgaccagccatctgccacctggcttcaacgagtacgacttcgtgcccgagagcttcgaccgggacaagacaatcgccctgatcatgaacagcagcggctctaccggactgcccaaaggtgttgccctgcctcatagaactgcctgcgtgcggtttagccacgccagagatcccatcttcggcaaccagatcatccccgacacagccatcctgagcgtggtgccttttcaccacggcttcggcatgttcaccacactgggctacctgatctgcggcttcagagtggtgctgatgtaccgcttcgaggaagaactgttcctgcggagcctgcaggactacaagatccagtctgctctgctggtgcctactctgttcagcttctttgccaagagcaccctgatcgataagtacgacctgagcaacctgcacgagatcgcctctggcggagcccctctgtctaaagaagtgggagaagccgtcgccaagcggttccatctgcctggcatcagacaaggctatggcctgaccgagacaaccagcgccattctgattacccctgagggcgacgataagcctggcgctgtgggaaaagtggtgccattcttcgaggccaaggtggtggatctggacaccggcaaaacactgggcgttaaccagaggggcgagctgtgtgttagaggccctatgatcatgagcggctacgtgaacaaccccgaggccacaaacgctctgatcgacaaggatggatggctgcacagcggcgacattgcctactgggacgaagatgagcacttcttcatcgtggaccggctgaagtccctgatcaagtacaagggctaccaggtggccccagccgagctggaatctattctgctgcaacaccccaacatcttcgatgccggcgttgcaggactgcccgatgatgatgctggcgaactgccagctgctgtggtggtgctggaacacggcaagaccatgaccgagaaagaaatcgtggactacgtggccagccaagtgaccaccgccaagaaactgagaggcggcgtggtgtttgtggacgaggtgccaaaaggcctgacaggcaagctggacgcccggaagatcagagagatcctgattaaggccaagaaaggcggcaagatcgccgtgtaatagctaactagacaaaacaccaaacaaacaagctgcgagccacggacttaaataattgagccttaaagaagaaattctttaagtggatgctctcaaactcagggaaacctaaatctagttatagacaaggcaatcctgagccaagccgaagtagtaattagtaagttaacaatagatgacttacaactaatcggaaggtgcagagactcgacgggagctaccctaacgtcaagacgagggtaaagagagagtaaaaacaaccaaaaaaaatctagatatcggatcccggg

SEQ ID NO: 3432 - DNA, 2831 bp, synthetic construct
  source 1..2831: mol_type = other DNA; note = Ana1.212
taatacgactcactatagggagaccctcgaaaaaaaacacaaacacccaattctcaaagccaataggcagtagcgaaagctgcaagagaatgaaaatccgtggctcgcagcaaacaccaaacaaaacaaacacaaaccaacaaaaattaaaacagcctgtgggttgatcccacccacaggcccattgggcgctagcactctggtatcacggtacctttgtgcgcctgttttataccccctcccccaactgtaacttagaagtaacacacaccgatcaacagtcagcgtggcacaccagccacgttttgatcaagcacttctgttaccccggactgagtatcaatagactgctcacgcggttgaaggagaaagcgttcgttatccggccaactacttcgaaaaacctagtaacaccgtggaagttgcagagtgtttcgctcagcactaccccagtgtagatcaggtcgatgagtcaccgcattccccacgggcgaccgtggcggtggctgcgttggcggcctgcccatggggaaacccatgggacgctctaatacagacatggtgcgaagagtctattgagctagttggtagtcctccggcccctgaatgcggctaatcctaactgcggagcacacaccctcaagccagagggcagtgtgtcgtaacgggcaactctgcagcggaaccgactactttgggtgtccgtgtttcattttattcctatactggctgcttatggtgacaattgagagatcgttaccatatagctattggattggccatccggtgactaatagagctattatatatccctttgttgggtttataccacttagcttgaaagaggttaaaacattacaattcattgttaagttgaatacagcaaaatggaagatgccaagaacatcaagaagggccctgctccattctaccctctggaagatggaacagccggcgagcagctgcacaaggccatgaagagatatgccctggtgcctggcacaatcgccttcacagatgcccacatcgaggtggacatcacctacgccgagtacttcgagatgtctgtgcggctggccgaagctatgaagcgctacggcctgaacaccaaccaccggatcgtcgtgtgcagcgagaacagcctgcagttcttcatgcctgtgctgggcgccctgttcatcggagttgctgtggcccctgccaacgacatctacaacgagcgcgagctgctgaacagcatgggcatctctcagcccaccgtggtgttcgtgtccaagaagggactgcagaaaatcctgaacgtgcagaagaagctgcccatcatccagaaaatcatcatcatggacagcaagaccgactaccagggcttccagagcatgtacaccttcgtgaccagccatctgccacctggcttcaacgagtacgacttcgtgcccgagagcttcgaccgggacaagacaatcgccctgatcatgaacagcagcggctctaccggactgcccaaaggtgttgccctgcctcatagaactgcctgcgtgcggtttagccacgccagagatcccatcttcggcaaccagatcatccccgacacagccatcctgagcgtggtgccttttcaccacggcttcggcatgttcaccacactgggctacctgatctgcggcttcagagtggtgctgatgtaccgcttcgaggaagaactgttcctgcggagcctgcaggactacaagatccagtctgctctgctggtgcctactctgttcagcttctttgccaagagcaccctgatcgataagtacgacctgagcaacctgcacgagatcgcctctggcggagcccctctgtctaaagaagtgggagaagccgtcgccaagcggttccatctgcctggcatcagacaaggctatggcctgaccgagacaaccagcgccattctgattacccctgagggcgacgataagcctggcgctgtgggaaaagtggtgccattcttcgaggccaaggtggtggatctggacaccggcaaaacactgggcgttaaccagaggggcgagctgtgtgttagaggccctatgatcatgagcggctacgtgaacaaccccgaggccacaaacgctctgatcgacaaggatggatggctgcacagcggcgacattgcctactgggacgaagatgagcacttcttcatcgtggaccggctgaagtccctgatcaagtacaagggctaccaggtggccccagccgagctggaatctattctgctgcaacaccccaacatcttcgatgccggcgttgcaggactgcccgatgatgatgctggcgaactgccagctgctgtggtggtgctggaacacggcaagaccatgaccgagaaagaaatcgtggactacgtggccagccaagtgaccaccgccaagaaactgagaggcggcgtggtgtttgtggacgaggtgccaaaaggcctgacaggcaagctggacgcccggaagatcagagagatcctgattaaggccaagaaaggcggcaagatcgccgtgtaatagctaactagacaaaacaccaaacaaacaagctgcgagccacggacttaaataattgagccttaaagaagaaattctttaagtggatgctctcaaactcagggaaacctaaatctagttatagacaaggcaatcctgagccaagccgaagtagtaattagtaagttaacaatagatgacttacaactaatcggaaggtgcagagactcgacgggagctaccctaacgtcaagacgagggtaaagagagagtcaaaaacaaccaaaaaaaatctagatatcggatcccggg

SEQ ID NO: 3433 - DNA, 2831 bp, synthetic construct
  source 1..2831: mol_type = other DNA; note = Ana1.213
taatacgactcactatagggagaccctcgaaaaaaaacacaaacaccaattctcaaagccaataggcagtagcgaaagctgcaagagaatgaaaatccgtggctcgcagcaaacaccaaacaaaacaaacacaaaccaacaaaaattaaaacagcctgtgggttgatcccacccacaggcccattgggcgctagcactctggtatcacggtacctttgtgcgcctgttttataccccctcccccaactgtaacttagaagtaacacacaccgatcaacagtcagcgtggcacaccagccacgttttgatcaagcacttctgttaccccggactgagtatcaatagactgctcacgcggttgaaggagaaagcgttcgttatccggccaactacttcgaaaaacctagtaacaccgtggaagttgcagagtgtttcgctcagcactaccccagtgtagatcaggtcgatgagtcaccgcattccccacgggcgaccgtggcggtggctgcgttggcggcctgcccatggggaaacccatgggacgctctaatacagacatggtgcgaagagtctattgagctagttggtagtcctccggcccctgaatgcggctaatcctaactgcggagcacacaccctcaagccagagggcagtgtgtcgtaacgggcaactctgcagcggaaccgactactttgggtgtccgtgtttcattttattcctatactggctgcttatggtgacaattgagagatcgttaccatatagctattggattggccatccggtgactaatagagctattatatatccctttgttgggtttataccacttagcttgaaagaggttaaaacattacaattcattgttaagttgaatacagcaaaatggaagatgccaagaacatcaagaagggccctgctccattctaccctctggaagatggaacagccggcgagcagctgcacaaggccatgaagagatatgccctggtgcctggcacaatcgccttcacagatgcccacatcgaggtggacatcacctacgccgagtacttcgagatgtctgtgcggctggccgaagctatgaagcgctacggcctgaacaccaaccaccggatcgtcgtgtgcagcgagaacagcctgcagttcttcatgcctgtgctgggcgccctgttcatcggagttgctgtggcccctgccaacgacatctacaacgagcgcgagctgctgaacagcatgggcatctctcagcccaccgtggtgttcgtgtccaagaagggactgcagaaaatcctgaacgtgcagaagaagctgcccatcatccagaaaatcatcatcatggacagcaagaccgactaccagggcttccagagcatgtacaccttcgtgaccagccatctgccacctggcttcaacgagtacgacttcgtgcccgagagcttcgaccgggacaagacaatcgccctgatcatgaacagcagcggctctaccggactgcccaaaggtgttgccctgcctcatagaactgcctgcgtgcggtttagccacgccagagatcccatcttcggcaaccagatcatccccgacacagccatcctgagcgtggtgccttttcaccacggcttcggcatgttcaccacactgggctacctgatctgcggcttcagagtggtgctgatgtaccgcttcgaggaagaactgttcctgcggagcctgcaggactacaagatccagtctgctctgctggtgcctactctgttcagcttctttgccaagagcaccctgatcgataagtacgacctgagcaacctgcacgagatcgcctctggcggagcccctctgtctaaagaagtgggagaagccgtcgccaagcggttccatctgcctggcatcagacaaggctatggcctgaccgagacaaccagcgccattctgattacccctgagggcgacgataagcctggcgctgtgggaaaagtggtgccattcttcgaggccaaggtggtggatctggacaccggcaaaacactgggcgttaaccagaggggcgagctgtgtgttagaggccctatgatcatgagcggctacgtgaacaaccccgaggccacaaacgctctgatcgacaaggatggatggctgcacagcggcgacattgcctactgggacgaagatgagcacttcttcatcgtggaccggctgaagtccctgatcaagtacaagggctaccaggtggccccagccgagctggaatctattctgctgcaacaccccaacatcttcgatgccggcgttgcaggactgcccgatgatgatgctggcgaactgccagctgctgtggtggtgctggaacacggcaagaccatgaccgagaaagaaatcgtggactacgtggccagccaagtgaccaccgccaagaaactgagaggcggcgtggtgtttgtggacgaggtgccaaaaggcctgacaggcaagctggacgcccggaagatcagagagatcctgattaaggccaagaaaggcggcaagatcgccgtgtaatagctaactagacaaaacaccaaacaaacaagctgcgagccacggacttaaataattgagccttaaagaagaaattctttaagtggatgctctcaaactcagggaaacctaaatctagttatagacaaggcaatcctgagccaagccgaagtagtaattagtaagttaacaatagatgacttacaactaatcggaaggtgcagagactcgacgggagctaccctaacgtcaagacgagggtaaagagagagtccaaaaacaaccaaaaaaaatctagatatcggatcccggg

SEQ ID NO: 3434 - DNA, 2831 bp, synthetic construct
  source 1..2831: mol_type = other DNA; note = Ana1.214
taatacgactcactatagggagaccctcgaaaaaaaacacaaacaccattctcaaagccaataggcagtagcgaaagctgcaagagaatgaaaatccgtggctcgcagcaaacaccaaacaaaacaaacacaaaccaacaaaaattaaaacagcctgtgggttgatcccacccacaggcccattgggcgctagcactctggtatcacggtacctttgtgcgcctgttttataccccctcccccaactgtaacttagaagtaacacacaccgatcaacagtcagcgtggcacaccagccacgttttgatcaagcacttctgttaccccggactgagtatcaatagactgctcacgcggttgaaggagaaagcgttcgttatccggccaactacttcgaaaaacctagtaacaccgtggaagttgcagagtgtttcgctcagcactaccccagtgtagatcaggtcgatgagtcaccgcattccccacgggcgaccgtggcggtggctgcgttggcggcctgcccatggggaaacccatgggacgctctaatacagacatggtgcgaagagtctattgagctagttggtagtcctccggcccctgaatgcggctaatcctaactgcggagcacacaccctcaagccagagggcagtgtgtcgtaacgggcaactctgcagcggaaccgactactttgggtgtccgtgtttcattttattcctatactggctgcttatggtgacaattgagagatcgttaccatatagctattggattggccatccggtgactaatagagctattatatatccctttgttgggtttataccacttagcttgaaagaggttaaaacattacaattcattgttaagttgaatacagcaaaatggaagatgccaagaacatcaagaagggccctgctccattctaccctctggaagatggaacagccggcgagcagctgcacaaggccatgaagagatatgccctggtgcctggcacaatcgccttcacagatgcccacatcgaggtggacatcacctacgccgagtacttcgagatgtctgtgcggctggccgaagctatgaagcgctacggcctgaacaccaaccaccggatcgtcgtgtgcagcgagaacagcctgcagttcttcatgcctgtgctgggcgccctgttcatcggagttgctgtggcccctgccaacgacatctacaacgagcgcgagctgctgaacagcatgggcatctctcagcccaccgtggtgttcgtgtccaagaagggactgcagaaaatcctgaacgtgcagaagaagctgcccatcatccagaaaatcatcatcatggacagcaagaccgactaccagggcttccagagcatgtacaccttcgtgaccagccatctgccacctggcttcaacgagtacgacttcgtgcccgagagcttcgaccgggacaagacaatcgccctgatcatgaacagcagcggctctaccggactgcccaaaggtgttgccctgcctcatagaactgcctgcgtgcggtttagccacgccagagatcccatcttcggcaaccagatcatccccgacacagccatcctgagcgtggtgccttttcaccacggcttcggcatgttcaccacactgggctacctgatctgcggcttcagagtggtgctgatgtaccgcttcgaggaagaactgttcctgcggagcctgcaggactacaagatccagtctgctctgctggtgcctactctgttcagcttctttgccaagagcaccctgatcgataagtacgacctgagcaacctgcacgagatcgcctctggcggagcccctctgtctaaagaagtgggagaagccgtcgccaagcggttccatctgcctggcatcagacaaggctatggcctgaccgagacaaccagcgccattctgattacccctgagggcgacgataagcctggcgctgtgggaaaagtggtgccattcttcgaggccaaggtggtggatctggacaccggcaaaacactgggcgttaaccagaggggcgagctgtgtgttagaggccctatgatcatgagcggctacgtgaacaaccccgaggccacaaacgctctgatcgacaaggatggatggctgcacagcggcgacattgcctactgggacgaagatgagcacttcttcatcgtggaccggctgaagtccctgatcaagtacaagggctaccaggtggccccagccgagctggaatctattctgctgcaacaccccaacatcttcgatgccggcgttgcaggactgcccgatgatgatgctggcgaactgccagctgctgtggtggtgctggaacacggcaagaccatgaccgagaaagaaatcgtggactacgtggccagccaagtgaccaccgccaagaaactgagaggcggcgtggtgtttgtggacgaggtgccaaaaggcctgacaggcaagctggacgcccggaagatcagagagatcctgattaaggccaagaaaggcggcaagatcgccgtgtaatagctaactagacaaaacaccaaacaaacaagctgcgagccacggacttaaataattgagccttaaagaagaaattctttaagtggatgctctcaaactcagggaaacctaaatctagttatagacaaggcaatcctgagccaagccgaagtagtaattagtaagttaacaatagatgacttacaactaatcggaaggtgcagagactcgacgggagctaccctaacgtcaagacgagggtaaagagagagtccaaaaaacaaccaaaaaaaatctagatatcggatcccggg

SEQ ID NO: 3435 - DNA, 2831 bp, synthetic construct
  source 1..2831: mol_type = other DNA; note = Ana1.215
taatacgactcactatagggagaccctcgaaaaaaaacacaaacaccttctcaaagccaataggcagtagcgaaagctgcaagagaatgaaaatccgtggctcgcagcaaacaccaaacaaaacaaacacaaaccaacaaaaattaaaacagcctgtgggttgatcccacccacaggcccattgggcgctagcactctggtatcacggtacctttgtgcgcctgttttataccccctcccccaactgtaacttagaagtaacacacaccgatcaacagtcagcgtggcacaccagccacgttttgatcaagcacttctgttaccccggactgagtatcaatagactgctcacgcggttgaaggagaaagcgttcgttatccggccaactacttcgaaaaacctagtaacaccgtggaagttgcagagtgtttcgctcagcactaccccagtgtagatcaggtcgatgagtcaccgcattccccacgggcgaccgtggcggtggctgcgttggcggcctgcccatggggaaacccatgggacgctctaatacagacatggtgcgaagagtctattgagctagttggtagtcctccggcccctgaatgcggctaatcctaactgcggagcacacaccctcaagccagagggcagtgtgtcgtaacgggcaactctgcagcggaaccgactactttgggtgtccgtgtttcattttattcctatactggctgcttatggtgacaattgagagatcgttaccatatagctattggattggccatccggtgactaatagagctattatatatccctttgttgggtttataccacttagcttgaaagaggttaaaacattacaattcattgttaagttgaatacagcaaaatggaagatgccaagaacatcaagaagggccctgctccattctaccctctggaagatggaacagccggcgagcagctgcacaaggccatgaagagatatgccctggtgcctggcacaatcgccttcacagatgcccacatcgaggtggacatcacctacgccgagtacttcgagatgtctgtgcggctggccgaagctatgaagcgctacggcctgaacaccaaccaccggatcgtcgtgtgcagcgagaacagcctgcagttcttcatgcctgtgctgggcgccctgttcatcggagttgctgtggcccctgccaacgacatctacaacgagcgcgagctgctgaacagcatgggcatctctcagcccaccgtggtgttcgtgtccaagaagggactgcagaaaatcctgaacgtgcagaagaagctgcccatcatccagaaaatcatcatcatggacagcaagaccgactaccagggcttccagagcatgtacaccttcgtgaccagccatctgccacctggcttcaacgagtacgacttcgtgcccgagagcttcgaccgggacaagacaatcgccctgatcatgaacagcagcggctctaccggactgcccaaaggtgttgccctgcctcatagaactgcctgcgtgcggtttagccacgccagagatcccatcttcggcaaccagatcatccccgacacagccatcctgagcgtggtgccttttcaccacggcttcggcatgttcaccacactgggctacctgatctgcggcttcagagtggtgctgatgtaccgcttcgaggaagaactgttcctgcggagcctgcaggactacaagatccagtctgctctgctggtgcctactctgttcagcttctttgccaagagcaccctgatcgataagtacgacctgagcaacctgcacgagatcgcctctggcggagcccctctgtctaaagaagtgggagaagccgtcgccaagcggttccatctgcctggcatcagacaaggctatggcctgaccgagacaaccagcgccattctgattacccctgagggcgacgataagcctggcgctgtgggaaaagtggtgccattcttcgaggccaaggtggtggatctggacaccggcaaaacactgggcgttaaccagaggggcgagctgtgtgttagaggccctatgatcatgagcggctacgtgaacaaccccgaggccacaaacgctctgatcgacaaggatggatggctgcacagcggcgacattgcctactgggacgaagatgagcacttcttcatcgtggaccggctgaagtccctgatcaagtacaagggctaccaggtggccccagccgagctggaatctattctgctgcaacaccccaacatcttcgatgccggcgttgcaggactgcccgatgatgatgctggcgaactgccagctgctgtggtggtgctggaacacggcaagaccatgaccgagaaagaaatcgtggactacgtggccagccaagtgaccaccgccaagaaactgagaggcggcgtggtgtttgtggacgaggtgccaaaaggcctgacaggcaagctggacgcccggaagatcagagagatcctgattaaggccaagaaaggcggcaagatcgccgtgtaatagctaactagacaaaacaccaaacaaacaagctgcgagccacggacttaaataattgagccttaaagaagaaattctttaagtggatgctctcaaactcagggaaacctaaatctagttatagacaaggcaatcctgagccaagccgaagtagtaattagtaagttaacaatagatgacttacaactaatcggaaggtgcagagactcgacgggagctaccctaacgtcaagacgagggtaaagagagagtccaaaaaaacaaccaaaaaaaatctagatatcggatcccggg

SEQ ID NO: 3436 - DNA, 2831 bp, synthetic construct
  source 1..2831: mol_type = other DNA; note = Ana1.216
taatacgactcactatagggagaccctcgaaaaaaaacacaaacacctctcaaagccaataggcagtagcgaaagctgcaagagaatgaaaatccgtggctcgcagcaaacaccaaacaaaacaaacacaaaccaacaaaaattaaaacagcctgtgggttgatcccacccacaggcccattgggcgctagcactctggtatcacggtacctttgtgcgcctgttttataccccctcccccaactgtaacttagaagtaacacacaccgatcaacagtcagcgtggcacaccagccacgttttgatcaagcacttctgttaccccggactgagtatcaatagactgctcacgcggttgaaggagaaagcgttcgttatccggccaactacttcgaaaaacctagtaacaccgtggaagttgcagagtgtttcgctcagcactaccccagtgtagatcaggtcgatgagtcaccgcattccccacgggcgaccgtggcggtggctgcgttggcggcctgcccatggggaaacccatgggacgctctaatacagacatggtgcgaagagtctattgagctagttggtagtcctccggcccctgaatgcggctaatcctaactgcggagcacacaccctcaagccagagggcagtgtgtcgtaacgggcaactctgcagcggaaccgactactttgggtgtccgtgtttcattttattcctatactggctgcttatggtgacaattgagagatcgttaccatatagctattggattggccatccggtgactaatagagctattatatatccctttgttgggtttataccacttagcttgaaagaggttaaaacattacaattcattgttaagttgaatacagcaaaatggaagatgccaagaacatcaagaagggccctgctccattctaccctctggaagatggaacagccggcgagcagctgcacaaggccatgaagagatatgccctggtgcctggcacaatcgccttcacagatgcccacatcgaggtggacatcacctacgccgagtacttcgagatgtctgtgcggctggccgaagctatgaagcgctacggcctgaacaccaaccaccggatcgtcgtgtgcagcgagaacagcctgcagttcttcatgcctgtgctgggcgccctgttcatcggagttgctgtggcccctgccaacgacatctacaacgagcgcgagctgctgaacagcatgggcatctctcagcccaccgtggtgttcgtgtccaagaagggactgcagaaaatcctgaacgtgcagaagaagctgcccatcatccagaaaatcatcatcatggacagcaagaccgactaccagggcttccagagcatgtacaccttcgtgaccagccatctgccacctggcttcaacgagtacgacttcgtgcccgagagcttcgaccgggacaagacaatcgccctgatcatgaacagcagcggctctaccggactgcccaaaggtgttgccctgcctcatagaactgcctgcgtgcggtttagccacgccagagatcccatcttcggcaaccagatcatccccgacacagccatcctgagcgtggtgccttttcaccacggcttcggcatgttcaccacactgggctacctgatctgcggcttcagagtggtgctgatgtaccgcttcgaggaagaactgttcctgcggagcctgcaggactacaagatccagtctgctctgctggtgcctactctgttcagcttctttgccaagagcaccctgatcgataagtacgacctgagcaacctgcacgagatcgcctctggcggagcccctctgtctaaagaagtgggagaagccgtcgccaagcggttccatctgcctggcatcagacaaggctatggcctgaccgagacaaccagcgccattctgattacccctgagggcgacgataagcctggcgctgtgggaaaagtggtgccattcttcgaggccaaggtggtggatctggacaccggcaaaacactgggcgttaaccagaggggcgagctgtgtgttagaggccctatgatcatgagcggctacgtgaacaaccccgaggccacaaacgctctgatcgacaaggatggatggctgcacagcggcgacattgcctactgggacgaagatgagcacttcttcatcgtggaccggctgaagtccctgatcaagtacaagggctaccaggtggccccagccgagctggaatctattctgctgcaacaccccaacatcttcgatgccggcgttgcaggactgcccgatgatgatgctggcgaactgccagctgctgtggtggtgctggaacacggcaagaccatgaccgagaaagaaatcgtggactacgtggccagccaagtgaccaccgccaagaaactgagaggcggcgtggtgtttgtggacgaggtgccaaaaggcctgacaggcaagctggacgcccggaagatcagagagatcctgattaaggccaagaaaggcggcaagatcgccgtgtaatagctaactagacaaaacaccaaacaaacaagctgcgagccacggacttaaataattgagccttaaagaagaaattctttaagtggatgctctcaaactcagggaaacctaaatctagttatagacaaggcaatcctgagccaagccgaagtagtaattagtaagttaacaatagatgacttacaactaatcggaaggtgcagagactcgacgggagctaccctaacgtcaagacgagggtaaagagagagtccaataaaaacaaccaaaaaaaatctagatatcggatcccggg

SEQ ID NO: 3437 - DNA, 2831 bp, synthetic construct
  source 1..2831: mol_type = other DNA; note = Ana1.217
taatacgactcactatagggagaccctcgaaaaaaaacacaaacaccctcaaagccaataggcagtagcgaaagctgcaagagaatgaaaatccgtggctcgcagcaaacaccaaacaaaacaaacacaaaccaacaaaaattaaaacagcctgtgggttgatcccacccacaggcccattgggcgctagcactctggtatcacggtacctttgtgcgcctgttttataccccctcccccaactgtaacttagaagtaacacacaccgatcaacagtcagcgtggcacaccagccacgttttgatcaagcacttctgttaccccggactgagtatcaatagactgctcacgcggttgaaggagaaagcgttcgttatccggccaactacttcgaaaaacctagtaacaccgtggaagttgcagagtgtttcgctcagcactaccccagtgtagatcaggtcgatgagtcaccgcattccccacgggcgaccgtggcggtggctgcgttggcggcctgcccatggggaaacccatgggacgctctaatacagacatggtgcgaagagtctattgagctagttggtagtcctccggcccctgaatgcggctaatcctaactgcggagcacacaccctcaagccagagggcagtgtgtcgtaacgggcaactctgcagcggaaccgactactttgggtgtccgtgtttcattttattcctatactggctgcttatggtgacaattgagagatcgttaccatatagctattggattggccatccggtgactaatagagctattatatatccctttgttgggtttataccacttagcttgaaagaggttaaaacattacaattcattgttaagttgaatacagcaaaatggaagatgccaagaacatcaagaagggccctgctccattctaccctctggaagatggaacagccggcgagcagctgcacaaggccatgaagagatatgccctggtgcctggcacaatcgccttcacagatgcccacatcgaggtggacatcacctacgccgagtacttcgagatgtctgtgcggctggccgaagctatgaagcgctacggcctgaacaccaaccaccggatcgtcgtgtgcagcgagaacagcctgcagttcttcatgcctgtgctgggcgccctgttcatcggagttgctgtggcccctgccaacgacatctacaacgagcgcgagctgctgaacagcatgggcatctctcagcccaccgtggtgttcgtgtccaagaagggactgcagaaaatcctgaacgtgcagaagaagctgcccatcatccagaaaatcatcatcatggacagcaagaccgactaccagggcttccagagcatgtacaccttcgtgaccagccatctgccacctggcttcaacgagtacgacttcgtgcccgagagcttcgaccgggacaagacaatcgccctgatcatgaacagcagcggctctaccggactgcccaaaggtgttgccctgcctcatagaactgcctgcgtgcggtttagccacgccagagatcccatcttcggcaaccagatcatccccgacacagccatcctgagcgtggtgccttttcaccacggcttcggcatgttcaccacactgggctacctgatctgcggcttcagagtggtgctgatgtaccgcttcgaggaagaactgttcctgcggagcctgcaggactacaagatccagtctgctctgctggtgcctactctgttcagcttctttgccaagagcaccctgatcgataagtacgacctgagcaacctgcacgagatcgcctctggcggagcccctctgtctaaagaagtgggagaagccgtcgccaagcggttccatctgcctggcatcagacaaggctatggcctgaccgagacaaccagcgccattctgattacccctgagggcgacgataagcctggcgctgtgggaaaagtggtgccattcttcgaggccaaggtggtggatctggacaccggcaaaacactgggcgttaaccagaggggcgagctgtgtgttagaggccctatgatcatgagcggctacgtgaacaaccccgaggccacaaacgctctgatcgacaaggatggatggctgcacagcggcgacattgcctactgggacgaagatgagcacttcttcatcgtggaccggctgaagtccctgatcaagtacaagggctaccaggtggccccagccgagctggaatctattctgctgcaacaccccaacatcttcgatgccggcgttgcaggactgcccgatgatgatgctggcgaactgccagctgctgtggtggtgctggaacacggcaagaccatgaccgagaaagaaatcgtggactacgtggccagccaagtgaccaccgccaagaaactgagaggcggcgtggtgtttgtggacgaggtgccaaaaggcctgacaggcaagctggacgcccggaagatcagagagatcctgattaaggccaagaaaggcggcaagatcgccgtgtaatagctaactagacaaaacaccaaacaaacaagctgcgagccacggacttaaataattgagccttaaagaagaaattctttaagtggatgctctcaaactcagggaaacctaaatctagttatagacaaggcaatcctgagccaagccgaagtagtaattagtaagttaacaatagatgacttacaactaatcggaaggtgcagagactcgacgggagctaccctaacgtcaagacgagggtaaagagagagtccaattaaaaacaaccaaaaaaaatctagatatcggatcccggg

SEQ ID NO: 3438 - DNA, 2831 bp, synthetic construct
  source 1..2831: mol_type = other DNA; note = Ana1.218
taatacgactcactatagggagaccctcgaaaaaaaacacaaacacctcaaagccaataggcagtagcgaaagctgcaagagaatgaaaatccgtggctcgcagcaaacaccaaacaaaacaaacacaaaccaacaaaaattaaaacagcctgtgggttgatcccacccacaggcccattgggcgctagcactctggtatcacggtacctttgtgcgcctgttttataccccctcccccaactgtaacttagaagtaacacacaccgatcaacagtcagcgtggcacaccagccacgttttgatcaagcacttctgttaccccggactgagtatcaatagactgctcacgcggttgaaggagaaagcgttcgttatccggccaactacttcgaaaaacctagtaacaccgtggaagttgcagagtgtttcgctcagcactaccccagtgtagatcaggtcgatgagtcaccgcattccccacgggcgaccgtggcggtggctgcgttggcggcctgcccatggggaaacccatgggacgctctaatacagacatggtgcgaagagtctattgagctagttggtagtcctccggcccctgaatgcggctaatcctaactgcggagcacacaccctcaagccagagggcagtgtgtcgtaacgggcaactctgcagcggaaccgactactttgggtgtccgtgtttcattttattcctatactggctgcttatggtgacaattgagagatcgttaccatatagctattggattggccatccggtgactaatagagctattatatatccctttgttgggtttataccacttagcttgaaagaggttaaaacattacaattcattgttaagttgaatacagcaaaatggaagatgccaagaacatcaagaagggccctgctccattctaccctctggaagatggaacagccggcgagcagctgcacaaggccatgaagagatatgccctggtgcctggcacaatcgccttcacagatgcccacatcgaggtggacatcacctacgccgagtacttcgagatgtctgtgcggctggccgaagctatgaagcgctacggcctgaacaccaaccaccggatcgtcgtgtgcagcgagaacagcctgcagttcttcatgcctgtgctgggcgccctgttcatcggagttgctgtggcccctgccaacgacatctacaacgagcgcgagctgctgaacagcatgggcatctctcagcccaccgtggtgttcgtgtccaagaagggactgcagaaaatcctgaacgtgcagaagaagctgcccatcatccagaaaatcatcatcatggacagcaagaccgactaccagggcttccagagcatgtacaccttcgtgaccagccatctgccacctggcttcaacgagtacgacttcgtgcccgagagcttcgaccgggacaagacaatcgccctgatcatgaacagcagcggctctaccggactgcccaaaggtgttgccctgcctcatagaactgcctgcgtgcggtttagccacgccagagatcccatcttcggcaaccagatcatccccgacacagccatcctgagcgtggtgccttttcaccacggcttcggcatgttcaccacactgggctacctgatctgcggcttcagagtggtgctgatgtaccgcttcgaggaagaactgttcctgcggagcctgcaggactacaagatccagtctgctctgctggtgcctactctgttcagcttctttgccaagagcaccctgatcgataagtacgacctgagcaacctgcacgagatcgcctctggcggagcccctctgtctaaagaagtgggagaagccgtcgccaagcggttccatctgcctggcatcagacaaggctatggcctgaccgagacaaccagcgccattctgattacccctgagggcgacgataagcctggcgctgtgggaaaagtggtgccattcttcgaggccaaggtggtggatctggacaccggcaaaacactgggcgttaaccagaggggcgagctgtgtgttagaggccctatgatcatgagcggctacgtgaacaaccccgaggccacaaacgctctgatcgacaaggatggatggctgcacagcggcgacattgcctactgggacgaagatgagcacttcttcatcgtggaccggctgaagtccctgatcaagtacaagggctaccaggtggccccagccgagctggaatctattctgctgcaacaccccaacatcttcgatgccggcgttgcaggactgcccgatgatgatgctggcgaactgccagctgctgtggtggtgctggaacacggcaagaccatgaccgagaaagaaatcgtggactacgtggccagccaagtgaccaccgccaagaaactgagaggcggcgtggtgtttgtggacgaggtgccaaaaggcctgacaggcaagctggacgcccggaagatcagagagatcctgattaaggccaagaaaggcggcaagatcgccgtgtaatagctaactagacaaaacaccaaacaaacaagctgcgagccacggacttaaataattgagccttaaagaagaaattctttaagtggatgctctcaaactcagggaaacctaaatctagttatagacaaggcaatcctgagccaagccgaagtagtaattagtaagttaacaatagatgacttacaactaatcggaaggtgcagagactcgacgggagctaccctaacgtcaagacgagggtaaagagagagtccaattcaaaaacaaccaaaaaaaatctagatatcggatcccggg

SEQ ID NO: 3439 - DNA, 2831 bp, synthetic construct
  source 1..2831: mol_type = other DNA; note = Ana1.219
taatacgactcactatagggagaccctcgaaaaaaaacacaaacacccaaagccaataggcagtagcgaaagctgcaagagaatgaaaatccgtggctcgcagcaaacaccaaacaaaacaaacacaaaccaacaaaaattaaaacagcctgtgggttgatcccacccacaggcccattgggcgctagcactctggtatcacggtacctttgtgcgcctgttttataccccctcccccaactgtaacttagaagtaacacacaccgatcaacagtcagcgtggcacaccagccacgttttgatcaagcacttctgttaccccggactgagtatcaatagactgctcacgcggttgaaggagaaagcgttcgttatccggccaactacttcgaaaaacctagtaacaccgtggaagttgcagagtgtttcgctcagcactaccccagtgtagatcaggtcgatgagtcaccgcattccccacgggcgaccgtggcggtggctgcgttggcggcctgcccatggggaaacccatgggacgctctaatacagacatggtgcgaagagtctattgagctagttggtagtcctccggcccctgaatgcggctaatcctaactgcggagcacacaccctcaagccagagggcagtgtgtcgtaacgggcaactctgcagcggaaccgactactttgggtgtccgtgtttcattttattcctatactggctgcttatggtgacaattgagagatcgttaccatatagctattggattggccatccggtgactaatagagctattatatatccctttgttgggtttataccacttagcttgaaagaggttaaaacattacaattcattgttaagttgaatacagcaaaatggaagatgccaagaacatcaagaagggccctgctccattctaccctctggaagatggaacagccggcgagcagctgcacaaggccatgaagagatatgccctggtgcctggcacaatcgccttcacagatgcccacatcgaggtggacatcacctacgccgagtacttcgagatgtctgtgcggctggccgaagctatgaagcgctacggcctgaacaccaaccaccggatcgtcgtgtgcagcgagaacagcctgcagttcttcatgcctgtgctgggcgccctgttcatcggagttgctgtggcccctgccaacgacatctacaacgagcgcgagctgctgaacagcatgggcatctctcagcccaccgtggtgttcgtgtccaagaagggactgcagaaaatcctgaacgtgcagaagaagctgcccatcatccagaaaatcatcatcatggacagcaagaccgactaccagggcttccagagcatgtacaccttcgtgaccagccatctgccacctggcttcaacgagtacgacttcgtgcccgagagcttcgaccgggacaagacaatcgccctgatcatgaacagcagcggctctaccggactgcccaaaggtgttgccctgcctcatagaactgcctgcgtgcggtttagccacgccagagatcccatcttcggcaaccagatcatccccgacacagccatcctgagcgtggtgccttttcaccacggcttcggcatgttcaccacactgggctacctgatctgcggcttcagagtggtgctgatgtaccgcttcgaggaagaactgttcctgcggagcctgcaggactacaagatccagtctgctctgctggtgcctactctgttcagcttctttgccaagagcaccctgatcgataagtacgacctgagcaacctgcacgagatcgcctctggcggagcccctctgtctaaagaagtgggagaagccgtcgccaagcggttccatctgcctggcatcagacaaggctatggcctgaccgagacaaccagcgccattctgattacccctgagggcgacgataagcctggcgctgtgggaaaagtggtgccattcttcgaggccaaggtggtggatctggacaccggcaaaacactgggcgttaaccagaggggcgagctgtgtgttagaggccctatgatcatgagcggctacgtgaacaaccccgaggccacaaacgctctgatcgacaaggatggatggctgcacagcggcgacattgcctactgggacgaagatgagcacttcttcatcgtggaccggctgaagtccctgatcaagtacaagggctaccaggtggccccagccgagctggaatctattctgctgcaacaccccaacatcttcgatgccggcgttgcaggactgcccgatgatgatgctggcgaactgccagctgctgtggtggtgctggaacacggcaagaccatgaccgagaaagaaatcgtggactacgtggccagccaagtgaccaccgccaagaaactgagaggcggcgtggtgtttgtggacgaggtgccaaaaggcctgacaggcaagctggacgcccggaagatcagagagatcctgattaaggccaagaaaggcggcaagatcgccgtgtaatagctaactagacaaaacaccaaacaaacaagctgcgagccacggacttaaataattgagccttaaagaagaaattctttaagtggatgctctcaaactcagggaaacctaaatctagttatagacaaggcaatcctgagccaagccgaagtagtaattagtaagttaacaatagatgacttacaactaatcggaaggtgcagagactcgacgggagctaccctaacgtcaagacgagggtaaagagagagtccaattctaaaaacaaccaaaaaaaatctagatatcggatcccggg

SEQ ID NO: 3440 - DNA, 2831 bp, synthetic construct
  source 1..2831: mol_type = other DNA; note = Ana1.220
taatacgactcactatagggagaccctcgaaaaaaaacacaaacaccaaagccaataggcagtagcgaaagctgcaagagaatgaaaatccgtggctcgcagcaaacaccaaacaaaacaaacacaaaccaacaaaaattaaaacagcctgtgggttgatcccacccacaggcccattgggcgctagcactctggtatcacggtacctttgtgcgcctgttttataccccctcccccaactgtaacttagaagtaacacacaccgatcaacagtcagcgtggcacaccagccacgttttgatcaagcacttctgttaccccggactgagtatcaatagactgctcacgcggttgaaggagaaagcgttcgttatccggccaactacttcgaaaaacctagtaacaccgtggaagttgcagagtgtttcgctcagcactaccccagtgtagatcaggtcgatgagtcaccgcattccccacgggcgaccgtggcggtggctgcgttggcggcctgcccatggggaaacccatgggacgctctaatacagacatggtgcgaagagtctattgagctagttggtagtcctccggcccctgaatgcggctaatcctaactgcggagcacacaccctcaagccagagggcagtgtgtcgtaacgggcaactctgcagcggaaccgactactttgggtgtccgtgtttcattttattcctatactggctgcttatggtgacaattgagagatcgttaccatatagctattggattggccatccggtgactaatagagctattatatatccctttgttgggtttataccacttagcttgaaagaggttaaaacattacaattcattgttaagttgaatacagcaaaatggaagatgccaagaacatcaagaagggccctgctccattctaccctctggaagatggaacagccggcgagcagctgcacaaggccatgaagagatatgccctggtgcctggcacaatcgccttcacagatgcccacatcgaggtggacatcacctacgccgagtacttcgagatgtctgtgcggctggccgaagctatgaagcgctacggcctgaacaccaaccaccggatcgtcgtgtgcagcgagaacagcctgcagttcttcatgcctgtgctgggcgccctgttcatcggagttgctgtggcccctgccaacgacatctacaacgagcgcgagctgctgaacagcatgggcatctctcagcccaccgtggtgttcgtgtccaagaagggactgcagaaaatcctgaacgtgcagaagaagctgcccatcatccagaaaatcatcatcatggacagcaagaccgactaccagggcttccagagcatgtacaccttcgtgaccagccatctgccacctggcttcaacgagtacgacttcgtgcccgagagcttcgaccgggacaagacaatcgccctgatcatgaacagcagcggctctaccggactgcccaaaggtgttgccctgcctcatagaactgcctgcgtgcggtttagccacgccagagatcccatcttcggcaaccagatcatccccgacacagccatcctgagcgtggtgccttttcaccacggcttcggcatgttcaccacactgggctacctgatctgcggcttcagagtggtgctgatgtaccgcttcgaggaagaactgttcctgcggagcctgcaggactacaagatccagtctgctctgctggtgcctactctgttcagcttctttgccaagagcaccctgatcgataagtacgacctgagcaacctgcacgagatcgcctctggcggagcccctctgtctaaagaagtgggagaagccgtcgccaagcggttccatctgcctggcatcagacaaggctatggcctgaccgagacaaccagcgccattctgattacccctgagggcgacgataagcctggcgctgtgggaaaagtggtgccattcttcgaggccaaggtggtggatctggacaccggcaaaacactgggcgttaaccagaggggcgagctgtgtgttagaggccctatgatcatgagcggctacgtgaacaaccccgaggccacaaacgctctgatcgacaaggatggatggctgcacagcggcgacattgcctactgggacgaagatgagcacttcttcatcgtggaccggctgaagtccctgatcaagtacaagggctaccaggtggccccagccgagctggaatctattctgctgcaacaccccaacatcttcgatgccggcgttgcaggactgcccgatgatgatgctggcgaactgccagctgctgtggtggtgctggaacacggcaagaccatgaccgagaaagaaatcgtggactacgtggccagccaagtgaccaccgccaagaaactgagaggcggcgtggtgtttgtggacgaggtgccaaaaggcctgacaggcaagctggacgcccggaagatcagagagatcctgattaaggccaagaaaggcggcaagatcgccgtgtaatagctaactagacaaaacaccaaacaaacaagctgcgagccacggacttaaataattgagccttaaagaagaaattctttaagtggatgctctcaaactcagggaaacctaaatctagttatagacaaggcaatcctgagccaagccgaagtagtaattagtaagttaacaatagatgacttacaactaatcggaaggtgcagagactcgacgggagctaccctaacgtcaagacgagggtaaagagagagtccaattctcaaaaacaaccaaaaaaaatctagatatcggatcccggg

SEQ ID NO: 3441 - DNA, 2831 bp, synthetic construct
  source 1..2831: mol_type = other DNA; note = Ana1.221
taatacgactcactatagggagaccctcgaaaaaaaacacaaacaccaagccaataggcagtagcgaaagctgcaagagaatgaaaatccgtggctcgcagcaaacaccaaacaaaacaaacacaaaccaacaaaaattaaaacagcctgtgggttgatcccacccacaggcccattgggcgctagcactctggtatcacggtacctttgtgcgcctgttttataccccctcccccaactgtaacttagaagtaacacacaccgatcaacagtcagcgtggcacaccagccacgttttgatcaagcacttctgttaccccggactgagtatcaatagactgctcacgcggttgaaggagaaagcgttcgttatccggccaactacttcgaaaaacctagtaacaccgtggaagttgcagagtgtttcgctcagcactaccccagtgtagatcaggtcgatgagtcaccgcattccccacgggcgaccgtggcggtggctgcgttggcggcctgcccatggggaaacccatgggacgctctaatacagacatggtgcgaagagtctattgagctagttggtagtcctccggcccctgaatgcggctaatcctaactgcggagcacacaccctcaagccagagggcagtgtgtcgtaacgggcaactctgcagcggaaccgactactttgggtgtccgtgtttcattttattcctatactggctgcttatggtgacaattgagagatcgttaccatatagctattggattggccatccggtgactaatagagctattatatatccctttgttgggtttataccacttagcttgaaagaggttaaaacattacaattcattgttaagttgaatacagcaaaatggaagatgccaagaacatcaagaagggccctgctccattctaccctctggaagatggaacagccggcgagcagctgcacaaggccatgaagagatatgccctggtgcctggcacaatcgccttcacagatgcccacatcgaggtggacatcacctacgccgagtacttcgagatgtctgtgcggctggccgaagctatgaagcgctacggcctgaacaccaaccaccggatcgtcgtgtgcagcgagaacagcctgcagttcttcatgcctgtgctgggcgccctgttcatcggagttgctgtggcccctgccaacgacatctacaacgagcgcgagctgctgaacagcatgggcatctctcagcccaccgtggtgttcgtgtccaagaagggactgcagaaaatcctgaacgtgcagaagaagctgcccatcatccagaaaatcatcatcatggacagcaagaccgactaccagggcttccagagcatgtacaccttcgtgaccagccatctgccacctggcttcaacgagtacgacttcgtgcccgagagcttcgaccgggacaagacaatcgccctgatcatgaacagcagcggctctaccggactgcccaaaggtgttgccctgcctcatagaactgcctgcgtgcggtttagccacgccagagatcccatcttcggcaaccagatcatccccgacacagccatcctgagcgtggtgccttttcaccacggcttcggcatgttcaccacactgggctacctgatctgcggcttcagagtggtgctgatgtaccgcttcgaggaagaactgttcctgcggagcctgcaggactacaagatccagtctgctctgctggtgcctactctgttcagcttctttgccaagagcaccctgatcgataagtacgacctgagcaacctgcacgagatcgcctctggcggagcccctctgtctaaagaagtgggagaagccgtcgccaagcggttccatctgcctggcatcagacaaggctatggcctgaccgagacaaccagcgccattctgattacccctgagggcgacgataagcctggcgctgtgggaaaagtggtgccattcttcgaggccaaggtggtggatctggacaccggcaaaacactgggcgttaaccagaggggcgagctgtgtgttagaggccctatgatcatgagcggctacgtgaacaaccccgaggccacaaacgctctgatcgacaaggatggatggctgcacagcggcgacattgcctactgggacgaagatgagcacttcttcatcgtggaccggctgaagtccctgatcaagtacaagggctaccaggtggccccagccgagctggaatctattctgctgcaacaccccaacatcttcgatgccggcgttgcaggactgcccgatgatgatgctggcgaactgccagctgctgtggtggtgctggaacacggcaagaccatgaccgagaaagaaatcgtggactacgtggccagccaagtgaccaccgccaagaaactgagaggcggcgtggtgtttgtggacgaggtgccaaaaggcctgacaggcaagctggacgcccggaagatcagagagatcctgattaaggccaagaaaggcggcaagatcgccgtgtaatagctaactagacaaaacaccaaacaaacaagctgcgagccacggacttaaataattgagccttaaagaagaaattctttaagtggatgctctcaaactcagggaaacctaaatctagttatagacaaggcaatcctgagccaagccgaagtagtaattagtaagttaacaatagatgacttacaactaatcggaaggtgcagagactcgacgggagctaccctaacgtcaagacgagggtaaagagagagtccaattctcaaaaaacaaccaaaaaaaatctagatatcggatcccggg

SEQ ID NO: 3442 - DNA, 2831 bp, synthetic construct
  source 1..2831: mol_type = other DNA; note = Ana1.222
taatacgactcactatagggagaccctcgaaaaaaaacacaaacaccagccaataggcagtagcgaaagctgcaagagaatgaaaatccgtggctcgcagcaaacaccaaacaaaacaaacacaaaccaacaaaaattaaaacagcctgtgggttgatcccacccacaggcccattgggcgctagcactctggtatcacggtacctttgtgcgcctgttttataccccctcccccaactgtaacttagaagtaacacacaccgatcaacagtcagcgtggcacaccagccacgttttgatcaagcacttctgttaccccggactgagtatcaatagactgctcacgcggttgaaggagaaagcgttcgttatccggccaactacttcgaaaaacctagtaacaccgtggaagttgcagagtgtttcgctcagcactaccccagtgtagatcaggtcgatgagtcaccgcattccccacgggcgaccgtggcggtggctgcgttggcggcctgcccatggggaaacccatgggacgctctaatacagacatggtgcgaagagtctattgagctagttggtagtcctccggcccctgaatgcggctaatcctaactgcggagcacacaccctcaagccagagggcagtgtgtcgtaacgggcaactctgcagcggaaccgactactttgggtgtccgtgtttcattttattcctatactggctgcttatggtgacaattgagagatcgttaccatatagctattggattggccatccggtgactaatagagctattatatatccctttgttgggtttataccacttagcttgaaagaggttaaaacattacaattcattgttaagttgaatacagcaaaatggaagatgccaagaacatcaagaagggccctgctccattctaccctctggaagatggaacagccggcgagcagctgcacaaggccatgaagagatatgccctggtgcctggcacaatcgccttcacagatgcccacatcgaggtggacatcacctacgccgagtacttcgagatgtctgtgcggctggccgaagctatgaagcgctacggcctgaacaccaaccaccggatcgtcgtgtgcagcgagaacagcctgcagttcttcatgcctgtgctgggcgccctgttcatcggagttgctgtggcccctgccaacgacatctacaacgagcgcgagctgctgaacagcatgggcatctctcagcccaccgtggtgttcgtgtccaagaagggactgcagaaaatcctgaacgtgcagaagaagctgcccatcatccagaaaatcatcatcatggacagcaagaccgactaccagggcttccagagcatgtacaccttcgtgaccagccatctgccacctggcttcaacgagtacgacttcgtgcccgagagcttcgaccgggacaagacaatcgccctgatcatgaacagcagcggctctaccggactgcccaaaggtgttgccctgcctcatagaactgcctgcgtgcggtttagccacgccagagatcccatcttcggcaaccagatcatccccgacacagccatcctgagcgtggtgccttttcaccacggcttcggcatgttcaccacactgggctacctgatctgcggcttcagagtggtgctgatgtaccgcttcgaggaagaactgttcctgcggagcctgcaggactacaagatccagtctgctctgctggtgcctactctgttcagcttctttgccaagagcaccctgatcgataagtacgacctgagcaacctgcacgagatcgcctctggcggagcccctctgtctaaagaagtgggagaagccgtcgccaagcggttccatctgcctggcatcagacaaggctatggcctgaccgagacaaccagcgccattctgattacccctgagggcgacgataagcctggcgctgtgggaaaagtggtgccattcttcgaggccaaggtggtggatctggacaccggcaaaacactgggcgttaaccagaggggcgagctgtgtgttagaggccctatgatcatgagcggctacgtgaacaaccccgaggccacaaacgctctgatcgacaaggatggatggctgcacagcggcgacattgcctactgggacgaagatgagcacttcttcatcgtggaccggctgaagtccctgatcaagtacaagggctaccaggtggccccagccgagctggaatctattctgctgcaacaccccaacatcttcgatgccggcgttgcaggactgcccgatgatgatgctggcgaactgccagctgctgtggtggtgctggaacacggcaagaccatgaccgagaaagaaatcgtggactacgtggccagccaagtgaccaccgccaagaaactgagaggcggcgtggtgtttgtggacgaggtgccaaaaggcctgacaggcaagctggacgcccggaagatcagagagatcctgattaaggccaagaaaggcggcaagatcgccgtgtaatagctaactagacaaaacaccaaacaaacaagctgcgagccacggacttaaataattgagccttaaagaagaaattctttaagtggatgctctcaaactcagggaaacctaaatctagttatagacaaggcaatcctgagccaagccgaagtagtaattagtaagttaacaatagatgacttacaactaatcggaaggtgcagagactcgacgggagctaccctaacgtcaagacgagggtaaagagagagtccaattctcaaaaaaacaaccaaaaaaaatctagatatcggatcccggg

SEQ ID NO: 3443 - DNA, 2831 bp, synthetic construct
  source 1..2831: mol_type = other DNA; note = Ana1.223
taatacgactcactatagggagaccctcgaaaaaaaacacaaacaccgccaataggcagtagcgaaagctgcaagagaatgaaaatccgtggctcgcagcaaacaccaaacaaaacaaacacaaaccaacaaaaattaaaacagcctgtgggttgatcccacccacaggcccattgggcgctagcactctggtatcacggtacctttgtgcgcctgttttataccccctcccccaactgtaacttagaagtaacacacaccgatcaacagtcagcgtggcacaccagccacgttttgatcaagcacttctgttaccccggactgagtatcaatagactgctcacgcggttgaaggagaaagcgttcgttatccggccaactacttcgaaaaacctagtaacaccgtggaagttgcagagtgtttcgctcagcactaccccagtgtagatcaggtcgatgagtcaccgcattccccacgggcgaccgtggcggtggctgcgttggcggcctgcccatggggaaacccatgggacgctctaatacagacatggtgcgaagagtctattgagctagttggtagtcctccggcccctgaatgcggctaatcctaactgcggagcacacaccctcaagccagagggcagtgtgtcgtaacgggcaactctgcagcggaaccgactactttgggtgtccgtgtttcattttattcctatactggctgcttatggtgacaattgagagatcgttaccatatagctattggattggccatccggtgactaatagagctattatatatccctttgttgggtttataccacttagcttgaaagaggttaaaacattacaattcattgttaagttgaatacagcaaaatggaagatgccaagaacatcaagaagggccctgctccattctaccctctggaagatggaacagccggcgagcagctgcacaaggccatgaagagatatgccctggtgcctggcacaatcgccttcacagatgcccacatcgaggtggacatcacctacgccgagtacttcgagatgtctgtgcggctggccgaagctatgaagcgctacggcctgaacaccaaccaccggatcgtcgtgtgcagcgagaacagcctgcagttcttcatgcctgtgctgggcgccctgttcatcggagttgctgtggcccctgccaacgacatctacaacgagcgcgagctgctgaacagcatgggcatctctcagcccaccgtggtgttcgtgtccaagaagggactgcagaaaatcctgaacgtgcagaagaagctgcccatcatccagaaaatcatcatcatggacagcaagaccgactaccagggcttccagagcatgtacaccttcgtgaccagccatctgccacctggcttcaacgagtacgacttcgtgcccgagagcttcgaccgggacaagacaatcgccctgatcatgaacagcagcggctctaccggactgcccaaaggtgttgccctgcctcatagaactgcctgcgtgcggtttagccacgccagagatcccatcttcggcaaccagatcatccccgacacagccatcctgagcgtggtgccttttcaccacggcttcggcatgttcaccacactgggctacctgatctgcggcttcagagtggtgctgatgtaccgcttcgaggaagaactgttcctgcggagcctgcaggactacaagatccagtctgctctgctggtgcctactctgttcagcttctttgccaagagcaccctgatcgataagtacgacctgagcaacctgcacgagatcgcctctggcggagcccctctgtctaaagaagtgggagaagccgtcgccaagcggttccatctgcctggcatcagacaaggctatggcctgaccgagacaaccagcgccattctgattacccctgagggcgacgataagcctggcgctgtgggaaaagtggtgccattcttcgaggccaaggtggtggatctggacaccggcaaaacactgggcgttaaccagaggggcgagctgtgtgttagaggccctatgatcatgagcggctacgtgaacaaccccgaggccacaaacgctctgatcgacaaggatggatggctgcacagcggcgacattgcctactgggacgaagatgagcacttcttcatcgtggaccggctgaagtccctgatcaagtacaagggctaccaggtggccccagccgagctggaatctattctgctgcaacaccccaacatcttcgatgccggcgttgcaggactgcccgatgatgatgctggcgaactgccagctgctgtggtggtgctggaacacggcaagaccatgaccgagaaagaaatcgtggactacgtggccagccaagtgaccaccgccaagaaactgagaggcggcgtggtgtttgtggacgaggtgccaaaaggcctgacaggcaagctggacgcccggaagatcagagagatcctgattaaggccaagaaaggcggcaagatcgccgtgtaatagctaactagacaaaacaccaaacaaacaagctgcgagccacggacttaaataattgagccttaaagaagaaattctttaagtggatgctctcaaactcagggaaacctaaatctagttatagacaaggcaatcctgagccaagccgaagtagtaattagtaagttaacaatagatgacttacaactaatcggaaggtgcagagactcgacgggagctaccctaacgtcaagacgagggtaaagagagagtccaattctcaaaaaaaacaaccaaaaaaaatctagatatcggatcccggg

SEQ ID NO: 3444 - DNA, 2831 bp, synthetic construct
  source 1..2831: mol_type = other DNA; note = Ana1.224
taatacgactcactatagggagaccctcgaaaaaaaacacaaacaccccaataggcagtagcgaaagctgcaagagaatgaaaatccgtggctcgcagcaaacaccaaacaaaacaaacacaaaccaacaaaaattaaaacagcctgtgggttgatcccacccacaggcccattgggcgctagcactctggtatcacggtacctttgtgcgcctgttttataccccctcccccaactgtaacttagaagtaacacacaccgatcaacagtcagcgtggcacaccagccacgttttgatcaagcacttctgttaccccggactgagtatcaatagactgctcacgcggttgaaggagaaagcgttcgttatccggccaactacttcgaaaaacctagtaacaccgtggaagttgcagagtgtttcgctcagcactaccccagtgtagatcaggtcgatgagtcaccgcattccccacgggcgaccgtggcggtggctgcgttggcggcctgcccatggggaaacccatgggacgctctaatacagacatggtgcgaagagtctattgagctagttggtagtcctccggcccctgaatgcggctaatcctaactgcggagcacacaccctcaagccagagggcagtgtgtcgtaacgggcaactctgcagcggaaccgactactttgggtgtccgtgtttcattttattcctatactggctgcttatggtgacaattgagagatcgttaccatatagctattggattggccatccggtgactaatagagctattatatatccctttgttgggtttataccacttagcttgaaagaggttaaaacattacaattcattgttaagttgaatacagcaaaatggaagatgccaagaacatcaagaagggccctgctccattctaccctctggaagatggaacagccggcgagcagctgcacaaggccatgaagagatatgccctggtgcctggcacaatcgccttcacagatgcccacatcgaggtggacatcacctacgccgagtacttcgagatgtctgtgcggctggccgaagctatgaagcgctacggcctgaacaccaaccaccggatcgtcgtgtgcagcgagaacagcctgcagttcttcatgcctgtgctgggcgccctgttcatcggagttgctgtggcccctgccaacgacatctacaacgagcgcgagctgctgaacagcatgggcatctctcagcccaccgtggtgttcgtgtccaagaagggactgcagaaaatcctgaacgtgcagaagaagctgcccatcatccagaaaatcatcatcatggacagcaagaccgactaccagggcttccagagcatgtacaccttcgtgaccagccatctgccacctggcttcaacgagtacgacttcgtgcccgagagcttcgaccgggacaagacaatcgccctgatcatgaacagcagcggctctaccggactgcccaaaggtgttgccctgcctcatagaactgcctgcgtgcggtttagccacgccagagatcccatcttcggcaaccagatcatccccgacacagccatcctgagcgtggtgccttttcaccacggcttcggcatgttcaccacactgggctacctgatctgcggcttcagagtggtgctgatgtaccgcttcgaggaagaactgttcctgcggagcctgcaggactacaagatccagtctgctctgctggtgcctactctgttcagcttctttgccaagagcaccctgatcgataagtacgacctgagcaacctgcacgagatcgcctctggcggagcccctctgtctaaagaagtgggagaagccgtcgccaagcggttccatctgcctggcatcagacaaggctatggcctgaccgagacaaccagcgccattctgattacccctgagggcgacgataagcctggcgctgtgggaaaagtggtgccattcttcgaggccaaggtggtggatctggacaccggcaaaacactgggcgttaaccagaggggcgagctgtgtgttagaggccctatgatcatgagcggctacgtgaacaaccccgaggccacaaacgctctgatcgacaaggatggatggctgcacagcggcgacattgcctactgggacgaagatgagcacttcttcatcgtggaccggctgaagtccctgatcaagtacaagggctaccaggtggccccagccgagctggaatctattctgctgcaacaccccaacatcttcgatgccggcgttgcaggactgcccgatgatgatgctggcgaactgccagctgctgtggtggtgctggaacacggcaagaccatgaccgagaaagaaatcgtggactacgtggccagccaagtgaccaccgccaagaaactgagaggcggcgtggtgtttgtggacgaggtgccaaaaggcctgacaggcaagctggacgcccggaagatcagagagatcctgattaaggccaagaaaggcggcaagatcgccgtgtaatagctaactagacaaaacaccaaacaaacaagctgcgagccacggacttaaataattgagccttaaagaagaaattctttaagtggatgctctcaaactcagggaaacctaaatctagttatagacaaggcaatcctgagccaagccgaagtagtaattagtaagttaacaatagatgacttacaactaatcggaaggtgcagagactcgacgggagctaccctaacgtcaagacgagggtaaagagagagtccaattctcaaagaaaaacaaccaaaaaaaatctagatatcggatcccggg

SEQ ID NO: 3445 - DNA, 2831 bp, synthetic construct
  source 1..2831: mol_type = other DNA; note = Ana1.225
taatacgactcactatagggagaccctcgaaaaaaaacacaaacacccaataggcagtagcgaaagctgcaagagaatgaaaatccgtggctcgcagcaaacaccaaacaaaacaaacacaaaccaacaaaaattaaaacagcctgtgggttgatcccacccacaggcccattgggcgctagcactctggtatcacggtacctttgtgcgcctgttttataccccctcccccaactgtaacttagaagtaacacacaccgatcaacagtcagcgtggcacaccagccacgttttgatcaagcacttctgttaccccggactgagtatcaatagactgctcacgcggttgaaggagaaagcgttcgttatccggccaactacttcgaaaaacctagtaacaccgtggaagttgcagagtgtttcgctcagcactaccccagtgtagatcaggtcgatgagtcaccgcattccccacgggcgaccgtggcggtggctgcgttggcggcctgcccatggggaaacccatgggacgctctaatacagacatggtgcgaagagtctattgagctagttggtagtcctccggcccctgaatgcggctaatcctaactgcggagcacacaccctcaagccagagggcagtgtgtcgtaacgggcaactctgcagcggaaccgactactttgggtgtccgtgtttcattttattcctatactggctgcttatggtgacaattgagagatcgttaccatatagctattggattggccatccggtgactaatagagctattatatatccctttgttgggtttataccacttagcttgaaagaggttaaaacattacaattcattgttaagttgaatacagcaaaatggaagatgccaagaacatcaagaagggccctgctccattctaccctctggaagatggaacagccggcgagcagctgcacaaggccatgaagagatatgccctggtgcctggcacaatcgccttcacagatgcccacatcgaggtggacatcacctacgccgagtacttcgagatgtctgtgcggctggccgaagctatgaagcgctacggcctgaacaccaaccaccggatcgtcgtgtgcagcgagaacagcctgcagttcttcatgcctgtgctgggcgccctgttcatcggagttgctgtggcccctgccaacgacatctacaacgagcgcgagctgctgaacagcatgggcatctctcagcccaccgtggtgttcgtgtccaagaagggactgcagaaaatcctgaacgtgcagaagaagctgcccatcatccagaaaatcatcatcatggacagcaagaccgactaccagggcttccagagcatgtacaccttcgtgaccagccatctgccacctggcttcaacgagtacgacttcgtgcccgagagcttcgaccgggacaagacaatcgccctgatcatgaacagcagcggctctaccggactgcccaaaggtgttgccctgcctcatagaactgcctgcgtgcggtttagccacgccagagatcccatcttcggcaaccagatcatccccgacacagccatcctgagcgtggtgccttttcaccacggcttcggcatgttcaccacactgggctacctgatctgcggcttcagagtggtgctgatgtaccgcttcgaggaagaactgttcctgcggagcctgcaggactacaagatccagtctgctctgctggtgcctactctgttcagcttctttgccaagagcaccctgatcgataagtacgacctgagcaacctgcacgagatcgcctctggcggagcccctctgtctaaagaagtgggagaagccgtcgccaagcggttccatctgcctggcatcagacaaggctatggcctgaccgagacaaccagcgccattctgattacccctgagggcgacgataagcctggcgctgtgggaaaagtggtgccattcttcgaggccaaggtggtggatctggacaccggcaaaacactgggcgttaaccagaggggcgagctgtgtgttagaggccctatgatcatgagcggctacgtgaacaaccccgaggccacaaacgctctgatcgacaaggatggatggctgcacagcggcgacattgcctactgggacgaagatgagcacttcttcatcgtggaccggctgaagtccctgatcaagtacaagggctaccaggtggccccagccgagctggaatctattctgctgcaacaccccaacatcttcgatgccggcgttgcaggactgcccgatgatgatgctggcgaactgccagctgctgtggtggtgctggaacacggcaagaccatgaccgagaaagaaatcgtggactacgtggccagccaagtgaccaccgccaagaaactgagaggcggcgtggtgtttgtggacgaggtgccaaaaggcctgacaggcaagctggacgcccggaagatcagagagatcctgattaaggccaagaaaggcggcaagatcgccgtgtaatagctaactagacaaaacaccaaacaaacaagctgcgagccacggacttaaataattgagccttaaagaagaaattctttaagtggatgctctcaaactcagggaaacctaaatctagttatagacaaggcaatcctgagccaagccgaagtagtaattagtaagttaacaatagatgacttacaactaatcggaaggtgcagagactcgacgggagctaccctaacgtcaagacgagggtaaagagagagtccaattctcaaagcaaaaacaaccaaaaaaaatctagatatcggatcccggg

SEQ ID NO: 3446 - DNA, 2831 bp, synthetic construct
  source 1..2831: mol_type = other DNA; note = Ana1.226
taatacgactcactatagggagaccctcgaaaaaaaacacaaacaccaataggcagtagcgaaagctgcaagagaatgaaaatccgtggctcgcagcaaacaccaaacaaaacaaacacaaaccaacaaaaattaaaacagcctgtgggttgatcccacccacaggcccattgggcgctagcactctggtatcacggtacctttgtgcgcctgttttataccccctcccccaactgtaacttagaagtaacacacaccgatcaacagtcagcgtggcacaccagccacgttttgatcaagcacttctgttaccccggactgagtatcaatagactgctcacgcggttgaaggagaaagcgttcgttatccggccaactacttcgaaaaacctagtaacaccgtggaagttgcagagtgtttcgctcagcactaccccagtgtagatcaggtcgatgagtcaccgcattccccacgggcgaccgtggcggtggctgcgttggcggcctgcccatggggaaacccatgggacgctctaatacagacatggtgcgaagagtctattgagctagttggtagtcctccggcccctgaatgcggctaatcctaactgcggagcacacaccctcaagccagagggcagtgtgtcgtaacgggcaactctgcagcggaaccgactactttgggtgtccgtgtttcattttattcctatactggctgcttatggtgacaattgagagatcgttaccatatagctattggattggccatccggtgactaatagagctattatatatccctttgttgggtttataccacttagcttgaaagaggttaaaacattacaattcattgttaagttgaatacagcaaaatggaagatgccaagaacatcaagaagggccctgctccattctaccctctggaagatggaacagccggcgagcagctgcacaaggccatgaagagatatgccctggtgcctggcacaatcgccttcacagatgcccacatcgaggtggacatcacctacgccgagtacttcgagatgtctgtgcggctggccgaagctatgaagcgctacggcctgaacaccaaccaccggatcgtcgtgtgcagcgagaacagcctgcagttcttcatgcctgtgctgggcgccctgttcatcggagttgctgtggcccctgccaacgacatctacaacgagcgcgagctgctgaacagcatgggcatctctcagcccaccgtggtgttcgtgtccaagaagggactgcagaaaatcctgaacgtgcagaagaagctgcccatcatccagaaaatcatcatcatggacagcaagaccgactaccagggcttccagagcatgtacaccttcgtgaccagccatctgccacctggcttcaacgagtacgacttcgtgcccgagagcttcgaccgggacaagacaatcgccctgatcatgaacagcagcggctctaccggactgcccaaaggtgttgccctgcctcatagaactgcctgcgtgcggtttagccacgccagagatcccatcttcggcaaccagatcatccccgacacagccatcctgagcgtggtgccttttcaccacggcttcggcatgttcaccacactgggctacctgatctgcggcttcagagtggtgctgatgtaccgcttcgaggaagaactgttcctgcggagcctgcaggactacaagatccagtctgctctgctggtgcctactctgttcagcttctttgccaagagcaccctgatcgataagtacgacctgagcaacctgcacgagatcgcctctggcggagcccctctgtctaaagaagtgggagaagccgtcgccaagcggttccatctgcctggcatcagacaaggctatggcctgaccgagacaaccagcgccattctgattacccctgagggcgacgataagcctggcgctgtgggaaaagtggtgccattcttcgaggccaaggtggtggatctggacaccggcaaaacactgggcgttaaccagaggggcgagctgtgtgttagaggccctatgatcatgagcggctacgtgaacaaccccgaggccacaaacgctctgatcgacaaggatggatggctgcacagcggcgacattgcctactgggacgaagatgagcacttcttcatcgtggaccggctgaagtccctgatcaagtacaagggctaccaggtggccccagccgagctggaatctattctgctgcaacaccccaacatcttcgatgccggcgttgcaggactgcccgatgatgatgctggcgaactgccagctgctgtggtggtgctggaacacggcaagaccatgaccgagaaagaaatcgtggactacgtggccagccaagtgaccaccgccaagaaactgagaggcggcgtggtgtttgtggacgaggtgccaaaaggcctgacaggcaagctggacgcccggaagatcagagagatcctgattaaggccaagaaaggcggcaagatcgccgtgtaatagctaactagacaaaacaccaaacaaacaagctgcgagccacggacttaaataattgagccttaaagaagaaattctttaagtggatgctctcaaactcagggaaacctaaatctagttatagacaaggcaatcctgagccaagccgaagtagtaattagtaagttaacaatagatgacttacaactaatcggaaggtgcagagactcgacgggagctaccctaacgtcaagacgagggtaaagagagagtccaattctcaaagccaaaaacaaccaaaaaaaatctagatatcggatcccggg

SEQ ID NO: 3447 - DNA, 2831 bp, synthetic construct
  source 1..2831: mol_type = other DNA; note = Ana1.227
taatacgactcactatagggagaccctcgaaaaaaaacacaaacaccataggcagtagcgaaagctgcaagagaatgaaaatccgtggctcgcagcaaacaccaaacaaaacaaacacaaaccaacaaaaattaaaacagcctgtgggttgatcccacccacaggcccattgggcgctagcactctggtatcacggtacctttgtgcgcctgttttataccccctcccccaactgtaacttagaagtaacacacaccgatcaacagtcagcgtggcacaccagccacgttttgatcaagcacttctgttaccccggactgagtatcaatagactgctcacgcggttgaaggagaaagcgttcgttatccggccaactacttcgaaaaacctagtaacaccgtggaagttgcagagtgtttcgctcagcactaccccagtgtagatcaggtcgatgagtcaccgcattccccacgggcgaccgtggcggtggctgcgttggcggcctgcccatggggaaacccatgggacgctctaatacagacatggtgcgaagagtctattgagctagttggtagtcctccggcccctgaatgcggctaatcctaactgcggagcacacaccctcaagccagagggcagtgtgtcgtaacgggcaactctgcagcggaaccgactactttgggtgtccgtgtttcattttattcctatactggctgcttatggtgacaattgagagatcgttaccatatagctattggattggccatccggtgactaatagagctattatatatccctttgttgggtttataccacttagcttgaaagaggttaaaacattacaattcattgttaagttgaatacagcaaaatggaagatgccaagaacatcaagaagggccctgctccattctaccctctggaagatggaacagccggcgagcagctgcacaaggccatgaagagatatgccctggtgcctggcacaatcgccttcacagatgcccacatcgaggtggacatcacctacgccgagtacttcgagatgtctgtgcggctggccgaagctatgaagcgctacggcctgaacaccaaccaccggatcgtcgtgtgcagcgagaacagcctgcagttcttcatgcctgtgctgggcgccctgttcatcggagttgctgtggcccctgccaacgacatctacaacgagcgcgagctgctgaacagcatgggcatctctcagcccaccgtggtgttcgtgtccaagaagggactgcagaaaatcctgaacgtgcagaagaagctgcccatcatccagaaaatcatcatcatggacagcaagaccgactaccagggcttccagagcatgtacaccttcgtgaccagccatctgccacctggcttcaacgagtacgacttcgtgcccgagagcttcgaccgggacaagacaatcgccctgatcatgaacagcagcggctctaccggactgcccaaaggtgttgccctgcctcatagaactgcctgcgtgcggtttagccacgccagagatcccatcttcggcaaccagatcatccccgacacagccatcctgagcgtggtgccttttcaccacggcttcggcatgttcaccacactgggctacctgatctgcggcttcagagtggtgctgatgtaccgcttcgaggaagaactgttcctgcggagcctgcaggactacaagatccagtctgctctgctggtgcctactctgttcagcttctttgccaagagcaccctgatcgataagtacgacctgagcaacctgcacgagatcgcctctggcggagcccctctgtctaaagaagtgggagaagccgtcgccaagcggttccatctgcctggcatcagacaaggctatggcctgaccgagacaaccagcgccattctgattacccctgagggcgacgataagcctggcgctgtgggaaaagtggtgccattcttcgaggccaaggtggtggatctggacaccggcaaaacactgggcgttaaccagaggggcgagctgtgtgttagaggccctatgatcatgagcggctacgtgaacaaccccgaggccacaaacgctctgatcgacaaggatggatggctgcacagcggcgacattgcctactgggacgaagatgagcacttcttcatcgtggaccggctgaagtccctgatcaagtacaagggctaccaggtggccccagccgagctggaatctattctgctgcaacaccccaacatcttcgatgccggcgttgcaggactgcccgatgatgatgctggcgaactgccagctgctgtggtggtgctggaacacggcaagaccatgaccgagaaagaaatcgtggactacgtggccagccaagtgaccaccgccaagaaactgagaggcggcgtggtgtttgtggacgaggtgccaaaaggcctgacaggcaagctggacgcccggaagatcagagagatcctgattaaggccaagaaaggcggcaagatcgccgtgtaatagctaactagacaaaacaccaaacaaacaagctgcgagccacggacttaaataattgagccttaaagaagaaattctttaagtggatgctctcaaactcagggaaacctaaatctagttatagacaaggcaatcctgagccaagccgaagtagtaattagtaagttaacaatagatgacttacaactaatcggaaggtgcagagactcgacgggagctaccctaacgtcaagacgagggtaaagagagagtccaattctcaaagccaaaaaacaaccaaaaaaaatctagatatcggatcccggg

SEQ ID NO: 3448 - DNA, 2831 bp, synthetic construct
  source 1..2831: mol_type = other DNA; note = Ana1.228
taatacgactcactatagggagaccctcgaaaaaaaacacaaacacctaggcagtagcgaaagctgcaagagaatgaaaatccgtggctcgcagcaaacaccaaacaaaacaaacacaaaccaacaaaaattaaaacagcctgtgggttgatcccacccacaggcccattgggcgctagcactctggtatcacggtacctttgtgcgcctgttttataccccctcccccaactgtaacttagaagtaacacacaccgatcaacagtcagcgtggcacaccagccacgttttgatcaagcacttctgttaccccggactgagtatcaatagactgctcacgcggttgaaggagaaagcgttcgttatccggccaactacttcgaaaaacctagtaacaccgtggaagttgcagagtgtttcgctcagcactaccccagtgtagatcaggtcgatgagtcaccgcattccccacgggcgaccgtggcggtggctgcgttggcggcctgcccatggggaaacccatgggacgctctaatacagacatggtgcgaagagtctattgagctagttggtagtcctccggcccctgaatgcggctaatcctaactgcggagcacacaccctcaagccagagggcagtgtgtcgtaacgggcaactctgcagcggaaccgactactttgggtgtccgtgtttcattttattcctatactggctgcttatggtgacaattgagagatcgttaccatatagctattggattggccatccggtgactaatagagctattatatatccctttgttgggtttataccacttagcttgaaagaggttaaaacattacaattcattgttaagttgaatacagcaaaatggaagatgccaagaacatcaagaagggccctgctccattctaccctctggaagatggaacagccggcgagcagctgcacaaggccatgaagagatatgccctggtgcctggcacaatcgccttcacagatgcccacatcgaggtggacatcacctacgccgagtacttcgagatgtctgtgcggctggccgaagctatgaagcgctacggcctgaacaccaaccaccggatcgtcgtgtgcagcgagaacagcctgcagttcttcatgcctgtgctgggcgccctgttcatcggagttgctgtggcccctgccaacgacatctacaacgagcgcgagctgctgaacagcatgggcatctctcagcccaccgtggtgttcgtgtccaagaagggactgcagaaaatcctgaacgtgcagaagaagctgcccatcatccagaaaatcatcatcatggacagcaagaccgactaccagggcttccagagcatgtacaccttcgtgaccagccatctgccacctggcttcaacgagtacgacttcgtgcccgagagcttcgaccgggacaagacaatcgccctgatcatgaacagcagcggctctaccggactgcccaaaggtgttgccctgcctcatagaactgcctgcgtgcggtttagccacgccagagatcccatcttcggcaaccagatcatccccgacacagccatcctgagcgtggtgccttttcaccacggcttcggcatgttcaccacactgggctacctgatctgcggcttcagagtggtgctgatgtaccgcttcgaggaagaactgttcctgcggagcctgcaggactacaagatccagtctgctctgctggtgcctactctgttcagcttctttgccaagagcaccctgatcgataagtacgacctgagcaacctgcacgagatcgcctctggcggagcccctctgtctaaagaagtgggagaagccgtcgccaagcggttccatctgcctggcatcagacaaggctatggcctgaccgagacaaccagcgccattctgattacccctgagggcgacgataagcctggcgctgtgggaaaagtggtgccattcttcgaggccaaggtggtggatctggacaccggcaaaacactgggcgttaaccagaggggcgagctgtgtgttagaggccctatgatcatgagcggctacgtgaacaaccccgaggccacaaacgctctgatcgacaaggatggatggctgcacagcggcgacattgcctactgggacgaagatgagcacttcttcatcgtggaccggctgaagtccctgatcaagtacaagggctaccaggtggccccagccgagctggaatctattctgctgcaacaccccaacatcttcgatgccggcgttgcaggactgcccgatgatgatgctggcgaactgccagctgctgtggtggtgctggaacacggcaagaccatgaccgagaaagaaatcgtggactacgtggccagccaagtgaccaccgccaagaaactgagaggcggcgtggtgtttgtggacgaggtgccaaaaggcctgacaggcaagctggacgcccggaagatcagagagatcctgattaaggccaagaaaggcggcaagatcgccgtgtaatagctaactagacaaaacaccaaacaaacaagctgcgagccacggacttaaataattgagccttaaagaagaaattctttaagtggatgctctcaaactcagggaaacctaaatctagttatagacaaggcaatcctgagccaagccgaagtagtaattagtaagttaacaatagatgacttacaactaatcggaaggtgcagagactcgacgggagctaccctaacgtcaagacgagggtaaagagagagtccaattctcaaagccaaaaaaacaaccaaaaaaaatctagatatcggatcccggg

SEQ ID NO: 3449 - DNA, 2831 bp, synthetic construct
  source 1..2831: mol_type = other DNA; note = Ana1.229
taatacgactcactatagggagaccctcgaaaaaaaacacaaacaccaggcagtagcgaaagctgcaagagaatgaaaatccgtggctcgcagcaaacaccaaacaaaacaaacacaaaccaacaaaaattaaaacagcctgtgggttgatcccacccacaggcccattgggcgctagcactctggtatcacggtacctttgtgcgcctgttttataccccctcccccaactgtaacttagaagtaacacacaccgatcaacagtcagcgtggcacaccagccacgttttgatcaagcacttctgttaccccggactgagtatcaatagactgctcacgcggttgaaggagaaagcgttcgttatccggccaactacttcgaaaaacctagtaacaccgtggaagttgcagagtgtttcgctcagcactaccccagtgtagatcaggtcgatgagtcaccgcattccccacgggcgaccgtggcggtggctgcgttggcggcctgcccatggggaaacccatgggacgctctaatacagacatggtgcgaagagtctattgagctagttggtagtcctccggcccctgaatgcggctaatcctaactgcggagcacacaccctcaagccagagggcagtgtgtcgtaacgggcaactctgcagcggaaccgactactttgggtgtccgtgtttcattttattcctatactggctgcttatggtgacaattgagagatcgttaccatatagctattggattggccatccggtgactaatagagctattatatatccctttgttgggtttataccacttagcttgaaagaggttaaaacattacaattcattgttaagttgaatacagcaaaatggaagatgccaagaacatcaagaagggccctgctccattctaccctctggaagatggaacagccggcgagcagctgcacaaggccatgaagagatatgccctggtgcctggcacaatcgccttcacagatgcccacatcgaggtggacatcacctacgccgagtacttcgagatgtctgtgcggctggccgaagctatgaagcgctacggcctgaacaccaaccaccggatcgtcgtgtgcagcgagaacagcctgcagttcttcatgcctgtgctgggcgccctgttcatcggagttgctgtggcccctgccaacgacatctacaacgagcgcgagctgctgaacagcatgggcatctctcagcccaccgtggtgttcgtgtccaagaagggactgcagaaaatcctgaacgtgcagaagaagctgcccatcatccagaaaatcatcatcatggacagcaagaccgactaccagggcttccagagcatgtacaccttcgtgaccagccatctgccacctggcttcaacgagtacgacttcgtgcccgagagcttcgaccgggacaagacaatcgccctgatcatgaacagcagcggctctaccggactgcccaaaggtgttgccctgcctcatagaactgcctgcgtgcggtttagccacgccagagatcccatcttcggcaaccagatcatccccgacacagccatcctgagcgtggtgccttttcaccacggcttcggcatgttcaccacactgggctacctgatctgcggcttcagagtggtgctgatgtaccgcttcgaggaagaactgttcctgcggagcctgcaggactacaagatccagtctgctctgctggtgcctactctgttcagcttctttgccaagagcaccctgatcgataagtacgacctgagcaacctgcacgagatcgcctctggcggagcccctctgtctaaagaagtgggagaagccgtcgccaagcggttccatctgcctggcatcagacaaggctatggcctgaccgagacaaccagcgccattctgattacccctgagggcgacgataagcctggcgctgtgggaaaagtggtgccattcttcgaggccaaggtggtggatctggacaccggcaaaacactgggcgttaaccagaggggcgagctgtgtgttagaggccctatgatcatgagcggctacgtgaacaaccccgaggccacaaacgctctgatcgacaaggatggatggctgcacagcggcgacattgcctactgggacgaagatgagcacttcttcatcgtggaccggctgaagtccctgatcaagtacaagggctaccaggtggccccagccgagctggaatctattctgctgcaacaccccaacatcttcgatgccggcgttgcaggactgcccgatgatgatgctggcgaactgccagctgctgtggtggtgctggaacacggcaagaccatgaccgagaaagaaatcgtggactacgtggccagccaagtgaccaccgccaagaaactgagaggcggcgtggtgtttgtggacgaggtgccaaaaggcctgacaggcaagctggacgcccggaagatcagagagatcctgattaaggccaagaaaggcggcaagatcgccgtgtaatagctaactagacaaaacaccaaacaaacaagctgcgagccacggacttaaataattgagccttaaagaagaaattctttaagtggatgctctcaaactcagggaaacctaaatctagttatagacaaggcaatcctgagccaagccgaagtagtaattagtaagttaacaatagatgacttacaactaatcggaaggtgcagagactcgacgggagctaccctaacgtcaagacgagggtaaagagagagtccaattctcaaagccaataaaaacaaccaaaaaaaatctagatatcggatcccggg

SEQ ID NO: 3450 - DNA, 2831 bp, synthetic construct
  source 1..2831: mol_type = other DNA; note = Ana1.230
taatacgactcactatagggagaccctcgaaaaaaaacacaaacaccggcagtagcgaaagctgcaagagaatgaaaatccgtggctcgcagcaaacaccaaacaaaacaaacacaaaccaacaaaaattaaaacagcctgtgggttgatcccacccacaggcccattgggcgctagcactctggtatcacggtacctttgtgcgcctgttttataccccctcccccaactgtaacttagaagtaacacacaccgatcaacagtcagcgtggcacaccagccacgttttgatcaagcacttctgttaccccggactgagtatcaatagactgctcacgcggttgaaggagaaagcgttcgttatccggccaactacttcgaaaaacctagtaacaccgtggaagttgcagagtgtttcgctcagcactaccccagtgtagatcaggtcgatgagtcaccgcattccccacgggcgaccgtggcggtggctgcgttggcggcctgcccatggggaaacccatgggacgctctaatacagacatggtgcgaagagtctattgagctagttggtagtcctccggcccctgaatgcggctaatcctaactgcggagcacacaccctcaagccagagggcagtgtgtcgtaacgggcaactctgcagcggaaccgactactttgggtgtccgtgtttcattttattcctatactggctgcttatggtgacaattgagagatcgttaccatatagctattggattggccatccggtgactaatagagctattatatatccctttgttgggtttataccacttagcttgaaagaggttaaaacattacaattcattgttaagttgaatacagcaaaatggaagatgccaagaacatcaagaagggccctgctccattctaccctctggaagatggaacagccggcgagcagctgcacaaggccatgaagagatatgccctggtgcctggcacaatcgccttcacagatgcccacatcgaggtggacatcacctacgccgagtacttcgagatgtctgtgcggctggccgaagctatgaagcgctacggcctgaacaccaaccaccggatcgtcgtgtgcagcgagaacagcctgcagttcttcatgcctgtgctgggcgccctgttcatcggagttgctgtggcccctgccaacgacatctacaacgagcgcgagctgctgaacagcatgggcatctctcagcccaccgtggtgttcgtgtccaagaagggactgcagaaaatcctgaacgtgcagaagaagctgcccatcatccagaaaatcatcatcatggacagcaagaccgactaccagggcttccagagcatgtacaccttcgtgaccagccatctgccacctggcttcaacgagtacgacttcgtgcccgagagcttcgaccgggacaagacaatcgccctgatcatgaacagcagcggctctaccggactgcccaaaggtgttgccctgcctcatagaactgcctgcgtgcggtttagccacgccagagatcccatcttcggcaaccagatcatccccgacacagccatcctgagcgtggtgccttttcaccacggcttcggcatgttcaccacactgggctacctgatctgcggcttcagagtggtgctgatgtaccgcttcgaggaagaactgttcctgcggagcctgcaggactacaagatccagtctgctctgctggtgcctactctgttcagcttctttgccaagagcaccctgatcgataagtacgacctgagcaacctgcacgagatcgcctctggcggagcccctctgtctaaagaagtgggagaagccgtcgccaagcggttccatctgcctggcatcagacaaggctatggcctgaccgagacaaccagcgccattctgattacccctgagggcgacgataagcctggcgctgtgggaaaagtggtgccattcttcgaggccaaggtggtggatctggacaccggcaaaacactgggcgttaaccagaggggcgagctgtgtgttagaggccctatgatcatgagcggctacgtgaacaaccccgaggccacaaacgctctgatcgacaaggatggatggctgcacagcggcgacattgcctactgggacgaagatgagcacttcttcatcgtggaccggctgaagtccctgatcaagtacaagggctaccaggtggccccagccgagctggaatctattctgctgcaacaccccaacatcttcgatgccggcgttgcaggactgcccgatgatgatgctggcgaactgccagctgctgtggtggtgctggaacacggcaagaccatgaccgagaaagaaatcgtggactacgtggccagccaagtgaccaccgccaagaaactgagaggcggcgtggtgtttgtggacgaggtgccaaaaggcctgacaggcaagctggacgcccggaagatcagagagatcctgattaaggccaagaaaggcggcaagatcgccgtgtaatagctaactagacaaaacaccaaacaaacaagctgcgagccacggacttaaataattgagccttaaagaagaaattctttaagtggatgctctcaaactcagggaaacctaaatctagttatagacaaggcaatcctgagccaagccgaagtagtaattagtaagttaacaatagatgacttacaactaatcggaaggtgcagagactcgacgggagctaccctaacgtcaagacgagggtaaagagagagtccaattctcaaagccaataaaaaacaaccaaaaaaaatctagatatcggatcccggg

SEQ ID NO: 3451 - DNA, 2831 bp, synthetic construct
  source 1..2831: mol_type = other DNA; note = Ana1.231
taatacgactcactatagggagaccctcgaaaaaaaacacaaacaccgcagtagcgaaagctgcaagagaatgaaaatccgtggctcgcagcaaacaccaaacaaaacaaacacaaaccaacaaaaattaaaacagcctgtgggttgatcccacccacaggcccattgggcgctagcactctggtatcacggtacctttgtgcgcctgttttataccccctcccccaactgtaacttagaagtaacacacaccgatcaacagtcagcgtggcacaccagccacgttttgatcaagcacttctgttaccccggactgagtatcaatagactgctcacgcggttgaaggagaaagcgttcgttatccggccaactacttcgaaaaacctagtaacaccgtggaagttgcagagtgtttcgctcagcactaccccagtgtagatcaggtcgatgagtcaccgcattccccacgggcgaccgtggcggtggctgcgttggcggcctgcccatggggaaacccatgggacgctctaatacagacatggtgcgaagagtctattgagctagttggtagtcctccggcccctgaatgcggctaatcctaactgcggagcacacaccctcaagccagagggcagtgtgtcgtaacgggcaactctgcagcggaaccgactactttgggtgtccgtgtttcattttattcctatactggctgcttatggtgacaattgagagatcgttaccatatagctattggattggccatccggtgactaatagagctattatatatccctttgttgggtttataccacttagcttgaaagaggttaaaacattacaattcattgttaagttgaatacagcaaaatggaagatgccaagaacatcaagaagggccctgctccattctaccctctggaagatggaacagccggcgagcagctgcacaaggccatgaagagatatgccctggtgcctggcacaatcgccttcacagatgcccacatcgaggtggacatcacctacgccgagtacttcgagatgtctgtgcggctggccgaagctatgaagcgctacggcctgaacaccaaccaccggatcgtcgtgtgcagcgagaacagcctgcagttcttcatgcctgtgctgggcgccctgttcatcggagttgctgtggcccctgccaacgacatctacaacgagcgcgagctgctgaacagcatgggcatctctcagcccaccgtggtgttcgtgtccaagaagggactgcagaaaatcctgaacgtgcagaagaagctgcccatcatccagaaaatcatcatcatggacagcaagaccgactaccagggcttccagagcatgtacaccttcgtgaccagccatctgccacctggcttcaacgagtacgacttcgtgcccgagagcttcgaccgggacaagacaatcgccctgatcatgaacagcagcggctctaccggactgcccaaaggtgttgccctgcctcatagaactgcctgcgtgcggtttagccacgccagagatcccatcttcggcaaccagatcatccccgacacagccatcctgagcgtggtgccttttcaccacggcttcggcatgttcaccacactgggctacctgatctgcggcttcagagtggtgctgatgtaccgcttcgaggaagaactgttcctgcggagcctgcaggactacaagatccagtctgctctgctggtgcctactctgttcagcttctttgccaagagcaccctgatcgataagtacgacctgagcaacctgcacgagatcgcctctggcggagcccctctgtctaaagaagtgggagaagccgtcgccaagcggttccatctgcctggcatcagacaaggctatggcctgaccgagacaaccagcgccattctgattacccctgagggcgacgataagcctggcgctgtgggaaaagtggtgccattcttcgaggccaaggtggtggatctggacaccggcaaaacactgggcgttaaccagaggggcgagctgtgtgttagaggccctatgatcatgagcggctacgtgaacaaccccgaggccacaaacgctctgatcgacaaggatggatggctgcacagcggcgacattgcctactgggacgaagatgagcacttcttcatcgtggaccggctgaagtccctgatcaagtacaagggctaccaggtggccccagccgagctggaatctattctgctgcaacaccccaacatcttcgatgccggcgttgcaggactgcccgatgatgatgctggcgaactgccagctgctgtggtggtgctggaacacggcaagaccatgaccgagaaagaaatcgtggactacgtggccagccaagtgaccaccgccaagaaactgagaggcggcgtggtgtttgtggacgaggtgccaaaaggcctgacaggcaagctggacgcccggaagatcagagagatcctgattaaggccaagaaaggcggcaagatcgccgtgtaatagctaactagacaaaacaccaaacaaacaagctgcgagccacggacttaaataattgagccttaaagaagaaattctttaagtggatgctctcaaactcagggaaacctaaatctagttatagacaaggcaatcctgagccaagccgaagtagtaattagtaagttaacaatagatgacttacaactaatcggaaggtgcagagactcgacgggagctaccctaacgtcaagacgagggtaaagagagagtccaattctcaaagccaatagaaaaacaaccaaaaaaaatctagatatcggatcccggg

SEQ ID NO: 3452 - DNA, 2831 bp, synthetic construct
  source 1..2831: mol_type = other DNA; note = Ana1.232
taatacgactcactatagggagaccctcgaaaaaaaacacaaacacccagtagcgaaagctgcaagagaatgaaaatccgtggctcgcagcaaacaccaaacaaaacaaacacaaaccaacaaaaattaaaacagcctgtgggttgatcccacccacaggcccattgggcgctagcactctggtatcacggtacctttgtgcgcctgttttataccccctcccccaactgtaacttagaagtaacacacaccgatcaacagtcagcgtggcacaccagccacgttttgatcaagcacttctgttaccccggactgagtatcaatagactgctcacgcggttgaaggagaaagcgttcgttatccggccaactacttcgaaaaacctagtaacaccgtggaagttgcagagtgtttcgctcagcactaccccagtgtagatcaggtcgatgagtcaccgcattccccacgggcgaccgtggcggtggctgcgttggcggcctgcccatggggaaacccatgggacgctctaatacagacatggtgcgaagagtctattgagctagttggtagtcctccggcccctgaatgcggctaatcctaactgcggagcacacaccctcaagccagagggcagtgtgtcgtaacgggcaactctgcagcggaaccgactactttgggtgtccgtgtttcattttattcctatactggctgcttatggtgacaattgagagatcgttaccatatagctattggattggccatccggtgactaatagagctattatatatccctttgttgggtttataccacttagcttgaaagaggttaaaacattacaattcattgttaagttgaatacagcaaaatggaagatgccaagaacatcaagaagggccctgctccattctaccctctggaagatggaacagccggcgagcagctgcacaaggccatgaagagatatgccctggtgcctggcacaatcgccttcacagatgcccacatcgaggtggacatcacctacgccgagtacttcgagatgtctgtgcggctggccgaagctatgaagcgctacggcctgaacaccaaccaccggatcgtcgtgtgcagcgagaacagcctgcagttcttcatgcctgtgctgggcgccctgttcatcggagttgctgtggcccctgccaacgacatctacaacgagcgcgagctgctgaacagcatgggcatctctcagcccaccgtggtgttcgtgtccaagaagggactgcagaaaatcctgaacgtgcagaagaagctgcccatcatccagaaaatcatcatcatggacagcaagaccgactaccagggcttccagagcatgtacaccttcgtgaccagccatctgccacctggcttcaacgagtacgacttcgtgcccgagagcttcgaccgggacaagacaatcgccctgatcatgaacagcagcggctctaccggactgcccaaaggtgttgccctgcctcatagaactgcctgcgtgcggtttagccacgccagagatcccatcttcggcaaccagatcatccccgacacagccatcctgagcgtggtgccttttcaccacggcttcggcatgttcaccacactgggctacctgatctgcggcttcagagtggtgctgatgtaccgcttcgaggaagaactgttcctgcggagcctgcaggactacaagatccagtctgctctgctggtgcctactctgttcagcttctttgccaagagcaccctgatcgataagtacgacctgagcaacctgcacgagatcgcctctggcggagcccctctgtctaaagaagtgggagaagccgtcgccaagcggttccatctgcctggcatcagacaaggctatggcctgaccgagacaaccagcgccattctgattacccctgagggcgacgataagcctggcgctgtgggaaaagtggtgccattcttcgaggccaaggtggtggatctggacaccggcaaaacactgggcgttaaccagaggggcgagctgtgtgttagaggccctatgatcatgagcggctacgtgaacaaccccgaggccacaaacgctctgatcgacaaggatggatggctgcacagcggcgacattgcctactgggacgaagatgagcacttcttcatcgtggaccggctgaagtccctgatcaagtacaagggctaccaggtggccccagccgagctggaatctattctgctgcaacaccccaacatcttcgatgccggcgttgcaggactgcccgatgatgatgctggcgaactgccagctgctgtggtggtgctggaacacggcaagaccatgaccgagaaagaaatcgtggactacgtggccagccaagtgaccaccgccaagaaactgagaggcggcgtggtgtttgtggacgaggtgccaaaaggcctgacaggcaagctggacgcccggaagatcagagagatcctgattaaggccaagaaaggcggcaagatcgccgtgtaatagctaactagacaaaacaccaaacaaacaagctgcgagccacggacttaaataattgagccttaaagaagaaattctttaagtggatgctctcaaactcagggaaacctaaatctagttatagacaaggcaatcctgagccaagccgaagtagtaattagtaagttaacaatagatgacttacaactaatcggaaggtgcagagactcgacgggagctaccctaacgtcaagacgagggtaaagagagagtccaattctcaaagccaataggaaaaacaaccaaaaaaaatctagatatcggatcccggg

SEQ ID NO: 3453 - DNA, 2831 bp, synthetic construct
  source 1..2831: mol_type = other DNA; note = Ana1.233
taatacgactcactatagggagaccctcgaaaaaaaacacaaacaccagtagcgaaagctgcaagagaatgaaaatccgtggctcgcagcaaacaccaaacaaaacaaacacaaaccaacaaaaattaaaacagcctgtgggttgatcccacccacaggcccattgggcgctagcactctggtatcacggtacctttgtgcgcctgttttataccccctcccccaactgtaacttagaagtaacacacaccgatcaacagtcagcgtggcacaccagccacgttttgatcaagcacttctgttaccccggactgagtatcaatagactgctcacgcggttgaaggagaaagcgttcgttatccggccaactacttcgaaaaacctagtaacaccgtggaagttgcagagtgtttcgctcagcactaccccagtgtagatcaggtcgatgagtcaccgcattccccacgggcgaccgtggcggtggctgcgttggcggcctgcccatggggaaacccatgggacgctctaatacagacatggtgcgaagagtctattgagctagttggtagtcctccggcccctgaatgcggctaatcctaactgcggagcacacaccctcaagccagagggcagtgtgtcgtaacgggcaactctgcagcggaaccgactactttgggtgtccgtgtttcattttattcctatactggctgcttatggtgacaattgagagatcgttaccatatagctattggattggccatccggtgactaatagagctattatatatccctttgttgggtttataccacttagcttgaaagaggttaaaacattacaattcattgttaagttgaatacagcaaaatggaagatgccaagaacatcaagaagggccctgctccattctaccctctggaagatggaacagccggcgagcagctgcacaaggccatgaagagatatgccctggtgcctggcacaatcgccttcacagatgcccacatcgaggtggacatcacctacgccgagtacttcgagatgtctgtgcggctggccgaagctatgaagcgctacggcctgaacaccaaccaccggatcgtcgtgtgcagcgagaacagcctgcagttcttcatgcctgtgctgggcgccctgttcatcggagttgctgtggcccctgccaacgacatctacaacgagcgcgagctgctgaacagcatgggcatctctcagcccaccgtggtgttcgtgtccaagaagggactgcagaaaatcctgaacgtgcagaagaagctgcccatcatccagaaaatcatcatcatggacagcaagaccgactaccagggcttccagagcatgtacaccttcgtgaccagccatctgccacctggcttcaacgagtacgacttcgtgcccgagagcttcgaccgggacaagacaatcgccctgatcatgaacagcagcggctctaccggactgcccaaaggtgttgccctgcctcatagaactgcctgcgtgcggtttagccacgccagagatcccatcttcggcaaccagatcatccccgacacagccatcctgagcgtggtgccttttcaccacggcttcggcatgttcaccacactgggctacctgatctgcggcttcagagtggtgctgatgtaccgcttcgaggaagaactgttcctgcggagcctgcaggactacaagatccagtctgctctgctggtgcctactctgttcagcttctttgccaagagcaccctgatcgataagtacgacctgagcaacctgcacgagatcgcctctggcggagcccctctgtctaaagaagtgggagaagccgtcgccaagcggttccatctgcctggcatcagacaaggctatggcctgaccgagacaaccagcgccattctgattacccctgagggcgacgataagcctggcgctgtgggaaaagtggtgccattcttcgaggccaaggtggtggatctggacaccggcaaaacactgggcgttaaccagaggggcgagctgtgtgttagaggccctatgatcatgagcggctacgtgaacaaccccgaggccacaaacgctctgatcgacaaggatggatggctgcacagcggcgacattgcctactgggacgaagatgagcacttcttcatcgtggaccggctgaagtccctgatcaagtacaagggctaccaggtggccccagccgagctggaatctattctgctgcaacaccccaacatcttcgatgccggcgttgcaggactgcccgatgatgatgctggcgaactgccagctgctgtggtggtgctggaacacggcaagaccatgaccgagaaagaaatcgtggactacgtggccagccaagtgaccaccgccaagaaactgagaggcggcgtggtgtttgtggacgaggtgccaaaaggcctgacaggcaagctggacgcccggaagatcagagagatcctgattaaggccaagaaaggcggcaagatcgccgtgtaatagctaactagacaaaacaccaaacaaacaagctgcgagccacggacttaaataattgagccttaaagaagaaattctttaagtggatgctctcaaactcagggaaacctaaatctagttatagacaaggcaatcctgagccaagccgaagtagtaattagtaagttaacaatagatgacttacaactaatcggaaggtgcagagactcgacgggagctaccctaacgtcaagacgagggtaaagagagagtccaattctcaaagccaataggcaaaaacaaccaaaaaaaatctagatatcggatcccggg

SEQ ID NO: 3454 - DNA, 2831 bp, synthetic construct
  source 1..2831: mol_type = other DNA; note = Ana1.234
taatacgactcactatagggagaccctcgaaaaaaaacacaaacaccgtagcgaaagctgcaagagaatgaaaatccgtggctcgcagcaaacaccaaacaaaacaaacacaaaccaacaaaaattaaaacagcctgtgggttgatcccacccacaggcccattgggcgctagcactctggtatcacggtacctttgtgcgcctgttttataccccctcccccaactgtaacttagaagtaacacacaccgatcaacagtcagcgtggcacaccagccacgttttgatcaagcacttctgttaccccggactgagtatcaatagactgctcacgcggttgaaggagaaagcgttcgttatccggccaactacttcgaaaaacctagtaacaccgtggaagttgcagagtgtttcgctcagcactaccccagtgtagatcaggtcgatgagtcaccgcattccccacgggcgaccgtggcggtggctgcgttggcggcctgcccatggggaaacccatgggacgctctaatacagacatggtgcgaagagtctattgagctagttggtagtcctccggcccctgaatgcggctaatcctaactgcggagcacacaccctcaagccagagggcagtgtgtcgtaacgggcaactctgcagcggaaccgactactttgggtgtccgtgtttcattttattcctatactggctgcttatggtgacaattgagagatcgttaccatatagctattggattggccatccggtgactaatagagctattatatatccctttgttgggtttataccacttagcttgaaagaggttaaaacattacaattcattgttaagttgaatacagcaaaatggaagatgccaagaacatcaagaagggccctgctccattctaccctctggaagatggaacagccggcgagcagctgcacaaggccatgaagagatatgccctggtgcctggcacaatcgccttcacagatgcccacatcgaggtggacatcacctacgccgagtacttcgagatgtctgtgcggctggccgaagctatgaagcgctacggcctgaacaccaaccaccggatcgtcgtgtgcagcgagaacagcctgcagttcttcatgcctgtgctgggcgccctgttcatcggagttgctgtggcccctgccaacgacatctacaacgagcgcgagctgctgaacagcatgggcatctctcagcccaccgtggtgttcgtgtccaagaagggactgcagaaaatcctgaacgtgcagaagaagctgcccatcatccagaaaatcatcatcatggacagcaagaccgactaccagggcttccagagcatgtacaccttcgtgaccagccatctgccacctggcttcaacgagtacgacttcgtgcccgagagcttcgaccgggacaagacaatcgccctgatcatgaacagcagcggctctaccggactgcccaaaggtgttgccctgcctcatagaactgcctgcgtgcggtttagccacgccagagatcccatcttcggcaaccagatcatccccgacacagccatcctgagcgtggtgccttttcaccacggcttcggcatgttcaccacactgggctacctgatctgcggcttcagagtggtgctgatgtaccgcttcgaggaagaactgttcctgcggagcctgcaggactacaagatccagtctgctctgctggtgcctactctgttcagcttctttgccaagagcaccctgatcgataagtacgacctgagcaacctgcacgagatcgcctctggcggagcccctctgtctaaagaagtgggagaagccgtcgccaagcggttccatctgcctggcatcagacaaggctatggcctgaccgagacaaccagcgccattctgattacccctgagggcgacgataagcctggcgctgtgggaaaagtggtgccattcttcgaggccaaggtggtggatctggacaccggcaaaacactgggcgttaaccagaggggcgagctgtgtgttagaggccctatgatcatgagcggctacgtgaacaaccccgaggccacaaacgctctgatcgacaaggatggatggctgcacagcggcgacattgcctactgggacgaagatgagcacttcttcatcgtggaccggctgaagtccctgatcaagtacaagggctaccaggtggccccagccgagctggaatctattctgctgcaacaccccaacatcttcgatgccggcgttgcaggactgcccgatgatgatgctggcgaactgccagctgctgtggtggtgctggaacacggcaagaccatgaccgagaaagaaatcgtggactacgtggccagccaagtgaccaccgccaagaaactgagaggcggcgtggtgtttgtggacgaggtgccaaaaggcctgacaggcaagctggacgcccggaagatcagagagatcctgattaaggccaagaaaggcggcaagatcgccgtgtaatagctaactagacaaaacaccaaacaaacaagctgcgagccacggacttaaataattgagccttaaagaagaaattctttaagtggatgctctcaaactcagggaaacctaaatctagttatagacaaggcaatcctgagccaagccgaagtagtaattagtaagttaacaatagatgacttacaactaatcggaaggtgcagagactcgacgggagctaccctaacgtcaagacgagggtaaagagagagtccaattctcaaagccaataggcaaaaaacaaccaaaaaaaatctagatatcggatcccggg

SEQ ID NO: 3455 - DNA, 2831 bp, synthetic construct
  source 1..2831: mol_type = other DNA; note = Ana1.235
taatacgactcactatagggagaccctcgaaaaaaaacacaaacacctagcgaaagctgcaagagaatgaaaatccgtggctcgcagcaaacaccaaacaaaacaaacacaaaccaacaaaaattaaaacagcctgtgggttgatcccacccacaggcccattgggcgctagcactctggtatcacggtacctttgtgcgcctgttttataccccctcccccaactgtaacttagaagtaacacacaccgatcaacagtcagcgtggcacaccagccacgttttgatcaagcacttctgttaccccggactgagtatcaatagactgctcacgcggttgaaggagaaagcgttcgttatccggccaactacttcgaaaaacctagtaacaccgtggaagttgcagagtgtttcgctcagcactaccccagtgtagatcaggtcgatgagtcaccgcattccccacgggcgaccgtggcggtggctgcgttggcggcctgcccatggggaaacccatgggacgctctaatacagacatggtgcgaagagtctattgagctagttggtagtcctccggcccctgaatgcggctaatcctaactgcggagcacacaccctcaagccagagggcagtgtgtcgtaacgggcaactctgcagcggaaccgactactttgggtgtccgtgtttcattttattcctatactggctgcttatggtgacaattgagagatcgttaccatatagctattggattggccatccggtgactaatagagctattatatatccctttgttgggtttataccacttagcttgaaagaggttaaaacattacaattcattgttaagttgaatacagcaaaatggaagatgccaagaacatcaagaagggccctgctccattctaccctctggaagatggaacagccggcgagcagctgcacaaggccatgaagagatatgccctggtgcctggcacaatcgccttcacagatgcccacatcgaggtggacatcacctacgccgagtacttcgagatgtctgtgcggctggccgaagctatgaagcgctacggcctgaacaccaaccaccggatcgtcgtgtgcagcgagaacagcctgcagttcttcatgcctgtgctgggcgccctgttcatcggagttgctgtggcccctgccaacgacatctacaacgagcgcgagctgctgaacagcatgggcatctctcagcccaccgtggtgttcgtgtccaagaagggactgcagaaaatcctgaacgtgcagaagaagctgcccatcatccagaaaatcatcatcatggacagcaagaccgactaccagggcttccagagcatgtacaccttcgtgaccagccatctgccacctggcttcaacgagtacgacttcgtgcccgagagcttcgaccgggacaagacaatcgccctgatcatgaacagcagcggctctaccggactgcccaaaggtgttgccctgcctcatagaactgcctgcgtgcggtttagccacgccagagatcccatcttcggcaaccagatcatccccgacacagccatcctgagcgtggtgccttttcaccacggcttcggcatgttcaccacactgggctacctgatctgcggcttcagagtggtgctgatgtaccgcttcgaggaagaactgttcctgcggagcctgcaggactacaagatccagtctgctctgctggtgcctactctgttcagcttctttgccaagagcaccctgatcgataagtacgacctgagcaacctgcacgagatcgcctctggcggagcccctctgtctaaagaagtgggagaagccgtcgccaagcggttccatctgcctggcatcagacaaggctatggcctgaccgagacaaccagcgccattctgattacccctgagggcgacgataagcctggcgctgtgggaaaagtggtgccattcttcgaggccaaggtggtggatctggacaccggcaaaacactgggcgttaaccagaggggcgagctgtgtgttagaggccctatgatcatgagcggctacgtgaacaaccccgaggccacaaacgctctgatcgacaaggatggatggctgcacagcggcgacattgcctactgggacgaagatgagcacttcttcatcgtggaccggctgaagtccctgatcaagtacaagggctaccaggtggccccagccgagctggaatctattctgctgcaacaccccaacatcttcgatgccggcgttgcaggactgcccgatgatgatgctggcgaactgccagctgctgtggtggtgctggaacacggcaagaccatgaccgagaaagaaatcgtggactacgtggccagccaagtgaccaccgccaagaaactgagaggcggcgtggtgtttgtggacgaggtgccaaaaggcctgacaggcaagctggacgcccggaagatcagagagatcctgattaaggccaagaaaggcggcaagatcgccgtgtaatagctaactagacaaaacaccaaacaaacaagctgcgagccacggacttaaataattgagccttaaagaagaaattctttaagtggatgctctcaaactcagggaaacctaaatctagttatagacaaggcaatcctgagccaagccgaagtagtaattagtaagttaacaatagatgacttacaactaatcggaaggtgcagagactcgacgggagctaccctaacgtcaagacgagggtaaagagagagtccaattctcaaagccaataggcagaaaaacaaccaaaaaaaatctagatatcggatcccggg

SEQ ID NO: 3456 - DNA, 2831 bp, synthetic construct
  source 1..2831: mol_type = other DNA; note = Ana1.237
taatacgactcactatagggagaccctcgaaaaaaaacacaaacaccgcgaaagctgcaagagaatgaaaatccgtggctcgcagcaaacaccaaacaaaacaaacacaaaccaacaaaaattaaaacagcctgtgggttgatcccacccacaggcccattgggcgctagcactctggtatcacggtacctttgtgcgcctgttttataccccctcccccaactgtaacttagaagtaacacacaccgatcaacagtcagcgtggcacaccagccacgttttgatcaagcacttctgttaccccggactgagtatcaatagactgctcacgcggttgaaggagaaagcgttcgttatccggccaactacttcgaaaaacctagtaacaccgtggaagttgcagagtgtttcgctcagcactaccccagtgtagatcaggtcgatgagtcaccgcattccccacgggcgaccgtggcggtggctgcgttggcggcctgcccatggggaaacccatgggacgctctaatacagacatggtgcgaagagtctattgagctagttggtagtcctccggcccctgaatgcggctaatcctaactgcggagcacacaccctcaagccagagggcagtgtgtcgtaacgggcaactctgcagcggaaccgactactttgggtgtccgtgtttcattttattcctatactggctgcttatggtgacaattgagagatcgttaccatatagctattggattggccatccggtgactaatagagctattatatatccctttgttgggtttataccacttagcttgaaagaggttaaaacattacaattcattgttaagttgaatacagcaaaatggaagatgccaagaacatcaagaagggccctgctccattctaccctctggaagatggaacagccggcgagcagctgcacaaggccatgaagagatatgccctggtgcctggcacaatcgccttcacagatgcccacatcgaggtggacatcacctacgccgagtacttcgagatgtctgtgcggctggccgaagctatgaagcgctacggcctgaacaccaaccaccggatcgtcgtgtgcagcgagaacagcctgcagttcttcatgcctgtgctgggcgccctgttcatcggagttgctgtggcccctgccaacgacatctacaacgagcgcgagctgctgaacagcatgggcatctctcagcccaccgtggtgttcgtgtccaagaagggactgcagaaaatcctgaacgtgcagaagaagctgcccatcatccagaaaatcatcatcatggacagcaagaccgactaccagggcttccagagcatgtacaccttcgtgaccagccatctgccacctggcttcaacgagtacgacttcgtgcccgagagcttcgaccgggacaagacaatcgccctgatcatgaacagcagcggctctaccggactgcccaaaggtgttgccctgcctcatagaactgcctgcgtgcggtttagccacgccagagatcccatcttcggcaaccagatcatccccgacacagccatcctgagcgtggtgccttttcaccacggcttcggcatgttcaccacactgggctacctgatctgcggcttcagagtggtgctgatgtaccgcttcgaggaagaactgttcctgcggagcctgcaggactacaagatccagtctgctctgctggtgcctactctgttcagcttctttgccaagagcaccctgatcgataagtacgacctgagcaacctgcacgagatcgcctctggcggagcccctctgtctaaagaagtgggagaagccgtcgccaagcggttccatctgcctggcatcagacaaggctatggcctgaccgagacaaccagcgccattctgattacccctgagggcgacgataagcctggcgctgtgggaaaagtggtgccattcttcgaggccaaggtggtggatctggacaccggcaaaacactgggcgttaaccagaggggcgagctgtgtgttagaggccctatgatcatgagcggctacgtgaacaaccccgaggccacaaacgctctgatcgacaaggatggatggctgcacagcggcgacattgcctactgggacgaagatgagcacttcttcatcgtggaccggctgaagtccctgatcaagtacaagggctaccaggtggccccagccgagctggaatctattctgctgcaacaccccaacatcttcgatgccggcgttgcaggactgcccgatgatgatgctggcgaactgccagctgctgtggtggtgctggaacacggcaagaccatgaccgagaaagaaatcgtggactacgtggccagccaagtgaccaccgccaagaaactgagaggcggcgtggtgtttgtggacgaggtgccaaaaggcctgacaggcaagctggacgcccggaagatcagagagatcctgattaaggccaagaaaggcggcaagatcgccgtgtaatagctaactagacaaaacaccaaacaaacaagctgcgagccacggacttaaataattgagccttaaagaagaaattctttaagtggatgctctcaaactcagggaaacctaaatctagttatagacaaggcaatcctgagccaagccgaagtagtaattagtaagttaacaatagatgacttacaactaatcggaaggtgcagagactcgacgggagctaccctaacgtcaagacgagggtaaagagagagtccaattctcaaagccaataggcagtaaaaaacaaccaaaaaaaatctagatatcggatcccggg

SEQ ID NO: 3457 - DNA, 2831 bp, synthetic construct
  source 1..2831: mol_type = other DNA; note = Ana1.238
taatacgactcactatagggagaccctcgaaaaaaaacacaaacacccgaaagctgcaagagaatgaaaatccgtggctcgcagcaaacaccaaacaaaacaaacacaaaccaacaaaaattaaaacagcctgtgggttgatcccacccacaggcccattgggcgctagcactctggtatcacggtacctttgtgcgcctgttttataccccctcccccaactgtaacttagaagtaacacacaccgatcaacagtcagcgtggcacaccagccacgttttgatcaagcacttctgttaccccggactgagtatcaatagactgctcacgcggttgaaggagaaagcgttcgttatccggccaactacttcgaaaaacctagtaacaccgtggaagttgcagagtgtttcgctcagcactaccccagtgtagatcaggtcgatgagtcaccgcattccccacgggcgaccgtggcggtggctgcgttggcggcctgcccatggggaaacccatgggacgctctaatacagacatggtgcgaagagtctattgagctagttggtagtcctccggcccctgaatgcggctaatcctaactgcggagcacacaccctcaagccagagggcagtgtgtcgtaacgggcaactctgcagcggaaccgactactttgggtgtccgtgtttcattttattcctatactggctgcttatggtgacaattgagagatcgttaccatatagctattggattggccatccggtgactaatagagctattatatatccctttgttgggtttataccacttagcttgaaagaggttaaaacattacaattcattgttaagttgaatacagcaaaatggaagatgccaagaacatcaagaagggccctgctccattctaccctctggaagatggaacagccggcgagcagctgcacaaggccatgaagagatatgccctggtgcctggcacaatcgccttcacagatgcccacatcgaggtggacatcacctacgccgagtacttcgagatgtctgtgcggctggccgaagctatgaagcgctacggcctgaacaccaaccaccggatcgtcgtgtgcagcgagaacagcctgcagttcttcatgcctgtgctgggcgccctgttcatcggagttgctgtggcccctgccaacgacatctacaacgagcgcgagctgctgaacagcatgggcatctctcagcccaccgtggtgttcgtgtccaagaagggactgcagaaaatcctgaacgtgcagaagaagctgcccatcatccagaaaatcatcatcatggacagcaagaccgactaccagggcttccagagcatgtacaccttcgtgaccagccatctgccacctggcttcaacgagtacgacttcgtgcccgagagcttcgaccgggacaagacaatcgccctgatcatgaacagcagcggctctaccggactgcccaaaggtgttgccctgcctcatagaactgcctgcgtgcggtttagccacgccagagatcccatcttcggcaaccagatcatccccgacacagccatcctgagcgtggtgccttttcaccacggcttcggcatgttcaccacactgggctacctgatctgcggcttcagagtggtgctgatgtaccgcttcgaggaagaactgttcctgcggagcctgcaggactacaagatccagtctgctctgctggtgcctactctgttcagcttctttgccaagagcaccctgatcgataagtacgacctgagcaacctgcacgagatcgcctctggcggagcccctctgtctaaagaagtgggagaagccgtcgccaagcggttccatctgcctggcatcagacaaggctatggcctgaccgagacaaccagcgccattctgattacccctgagggcgacgataagcctggcgctgtgggaaaagtggtgccattcttcgaggccaaggtggtggatctggacaccggcaaaacactgggcgttaaccagaggggcgagctgtgtgttagaggccctatgatcatgagcggctacgtgaacaaccccgaggccacaaacgctctgatcgacaaggatggatggctgcacagcggcgacattgcctactgggacgaagatgagcacttcttcatcgtggaccggctgaagtccctgatcaagtacaagggctaccaggtggccccagccgagctggaatctattctgctgcaacaccccaacatcttcgatgccggcgttgcaggactgcccgatgatgatgctggcgaactgccagctgctgtggtggtgctggaacacggcaagaccatgaccgagaaagaaatcgtggactacgtggccagccaagtgaccaccgccaagaaactgagaggcggcgtggtgtttgtggacgaggtgccaaaaggcctgacaggcaagctggacgcccggaagatcagagagatcctgattaaggccaagaaaggcggcaagatcgccgtgtaatagctaactagacaaaacaccaaacaaacaagctgcgagccacggacttaaataattgagccttaaagaagaaattctttaagtggatgctctcaaactcagggaaacctaaatctagttatagacaaggcaatcctgagccaagccgaagtagtaattagtaagttaacaatagatgacttacaactaatcggaaggtgcagagactcgacgggagctaccctaacgtcaagacgagggtaaagagagagtccaattctcaaagccaataggcagtagaaaaacaaccaaaaaaaatctagatatcggatcccggg

SEQ ID NO: 3458 - DNA, 2831 bp, synthetic construct
  source 1..2831: mol_type = other DNA; note = Ana1.239
taatacgactcactatagggagaccctcgaaaaaaaacacaaacaccgaaagctgcaagagaatgaaaatccgtggctcgcagcaaacaccaaacaaaacaaacacaaaccaacaaaaattaaaacagcctgtgggttgatcccacccacaggcccattgggcgctagcactctggtatcacggtacctttgtgcgcctgttttataccccctcccccaactgtaacttagaagtaacacacaccgatcaacagtcagcgtggcacaccagccacgttttgatcaagcacttctgttaccccggactgagtatcaatagactgctcacgcggttgaaggagaaagcgttcgttatccggccaactacttcgaaaaacctagtaacaccgtggaagttgcagagtgtttcgctcagcactaccccagtgtagatcaggtcgatgagtcaccgcattccccacgggcgaccgtggcggtggctgcgttggcggcctgcccatggggaaacccatgggacgctctaatacagacatggtgcgaagagtctattgagctagttggtagtcctccggcccctgaatgcggctaatcctaactgcggagcacacaccctcaagccagagggcagtgtgtcgtaacgggcaactctgcagcggaaccgactactttgggtgtccgtgtttcattttattcctatactggctgcttatggtgacaattgagagatcgttaccatatagctattggattggccatccggtgactaatagagctattatatatccctttgttgggtttataccacttagcttgaaagaggttaaaacattacaattcattgttaagttgaatacagcaaaatggaagatgccaagaacatcaagaagggccctgctccattctaccctctggaagatggaacagccggcgagcagctgcacaaggccatgaagagatatgccctggtgcctggcacaatcgccttcacagatgcccacatcgaggtggacatcacctacgccgagtacttcgagatgtctgtgcggctggccgaagctatgaagcgctacggcctgaacaccaaccaccggatcgtcgtgtgcagcgagaacagcctgcagttcttcatgcctgtgctgggcgccctgttcatcggagttgctgtggcccctgccaacgacatctacaacgagcgcgagctgctgaacagcatgggcatctctcagcccaccgtggtgttcgtgtccaagaagggactgcagaaaatcctgaacgtgcagaagaagctgcccatcatccagaaaatcatcatcatggacagcaagaccgactaccagggcttccagagcatgtacaccttcgtgaccagccatctgccacctggcttcaacgagtacgacttcgtgcccgagagcttcgaccgggacaagacaatcgccctgatcatgaacagcagcggctctaccggactgcccaaaggtgttgccctgcctcatagaactgcctgcgtgcggtttagccacgccagagatcccatcttcggcaaccagatcatccccgacacagccatcctgagcgtggtgccttttcaccacggcttcggcatgttcaccacactgggctacctgatctgcggcttcagagtggtgctgatgtaccgcttcgaggaagaactgttcctgcggagcctgcaggactacaagatccagtctgctctgctggtgcctactctgttcagcttctttgccaagagcaccctgatcgataagtacgacctgagcaacctgcacgagatcgcctctggcggagcccctctgtctaaagaagtgggagaagccgtcgccaagcggttccatctgcctggcatcagacaaggctatggcctgaccgagacaaccagcgccattctgattacccctgagggcgacgataagcctggcgctgtgggaaaagtggtgccattcttcgaggccaaggtggtggatctggacaccggcaaaacactgggcgttaaccagaggggcgagctgtgtgttagaggccctatgatcatgagcggctacgtgaacaaccccgaggccacaaacgctctgatcgacaaggatggatggctgcacagcggcgacattgcctactgggacgaagatgagcacttcttcatcgtggaccggctgaagtccctgatcaagtacaagggctaccaggtggccccagccgagctggaatctattctgctgcaacaccccaacatcttcgatgccggcgttgcaggactgcccgatgatgatgctggcgaactgccagctgctgtggtggtgctggaacacggcaagaccatgaccgagaaagaaatcgtggactacgtggccagccaagtgaccaccgccaagaaactgagaggcggcgtggtgtttgtggacgaggtgccaaaaggcctgacaggcaagctggacgcccggaagatcagagagatcctgattaaggccaagaaaggcggcaagatcgccgtgtaatagctaactagacaaaacaccaaacaaacaagctgcgagccacggacttaaataattgagccttaaagaagaaattctttaagtggatgctctcaaactcagggaaacctaaatctagttatagacaaggcaatcctgagccaagccgaagtagtaattagtaagttaacaatagatgacttacaactaatcggaaggtgcagagactcgacgggagctaccctaacgtcaagacgagggtaaagagagagtccaattctcaaagccaataggcagtagcaaaaacaaccaaaaaaaatctagatatcggatcccggg

SEQ ID NO: 3459 - DNA, 2831 bp, synthetic construct
  source 1..2831: mol_type = other DNA; note = Ana1.240
taatacgactcactatagggagaccctcgaaaaaaaacacaaacaccaaagctgcaagagaatgaaaatccgtggctcgcagcaaacaccaaacaaaacaaacacaaaccaacaaaaattaaaacagcctgtgggttgatcccacccacaggcccattgggcgctagcactctggtatcacggtacctttgtgcgcctgttttataccccctcccccaactgtaacttagaagtaacacacaccgatcaacagtcagcgtggcacaccagccacgttttgatcaagcacttctgttaccccggactgagtatcaatagactgctcacgcggttgaaggagaaagcgttcgttatccggccaactacttcgaaaaacctagtaacaccgtggaagttgcagagtgtttcgctcagcactaccccagtgtagatcaggtcgatgagtcaccgcattccccacgggcgaccgtggcggtggctgcgttggcggcctgcccatggggaaacccatgggacgctctaatacagacatggtgcgaagagtctattgagctagttggtagtcctccggcccctgaatgcggctaatcctaactgcggagcacacaccctcaagccagagggcagtgtgtcgtaacgggcaactctgcagcggaaccgactactttgggtgtccgtgtttcattttattcctatactggctgcttatggtgacaattgagagatcgttaccatatagctattggattggccatccggtgactaatagagctattatatatccctttgttgggtttataccacttagcttgaaagaggttaaaacattacaattcattgttaagttgaatacagcaaaatggaagatgccaagaacatcaagaagggccctgctccattctaccctctggaagatggaacagccggcgagcagctgcacaaggccatgaagagatatgccctggtgcctggcacaatcgccttcacagatgcccacatcgaggtggacatcacctacgccgagtacttcgagatgtctgtgcggctggccgaagctatgaagcgctacggcctgaacaccaaccaccggatcgtcgtgtgcagcgagaacagcctgcagttcttcatgcctgtgctgggcgccctgttcatcggagttgctgtggcccctgccaacgacatctacaacgagcgcgagctgctgaacagcatgggcatctctcagcccaccgtggtgttcgtgtccaagaagggactgcagaaaatcctgaacgtgcagaagaagctgcccatcatccagaaaatcatcatcatggacagcaagaccgactaccagggcttccagagcatgtacaccttcgtgaccagccatctgccacctggcttcaacgagtacgacttcgtgcccgagagcttcgaccgggacaagacaatcgccctgatcatgaacagcagcggctctaccggactgcccaaaggtgttgccctgcctcatagaactgcctgcgtgcggtttagccacgccagagatcccatcttcggcaaccagatcatccccgacacagccatcctgagcgtggtgccttttcaccacggcttcggcatgttcaccacactgggctacctgatctgcggcttcagagtggtgctgatgtaccgcttcgaggaagaactgttcctgcggagcctgcaggactacaagatccagtctgctctgctggtgcctactctgttcagcttctttgccaagagcaccctgatcgataagtacgacctgagcaacctgcacgagatcgcctctggcggagcccctctgtctaaagaagtgggagaagccgtcgccaagcggttccatctgcctggcatcagacaaggctatggcctgaccgagacaaccagcgccattctgattacccctgagggcgacgataagcctggcgctgtgggaaaagtggtgccattcttcgaggccaaggtggtggatctggacaccggcaaaacactgggcgttaaccagaggggcgagctgtgtgttagaggccctatgatcatgagcggctacgtgaacaaccccgaggccacaaacgctctgatcgacaaggatggatggctgcacagcggcgacattgcctactgggacgaagatgagcacttcttcatcgtggaccggctgaagtccctgatcaagtacaagggctaccaggtggccccagccgagctggaatctattctgctgcaacaccccaacatcttcgatgccggcgttgcaggactgcccgatgatgatgctggcgaactgccagctgctgtggtggtgctggaacacggcaagaccatgaccgagaaagaaatcgtggactacgtggccagccaagtgaccaccgccaagaaactgagaggcggcgtggtgtttgtggacgaggtgccaaaaggcctgacaggcaagctggacgcccggaagatcagagagatcctgattaaggccaagaaaggcggcaagatcgccgtgtaatagctaactagacaaaacaccaaacaaacaagctgcgagccacggacttaaataattgagccttaaagaagaaattctttaagtggatgctctcaaactcagggaaacctaaatctagttatagacaaggcaatcctgagccaagccgaagtagtaattagtaagttaacaatagatgacttacaactaatcggaaggtgcagagactcgacgggagctaccctaacgtcaagacgagggtaaagagagagtccaattctcaaagccaataggcagtagcgaaaaacaaccaaaaaaaatctagatatcggatcccggg

SEQ ID NO: 3460 - DNA, 2831 bp, synthetic construct
  source 1..2831: mol_type = other DNA; note = Ana1.241
taatacgactcactatagggagaccctcgaaaaaaaacacaaacaccaagctgcaagagaatgaaaatccgtggctcgcagcaaacaccaaacaaaacaaacacaaaccaacaaaaattaaaacagcctgtgggttgatcccacccacaggcccattgggcgctagcactctggtatcacggtacctttgtgcgcctgttttataccccctcccccaactgtaacttagaagtaacacacaccgatcaacagtcagcgtggcacaccagccacgttttgatcaagcacttctgttaccccggactgagtatcaatagactgctcacgcggttgaaggagaaagcgttcgttatccggccaactacttcgaaaaacctagtaacaccgtggaagttgcagagtgtttcgctcagcactaccccagtgtagatcaggtcgatgagtcaccgcattccccacgggcgaccgtggcggtggctgcgttggcggcctgcccatggggaaacccatgggacgctctaatacagacatggtgcgaagagtctattgagctagttggtagtcctccggcccctgaatgcggctaatcctaactgcggagcacacaccctcaagccagagggcagtgtgtcgtaacgggcaactctgcagcggaaccgactactttgggtgtccgtgtttcattttattcctatactggctgcttatggtgacaattgagagatcgttaccatatagctattggattggccatccggtgactaatagagctattatatatccctttgttgggtttataccacttagcttgaaagaggttaaaacattacaattcattgttaagttgaatacagcaaaatggaagatgccaagaacatcaagaagggccctgctccattctaccctctggaagatggaacagccggcgagcagctgcacaaggccatgaagagatatgccctggtgcctggcacaatcgccttcacagatgcccacatcgaggtggacatcacctacgccgagtacttcgagatgtctgtgcggctggccgaagctatgaagcgctacggcctgaacaccaaccaccggatcgtcgtgtgcagcgagaacagcctgcagttcttcatgcctgtgctgggcgccctgttcatcggagttgctgtggcccctgccaacgacatctacaacgagcgcgagctgctgaacagcatgggcatctctcagcccaccgtggtgttcgtgtccaagaagggactgcagaaaatcctgaacgtgcagaagaagctgcccatcatccagaaaatcatcatcatggacagcaagaccgactaccagggcttccagagcatgtacaccttcgtgaccagccatctgccacctggcttcaacgagtacgacttcgtgcccgagagcttcgaccgggacaagacaatcgccctgatcatgaacagcagcggctctaccggactgcccaaaggtgttgccctgcctcatagaactgcctgcgtgcggtttagccacgccagagatcccatcttcggcaaccagatcatccccgacacagccatcctgagcgtggtgccttttcaccacggcttcggcatgttcaccacactgggctacctgatctgcggcttcagagtggtgctgatgtaccgcttcgaggaagaactgttcctgcggagcctgcaggactacaagatccagtctgctctgctggtgcctactctgttcagcttctttgccaagagcaccctgatcgataagtacgacctgagcaacctgcacgagatcgcctctggcggagcccctctgtctaaagaagtgggagaagccgtcgccaagcggttccatctgcctggcatcagacaaggctatggcctgaccgagacaaccagcgccattctgattacccctgagggcgacgataagcctggcgctgtgggaaaagtggtgccattcttcgaggccaaggtggtggatctggacaccggcaaaacactgggcgttaaccagaggggcgagctgtgtgttagaggccctatgatcatgagcggctacgtgaacaaccccgaggccacaaacgctctgatcgacaaggatggatggctgcacagcggcgacattgcctactgggacgaagatgagcacttcttcatcgtggaccggctgaagtccctgatcaagtacaagggctaccaggtggccccagccgagctggaatctattctgctgcaacaccccaacatcttcgatgccggcgttgcaggactgcccgatgatgatgctggcgaactgccagctgctgtggtggtgctggaacacggcaagaccatgaccgagaaagaaatcgtggactacgtggccagccaagtgaccaccgccaagaaactgagaggcggcgtggtgtttgtggacgaggtgccaaaaggcctgacaggcaagctggacgcccggaagatcagagagatcctgattaaggccaagaaaggcggcaagatcgccgtgtaatagctaactagacaaaacaccaaacaaacaagctgcgagccacggacttaaataattgagccttaaagaagaaattctttaagtggatgctctcaaactcagggaaacctaaatctagttatagacaaggcaatcctgagccaagccgaagtagtaattagtaagttaacaatagatgacttacaactaatcggaaggtgcagagactcgacgggagctaccctaacgtcaagacgagggtaaagagagagtccaattctcaaagccaataggcagtagcgaaaaaacaaccaaaaaaaatctagatatcggatcccggg

SEQ ID NO: 3461 - DNA, 2831 bp, synthetic construct
  source 1..2831: mol_type = other DNA; note = Ana1.242
taatacgactcactatagggagaccctcgaaaaaaaacacaaacaccagctgcaagagaatgaaaatccgtggctcgcagcaaacaccaaacaaaacaaacacaaaccaacaaaaattaaaacagcctgtgggttgatcccacccacaggcccattgggcgctagcactctggtatcacggtacctttgtgcgcctgttttataccccctcccccaactgtaacttagaagtaacacacaccgatcaacagtcagcgtggcacaccagccacgttttgatcaagcacttctgttaccccggactgagtatcaatagactgctcacgcggttgaaggagaaagcgttcgttatccggccaactacttcgaaaaacctagtaacaccgtggaagttgcagagtgtttcgctcagcactaccccagtgtagatcaggtcgatgagtcaccgcattccccacgggcgaccgtggcggtggctgcgttggcggcctgcccatggggaaacccatgggacgctctaatacagacatggtgcgaagagtctattgagctagttggtagtcctccggcccctgaatgcggctaatcctaactgcggagcacacaccctcaagccagagggcagtgtgtcgtaacgggcaactctgcagcggaaccgactactttgggtgtccgtgtttcattttattcctatactggctgcttatggtgacaattgagagatcgttaccatatagctattggattggccatccggtgactaatagagctattatatatccctttgttgggtttataccacttagcttgaaagaggttaaaacattacaattcattgttaagttgaatacagcaaaatggaagatgccaagaacatcaagaagggccctgctccattctaccctctggaagatggaacagccggcgagcagctgcacaaggccatgaagagatatgccctggtgcctggcacaatcgccttcacagatgcccacatcgaggtggacatcacctacgccgagtacttcgagatgtctgtgcggctggccgaagctatgaagcgctacggcctgaacaccaaccaccggatcgtcgtgtgcagcgagaacagcctgcagttcttcatgcctgtgctgggcgccctgttcatcggagttgctgtggcccctgccaacgacatctacaacgagcgcgagctgctgaacagcatgggcatctctcagcccaccgtggtgttcgtgtccaagaagggactgcagaaaatcctgaacgtgcagaagaagctgcccatcatccagaaaatcatcatcatggacagcaagaccgactaccagggcttccagagcatgtacaccttcgtgaccagccatctgccacctggcttcaacgagtacgacttcgtgcccgagagcttcgaccgggacaagacaatcgccctgatcatgaacagcagcggctctaccggactgcccaaaggtgttgccctgcctcatagaactgcctgcgtgcggtttagccacgccagagatcccatcttcggcaaccagatcatccccgacacagccatcctgagcgtggtgccttttcaccacggcttcggcatgttcaccacactgggctacctgatctgcggcttcagagtggtgctgatgtaccgcttcgaggaagaactgttcctgcggagcctgcaggactacaagatccagtctgctctgctggtgcctactctgttcagcttctttgccaagagcaccctgatcgataagtacgacctgagcaacctgcacgagatcgcctctggcggagcccctctgtctaaagaagtgggagaagccgtcgccaagcggttccatctgcctggcatcagacaaggctatggcctgaccgagacaaccagcgccattctgattacccctgagggcgacgataagcctggcgctgtgggaaaagtggtgccattcttcgaggccaaggtggtggatctggacaccggcaaaacactgggcgttaaccagaggggcgagctgtgtgttagaggccctatgatcatgagcggctacgtgaacaaccccgaggccacaaacgctctgatcgacaaggatggatggctgcacagcggcgacattgcctactgggacgaagatgagcacttcttcatcgtggaccggctgaagtccctgatcaagtacaagggctaccaggtggccccagccgagctggaatctattctgctgcaacaccccaacatcttcgatgccggcgttgcaggactgcccgatgatgatgctggcgaactgccagctgctgtggtggtgctggaacacggcaagaccatgaccgagaaagaaatcgtggactacgtggccagccaagtgaccaccgccaagaaactgagaggcggcgtggtgtttgtggacgaggtgccaaaaggcctgacaggcaagctggacgcccggaagatcagagagatcctgattaaggccaagaaaggcggcaagatcgccgtgtaatagctaactagacaaaacaccaaacaaacaagctgcgagccacggacttaaataattgagccttaaagaagaaattctttaagtggatgctctcaaactcagggaaacctaaatctagttatagacaaggcaatcctgagccaagccgaagtagtaattagtaagttaacaatagatgacttacaactaatcggaaggtgcagagactcgacgggagctaccctaacgtcaagacgagggtaaagagagagtccaattctcaaagccaataggcagtagcgaaaaaaacaaccaaaaaaaatctagatatcggatcccggg

SEQ ID NO: 3462 - DNA, 2831 bp, synthetic construct
  source 1..2831: mol_type = other DNA; note = Ana1.243
taatacgactcactatagggagaccctcgaaaaaaaacacaaacaccgctgcaagagaatgaaaatccgtggctcgcagcaaacaccaaacaaaacaaacacaaaccaacaaaaattaaaacagcctgtgggttgatcccacccacaggcccattgggcgctagcactctggtatcacggtacctttgtgcgcctgttttataccccctcccccaactgtaacttagaagtaacacacaccgatcaacagtcagcgtggcacaccagccacgttttgatcaagcacttctgttaccccggactgagtatcaatagactgctcacgcggttgaaggagaaagcgttcgttatccggccaactacttcgaaaaacctagtaacaccgtggaagttgcagagtgtttcgctcagcactaccccagtgtagatcaggtcgatgagtcaccgcattccccacgggcgaccgtggcggtggctgcgttggcggcctgcccatggggaaacccatgggacgctctaatacagacatggtgcgaagagtctattgagctagttggtagtcctccggcccctgaatgcggctaatcctaactgcggagcacacaccctcaagccagagggcagtgtgtcgtaacgggcaactctgcagcggaaccgactactttgggtgtccgtgtttcattttattcctatactggctgcttatggtgacaattgagagatcgttaccatatagctattggattggccatccggtgactaatagagctattatatatccctttgttgggtttataccacttagcttgaaagaggttaaaacattacaattcattgttaagttgaatacagcaaaatggaagatgccaagaacatcaagaagggccctgctccattctaccctctggaagatggaacagccggcgagcagctgcacaaggccatgaagagatatgccctggtgcctggcacaatcgccttcacagatgcccacatcgaggtggacatcacctacgccgagtacttcgagatgtctgtgcggctggccgaagctatgaagcgctacggcctgaacaccaaccaccggatcgtcgtgtgcagcgagaacagcctgcagttcttcatgcctgtgctgggcgccctgttcatcggagttgctgtggcccctgccaacgacatctacaacgagcgcgagctgctgaacagcatgggcatctctcagcccaccgtggtgttcgtgtccaagaagggactgcagaaaatcctgaacgtgcagaagaagctgcccatcatccagaaaatcatcatcatggacagcaagaccgactaccagggcttccagagcatgtacaccttcgtgaccagccatctgccacctggcttcaacgagtacgacttcgtgcccgagagcttcgaccgggacaagacaatcgccctgatcatgaacagcagcggctctaccggactgcccaaaggtgttgccctgcctcatagaactgcctgcgtgcggtttagccacgccagagatcccatcttcggcaaccagatcatccccgacacagccatcctgagcgtggtgccttttcaccacggcttcggcatgttcaccacactgggctacctgatctgcggcttcagagtggtgctgatgtaccgcttcgaggaagaactgttcctgcggagcctgcaggactacaagatccagtctgctctgctggtgcctactctgttcagcttctttgccaagagcaccctgatcgataagtacgacctgagcaacctgcacgagatcgcctctggcggagcccctctgtctaaagaagtgggagaagccgtcgccaagcggttccatctgcctggcatcagacaaggctatggcctgaccgagacaaccagcgccattctgattacccctgagggcgacgataagcctggcgctgtgggaaaagtggtgccattcttcgaggccaaggtggtggatctggacaccggcaaaacactgggcgttaaccagaggggcgagctgtgtgttagaggccctatgatcatgagcggctacgtgaacaaccccgaggccacaaacgctctgatcgacaaggatggatggctgcacagcggcgacattgcctactgggacgaagatgagcacttcttcatcgtggaccggctgaagtccctgatcaagtacaagggctaccaggtggccccagccgagctggaatctattctgctgcaacaccccaacatcttcgatgccggcgttgcaggactgcccgatgatgatgctggcgaactgccagctgctgtggtggtgctggaacacggcaagaccatgaccgagaaagaaatcgtggactacgtggccagccaagtgaccaccgccaagaaactgagaggcggcgtggtgtttgtggacgaggtgccaaaaggcctgacaggcaagctggacgcccggaagatcagagagatcctgattaaggccaagaaaggcggcaagatcgccgtgtaatagctaactagacaaaacaccaaacaaacaagctgcgagccacggacttaaataattgagccttaaagaagaaattctttaagtggatgctctcaaactcagggaaacctaaatctagttatagacaaggcaatcctgagccaagccgaagtagtaattagtaagttaacaatagatgacttacaactaatcggaaggtgcagagactcgacgggagctaccctaacgtcaagacgagggtaaagagagagtccaattctcaaagccaataggcagtagcgaaaaaaaacaaccaaaaaaaatctagatatcggatcccggg

SEQ ID NO: 3463 - DNA, 2831 bp, synthetic construct
  source 1..2831: mol_type = other DNA; note = Ana1.244
taatacgactcactatagggagaccctcgaaaaaaaacacaaacaccctgcaagagaatgaaaatccgtggctcgcagcaaacaccaaacaaaacaaacacaaaccaacaaaaattaaaacagcctgtgggttgatcccacccacaggcccattgggcgctagcactctggtatcacggtacctttgtgcgcctgttttataccccctcccccaactgtaacttagaagtaacacacaccgatcaacagtcagcgtggcacaccagccacgttttgatcaagcacttctgttaccccggactgagtatcaatagactgctcacgcggttgaaggagaaagcgttcgttatccggccaactacttcgaaaaacctagtaacaccgtggaagttgcagagtgtttcgctcagcactaccccagtgtagatcaggtcgatgagtcaccgcattccccacgggcgaccgtggcggtggctgcgttggcggcctgcccatggggaaacccatgggacgctctaatacagacatggtgcgaagagtctattgagctagttggtagtcctccggcccctgaatgcggctaatcctaactgcggagcacacaccctcaagccagagggcagtgtgtcgtaacgggcaactctgcagcggaaccgactactttgggtgtccgtgtttcattttattcctatactggctgcttatggtgacaattgagagatcgttaccatatagctattggattggccatccggtgactaatagagctattatatatccctttgttgggtttataccacttagcttgaaagaggttaaaacattacaattcattgttaagttgaatacagcaaaatggaagatgccaagaacatcaagaagggccctgctccattctaccctctggaagatggaacagccggcgagcagctgcacaaggccatgaagagatatgccctggtgcctggcacaatcgccttcacagatgcccacatcgaggtggacatcacctacgccgagtacttcgagatgtctgtgcggctggccgaagctatgaagcgctacggcctgaacaccaaccaccggatcgtcgtgtgcagcgagaacagcctgcagttcttcatgcctgtgctgggcgccctgttcatcggagttgctgtggcccctgccaacgacatctacaacgagcgcgagctgctgaacagcatgggcatctctcagcccaccgtggtgttcgtgtccaagaagggactgcagaaaatcctgaacgtgcagaagaagctgcccatcatccagaaaatcatcatcatggacagcaagaccgactaccagggcttccagagcatgtacaccttcgtgaccagccatctgccacctggcttcaacgagtacgacttcgtgcccgagagcttcgaccgggacaagacaatcgccctgatcatgaacagcagcggctctaccggactgcccaaaggtgttgccctgcctcatagaactgcctgcgtgcggtttagccacgccagagatcccatcttcggcaaccagatcatccccgacacagccatcctgagcgtggtgccttttcaccacggcttcggcatgttcaccacactgggctacctgatctgcggcttcagagtggtgctgatgtaccgcttcgaggaagaactgttcctgcggagcctgcaggactacaagatccagtctgctctgctggtgcctactctgttcagcttctttgccaagagcaccctgatcgataagtacgacctgagcaacctgcacgagatcgcctctggcggagcccctctgtctaaagaagtgggagaagccgtcgccaagcggttccatctgcctggcatcagacaaggctatggcctgaccgagacaaccagcgccattctgattacccctgagggcgacgataagcctggcgctgtgggaaaagtggtgccattcttcgaggccaaggtggtggatctggacaccggcaaaacactgggcgttaaccagaggggcgagctgtgtgttagaggccctatgatcatgagcggctacgtgaacaaccccgaggccacaaacgctctgatcgacaaggatggatggctgcacagcggcgacattgcctactgggacgaagatgagcacttcttcatcgtggaccggctgaagtccctgatcaagtacaagggctaccaggtggccccagccgagctggaatctattctgctgcaacaccccaacatcttcgatgccggcgttgcaggactgcccgatgatgatgctggcgaactgccagctgctgtggtggtgctggaacacggcaagaccatgaccgagaaagaaatcgtggactacgtggccagccaagtgaccaccgccaagaaactgagaggcggcgtggtgtttgtggacgaggtgccaaaaggcctgacaggcaagctggacgcccggaagatcagagagatcctgattaaggccaagaaaggcggcaagatcgccgtgtaatagctaactagacaaaacaccaaacaaacaagctgcgagccacggacttaaataattgagccttaaagaagaaattctttaagtggatgctctcaaactcagggaaacctaaatctagttatagacaaggcaatcctgagccaagccgaagtagtaattagtaagttaacaatagatgacttacaactaatcggaaggtgcagagactcgacgggagctaccctaacgtcaagacgagggtaaagagagagtccaattctcaaagccaataggcagtagcgaaagaaaaacaaccaaaaaaaatctagatatcggatcccggg

SEQ ID NO: 3464 - DNA, 2831 bp, synthetic construct
  source 1..2831: mol_type = other DNA; note = Ana1.245
taatacgactcactatagggagaccctcgaaaaaaaacacaaacacctgcaagagaatgaaaatccgtggctcgcagcaaacaccaaacaaaacaaacacaaaccaacaaaaattaaaacagcctgtgggttgatcccacccacaggcccattgggcgctagcactctggtatcacggtacctttgtgcgcctgttttataccccctcccccaactgtaacttagaagtaacacacaccgatcaacagtcagcgtggcacaccagccacgttttgatcaagcacttctgttaccccggactgagtatcaatagactgctcacgcggttgaaggagaaagcgttcgttatccggccaactacttcgaaaaacctagtaacaccgtggaagttgcagagtgtttcgctcagcactaccccagtgtagatcaggtcgatgagtcaccgcattccccacgggcgaccgtggcggtggctgcgttggcggcctgcccatggggaaacccatgggacgctctaatacagacatggtgcgaagagtctattgagctagttggtagtcctccggcccctgaatgcggctaatcctaactgcggagcacacaccctcaagccagagggcagtgtgtcgtaacgggcaactctgcagcggaaccgactactttgggtgtccgtgtttcattttattcctatactggctgcttatggtgacaattgagagatcgttaccatatagctattggattggccatccggtgactaatagagctattatatatccctttgttgggtttataccacttagcttgaaagaggttaaaacattacaattcattgttaagttgaatacagcaaaatggaagatgccaagaacatcaagaagggccctgctccattctaccctctggaagatggaacagccggcgagcagctgcacaaggccatgaagagatatgccctggtgcctggcacaatcgccttcacagatgcccacatcgaggtggacatcacctacgccgagtacttcgagatgtctgtgcggctggccgaagctatgaagcgctacggcctgaacaccaaccaccggatcgtcgtgtgcagcgagaacagcctgcagttcttcatgcctgtgctgggcgccctgttcatcggagttgctgtggcccctgccaacgacatctacaacgagcgcgagctgctgaacagcatgggcatctctcagcccaccgtggtgttcgtgtccaagaagggactgcagaaaatcctgaacgtgcagaagaagctgcccatcatccagaaaatcatcatcatggacagcaagaccgactaccagggcttccagagcatgtacaccttcgtgaccagccatctgccacctggcttcaacgagtacgacttcgtgcccgagagcttcgaccgggacaagacaatcgccctgatcatgaacagcagcggctctaccggactgcccaaaggtgttgccctgcctcatagaactgcctgcgtgcggtttagccacgccagagatcccatcttcggcaaccagatcatccccgacacagccatcctgagcgtggtgccttttcaccacggcttcggcatgttcaccacactgggctacctgatctgcggcttcagagtggtgctgatgtaccgcttcgaggaagaactgttcctgcggagcctgcaggactacaagatccagtctgctctgctggtgcctactctgttcagcttctttgccaagagcaccctgatcgataagtacgacctgagcaacctgcacgagatcgcctctggcggagcccctctgtctaaagaagtgggagaagccgtcgccaagcggttccatctgcctggcatcagacaaggctatggcctgaccgagacaaccagcgccattctgattacccctgagggcgacgataagcctggcgctgtgggaaaagtggtgccattcttcgaggccaaggtggtggatctggacaccggcaaaacactgggcgttaaccagaggggcgagctgtgtgttagaggccctatgatcatgagcggctacgtgaacaaccccgaggccacaaacgctctgatcgacaaggatggatggctgcacagcggcgacattgcctactgggacgaagatgagcacttcttcatcgtggaccggctgaagtccctgatcaagtacaagggctaccaggtggccccagccgagctggaatctattctgctgcaacaccccaacatcttcgatgccggcgttgcaggactgcccgatgatgatgctggcgaactgccagctgctgtggtggtgctggaacacggcaagaccatgaccgagaaagaaatcgtggactacgtggccagccaagtgaccaccgccaagaaactgagaggcggcgtggtgtttgtggacgaggtgccaaaaggcctgacaggcaagctggacgcccggaagatcagagagatcctgattaaggccaagaaaggcggcaagatcgccgtgtaatagctaactagacaaaacaccaaacaaacaagctgcgagccacggacttaaataattgagccttaaagaagaaattctttaagtggatgctctcaaactcagggaaacctaaatctagttatagacaaggcaatcctgagccaagccgaagtagtaattagtaagttaacaatagatgacttacaactaatcggaaggtgcagagactcgacgggagctaccctaacgtcaagacgagggtaaagagagagtccaattctcaaagccaataggcagtagcgaaagcaaaaacaaccaaaaaaaatctagatatcggatcccggg

SEQ ID NO: 3465 - DNA, 2831 bp, synthetic construct
  source 1..2831: mol_type = other DNA; note = Ana1.246
taatacgactcactatagggagaccctcgaaaaaaaacacaaacaccgcaagagaatgaaaatccgtggctcgcagcaaacaccaaacaaaacaaacacaaaccaacaaaaattaaaacagcctgtgggttgatcccacccacaggcccattgggcgctagcactctggtatcacggtacctttgtgcgcctgttttataccccctcccccaactgtaacttagaagtaacacacaccgatcaacagtcagcgtggcacaccagccacgttttgatcaagcacttctgttaccccggactgagtatcaatagactgctcacgcggttgaaggagaaagcgttcgttatccggccaactacttcgaaaaacctagtaacaccgtggaagttgcagagtgtttcgctcagcactaccccagtgtagatcaggtcgatgagtcaccgcattccccacgggcgaccgtggcggtggctgcgttggcggcctgcccatggggaaacccatgggacgctctaatacagacatggtgcgaagagtctattgagctagttggtagtcctccggcccctgaatgcggctaatcctaactgcggagcacacaccctcaagccagagggcagtgtgtcgtaacgggcaactctgcagcggaaccgactactttgggtgtccgtgtttcattttattcctatactggctgcttatggtgacaattgagagatcgttaccatatagctattggattggccatccggtgactaatagagctattatatatccctttgttgggtttataccacttagcttgaaagaggttaaaacattacaattcattgttaagttgaatacagcaaaatggaagatgccaagaacatcaagaagggccctgctccattctaccctctggaagatggaacagccggcgagcagctgcacaaggccatgaagagatatgccctggtgcctggcacaatcgccttcacagatgcccacatcgaggtggacatcacctacgccgagtacttcgagatgtctgtgcggctggccgaagctatgaagcgctacggcctgaacaccaaccaccggatcgtcgtgtgcagcgagaacagcctgcagttcttcatgcctgtgctgggcgccctgttcatcggagttgctgtggcccctgccaacgacatctacaacgagcgcgagctgctgaacagcatgggcatctctcagcccaccgtggtgttcgtgtccaagaagggactgcagaaaatcctgaacgtgcagaagaagctgcccatcatccagaaaatcatcatcatggacagcaagaccgactaccagggcttccagagcatgtacaccttcgtgaccagccatctgccacctggcttcaacgagtacgacttcgtgcccgagagcttcgaccgggacaagacaatcgccctgatcatgaacagcagcggctctaccggactgcccaaaggtgttgccctgcctcatagaactgcctgcgtgcggtttagccacgccagagatcccatcttcggcaaccagatcatccccgacacagccatcctgagcgtggtgccttttcaccacggcttcggcatgttcaccacactgggctacctgatctgcggcttcagagtggtgctgatgtaccgcttcgaggaagaactgttcctgcggagcctgcaggactacaagatccagtctgctctgctggtgcctactctgttcagcttctttgccaagagcaccctgatcgataagtacgacctgagcaacctgcacgagatcgcctctggcggagcccctctgtctaaagaagtgggagaagccgtcgccaagcggttccatctgcctggcatcagacaaggctatggcctgaccgagacaaccagcgccattctgattacccctgagggcgacgataagcctggcgctgtgggaaaagtggtgccattcttcgaggccaaggtggtggatctggacaccggcaaaacactgggcgttaaccagaggggcgagctgtgtgttagaggccctatgatcatgagcggctacgtgaacaaccccgaggccacaaacgctctgatcgacaaggatggatggctgcacagcggcgacattgcctactgggacgaagatgagcacttcttcatcgtggaccggctgaagtccctgatcaagtacaagggctaccaggtggccccagccgagctggaatctattctgctgcaacaccccaacatcttcgatgccggcgttgcaggactgcccgatgatgatgctggcgaactgccagctgctgtggtggtgctggaacacggcaagaccatgaccgagaaagaaatcgtggactacgtggccagccaagtgaccaccgccaagaaactgagaggcggcgtggtgtttgtggacgaggtgccaaaaggcctgacaggcaagctggacgcccggaagatcagagagatcctgattaaggccaagaaaggcggcaagatcgccgtgtaatagctaactagacaaaacaccaaacaaacaagctgcgagccacggacttaaataattgagccttaaagaagaaattctttaagtggatgctctcaaactcagggaaacctaaatctagttatagacaaggcaatcctgagccaagccgaagtagtaattagtaagttaacaatagatgacttacaactaatcggaaggtgcagagactcgacgggagctaccctaacgtcaagacgagggtaaagagagagtccaattctcaaagccaataggcagtagcgaaagctaaaaacaaccaaaaaaaatctagatatcggatcccggg

SEQ ID NO: 3466 - DNA, 2831 bp, synthetic construct
  source 1..2831: mol_type = other DNA; note = Ana1.247
taatacgactcactatagggagaccctcgaaaaaaaacacaaacacccaagagaatgaaaatccgtggctcgcagcaaacaccaaacaaaacaaacacaaaccaacaaaaattaaaacagcctgtgggttgatcccacccacaggcccattgggcgctagcactctggtatcacggtacctttgtgcgcctgttttataccccctcccccaactgtaacttagaagtaacacacaccgatcaacagtcagcgtggcacaccagccacgttttgatcaagcacttctgttaccccggactgagtatcaatagactgctcacgcggttgaaggagaaagcgttcgttatccggccaactacttcgaaaaacctagtaacaccgtggaagttgcagagtgtttcgctcagcactaccccagtgtagatcaggtcgatgagtcaccgcattccccacgggcgaccgtggcggtggctgcgttggcggcctgcccatggggaaacccatgggacgctctaatacagacatggtgcgaagagtctattgagctagttggtagtcctccggcccctgaatgcggctaatcctaactgcggagcacacaccctcaagccagagggcagtgtgtcgtaacgggcaactctgcagcggaaccgactactttgggtgtccgtgtttcattttattcctatactggctgcttatggtgacaattgagagatcgttaccatatagctattggattggccatccggtgactaatagagctattatatatccctttgttgggtttataccacttagcttgaaagaggttaaaacattacaattcattgttaagttgaatacagcaaaatggaagatgccaagaacatcaagaagggccctgctccattctaccctctggaagatggaacagccggcgagcagctgcacaaggccatgaagagatatgccctggtgcctggcacaatcgccttcacagatgcccacatcgaggtggacatcacctacgccgagtacttcgagatgtctgtgcggctggccgaagctatgaagcgctacggcctgaacaccaaccaccggatcgtcgtgtgcagcgagaacagcctgcagttcttcatgcctgtgctgggcgccctgttcatcggagttgctgtggcccctgccaacgacatctacaacgagcgcgagctgctgaacagcatgggcatctctcagcccaccgtggtgttcgtgtccaagaagggactgcagaaaatcctgaacgtgcagaagaagctgcccatcatccagaaaatcatcatcatggacagcaagaccgactaccagggcttccagagcatgtacaccttcgtgaccagccatctgccacctggcttcaacgagtacgacttcgtgcccgagagcttcgaccgggacaagacaatcgccctgatcatgaacagcagcggctctaccggactgcccaaaggtgttgccctgcctcatagaactgcctgcgtgcggtttagccacgccagagatcccatcttcggcaaccagatcatccccgacacagccatcctgagcgtggtgccttttcaccacggcttcggcatgttcaccacactgggctacctgatctgcggcttcagagtggtgctgatgtaccgcttcgaggaagaactgttcctgcggagcctgcaggactacaagatccagtctgctctgctggtgcctactctgttcagcttctttgccaagagcaccctgatcgataagtacgacctgagcaacctgcacgagatcgcctctggcggagcccctctgtctaaagaagtgggagaagccgtcgccaagcggttccatctgcctggcatcagacaaggctatggcctgaccgagacaaccagcgccattctgattacccctgagggcgacgataagcctggcgctgtgggaaaagtggtgccattcttcgaggccaaggtggtggatctggacaccggcaaaacactgggcgttaaccagaggggcgagctgtgtgttagaggccctatgatcatgagcggctacgtgaacaaccccgaggccacaaacgctctgatcgacaaggatggatggctgcacagcggcgacattgcctactgggacgaagatgagcacttcttcatcgtggaccggctgaagtccctgatcaagtacaagggctaccaggtggccccagccgagctggaatctattctgctgcaacaccccaacatcttcgatgccggcgttgcaggactgcccgatgatgatgctggcgaactgccagctgctgtggtggtgctggaacacggcaagaccatgaccgagaaagaaatcgtggactacgtggccagccaagtgaccaccgccaagaaactgagaggcggcgtggtgtttgtggacgaggtgccaaaaggcctgacaggcaagctggacgcccggaagatcagagagatcctgattaaggccaagaaaggcggcaagatcgccgtgtaatagctaactagacaaaacaccaaacaaacaagctgcgagccacggacttaaataattgagccttaaagaagaaattctttaagtggatgctctcaaactcagggaaacctaaatctagttatagacaaggcaatcctgagccaagccgaagtagtaattagtaagttaacaatagatgacttacaactaatcggaaggtgcagagactcgacgggagctaccctaacgtcaagacgagggtaaagagagagtccaattctcaaagccaataggcagtagcgaaagctgaaaaacaaccaaaaaaaatctagatatcggatcccggg

SEQ ID NO: 3467 - DNA, 2831 bp, synthetic construct
  source 1..2831: mol_type = other DNA; note = Ana1.248
taatacgactcactatagggagaccctcgaaaaaaaacacaaacaccaagagaatgaaaatccgtggctcgcagcaaacaccaaacaaaacaaacacaaaccaacaaaaattaaaacagcctgtgggttgatcccacccacaggcccattgggcgctagcactctggtatcacggtacctttgtgcgcctgttttataccccctcccccaactgtaacttagaagtaacacacaccgatcaacagtcagcgtggcacaccagccacgttttgatcaagcacttctgttaccccggactgagtatcaatagactgctcacgcggttgaaggagaaagcgttcgttatccggccaactacttcgaaaaacctagtaacaccgtggaagttgcagagtgtttcgctcagcactaccccagtgtagatcaggtcgatgagtcaccgcattccccacgggcgaccgtggcggtggctgcgttggcggcctgcccatggggaaacccatgggacgctctaatacagacatggtgcgaagagtctattgagctagttggtagtcctccggcccctgaatgcggctaatcctaactgcggagcacacaccctcaagccagagggcagtgtgtcgtaacgggcaactctgcagcggaaccgactactttgggtgtccgtgtttcattttattcctatactggctgcttatggtgacaattgagagatcgttaccatatagctattggattggccatccggtgactaatagagctattatatatccctttgttgggtttataccacttagcttgaaagaggttaaaacattacaattcattgttaagttgaatacagcaaaatggaagatgccaagaacatcaagaagggccctgctccattctaccctctggaagatggaacagccggcgagcagctgcacaaggccatgaagagatatgccctggtgcctggcacaatcgccttcacagatgcccacatcgaggtggacatcacctacgccgagtacttcgagatgtctgtgcggctggccgaagctatgaagcgctacggcctgaacaccaaccaccggatcgtcgtgtgcagcgagaacagcctgcagttcttcatgcctgtgctgggcgccctgttcatcggagttgctgtggcccctgccaacgacatctacaacgagcgcgagctgctgaacagcatgggcatctctcagcccaccgtggtgttcgtgtccaagaagggactgcagaaaatcctgaacgtgcagaagaagctgcccatcatccagaaaatcatcatcatggacagcaagaccgactaccagggcttccagagcatgtacaccttcgtgaccagccatctgccacctggcttcaacgagtacgacttcgtgcccgagagcttcgaccgggacaagacaatcgccctgatcatgaacagcagcggctctaccggactgcccaaaggtgttgccctgcctcatagaactgcctgcgtgcggtttagccacgccagagatcccatcttcggcaaccagatcatccccgacacagccatcctgagcgtggtgccttttcaccacggcttcggcatgttcaccacactgggctacctgatctgcggcttcagagtggtgctgatgtaccgcttcgaggaagaactgttcctgcggagcctgcaggactacaagatccagtctgctctgctggtgcctactctgttcagcttctttgccaagagcaccctgatcgataagtacgacctgagcaacctgcacgagatcgcctctggcggagcccctctgtctaaagaagtgggagaagccgtcgccaagcggttccatctgcctggcatcagacaaggctatggcctgaccgagacaaccagcgccattctgattacccctgagggcgacgataagcctggcgctgtgggaaaagtggtgccattcttcgaggccaaggtggtggatctggacaccggcaaaacactgggcgttaaccagaggggcgagctgtgtgttagaggccctatgatcatgagcggctacgtgaacaaccccgaggccacaaacgctctgatcgacaaggatggatggctgcacagcggcgacattgcctactgggacgaagatgagcacttcttcatcgtggaccggctgaagtccctgatcaagtacaagggctaccaggtggccccagccgagctggaatctattctgctgcaacaccccaacatcttcgatgccggcgttgcaggactgcccgatgatgatgctggcgaactgccagctgctgtggtggtgctggaacacggcaagaccatgaccgagaaagaaatcgtggactacgtggccagccaagtgaccaccgccaagaaactgagaggcggcgtggtgtttgtggacgaggtgccaaaaggcctgacaggcaagctggacgcccggaagatcagagagatcctgattaaggccaagaaaggcggcaagatcgccgtgtaatagctaactagacaaaacaccaaacaaacaagctgcgagccacggacttaaataattgagccttaaagaagaaattctttaagtggatgctctcaaactcagggaaacctaaatctagttatagacaaggcaatcctgagccaagccgaagtagtaattagtaagttaacaatagatgacttacaactaatcggaaggtgcagagactcgacgggagctaccctaacgtcaagacgagggtaaagagagagtccaattctcaaagccaataggcagtagcgaaagctgcaaaaacaaccaaaaaaaatctagatatcggatcccggg

SEQ ID NO: 3468 - DNA, 2831 bp, synthetic construct
  source 1..2831: mol_type = other DNA; note = Ana1.249
taatacgactcactatagggagaccctcgaaaaaaaacacaaacaccagagaatgaaaatccgtggctcgcagcaaacaccaaacaaaacaaacacaaaccaacaaaaattaaaacagcctgtgggttgatcccacccacaggcccattgggcgctagcactctggtatcacggtacctttgtgcgcctgttttataccccctcccccaactgtaacttagaagtaacacacaccgatcaacagtcagcgtggcacaccagccacgttttgatcaagcacttctgttaccccggactgagtatcaatagactgctcacgcggttgaaggagaaagcgttcgttatccggccaactacttcgaaaaacctagtaacaccgtggaagttgcagagtgtttcgctcagcactaccccagtgtagatcaggtcgatgagtcaccgcattccccacgggcgaccgtggcggtggctgcgttggcggcctgcccatggggaaacccatgggacgctctaatacagacatggtgcgaagagtctattgagctagttggtagtcctccggcccctgaatgcggctaatcctaactgcggagcacacaccctcaagccagagggcagtgtgtcgtaacgggcaactctgcagcggaaccgactactttgggtgtccgtgtttcattttattcctatactggctgcttatggtgacaattgagagatcgttaccatatagctattggattggccatccggtgactaatagagctattatatatccctttgttgggtttataccacttagcttgaaagaggttaaaacattacaattcattgttaagttgaatacagcaaaatggaagatgccaagaacatcaagaagggccctgctccattctaccctctggaagatggaacagccggcgagcagctgcacaaggccatgaagagatatgccctggtgcctggcacaatcgccttcacagatgcccacatcgaggtggacatcacctacgccgagtacttcgagatgtctgtgcggctggccgaagctatgaagcgctacggcctgaacaccaaccaccggatcgtcgtgtgcagcgagaacagcctgcagttcttcatgcctgtgctgggcgccctgttcatcggagttgctgtggcccctgccaacgacatctacaacgagcgcgagctgctgaacagcatgggcatctctcagcccaccgtggtgttcgtgtccaagaagggactgcagaaaatcctgaacgtgcagaagaagctgcccatcatccagaaaatcatcatcatggacagcaagaccgactaccagggcttccagagcatgtacaccttcgtgaccagccatctgccacctggcttcaacgagtacgacttcgtgcccgagagcttcgaccgggacaagacaatcgccctgatcatgaacagcagcggctctaccggactgcccaaaggtgttgccctgcctcatagaactgcctgcgtgcggtttagccacgccagagatcccatcttcggcaaccagatcatccccgacacagccatcctgagcgtggtgccttttcaccacggcttcggcatgttcaccacactgggctacctgatctgcggcttcagagtggtgctgatgtaccgcttcgaggaagaactgttcctgcggagcctgcaggactacaagatccagtctgctctgctggtgcctactctgttcagcttctttgccaagagcaccctgatcgataagtacgacctgagcaacctgcacgagatcgcctctggcggagcccctctgtctaaagaagtgggagaagccgtcgccaagcggttccatctgcctggcatcagacaaggctatggcctgaccgagacaaccagcgccattctgattacccctgagggcgacgataagcctggcgctgtgggaaaagtggtgccattcttcgaggccaaggtggtggatctggacaccggcaaaacactgggcgttaaccagaggggcgagctgtgtgttagaggccctatgatcatgagcggctacgtgaacaaccccgaggccacaaacgctctgatcgacaaggatggatggctgcacagcggcgacattgcctactgggacgaagatgagcacttcttcatcgtggaccggctgaagtccctgatcaagtacaagggctaccaggtggccccagccgagctggaatctattctgctgcaacaccccaacatcttcgatgccggcgttgcaggactgcccgatgatgatgctggcgaactgccagctgctgtggtggtgctggaacacggcaagaccatgaccgagaaagaaatcgtggactacgtggccagccaagtgaccaccgccaagaaactgagaggcggcgtggtgtttgtggacgaggtgccaaaaggcctgacaggcaagctggacgcccggaagatcagagagatcctgattaaggccaagaaaggcggcaagatcgccgtgtaatagctaactagacaaaacaccaaacaaacaagctgcgagccacggacttaaataattgagccttaaagaagaaattctttaagtggatgctctcaaactcagggaaacctaaatctagttatagacaaggcaatcctgagccaagccgaagtagtaattagtaagttaacaatagatgacttacaactaatcggaaggtgcagagactcgacgggagctaccctaacgtcaagacgagggtaaagagagagtccaattctcaaagccaataggcagtagcgaaagctgcaaaaaacaaccaaaaaaaatctagatatcggatcccggg

SEQ ID NO: 3469 - DNA, 2831 bp, synthetic construct
  source 1..2831: mol_type = other DNA; note = Ana1.250
taatacgactcactatagggagaccctcgaaaaaaaacacaaacaccgagaatgaaaatccgtggctcgcagcaaacaccaaacaaaacaaacacaaaccaacaaaaattaaaacagcctgtgggttgatcccacccacaggcccattgggcgctagcactctggtatcacggtacctttgtgcgcctgttttataccccctcccccaactgtaacttagaagtaacacacaccgatcaacagtcagcgtggcacaccagccacgttttgatcaagcacttctgttaccccggactgagtatcaatagactgctcacgcggttgaaggagaaagcgttcgttatccggccaactacttcgaaaaacctagtaacaccgtggaagttgcagagtgtttcgctcagcactaccccagtgtagatcaggtcgatgagtcaccgcattccccacgggcgaccgtggcggtggctgcgttggcggcctgcccatggggaaacccatgggacgctctaatacagacatggtgcgaagagtctattgagctagttggtagtcctccggcccctgaatgcggctaatcctaactgcggagcacacaccctcaagccagagggcagtgtgtcgtaacgggcaactctgcagcggaaccgactactttgggtgtccgtgtttcattttattcctatactggctgcttatggtgacaattgagagatcgttaccatatagctattggattggccatccggtgactaatagagctattatatatccctttgttgggtttataccacttagcttgaaagaggttaaaacattacaattcattgttaagttgaatacagcaaaatggaagatgccaagaacatcaagaagggccctgctccattctaccctctggaagatggaacagccggcgagcagctgcacaaggccatgaagagatatgccctggtgcctggcacaatcgccttcacagatgcccacatcgaggtggacatcacctacgccgagtacttcgagatgtctgtgcggctggccgaagctatgaagcgctacggcctgaacaccaaccaccggatcgtcgtgtgcagcgagaacagcctgcagttcttcatgcctgtgctgggcgccctgttcatcggagttgctgtggcccctgccaacgacatctacaacgagcgcgagctgctgaacagcatgggcatctctcagcccaccgtggtgttcgtgtccaagaagggactgcagaaaatcctgaacgtgcagaagaagctgcccatcatccagaaaatcatcatcatggacagcaagaccgactaccagggcttccagagcatgtacaccttcgtgaccagccatctgccacctggcttcaacgagtacgacttcgtgcccgagagcttcgaccgggacaagacaatcgccctgatcatgaacagcagcggctctaccggactgcccaaaggtgttgccctgcctcatagaactgcctgcgtgcggtttagccacgccagagatcccatcttcggcaaccagatcatccccgacacagccatcctgagcgtggtgccttttcaccacggcttcggcatgttcaccacactgggctacctgatctgcggcttcagagtggtgctgatgtaccgcttcgaggaagaactgttcctgcggagcctgcaggactacaagatccagtctgctctgctggtgcctactctgttcagcttctttgccaagagcaccctgatcgataagtacgacctgagcaacctgcacgagatcgcctctggcggagcccctctgtctaaagaagtgggagaagccgtcgccaagcggttccatctgcctggcatcagacaaggctatggcctgaccgagacaaccagcgccattctgattacccctgagggcgacgataagcctggcgctgtgggaaaagtggtgccattcttcgaggccaaggtggtggatctggacaccggcaaaacactgggcgttaaccagaggggcgagctgtgtgttagaggccctatgatcatgagcggctacgtgaacaaccccgaggccacaaacgctctgatcgacaaggatggatggctgcacagcggcgacattgcctactgggacgaagatgagcacttcttcatcgtggaccggctgaagtccctgatcaagtacaagggctaccaggtggccccagccgagctggaatctattctgctgcaacaccccaacatcttcgatgccggcgttgcaggactgcccgatgatgatgctggcgaactgccagctgctgtggtggtgctggaacacggcaagaccatgaccgagaaagaaatcgtggactacgtggccagccaagtgaccaccgccaagaaactgagaggcggcgtggtgtttgtggacgaggtgccaaaaggcctgacaggcaagctggacgcccggaagatcagagagatcctgattaaggccaagaaaggcggcaagatcgccgtgtaatagctaactagacaaaacaccaaacaaacaagctgcgagccacggacttaaataattgagccttaaagaagaaattctttaagtggatgctctcaaactcagggaaacctaaatctagttatagacaaggcaatcctgagccaagccgaagtagtaattagtaagttaacaatagatgacttacaactaatcggaaggtgcagagactcgacgggagctaccctaacgtcaagacgagggtaaagagagagtccaattctcaaagccaataggcagtagcgaaagctgcaaaaaaacaaccaaaaaaaatctagatatcggatcccggg

SEQ ID NO: 3470 - DNA, 2831 bp, synthetic construct
  source 1..2831: mol_type = other DNA; note = Ana1.251
taatacgactcactatagggagaccctcgaaaaaaaacacaaacaccagaatgaaaatccgtggctcgcagcaaacaccaaacaaaacaaacacaaaccaacaaaaattaaaacagcctgtgggttgatcccacccacaggcccattgggcgctagcactctggtatcacggtacctttgtgcgcctgttttataccccctcccccaactgtaacttagaagtaacacacaccgatcaacagtcagcgtggcacaccagccacgttttgatcaagcacttctgttaccccggactgagtatcaatagactgctcacgcggttgaaggagaaagcgttcgttatccggccaactacttcgaaaaacctagtaacaccgtggaagttgcagagtgtttcgctcagcactaccccagtgtagatcaggtcgatgagtcaccgcattccccacgggcgaccgtggcggtggctgcgttggcggcctgcccatggggaaacccatgggacgctctaatacagacatggtgcgaagagtctattgagctagttggtagtcctccggcccctgaatgcggctaatcctaactgcggagcacacaccctcaagccagagggcagtgtgtcgtaacgggcaactctgcagcggaaccgactactttgggtgtccgtgtttcattttattcctatactggctgcttatggtgacaattgagagatcgttaccatatagctattggattggccatccggtgactaatagagctattatatatccctttgttgggtttataccacttagcttgaaagaggttaaaacattacaattcattgttaagttgaatacagcaaaatggaagatgccaagaacatcaagaagggccctgctccattctaccctctggaagatggaacagccggcgagcagctgcacaaggccatgaagagatatgccctggtgcctggcacaatcgccttcacagatgcccacatcgaggtggacatcacctacgccgagtacttcgagatgtctgtgcggctggccgaagctatgaagcgctacggcctgaacaccaaccaccggatcgtcgtgtgcagcgagaacagcctgcagttcttcatgcctgtgctgggcgccctgttcatcggagttgctgtggcccctgccaacgacatctacaacgagcgcgagctgctgaacagcatgggcatctctcagcccaccgtggtgttcgtgtccaagaagggactgcagaaaatcctgaacgtgcagaagaagctgcccatcatccagaaaatcatcatcatggacagcaagaccgactaccagggcttccagagcatgtacaccttcgtgaccagccatctgccacctggcttcaacgagtacgacttcgtgcccgagagcttcgaccgggacaagacaatcgccctgatcatgaacagcagcggctctaccggactgcccaaaggtgttgccctgcctcatagaactgcctgcgtgcggtttagccacgccagagatcccatcttcggcaaccagatcatccccgacacagccatcctgagcgtggtgccttttcaccacggcttcggcatgttcaccacactgggctacctgatctgcggcttcagagtggtgctgatgtaccgcttcgaggaagaactgttcctgcggagcctgcaggactacaagatccagtctgctctgctggtgcctactctgttcagcttctttgccaagagcaccctgatcgataagtacgacctgagcaacctgcacgagatcgcctctggcggagcccctctgtctaaagaagtgggagaagccgtcgccaagcggttccatctgcctggcatcagacaaggctatggcctgaccgagacaaccagcgccattctgattacccctgagggcgacgataagcctggcgctgtgggaaaagtggtgccattcttcgaggccaaggtggtggatctggacaccggcaaaacactgggcgttaaccagaggggcgagctgtgtgttagaggccctatgatcatgagcggctacgtgaacaaccccgaggccacaaacgctctgatcgacaaggatggatggctgcacagcggcgacattgcctactgggacgaagatgagcacttcttcatcgtggaccggctgaagtccctgatcaagtacaagggctaccaggtggccccagccgagctggaatctattctgctgcaacaccccaacatcttcgatgccggcgttgcaggactgcccgatgatgatgctggcgaactgccagctgctgtggtggtgctggaacacggcaagaccatgaccgagaaagaaatcgtggactacgtggccagccaagtgaccaccgccaagaaactgagaggcggcgtggtgtttgtggacgaggtgccaaaaggcctgacaggcaagctggacgcccggaagatcagagagatcctgattaaggccaagaaaggcggcaagatcgccgtgtaatagctaactagacaaaacaccaaacaaacaagctgcgagccacggacttaaataattgagccttaaagaagaaattctttaagtggatgctctcaaactcagggaaacctaaatctagttatagacaaggcaatcctgagccaagccgaagtagtaattagtaagttaacaatagatgacttacaactaatcggaaggtgcagagactcgacgggagctaccctaacgtcaagacgagggtaaagagagagtccaattctcaaagccaataggcagtagcgaaagctgcaagaaaaacaaccaaaaaaaatctagatatcggatcccggg

SEQ ID NO: 3471 - DNA, 2831 bp, synthetic construct
  source 1..2831: mol_type = other DNA; note = Ana1.252
taatacgactcactatagggagaccctcgaaaaaaaacacaaacaccgaatgaaaatccgtggctcgcagcaaacaccaaacaaaacaaacacaaaccaacaaaaattaaaacagcctgtgggttgatcccacccacaggcccattgggcgctagcactctggtatcacggtacctttgtgcgcctgttttataccccctcccccaactgtaacttagaagtaacacacaccgatcaacagtcagcgtggcacaccagccacgttttgatcaagcacttctgttaccccggactgagtatcaatagactgctcacgcggttgaaggagaaagcgttcgttatccggccaactacttcgaaaaacctagtaacaccgtggaagttgcagagtgtttcgctcagcactaccccagtgtagatcaggtcgatgagtcaccgcattccccacgggcgaccgtggcggtggctgcgttggcggcctgcccatggggaaacccatgggacgctctaatacagacatggtgcgaagagtctattgagctagttggtagtcctccggcccctgaatgcggctaatcctaactgcggagcacacaccctcaagccagagggcagtgtgtcgtaacgggcaactctgcagcggaaccgactactttgggtgtccgtgtttcattttattcctatactggctgcttatggtgacaattgagagatcgttaccatatagctattggattggccatccggtgactaatagagctattatatatccctttgttgggtttataccacttagcttgaaagaggttaaaacattacaattcattgttaagttgaatacagcaaaatggaagatgccaagaacatcaagaagggccctgctccattctaccctctggaagatggaacagccggcgagcagctgcacaaggccatgaagagatatgccctggtgcctggcacaatcgccttcacagatgcccacatcgaggtggacatcacctacgccgagtacttcgagatgtctgtgcggctggccgaagctatgaagcgctacggcctgaacaccaaccaccggatcgtcgtgtgcagcgagaacagcctgcagttcttcatgcctgtgctgggcgccctgttcatcggagttgctgtggcccctgccaacgacatctacaacgagcgcgagctgctgaacagcatgggcatctctcagcccaccgtggtgttcgtgtccaagaagggactgcagaaaatcctgaacgtgcagaagaagctgcccatcatccagaaaatcatcatcatggacagcaagaccgactaccagggcttccagagcatgtacaccttcgtgaccagccatctgccacctggcttcaacgagtacgacttcgtgcccgagagcttcgaccgggacaagacaatcgccctgatcatgaacagcagcggctctaccggactgcccaaaggtgttgccctgcctcatagaactgcctgcgtgcggtttagccacgccagagatcccatcttcggcaaccagatcatccccgacacagccatcctgagcgtggtgccttttcaccacggcttcggcatgttcaccacactgggctacctgatctgcggcttcagagtggtgctgatgtaccgcttcgaggaagaactgttcctgcggagcctgcaggactacaagatccagtctgctctgctggtgcctactctgttcagcttctttgccaagagcaccctgatcgataagtacgacctgagcaacctgcacgagatcgcctctggcggagcccctctgtctaaagaagtgggagaagccgtcgccaagcggttccatctgcctggcatcagacaaggctatggcctgaccgagacaaccagcgccattctgattacccctgagggcgacgataagcctggcgctgtgggaaaagtggtgccattcttcgaggccaaggtggtggatctggacaccggcaaaacactgggcgttaaccagaggggcgagctgtgtgttagaggccctatgatcatgagcggctacgtgaacaaccccgaggccacaaacgctctgatcgacaaggatggatggctgcacagcggcgacattgcctactgggacgaagatgagcacttcttcatcgtggaccggctgaagtccctgatcaagtacaagggctaccaggtggccccagccgagctggaatctattctgctgcaacaccccaacatcttcgatgccggcgttgcaggactgcccgatgatgatgctggcgaactgccagctgctgtggtggtgctggaacacggcaagaccatgaccgagaaagaaatcgtggactacgtggccagccaagtgaccaccgccaagaaactgagaggcggcgtggtgtttgtggacgaggtgccaaaaggcctgacaggcaagctggacgcccggaagatcagagagatcctgattaaggccaagaaaggcggcaagatcgccgtgtaatagctaactagacaaaacaccaaacaaacaagctgcgagccacggacttaaataattgagccttaaagaagaaattctttaagtggatgctctcaaactcagggaaacctaaatctagttatagacaaggcaatcctgagccaagccgaagtagtaattagtaagttaacaatagatgacttacaactaatcggaaggtgcagagactcgacgggagctaccctaacgtcaagacgagggtaaagagagagtccaattctcaaagccaataggcagtagcgaaagctgcaagaaaaaacaaccaaaaaaaatctagatatcggatcccggg

SEQ ID NO: 3472 - DNA, 2831 bp, synthetic construct
  source 1..2831: mol_type = other DNA; note = Ana1.253
taatacgactcactatagggagaccctcgaaaaaaaacacaaacaccaatgaaaatccgtggctcgcagcaaacaccaaacaaaacaaacacaaaccaacaaaaattaaaacagcctgtgggttgatcccacccacaggcccattgggcgctagcactctggtatcacggtacctttgtgcgcctgttttataccccctcccccaactgtaacttagaagtaacacacaccgatcaacagtcagcgtggcacaccagccacgttttgatcaagcacttctgttaccccggactgagtatcaatagactgctcacgcggttgaaggagaaagcgttcgttatccggccaactacttcgaaaaacctagtaacaccgtggaagttgcagagtgtttcgctcagcactaccccagtgtagatcaggtcgatgagtcaccgcattccccacgggcgaccgtggcggtggctgcgttggcggcctgcccatggggaaacccatgggacgctctaatacagacatggtgcgaagagtctattgagctagttggtagtcctccggcccctgaatgcggctaatcctaactgcggagcacacaccctcaagccagagggcagtgtgtcgtaacgggcaactctgcagcggaaccgactactttgggtgtccgtgtttcattttattcctatactggctgcttatggtgacaattgagagatcgttaccatatagctattggattggccatccggtgactaatagagctattatatatccctttgttgggtttataccacttagcttgaaagaggttaaaacattacaattcattgttaagttgaatacagcaaaatggaagatgccaagaacatcaagaagggccctgctccattctaccctctggaagatggaacagccggcgagcagctgcacaaggccatgaagagatatgccctggtgcctggcacaatcgccttcacagatgcccacatcgaggtggacatcacctacgccgagtacttcgagatgtctgtgcggctggccgaagctatgaagcgctacggcctgaacaccaaccaccggatcgtcgtgtgcagcgagaacagcctgcagttcttcatgcctgtgctgggcgccctgttcatcggagttgctgtggcccctgccaacgacatctacaacgagcgcgagctgctgaacagcatgggcatctctcagcccaccgtggtgttcgtgtccaagaagggactgcagaaaatcctgaacgtgcagaagaagctgcccatcatccagaaaatcatcatcatggacagcaagaccgactaccagggcttccagagcatgtacaccttcgtgaccagccatctgccacctggcttcaacgagtacgacttcgtgcccgagagcttcgaccgggacaagacaatcgccctgatcatgaacagcagcggctctaccggactgcccaaaggtgttgccctgcctcatagaactgcctgcgtgcggtttagccacgccagagatcccatcttcggcaaccagatcatccccgacacagccatcctgagcgtggtgccttttcaccacggcttcggcatgttcaccacactgggctacctgatctgcggcttcagagtggtgctgatgtaccgcttcgaggaagaactgttcctgcggagcctgcaggactacaagatccagtctgctctgctggtgcctactctgttcagcttctttgccaagagcaccctgatcgataagtacgacctgagcaacctgcacgagatcgcctctggcggagcccctctgtctaaagaagtgggagaagccgtcgccaagcggttccatctgcctggcatcagacaaggctatggcctgaccgagacaaccagcgccattctgattacccctgagggcgacgataagcctggcgctgtgggaaaagtggtgccattcttcgaggccaaggtggtggatctggacaccggcaaaacactgggcgttaaccagaggggcgagctgtgtgttagaggccctatgatcatgagcggctacgtgaacaaccccgaggccacaaacgctctgatcgacaaggatggatggctgcacagcggcgacattgcctactgggacgaagatgagcacttcttcatcgtggaccggctgaagtccctgatcaagtacaagggctaccaggtggccccagccgagctggaatctattctgctgcaacaccccaacatcttcgatgccggcgttgcaggactgcccgatgatgatgctggcgaactgccagctgctgtggtggtgctggaacacggcaagaccatgaccgagaaagaaatcgtggactacgtggccagccaagtgaccaccgccaagaaactgagaggcggcgtggtgtttgtggacgaggtgccaaaaggcctgacaggcaagctggacgcccggaagatcagagagatcctgattaaggccaagaaaggcggcaagatcgccgtgtaatagctaactagacaaaacaccaaacaaacaagctgcgagccacggacttaaataattgagccttaaagaagaaattctttaagtggatgctctcaaactcagggaaacctaaatctagttatagacaaggcaatcctgagccaagccgaagtagtaattagtaagttaacaatagatgacttacaactaatcggaaggtgcagagactcgacgggagctaccctaacgtcaagacgagggtaaagagagagtccaattctcaaagccaataggcagtagcgaaagctgcaagagaaaaacaaccaaaaaaaatctagatatcggatcccggg

SEQ ID NO: 3473 - DNA, 2831 bp, synthetic construct
  source 1..2831: mol_type = other DNA; note = Ana1.254
taatacgactcactatagggagaccctcgaaaaaaaacacaaacaccatgaaaatccgtggctcgcagcaaacaccaaacaaaacaaacacaaaccaacaaaaattaaaacagcctgtgggttgatcccacccacaggcccattgggcgctagcactctggtatcacggtacctttgtgcgcctgttttataccccctcccccaactgtaacttagaagtaacacacaccgatcaacagtcagcgtggcacaccagccacgttttgatcaagcacttctgttaccccggactgagtatcaatagactgctcacgcggttgaaggagaaagcgttcgttatccggccaactacttcgaaaaacctagtaacaccgtggaagttgcagagtgtttcgctcagcactaccccagtgtagatcaggtcgatgagtcaccgcattccccacgggcgaccgtggcggtggctgcgttggcggcctgcccatggggaaacccatgggacgctctaatacagacatggtgcgaagagtctattgagctagttggtagtcctccggcccctgaatgcggctaatcctaactgcggagcacacaccctcaagccagagggcagtgtgtcgtaacgggcaactctgcagcggaaccgactactttgggtgtccgtgtttcattttattcctatactggctgcttatggtgacaattgagagatcgttaccatatagctattggattggccatccggtgactaatagagctattatatatccctttgttgggtttataccacttagcttgaaagaggttaaaacattacaattcattgttaagttgaatacagcaaaatggaagatgccaagaacatcaagaagggccctgctccattctaccctctggaagatggaacagccggcgagcagctgcacaaggccatgaagagatatgccctggtgcctggcacaatcgccttcacagatgcccacatcgaggtggacatcacctacgccgagtacttcgagatgtctgtgcggctggccgaagctatgaagcgctacggcctgaacaccaaccaccggatcgtcgtgtgcagcgagaacagcctgcagttcttcatgcctgtgctgggcgccctgttcatcggagttgctgtggcccctgccaacgacatctacaacgagcgcgagctgctgaacagcatgggcatctctcagcccaccgtggtgttcgtgtccaagaagggactgcagaaaatcctgaacgtgcagaagaagctgcccatcatccagaaaatcatcatcatggacagcaagaccgactaccagggcttccagagcatgtacaccttcgtgaccagccatctgccacctggcttcaacgagtacgacttcgtgcccgagagcttcgaccgggacaagacaatcgccctgatcatgaacagcagcggctctaccggactgcccaaaggtgttgccctgcctcatagaactgcctgcgtgcggtttagccacgccagagatcccatcttcggcaaccagatcatccccgacacagccatcctgagcgtggtgccttttcaccacggcttcggcatgttcaccacactgggctacctgatctgcggcttcagagtggtgctgatgtaccgcttcgaggaagaactgttcctgcggagcctgcaggactacaagatccagtctgctctgctggtgcctactctgttcagcttctttgccaagagcaccctgatcgataagtacgacctgagcaacctgcacgagatcgcctctggcggagcccctctgtctaaagaagtgggagaagccgtcgccaagcggttccatctgcctggcatcagacaaggctatggcctgaccgagacaaccagcgccattctgattacccctgagggcgacgataagcctggcgctgtgggaaaagtggtgccattcttcgaggccaaggtggtggatctggacaccggcaaaacactgggcgttaaccagaggggcgagctgtgtgttagaggccctatgatcatgagcggctacgtgaacaaccccgaggccacaaacgctctgatcgacaaggatggatggctgcacagcggcgacattgcctactgggacgaagatgagcacttcttcatcgtggaccggctgaagtccctgatcaagtacaagggctaccaggtggccccagccgagctggaatctattctgctgcaacaccccaacatcttcgatgccggcgttgcaggactgcccgatgatgatgctggcgaactgccagctgctgtggtggtgctggaacacggcaagaccatgaccgagaaagaaatcgtggactacgtggccagccaagtgaccaccgccaagaaactgagaggcggcgtggtgtttgtggacgaggtgccaaaaggcctgacaggcaagctggacgcccggaagatcagagagatcctgattaaggccaagaaaggcggcaagatcgccgtgtaatagctaactagacaaaacaccaaacaaacaagctgcgagccacggacttaaataattgagccttaaagaagaaattctttaagtggatgctctcaaactcagggaaacctaaatctagttatagacaaggcaatcctgagccaagccgaagtagtaattagtaagttaacaatagatgacttacaactaatcggaaggtgcagagactcgacgggagctaccctaacgtcaagacgagggtaaagagagagtccaattctcaaagccaataggcagtagcgaaagctgcaagagaaaaaacaaccaaaaaaaatctagatatcggatcccggg

SEQ ID NO: 3474 - DNA, 2831 bp, synthetic construct
  source 1..2831: mol_type = other DNA; note = Ana1.255
taatacgactcactatagggagaccctcgaaaaaaaacacaaacacctgaaaatccgtggctcgcagcaaacaccaaacaaaacaaacacaaaccaacaaaaattaaaacagcctgtgggttgatcccacccacaggcccattgggcgctagcactctggtatcacggtacctttgtgcgcctgttttataccccctcccccaactgtaacttagaagtaacacacaccgatcaacagtcagcgtggcacaccagccacgttttgatcaagcacttctgttaccccggactgagtatcaatagactgctcacgcggttgaaggagaaagcgttcgttatccggccaactacttcgaaaaacctagtaacaccgtggaagttgcagagtgtttcgctcagcactaccccagtgtagatcaggtcgatgagtcaccgcattccccacgggcgaccgtggcggtggctgcgttggcggcctgcccatggggaaacccatgggacgctctaatacagacatggtgcgaagagtctattgagctagttggtagtcctccggcccctgaatgcggctaatcctaactgcggagcacacaccctcaagccagagggcagtgtgtcgtaacgggcaactctgcagcggaaccgactactttgggtgtccgtgtttcattttattcctatactggctgcttatggtgacaattgagagatcgttaccatatagctattggattggccatccggtgactaatagagctattatatatccctttgttgggtttataccacttagcttgaaagaggttaaaacattacaattcattgttaagttgaatacagcaaaatggaagatgccaagaacatcaagaagggccctgctccattctaccctctggaagatggaacagccggcgagcagctgcacaaggccatgaagagatatgccctggtgcctggcacaatcgccttcacagatgcccacatcgaggtggacatcacctacgccgagtacttcgagatgtctgtgcggctggccgaagctatgaagcgctacggcctgaacaccaaccaccggatcgtcgtgtgcagcgagaacagcctgcagttcttcatgcctgtgctgggcgccctgttcatcggagttgctgtggcccctgccaacgacatctacaacgagcgcgagctgctgaacagcatgggcatctctcagcccaccgtggtgttcgtgtccaagaagggactgcagaaaatcctgaacgtgcagaagaagctgcccatcatccagaaaatcatcatcatggacagcaagaccgactaccagggcttccagagcatgtacaccttcgtgaccagccatctgccacctggcttcaacgagtacgacttcgtgcccgagagcttcgaccgggacaagacaatcgccctgatcatgaacagcagcggctctaccggactgcccaaaggtgttgccctgcctcatagaactgcctgcgtgcggtttagccacgccagagatcccatcttcggcaaccagatcatccccgacacagccatcctgagcgtggtgccttttcaccacggcttcggcatgttcaccacactgggctacctgatctgcggcttcagagtggtgctgatgtaccgcttcgaggaagaactgttcctgcggagcctgcaggactacaagatccagtctgctctgctggtgcctactctgttcagcttctttgccaagagcaccctgatcgataagtacgacctgagcaacctgcacgagatcgcctctggcggagcccctctgtctaaagaagtgggagaagccgtcgccaagcggttccatctgcctggcatcagacaaggctatggcctgaccgagacaaccagcgccattctgattacccctgagggcgacgataagcctggcgctgtgggaaaagtggtgccattcttcgaggccaaggtggtggatctggacaccggcaaaacactgggcgttaaccagaggggcgagctgtgtgttagaggccctatgatcatgagcggctacgtgaacaaccccgaggccacaaacgctctgatcgacaaggatggatggctgcacagcggcgacattgcctactgggacgaagatgagcacttcttcatcgtggaccggctgaagtccctgatcaagtacaagggctaccaggtggccccagccgagctggaatctattctgctgcaacaccccaacatcttcgatgccggcgttgcaggactgcccgatgatgatgctggcgaactgccagctgctgtggtggtgctggaacacggcaagaccatgaccgagaaagaaatcgtggactacgtggccagccaagtgaccaccgccaagaaactgagaggcggcgtggtgtttgtggacgaggtgccaaaaggcctgacaggcaagctggacgcccggaagatcagagagatcctgattaaggccaagaaaggcggcaagatcgccgtgtaatagctaactagacaaaacaccaaacaaacaagctgcgagccacggacttaaataattgagccttaaagaagaaattctttaagtggatgctctcaaactcagggaaacctaaatctagttatagacaaggcaatcctgagccaagccgaagtagtaattagtaagttaacaatagatgacttacaactaatcggaaggtgcagagactcgacgggagctaccctaacgtcaagacgagggtaaagagagagtccaattctcaaagccaataggcagtagcgaaagctgcaagagaaaaaaacaaccaaaaaaaatctagatatcggatcccggg

SEQ ID NO: 3475 - DNA, 2831 bp, synthetic construct
  source 1..2831: mol_type = other DNA; note = Ana1.256
taatacgactcactatagggagaccctcgaaaaaaaacacaaacaccgaaaatccgtggctcgcagcaaacaccaaacaaaacaaacacaaaccaacaaaaattaaaacagcctgtgggttgatcccacccacaggcccattgggcgctagcactctggtatcacggtacctttgtgcgcctgttttataccccctcccccaactgtaacttagaagtaacacacaccgatcaacagtcagcgtggcacaccagccacgttttgatcaagcacttctgttaccccggactgagtatcaatagactgctcacgcggttgaaggagaaagcgttcgttatccggccaactacttcgaaaaacctagtaacaccgtggaagttgcagagtgtttcgctcagcactaccccagtgtagatcaggtcgatgagtcaccgcattccccacgggcgaccgtggcggtggctgcgttggcggcctgcccatggggaaacccatgggacgctctaatacagacatggtgcgaagagtctattgagctagttggtagtcctccggcccctgaatgcggctaatcctaactgcggagcacacaccctcaagccagagggcagtgtgtcgtaacgggcaactctgcagcggaaccgactactttgggtgtccgtgtttcattttattcctatactggctgcttatggtgacaattgagagatcgttaccatatagctattggattggccatccggtgactaatagagctattatatatccctttgttgggtttataccacttagcttgaaagaggttaaaacattacaattcattgttaagttgaatacagcaaaatggaagatgccaagaacatcaagaagggccctgctccattctaccctctggaagatggaacagccggcgagcagctgcacaaggccatgaagagatatgccctggtgcctggcacaatcgccttcacagatgcccacatcgaggtggacatcacctacgccgagtacttcgagatgtctgtgcggctggccgaagctatgaagcgctacggcctgaacaccaaccaccggatcgtcgtgtgcagcgagaacagcctgcagttcttcatgcctgtgctgggcgccctgttcatcggagttgctgtggcccctgccaacgacatctacaacgagcgcgagctgctgaacagcatgggcatctctcagcccaccgtggtgttcgtgtccaagaagggactgcagaaaatcctgaacgtgcagaagaagctgcccatcatccagaaaatcatcatcatggacagcaagaccgactaccagggcttccagagcatgtacaccttcgtgaccagccatctgccacctggcttcaacgagtacgacttcgtgcccgagagcttcgaccgggacaagacaatcgccctgatcatgaacagcagcggctctaccggactgcccaaaggtgttgccctgcctcatagaactgcctgcgtgcggtttagccacgccagagatcccatcttcggcaaccagatcatccccgacacagccatcctgagcgtggtgccttttcaccacggcttcggcatgttcaccacactgggctacctgatctgcggcttcagagtggtgctgatgtaccgcttcgaggaagaactgttcctgcggagcctgcaggactacaagatccagtctgctctgctggtgcctactctgttcagcttctttgccaagagcaccctgatcgataagtacgacctgagcaacctgcacgagatcgcctctggcggagcccctctgtctaaagaagtgggagaagccgtcgccaagcggttccatctgcctggcatcagacaaggctatggcctgaccgagacaaccagcgccattctgattacccctgagggcgacgataagcctggcgctgtgggaaaagtggtgccattcttcgaggccaaggtggtggatctggacaccggcaaaacactgggcgttaaccagaggggcgagctgtgtgttagaggccctatgatcatgagcggctacgtgaacaaccccgaggccacaaacgctctgatcgacaaggatggatggctgcacagcggcgacattgcctactgggacgaagatgagcacttcttcatcgtggaccggctgaagtccctgatcaagtacaagggctaccaggtggccccagccgagctggaatctattctgctgcaacaccccaacatcttcgatgccggcgttgcaggactgcccgatgatgatgctggcgaactgccagctgctgtggtggtgctggaacacggcaagaccatgaccgagaaagaaatcgtggactacgtggccagccaagtgaccaccgccaagaaactgagaggcggcgtggtgtttgtggacgaggtgccaaaaggcctgacaggcaagctggacgcccggaagatcagagagatcctgattaaggccaagaaaggcggcaagatcgccgtgtaatagctaactagacaaaacaccaaacaaacaagctgcgagccacggacttaaataattgagccttaaagaagaaattctttaagtggatgctctcaaactcagggaaacctaaatctagttatagacaaggcaatcctgagccaagccgaagtagtaattagtaagttaacaatagatgacttacaactaatcggaaggtgcagagactcgacgggagctaccctaacgtcaagacgagggtaaagagagagtccaattctcaaagccaataggcagtagcgaaagctgcaagagaataaaaacaaccaaaaaaaatctagatatcggatcccggg

SEQ ID NO: 3476 - DNA, 2831 bp, synthetic construct
  source 1..2831: mol_type = other DNA; note = Ana1.257 (P2 Monotron)
taatacgactcactatagggagaccctcgaaaaaaaacacaaacaccaaaatccgtggctcgcagcaaacaccaaacaaaacaaacacaaaccaacaaaaattaaaacagcctgtgggttgatcccacccacaggcccattgggcgctagcactctggtatcacggtacctttgtgcgcctgttttataccccctcccccaactgtaacttagaagtaacacacaccgatcaacagtcagcgtggcacaccagccacgttttgatcaagcacttctgttaccccggactgagtatcaatagactgctcacgcggttgaaggagaaagcgttcgttatccggccaactacttcgaaaaacctagtaacaccgtggaagttgcagagtgtttcgctcagcactaccccagtgtagatcaggtcgatgagtcaccgcattccccacgggcgaccgtggcggtggctgcgttggcggcctgcccatggggaaacccatgggacgctctaatacagacatggtgcgaagagtctattgagctagttggtagtcctccggcccctgaatgcggctaatcctaactgcggagcacacaccctcaagccagagggcagtgtgtcgtaacgggcaactctgcagcggaaccgactactttgggtgtccgtgtttcattttattcctatactggctgcttatggtgacaattgagagatcgttaccatatagctattggattggccatccggtgactaatagagctattatatatccctttgttgggtttataccacttagcttgaaagaggttaaaacattacaattcattgttaagttgaatacagcaaaatggaagatgccaagaacatcaagaagggccctgctccattctaccctctggaagatggaacagccggcgagcagctgcacaaggccatgaagagatatgccctggtgcctggcacaatcgccttcacagatgcccacatcgaggtggacatcacctacgccgagtacttcgagatgtctgtgcggctggccgaagctatgaagcgctacggcctgaacaccaaccaccggatcgtcgtgtgcagcgagaacagcctgcagttcttcatgcctgtgctgggcgccctgttcatcggagttgctgtggcccctgccaacgacatctacaacgagcgcgagctgctgaacagcatgggcatctctcagcccaccgtggtgttcgtgtccaagaagggactgcagaaaatcctgaacgtgcagaagaagctgcccatcatccagaaaatcatcatcatggacagcaagaccgactaccagggcttccagagcatgtacaccttcgtgaccagccatctgccacctggcttcaacgagtacgacttcgtgcccgagagcttcgaccgggacaagacaatcgccctgatcatgaacagcagcggctctaccggactgcccaaaggtgttgccctgcctcatagaactgcctgcgtgcggtttagccacgccagagatcccatcttcggcaaccagatcatccccgacacagccatcctgagcgtggtgccttttcaccacggcttcggcatgttcaccacactgggctacctgatctgcggcttcagagtggtgctgatgtaccgcttcgaggaagaactgttcctgcggagcctgcaggactacaagatccagtctgctctgctggtgcctactctgttcagcttctttgccaagagcaccctgatcgataagtacgacctgagcaacctgcacgagatcgcctctggcggagcccctctgtctaaagaagtgggagaagccgtcgccaagcggttccatctgcctggcatcagacaaggctatggcctgaccgagacaaccagcgccattctgattacccctgagggcgacgataagcctggcgctgtgggaaaagtggtgccattcttcgaggccaaggtggtggatctggacaccggcaaaacactgggcgttaaccagaggggcgagctgtgtgttagaggccctatgatcatgagcggctacgtgaacaaccccgaggccacaaacgctctgatcgacaaggatggatggctgcacagcggcgacattgcctactgggacgaagatgagcacttcttcatcgtggaccggctgaagtccctgatcaagtacaagggctaccaggtggccccagccgagctggaatctattctgctgcaacaccccaacatcttcgatgccggcgttgcaggactgcccgatgatgatgctggcgaactgccagctgctgtggtggtgctggaacacggcaagaccatgaccgagaaagaaatcgtggactacgtggccagccaagtgaccaccgccaagaaactgagaggcggcgtggtgtttgtggacgaggtgccaaaaggcctgacaggcaagctggacgcccggaagatcagagagatcctgattaaggccaagaaaggcggcaagatcgccgtgtaatagctaactagacaaaacaccaaacaaacaagctgcgagccacggacttaaataattgagccttaaagaagaaattctttaagtggatgctctcaaactcagggaaacctaaatctagttatagacaaggcaatcctgagccaagccgaagtagtaattagtaagttaacaatagatgacttacaactaatcggaaggtgcagagactcgacgggagctaccctaacgtcaagacgagggtaaagagagagtccaattctcaaagccaataggcagtagcgaaagctgcaagagaatgaaaaacaaccaaaaaaaatctagatatcggatcccggg

SEQ ID NO: 3477 - DNA, 2831 bp, synthetic construct
  source 1..2831: mol_type = other DNA; note = Ana1.258
taatacgactcactatagggagaccctcgaaaaaaaacacaaacaccaaatccgtggctcgcagcaaacaccaaacaaaacaaacacaaaccaacaaaaattaaaacagcctgtgggttgatcccacccacaggcccattgggcgctagcactctggtatcacggtacctttgtgcgcctgttttataccccctcccccaactgtaacttagaagtaacacacaccgatcaacagtcagcgtggcacaccagccacgttttgatcaagcacttctgttaccccggactgagtatcaatagactgctcacgcggttgaaggagaaagcgttcgttatccggccaactacttcgaaaaacctagtaacaccgtggaagttgcagagtgtttcgctcagcactaccccagtgtagatcaggtcgatgagtcaccgcattccccacgggcgaccgtggcggtggctgcgttggcggcctgcccatggggaaacccatgggacgctctaatacagacatggtgcgaagagtctattgagctagttggtagtcctccggcccctgaatgcggctaatcctaactgcggagcacacaccctcaagccagagggcagtgtgtcgtaacgggcaactctgcagcggaaccgactactttgggtgtccgtgtttcattttattcctatactggctgcttatggtgacaattgagagatcgttaccatatagctattggattggccatccggtgactaatagagctattatatatccctttgttgggtttataccacttagcttgaaagaggttaaaacattacaattcattgttaagttgaatacagcaaaatggaagatgccaagaacatcaagaagggccctgctccattctaccctctggaagatggaacagccggcgagcagctgcacaaggccatgaagagatatgccctggtgcctggcacaatcgccttcacagatgcccacatcgaggtggacatcacctacgccgagtacttcgagatgtctgtgcggctggccgaagctatgaagcgctacggcctgaacaccaaccaccggatcgtcgtgtgcagcgagaacagcctgcagttcttcatgcctgtgctgggcgccctgttcatcggagttgctgtggcccctgccaacgacatctacaacgagcgcgagctgctgaacagcatgggcatctctcagcccaccgtggtgttcgtgtccaagaagggactgcagaaaatcctgaacgtgcagaagaagctgcccatcatccagaaaatcatcatcatggacagcaagaccgactaccagggcttccagagcatgtacaccttcgtgaccagccatctgccacctggcttcaacgagtacgacttcgtgcccgagagcttcgaccgggacaagacaatcgccctgatcatgaacagcagcggctctaccggactgcccaaaggtgttgccctgcctcatagaactgcctgcgtgcggtttagccacgccagagatcccatcttcggcaaccagatcatccccgacacagccatcctgagcgtggtgccttttcaccacggcttcggcatgttcaccacactgggctacctgatctgcggcttcagagtggtgctgatgtaccgcttcgaggaagaactgttcctgcggagcctgcaggactacaagatccagtctgctctgctggtgcctactctgttcagcttctttgccaagagcaccctgatcgataagtacgacctgagcaacctgcacgagatcgcctctggcggagcccctctgtctaaagaagtgggagaagccgtcgccaagcggttccatctgcctggcatcagacaaggctatggcctgaccgagacaaccagcgccattctgattacccctgagggcgacgataagcctggcgctgtgggaaaagtggtgccattcttcgaggccaaggtggtggatctggacaccggcaaaacactgggcgttaaccagaggggcgagctgtgtgttagaggccctatgatcatgagcggctacgtgaacaaccccgaggccacaaacgctctgatcgacaaggatggatggctgcacagcggcgacattgcctactgggacgaagatgagcacttcttcatcgtggaccggctgaagtccctgatcaagtacaagggctaccaggtggccccagccgagctggaatctattctgctgcaacaccccaacatcttcgatgccggcgttgcaggactgcccgatgatgatgctggcgaactgccagctgctgtggtggtgctggaacacggcaagaccatgaccgagaaagaaatcgtggactacgtggccagccaagtgaccaccgccaagaaactgagaggcggcgtggtgtttgtggacgaggtgccaaaaggcctgacaggcaagctggacgcccggaagatcagagagatcctgattaaggccaagaaaggcggcaagatcgccgtgtaatagctaactagacaaaacaccaaacaaacaagctgcgagccacggacttaaataattgagccttaaagaagaaattctttaagtggatgctctcaaactcagggaaacctaaatctagttatagacaaggcaatcctgagccaagccgaagtagtaattagtaagttaacaatagatgacttacaactaatcggaaggtgcagagactcgacgggagctaccctaacgtcaagacgagggtaaagagagagtccaattctcaaagccaataggcagtagcgaaagctgcaagagaatgaaaaaacaaccaaaaaaaatctagatatcggatcccggg

SEQ ID NO: 3478 - DNA, 2831 bp, synthetic construct
  source 1..2831: mol_type = other DNA; note = Ana1.259
taatacgactcactatagggagaccctcgaaaaaaaacacaaacaccaatccgtggctcgcagcaaacaccaaacaaaacaaacacaaaccaacaaaaattaaaacagcctgtgggttgatcccacccacaggcccattgggcgctagcactctggtatcacggtacctttgtgcgcctgttttataccccctcccccaactgtaacttagaagtaacacacaccgatcaacagtcagcgtggcacaccagccacgttttgatcaagcacttctgttaccccggactgagtatcaatagactgctcacgcggttgaaggagaaagcgttcgttatccggccaactacttcgaaaaacctagtaacaccgtggaagttgcagagtgtttcgctcagcactaccccagtgtagatcaggtcgatgagtcaccgcattccccacgggcgaccgtggcggtggctgcgttggcggcctgcccatggggaaacccatgggacgctctaatacagacatggtgcgaagagtctattgagctagttggtagtcctccggcccctgaatgcggctaatcctaactgcggagcacacaccctcaagccagagggcagtgtgtcgtaacgggcaactctgcagcggaaccgactactttgggtgtccgtgtttcattttattcctatactggctgcttatggtgacaattgagagatcgttaccatatagctattggattggccatccggtgactaatagagctattatatatccctttgttgggtttataccacttagcttgaaagaggttaaaacattacaattcattgttaagttgaatacagcaaaatggaagatgccaagaacatcaagaagggccctgctccattctaccctctggaagatggaacagccggcgagcagctgcacaaggccatgaagagatatgccctggtgcctggcacaatcgccttcacagatgcccacatcgaggtggacatcacctacgccgagtacttcgagatgtctgtgcggctggccgaagctatgaagcgctacggcctgaacaccaaccaccggatcgtcgtgtgcagcgagaacagcctgcagttcttcatgcctgtgctgggcgccctgttcatcggagttgctgtggcccctgccaacgacatctacaacgagcgcgagctgctgaacagcatgggcatctctcagcccaccgtggtgttcgtgtccaagaagggactgcagaaaatcctgaacgtgcagaagaagctgcccatcatccagaaaatcatcatcatggacagcaagaccgactaccagggcttccagagcatgtacaccttcgtgaccagccatctgccacctggcttcaacgagtacgacttcgtgcccgagagcttcgaccgggacaagacaatcgccctgatcatgaacagcagcggctctaccggactgcccaaaggtgttgccctgcctcatagaactgcctgcgtgcggtttagccacgccagagatcccatcttcggcaaccagatcatccccgacacagccatcctgagcgtggtgccttttcaccacggcttcggcatgttcaccacactgggctacctgatctgcggcttcagagtggtgctgatgtaccgcttcgaggaagaactgttcctgcggagcctgcaggactacaagatccagtctgctctgctggtgcctactctgttcagcttctttgccaagagcaccctgatcgataagtacgacctgagcaacctgcacgagatcgcctctggcggagcccctctgtctaaagaagtgggagaagccgtcgccaagcggttccatctgcctggcatcagacaaggctatggcctgaccgagacaaccagcgccattctgattacccctgagggcgacgataagcctggcgctgtgggaaaagtggtgccattcttcgaggccaaggtggtggatctggacaccggcaaaacactgggcgttaaccagaggggcgagctgtgtgttagaggccctatgatcatgagcggctacgtgaacaaccccgaggccacaaacgctctgatcgacaaggatggatggctgcacagcggcgacattgcctactgggacgaagatgagcacttcttcatcgtggaccggctgaagtccctgatcaagtacaagggctaccaggtggccccagccgagctggaatctattctgctgcaacaccccaacatcttcgatgccggcgttgcaggactgcccgatgatgatgctggcgaactgccagctgctgtggtggtgctggaacacggcaagaccatgaccgagaaagaaatcgtggactacgtggccagccaagtgaccaccgccaagaaactgagaggcggcgtggtgtttgtggacgaggtgccaaaaggcctgacaggcaagctggacgcccggaagatcagagagatcctgattaaggccaagaaaggcggcaagatcgccgtgtaatagctaactagacaaaacaccaaacaaacaagctgcgagccacggacttaaataattgagccttaaagaagaaattctttaagtggatgctctcaaactcagggaaacctaaatctagttatagacaaggcaatcctgagccaagccgaagtagtaattagtaagttaacaatagatgacttacaactaatcggaaggtgcagagactcgacgggagctaccctaacgtcaagacgagggtaaagagagagtccaattctcaaagccaataggcagtagcgaaagctgcaagagaatgaaaaaaacaaccaaaaaaaatctagatatcggatcccggg

SEQ ID NO: 3479 - DNA, 2831 bp, synthetic construct
  source 1..2831: mol_type = other DNA; note = Ana1.260
taatacgactcactatagggagaccctcgaaaaaaaacacaaacaccatccgtggctcgcagcaaacaccaaacaaaacaaacacaaaccaacaaaaattaaaacagcctgtgggttgatcccacccacaggcccattgggcgctagcactctggtatcacggtacctttgtgcgcctgttttataccccctcccccaactgtaacttagaagtaacacacaccgatcaacagtcagcgtggcacaccagccacgttttgatcaagcacttctgttaccccggactgagtatcaatagactgctcacgcggttgaaggagaaagcgttcgttatccggccaactacttcgaaaaacctagtaacaccgtggaagttgcagagtgtttcgctcagcactaccccagtgtagatcaggtcgatgagtcaccgcattccccacgggcgaccgtggcggtggctgcgttggcggcctgcccatggggaaacccatgggacgctctaatacagacatggtgcgaagagtctattgagctagttggtagtcctccggcccctgaatgcggctaatcctaactgcggagcacacaccctcaagccagagggcagtgtgtcgtaacgggcaactctgcagcggaaccgactactttgggtgtccgtgtttcattttattcctatactggctgcttatggtgacaattgagagatcgttaccatatagctattggattggccatccggtgactaatagagctattatatatccctttgttgggtttataccacttagcttgaaagaggttaaaacattacaattcattgttaagttgaatacagcaaaatggaagatgccaagaacatcaagaagggccctgctccattctaccctctggaagatggaacagccggcgagcagctgcacaaggccatgaagagatatgccctggtgcctggcacaatcgccttcacagatgcccacatcgaggtggacatcacctacgccgagtacttcgagatgtctgtgcggctggccgaagctatgaagcgctacggcctgaacaccaaccaccggatcgtcgtgtgcagcgagaacagcctgcagttcttcatgcctgtgctgggcgccctgttcatcggagttgctgtggcccctgccaacgacatctacaacgagcgcgagctgctgaacagcatgggcatctctcagcccaccgtggtgttcgtgtccaagaagggactgcagaaaatcctgaacgtgcagaagaagctgcccatcatccagaaaatcatcatcatggacagcaagaccgactaccagggcttccagagcatgtacaccttcgtgaccagccatctgccacctggcttcaacgagtacgacttcgtgcccgagagcttcgaccgggacaagacaatcgccctgatcatgaacagcagcggctctaccggactgcccaaaggtgttgccctgcctcatagaactgcctgcgtgcggtttagccacgccagagatcccatcttcggcaaccagatcatccccgacacagccatcctgagcgtggtgccttttcaccacggcttcggcatgttcaccacactgggctacctgatctgcggcttcagagtggtgctgatgtaccgcttcgaggaagaactgttcctgcggagcctgcaggactacaagatccagtctgctctgctggtgcctactctgttcagcttctttgccaagagcaccctgatcgataagtacgacctgagcaacctgcacgagatcgcctctggcggagcccctctgtctaaagaagtgggagaagccgtcgccaagcggttccatctgcctggcatcagacaaggctatggcctgaccgagacaaccagcgccattctgattacccctgagggcgacgataagcctggcgctgtgggaaaagtggtgccattcttcgaggccaaggtggtggatctggacaccggcaaaacactgggcgttaaccagaggggcgagctgtgtgttagaggccctatgatcatgagcggctacgtgaacaaccccgaggccacaaacgctctgatcgacaaggatggatggctgcacagcggcgacattgcctactgggacgaagatgagcacttcttcatcgtggaccggctgaagtccctgatcaagtacaagggctaccaggtggccccagccgagctggaatctattctgctgcaacaccccaacatcttcgatgccggcgttgcaggactgcccgatgatgatgctggcgaactgccagctgctgtggtggtgctggaacacggcaagaccatgaccgagaaagaaatcgtggactacgtggccagccaagtgaccaccgccaagaaactgagaggcggcgtggtgtttgtggacgaggtgccaaaaggcctgacaggcaagctggacgcccggaagatcagagagatcctgattaaggccaagaaaggcggcaagatcgccgtgtaatagctaactagacaaaacaccaaacaaacaagctgcgagccacggacttaaataattgagccttaaagaagaaattctttaagtggatgctctcaaactcagggaaacctaaatctagttatagacaaggcaatcctgagccaagccgaagtagtaattagtaagttaacaatagatgacttacaactaatcggaaggtgcagagactcgacgggagctaccctaacgtcaagacgagggtaaagagagagtccaattctcaaagccaataggcagtagcgaaagctgcaagagaatgaaaaaaaacaaccaaaaaaaatctagatatcggatcccggg

SEQ ID NO: 3480 - DNA, 2831 bp, synthetic construct
  source 1..2831: mol_type = other DNA; note = Ana1.262
taatacgactcactatagggagaccctcgaaaaaaaacacaaacaccccgtggctcgcagcaaacaccaaacaaaacaaacacaaaccaacaaaaattaaaacagcctgtgggttgatcccacccacaggcccattgggcgctagcactctggtatcacggtacctttgtgcgcctgttttataccccctcccccaactgtaacttagaagtaacacacaccgatcaacagtcagcgtggcacaccagccacgttttgatcaagcacttctgttaccccggactgagtatcaatagactgctcacgcggttgaaggagaaagcgttcgttatccggccaactacttcgaaaaacctagtaacaccgtggaagttgcagagtgtttcgctcagcactaccccagtgtagatcaggtcgatgagtcaccgcattccccacgggcgaccgtggcggtggctgcgttggcggcctgcccatggggaaacccatgggacgctctaatacagacatggtgcgaagagtctattgagctagttggtagtcctccggcccctgaatgcggctaatcctaactgcggagcacacaccctcaagccagagggcagtgtgtcgtaacgggcaactctgcagcggaaccgactactttgggtgtccgtgtttcattttattcctatactggctgcttatggtgacaattgagagatcgttaccatatagctattggattggccatccggtgactaatagagctattatatatccctttgttgggtttataccacttagcttgaaagaggttaaaacattacaattcattgttaagttgaatacagcaaaatggaagatgccaagaacatcaagaagggccctgctccattctaccctctggaagatggaacagccggcgagcagctgcacaaggccatgaagagatatgccctggtgcctggcacaatcgccttcacagatgcccacatcgaggtggacatcacctacgccgagtacttcgagatgtctgtgcggctggccgaagctatgaagcgctacggcctgaacaccaaccaccggatcgtcgtgtgcagcgagaacagcctgcagttcttcatgcctgtgctgggcgccctgttcatcggagttgctgtggcccctgccaacgacatctacaacgagcgcgagctgctgaacagcatgggcatctctcagcccaccgtggtgttcgtgtccaagaagggactgcagaaaatcctgaacgtgcagaagaagctgcccatcatccagaaaatcatcatcatggacagcaagaccgactaccagggcttccagagcatgtacaccttcgtgaccagccatctgccacctggcttcaacgagtacgacttcgtgcccgagagcttcgaccgggacaagacaatcgccctgatcatgaacagcagcggctctaccggactgcccaaaggtgttgccctgcctcatagaactgcctgcgtgcggtttagccacgccagagatcccatcttcggcaaccagatcatccccgacacagccatcctgagcgtggtgccttttcaccacggcttcggcatgttcaccacactgggctacctgatctgcggcttcagagtggtgctgatgtaccgcttcgaggaagaactgttcctgcggagcctgcaggactacaagatccagtctgctctgctggtgcctactctgttcagcttctttgccaagagcaccctgatcgataagtacgacctgagcaacctgcacgagatcgcctctggcggagcccctctgtctaaagaagtgggagaagccgtcgccaagcggttccatctgcctggcatcagacaaggctatggcctgaccgagacaaccagcgccattctgattacccctgagggcgacgataagcctggcgctgtgggaaaagtggtgccattcttcgaggccaaggtggtggatctggacaccggcaaaacactgggcgttaaccagaggggcgagctgtgtgttagaggccctatgatcatgagcggctacgtgaacaaccccgaggccacaaacgctctgatcgacaaggatggatggctgcacagcggcgacattgcctactgggacgaagatgagcacttcttcatcgtggaccggctgaagtccctgatcaagtacaagggctaccaggtggccccagccgagctggaatctattctgctgcaacaccccaacatcttcgatgccggcgttgcaggactgcccgatgatgatgctggcgaactgccagctgctgtggtggtgctggaacacggcaagaccatgaccgagaaagaaatcgtggactacgtggccagccaagtgaccaccgccaagaaactgagaggcggcgtggtgtttgtggacgaggtgccaaaaggcctgacaggcaagctggacgcccggaagatcagagagatcctgattaaggccaagaaaggcggcaagatcgccgtgtaatagctaactagacaaaacaccaaacaaacaagctgcgagccacggacttaaataattgagccttaaagaagaaattctttaagtggatgctctcaaactcagggaaacctaaatctagttatagacaaggcaatcctgagccaagccgaagtagtaattagtaagttaacaatagatgacttacaactaatcggaaggtgcagagactcgacgggagctaccctaacgtcaagacgagggtaaagagagagtccaattctcaaagccaataggcagtagcgaaagctgcaagagaatgaaaataaaaacaaccaaaaaaaatctagatatcggatcccggg

SEQ ID NO: 3481 - DNA, 2831 bp, synthetic construct
  source 1..2831: mol_type = other DNA; note = Ana1.263
taatacgactcactatagggagaccctcgaaaaaaaacacaaacacccgtggctcgcagcaaacaccaaacaaaacaaacacaaaccaacaaaaattaaaacagcctgtgggttgatcccacccacaggcccattgggcgctagcactctggtatcacggtacctttgtgcgcctgttttataccccctcccccaactgtaacttagaagtaacacacaccgatcaacagtcagcgtggcacaccagccacgttttgatcaagcacttctgttaccccggactgagtatcaatagactgctcacgcggttgaaggagaaagcgttcgttatccggccaactacttcgaaaaacctagtaacaccgtggaagttgcagagtgtttcgctcagcactaccccagtgtagatcaggtcgatgagtcaccgcattccccacgggcgaccgtggcggtggctgcgttggcggcctgcccatggggaaacccatgggacgctctaatacagacatggtgcgaagagtctattgagctagttggtagtcctccggcccctgaatgcggctaatcctaactgcggagcacacaccctcaagccagagggcagtgtgtcgtaacgggcaactctgcagcggaaccgactactttgggtgtccgtgtttcattttattcctatactggctgcttatggtgacaattgagagatcgttaccatatagctattggattggccatccggtgactaatagagctattatatatccctttgttgggtttataccacttagcttgaaagaggttaaaacattacaattcattgttaagttgaatacagcaaaatggaagatgccaagaacatcaagaagggccctgctccattctaccctctggaagatggaacagccggcgagcagctgcacaaggccatgaagagatatgccctggtgcctggcacaatcgccttcacagatgcccacatcgaggtggacatcacctacgccgagtacttcgagatgtctgtgcggctggccgaagctatgaagcgctacggcctgaacaccaaccaccggatcgtcgtgtgcagcgagaacagcctgcagttcttcatgcctgtgctgggcgccctgttcatcggagttgctgtggcccctgccaacgacatctacaacgagcgcgagctgctgaacagcatgggcatctctcagcccaccgtggtgttcgtgtccaagaagggactgcagaaaatcctgaacgtgcagaagaagctgcccatcatccagaaaatcatcatcatggacagcaagaccgactaccagggcttccagagcatgtacaccttcgtgaccagccatctgccacctggcttcaacgagtacgacttcgtgcccgagagcttcgaccgggacaagacaatcgccctgatcatgaacagcagcggctctaccggactgcccaaaggtgttgccctgcctcatagaactgcctgcgtgcggtttagccacgccagagatcccatcttcggcaaccagatcatccccgacacagccatcctgagcgtggtgccttttcaccacggcttcggcatgttcaccacactgggctacctgatctgcggcttcagagtggtgctgatgtaccgcttcgaggaagaactgttcctgcggagcctgcaggactacaagatccagtctgctctgctggtgcctactctgttcagcttctttgccaagagcaccctgatcgataagtacgacctgagcaacctgcacgagatcgcctctggcggagcccctctgtctaaagaagtgggagaagccgtcgccaagcggttccatctgcctggcatcagacaaggctatggcctgaccgagacaaccagcgccattctgattacccctgagggcgacgataagcctggcgctgtgggaaaagtggtgccattcttcgaggccaaggtggtggatctggacaccggcaaaacactgggcgttaaccagaggggcgagctgtgtgttagaggccctatgatcatgagcggctacgtgaacaaccccgaggccacaaacgctctgatcgacaaggatggatggctgcacagcggcgacattgcctactgggacgaagatgagcacttcttcatcgtggaccggctgaagtccctgatcaagtacaagggctaccaggtggccccagccgagctggaatctattctgctgcaacaccccaacatcttcgatgccggcgttgcaggactgcccgatgatgatgctggcgaactgccagctgctgtggtggtgctggaacacggcaagaccatgaccgagaaagaaatcgtggactacgtggccagccaagtgaccaccgccaagaaactgagaggcggcgtggtgtttgtggacgaggtgccaaaaggcctgacaggcaagctggacgcccggaagatcagagagatcctgattaaggccaagaaaggcggcaagatcgccgtgtaatagctaactagacaaaacaccaaacaaacaagctgcgagccacggacttaaataattgagccttaaagaagaaattctttaagtggatgctctcaaactcagggaaacctaaatctagttatagacaaggcaatcctgagccaagccgaagtagtaattagtaagttaacaatagatgacttacaactaatcggaaggtgcagagactcgacgggagctaccctaacgtcaagacgagggtaaagagagagtccaattctcaaagccaataggcagtagcgaaagctgcaagagaatgaaaatcaaaaacaaccaaaaaaaatctagatatcggatcccggg

SEQ ID NO: 3482 - DNA, 2831 bp, synthetic construct
  source 1..2831: mol_type = other DNA; note = Ana1.264
taatacgactcactatagggagaccctcgaaaaaaaacacaaacaccgtggctcgcagcaaacaccaaacaaaacaaacacaaaccaacaaaaattaaaacagcctgtgggttgatcccacccacaggcccattgggcgctagcactctggtatcacggtacctttgtgcgcctgttttataccccctcccccaactgtaacttagaagtaacacacaccgatcaacagtcagcgtggcacaccagccacgttttgatcaagcacttctgttaccccggactgagtatcaatagactgctcacgcggttgaaggagaaagcgttcgttatccggccaactacttcgaaaaacctagtaacaccgtggaagttgcagagtgtttcgctcagcactaccccagtgtagatcaggtcgatgagtcaccgcattccccacgggcgaccgtggcggtggctgcgttggcggcctgcccatggggaaacccatgggacgctctaatacagacatggtgcgaagagtctattgagctagttggtagtcctccggcccctgaatgcggctaatcctaactgcggagcacacaccctcaagccagagggcagtgtgtcgtaacgggcaactctgcagcggaaccgactactttgggtgtccgtgtttcattttattcctatactggctgcttatggtgacaattgagagatcgttaccatatagctattggattggccatccggtgactaatagagctattatatatccctttgttgggtttataccacttagcttgaaagaggttaaaacattacaattcattgttaagttgaatacagcaaaatggaagatgccaagaacatcaagaagggccctgctccattctaccctctggaagatggaacagccggcgagcagctgcacaaggccatgaagagatatgccctggtgcctggcacaatcgccttcacagatgcccacatcgaggtggacatcacctacgccgagtacttcgagatgtctgtgcggctggccgaagctatgaagcgctacggcctgaacaccaaccaccggatcgtcgtgtgcagcgagaacagcctgcagttcttcatgcctgtgctgggcgccctgttcatcggagttgctgtggcccctgccaacgacatctacaacgagcgcgagctgctgaacagcatgggcatctctcagcccaccgtggtgttcgtgtccaagaagggactgcagaaaatcctgaacgtgcagaagaagctgcccatcatccagaaaatcatcatcatggacagcaagaccgactaccagggcttccagagcatgtacaccttcgtgaccagccatctgccacctggcttcaacgagtacgacttcgtgcccgagagcttcgaccgggacaagacaatcgccctgatcatgaacagcagcggctctaccggactgcccaaaggtgttgccctgcctcatagaactgcctgcgtgcggtttagccacgccagagatcccatcttcggcaaccagatcatccccgacacagccatcctgagcgtggtgccttttcaccacggcttcggcatgttcaccacactgggctacctgatctgcggcttcagagtggtgctgatgtaccgcttcgaggaagaactgttcctgcggagcctgcaggactacaagatccagtctgctctgctggtgcctactctgttcagcttctttgccaagagcaccctgatcgataagtacgacctgagcaacctgcacgagatcgcctctggcggagcccctctgtctaaagaagtgggagaagccgtcgccaagcggttccatctgcctggcatcagacaaggctatggcctgaccgagacaaccagcgccattctgattacccctgagggcgacgataagcctggcgctgtgggaaaagtggtgccattcttcgaggccaaggtggtggatctggacaccggcaaaacactgggcgttaaccagaggggcgagctgtgtgttagaggccctatgatcatgagcggctacgtgaacaaccccgaggccacaaacgctctgatcgacaaggatggatggctgcacagcggcgacattgcctactgggacgaagatgagcacttcttcatcgtggaccggctgaagtccctgatcaagtacaagggctaccaggtggccccagccgagctggaatctattctgctgcaacaccccaacatcttcgatgccggcgttgcaggactgcccgatgatgatgctggcgaactgccagctgctgtggtggtgctggaacacggcaagaccatgaccgagaaagaaatcgtggactacgtggccagccaagtgaccaccgccaagaaactgagaggcggcgtggtgtttgtggacgaggtgccaaaaggcctgacaggcaagctggacgcccggaagatcagagagatcctgattaaggccaagaaaggcggcaagatcgccgtgtaatagctaactagacaaaacaccaaacaaacaagctgcgagccacggacttaaataattgagccttaaagaagaaattctttaagtggatgctctcaaactcagggaaacctaaatctagttatagacaaggcaatcctgagccaagccgaagtagtaattagtaagttaacaatagatgacttacaactaatcggaaggtgcagagactcgacgggagctaccctaacgtcaagacgagggtaaagagagagtccaattctcaaagccaataggcagtagcgaaagctgcaagagaatgaaaatccaaaaacaaccaaaaaaaatctagatatcggatcccggg

SEQ ID NO: 3483 - DNA, 2831 bp, synthetic construct
  source 1..2831: mol_type = other DNA; note = Ana1.265
taatacgactcactatagggagaccctcgaaaaaaaacacaaacacctggctcgcagcaaacaccaaacaaaacaaacacaaaccaacaaaaattaaaacagcctgtgggttgatcccacccacaggcccattgggcgctagcactctggtatcacggtacctttgtgcgcctgttttataccccctcccccaactgtaacttagaagtaacacacaccgatcaacagtcagcgtggcacaccagccacgttttgatcaagcacttctgttaccccggactgagtatcaatagactgctcacgcggttgaaggagaaagcgttcgttatccggccaactacttcgaaaaacctagtaacaccgtggaagttgcagagtgtttcgctcagcactaccccagtgtagatcaggtcgatgagtcaccgcattccccacgggcgaccgtggcggtggctgcgttggcggcctgcccatggggaaacccatgggacgctctaatacagacatggtgcgaagagtctattgagctagttggtagtcctccggcccctgaatgcggctaatcctaactgcggagcacacaccctcaagccagagggcagtgtgtcgtaacgggcaactctgcagcggaaccgactactttgggtgtccgtgtttcattttattcctatactggctgcttatggtgacaattgagagatcgttaccatatagctattggattggccatccggtgactaatagagctattatatatccctttgttgggtttataccacttagcttgaaagaggttaaaacattacaattcattgttaagttgaatacagcaaaatggaagatgccaagaacatcaagaagggccctgctccattctaccctctggaagatggaacagccggcgagcagctgcacaaggccatgaagagatatgccctggtgcctggcacaatcgccttcacagatgcccacatcgaggtggacatcacctacgccgagtacttcgagatgtctgtgcggctggccgaagctatgaagcgctacggcctgaacaccaaccaccggatcgtcgtgtgcagcgagaacagcctgcagttcttcatgcctgtgctgggcgccctgttcatcggagttgctgtggcccctgccaacgacatctacaacgagcgcgagctgctgaacagcatgggcatctctcagcccaccgtggtgttcgtgtccaagaagggactgcagaaaatcctgaacgtgcagaagaagctgcccatcatccagaaaatcatcatcatggacagcaagaccgactaccagggcttccagagcatgtacaccttcgtgaccagccatctgccacctggcttcaacgagtacgacttcgtgcccgagagcttcgaccgggacaagacaatcgccctgatcatgaacagcagcggctctaccggactgcccaaaggtgttgccctgcctcatagaactgcctgcgtgcggtttagccacgccagagatcccatcttcggcaaccagatcatccccgacacagccatcctgagcgtggtgccttttcaccacggcttcggcatgttcaccacactgggctacctgatctgcggcttcagagtggtgctgatgtaccgcttcgaggaagaactgttcctgcggagcctgcaggactacaagatccagtctgctctgctggtgcctactctgttcagcttctttgccaagagcaccctgatcgataagtacgacctgagcaacctgcacgagatcgcctctggcggagcccctctgtctaaagaagtgggagaagccgtcgccaagcggttccatctgcctggcatcagacaaggctatggcctgaccgagacaaccagcgccattctgattacccctgagggcgacgataagcctggcgctgtgggaaaagtggtgccattcttcgaggccaaggtggtggatctggacaccggcaaaacactgggcgttaaccagaggggcgagctgtgtgttagaggccctatgatcatgagcggctacgtgaacaaccccgaggccacaaacgctctgatcgacaaggatggatggctgcacagcggcgacattgcctactgggacgaagatgagcacttcttcatcgtggaccggctgaagtccctgatcaagtacaagggctaccaggtggccccagccgagctggaatctattctgctgcaacaccccaacatcttcgatgccggcgttgcaggactgcccgatgatgatgctggcgaactgccagctgctgtggtggtgctggaacacggcaagaccatgaccgagaaagaaatcgtggactacgtggccagccaagtgaccaccgccaagaaactgagaggcggcgtggtgtttgtggacgaggtgccaaaaggcctgacaggcaagctggacgcccggaagatcagagagatcctgattaaggccaagaaaggcggcaagatcgccgtgtaatagctaactagacaaaacaccaaacaaacaagctgcgagccacggacttaaataattgagccttaaagaagaaattctttaagtggatgctctcaaactcagggaaacctaaatctagttatagacaaggcaatcctgagccaagccgaagtagtaattagtaagttaacaatagatgacttacaactaatcggaaggtgcagagactcgacgggagctaccctaacgtcaagacgagggtaaagagagagtccaattctcaaagccaataggcagtagcgaaagctgcaagagaatgaaaatccgaaaaacaaccaaaaaaaatctagatatcggatcccggg

SEQ ID NO: 3484 - DNA, 5076 bp, synthetic construct
  source 1..5076: mol_type = other DNA; note = Ana 8 Exonextention
aggctaggtggaggctcagtgtgataagtctgcgatggtggatgcatgtgtcatggtcatagctgtttcctgtgtgaaattgttatccgctcagagggcacaatcctattccgcgctatccgacaatctccaagacattaggtggagttcagttcggcgtatggcatatgtcgctggaaagaacatgtgagcaaaaggccagcaaaaggccaggaaccgtaaaaaggccgcgttgctggcgtttttccataggctccgcccccctgacgagcatcacaaaaatcgacgctcaagtcagaggtggcgaaacccgacaggactataaagataccaggcgtttccccctggaagctccctcgtgcgctctcctgttccgaccctgccgcttaccggatacctgtccgcctttctcccttcgggaagcgtggcgctttctcatagctcacgctgtaggtatctcagttcggtgtaggtcgttcgctccaagctgggctgtgtgcacgaaccccccgttcagcccgaccgctgcgccttatccggtaactatcgtcttgagtccaacccggtaagacacgacttatcgccactggcagcagccactggtaacaggattagcagagcgaggtatgtaggcggtgctacagagttcttgaagtggtggcctaactacggctacactagaagaacagtatttggtatctgcgctctgctgaagccagttaccttcggaaaaagagttggtagctcttgatccggcaaacaaaccaccgctggtagcggtggtttttttgtttgcaagcagcagattacgcgcagaaaaaaaggatctcaagaagatcctttgatcttttctacggggtctgacgctctattcaacaaagccgccgtcccgtcaagtcagcgtaaatgggtagggggcttcaaatcgtcctcgtgataccaattcggagcctgcttttttgtacaaacttgttgataatggcaattcaaggatcttcacctagatccttttaaattaaaaatgaagttttaaatcaatctaaagtatatatgagtaaacttggtctgacagttaccaatgcttaatcagtgaggcacctatctcagcgatctgtctatttcgttcatccatagttgcctgactccccgtcgtgtagataactacgatacgggagggcttaccatctggccccagtgctgcaatgataccgcgagagccacgctcaccggctccagatttatcagcaataaaccagccagccggaagggccgagcgcagaagtggtcctgcaactttatccgcctccatccagtctattaattgttgccgggaagctagagtaagtagttcgccagttaatagtttgcgcaacgttgttgccattgctacaggcatcgtggtgtcacgctcgtcgtttggtatggcttcattcagctccggttcccaacgatcaaggcgagttacatgatcccccatgttgtgcaaaaaagcggttagctccttcggtcctccgatcgttgtcagaagtaagttggccgcagtgttatcactcatggttatggcagcactgcataattctcttactgtcatgccatccgtaagatgcttttctgtgactggtgagtactcaaccaagtcattctgagaatagtgtatgcggcgaccgagttgctcttgcccggcgtcaatacgggataataccgcgccacatagcagaactttaaaagtgctcatcattggaaaacgttcttcggggcgaaaactctcaaggatcttaccgctgttgagatccagttcgatgtaacccactcgtgcacccaactgatcttcagcatcttttactttcaccagcgtttctgggtgagcaaaaacaggaaggcaaaatgccgcaaaaaagggaataagggcgacacggaaatgttgaatactcatactcttcctttttcaatattattgaagcatttatcagggttattgtctcatgagcggatacatatttgaatgtatttagaaaaataaacaaataggggttccgcgcacatttccccgaaaagtgccagatacctgaaacaaaacccatcgtacggccaaggaagtctccaataactgtgatccaccacaagcgccagggttttcccagtcacgacgttgtaaaacgacggccagtcatgcataatccgcacgcatctggaataaggaagtgccattccgcctgaccttaatacgactcactatagggagaccctcgaaaaaaaacacacacaccaaataattgagccttaaagaagaaattctttaagtggatgctctcaaactcagggaaacctaaatctagttatagacaaggcaatcctgagccaagccgaagtagtaattagtaagttaacaatagatgacttacaactaatcggaaggtgcagagactcgacgggagctaccctaacgtcaagacgagggtaaagagagagtccaattctcaaagccaataggcagtagcgaaagctgcaagagaatgaaaatccgttgaccttaaacggtcgtgtgggggctcgcagcaaacaccaaacaaaacaaacacaaaccaacaaaaattaaaacagcctgtgggttgatcccacccacaggcccattgggcgctagcactctggtatcacggtacctttgtgcgcctgttttataccccctcccccaactgtaacttagaagtaacacacaccgatcaacagtcagcgtggcacaccagccacgttttgatcaagcacttctgttaccccggactgagtatcaatagactgctcacgcggttgaaggagaaagcgttcgttatccggccaactacttcgaaaaacctagtaacaccgtggaagttgcagagtgtttcgctcagcactaccccagtgtagatcaggtcgatgagtcaccgcattccccacgggcgaccgtggcggtggctgcgttggcggcctgcccatggggaaacccatgggacgctctaatacagacatggtgcgaagagtctattgagctagttggtagtcctccggcccctgaatgcggctaatcctaactgcggagcacacaccctcaagccagagggcagtgtgtcgtaacgggcaactctgcagcggaaccgactactttgggtgtccgtgtttcattttattcctatactggctgcttatggtgacaattgagagatcgttaccatatagctattggattggccatccggtgactaatagagctattatatatccctttgttgggtttataccacttagcttgaaagaggttaaaacattacaattcattgttaagttgaatacagcaaaatggaagatgccaagaacatcaagaagggccctgctccattctaccctctggaagatggaacagccggcgagcagctgcacaaggccatgaagagatatgccctggtgcctggcacaatcgccttcacagatgcccacatcgaggtggacatcacctacgccgagtacttcgagatgtctgtgcggctggccgaagctatgaagcgctacggcctgaacaccaaccaccggatcgtcgtgtgcagcgagaacagcctgcagttcttcatgcctgtgctgggcgccctgttcatcggagttgctgtggcccctgccaacgacatctacaacgagcgcgagctgctgaacagcatgggcatctctcagcccaccgtggtgttcgtgtccaagaagggactgcagaaaatcctgaacgtgcagaagaagctgcccatcatccagaaaatcatcatcatggacagcaagaccgactaccagggcttccagagcatgtacaccttcgtgaccagccatctgccacctggcttcaacgagtacgacttcgtgcccgagagcttcgaccgggacaagacaatcgccctgatcatgaacagcagcggctctaccggactgcccaaaggtgttgccctgcctcatagaactgcctgcgtgcggtttagccacgccagagatcccatcttcggcaaccagatcatccccgacacagccatcctgagcgtggtgccttttcaccacggcttcggcatgttcaccacactgggctacctgatctgcggcttcagagtggtgctgatgtaccgcttcgaggaagaactgttcctgcggagcctgcaggactacaagatccagtctgctctgctggtgcctactctgttcagcttctttgccaagagcaccctgatcgataagtacgacctgagcaacctgcacgagatcgcctctggcggagcccctctgtctaaagaagtgggagaagccgtcgccaagcggttccatctgcctggcatcagacaaggctatggcctgaccgagacaaccagcgccattctgattacccctgagggcgacgataagcctggcgctgtgggaaaagtggtgccattcttcgaggccaaggtggtggatctggacaccggcaaaacactgggcgttaaccagaggggcgagctgtgtgttagaggccctatgatcatgagcggctacgtgaacaaccccgaggccacaaacgctctgatcgacaaggatggatggctgcacagcggcgacattgcctactgggacgaagatgagcacttcttcatcgtggaccggctgaagtccctgatcaagtacaagggctaccaggtggccccagccgagctggaatctattctgctgcaacaccccaacatcttcgatgccggcgttgcaggactgcccgatgatgatgctggcgaactgccagctgctgtggtggtgctggaacacggcaagaccatgaccgagaaagaaatcgtggactacgtggccagccaagtgaccaccgccaagaaactgagaggcggcgtggtgtttgtggacgaggtgccaaaaggcctgacaggcaagctggacgcccggaagatcagagagatcctgattaaggccaagaaaggcggcaagatcgccgtgtaatagctaactagacaaaacaccaaacaaacaagctgcgagccgctacggacttaaaaacaaccaaaaaaaatctagatatcggatcccggg

SEQ ID NO: 3485 - DNA, 5057 bp, synthetic construct
  source 1..5057: mol_type = other DNA; note = Ana8 13ntIH
aggctaggtggaggctcagtgtgataagtctgcgatggtggatgcatgtgtcatggtcatagctgtttcctgtgtgaaattgttatccgctcagagggcacaatcctattccgcgctatccgacaatctccaagacattaggtggagttcagttcggcgtatggcatatgtcgctggaaagaacatgtgagcaaaaggccagcaaaaggccaggaaccgtaaaaaggccgcgttgctggcgtttttccataggctccgcccccctgacgagcatcacaaaaatcgacgctcaagtcagaggtggcgaaacccgacaggactataaagataccaggcgtttccccctggaagctccctcgtgcgctctcctgttccgaccctgccgcttaccggatacctgtccgcctttctcccttcgggaagcgtggcgctttctcatagctcacgctgtaggtatctcagttcggtgtaggtcgttcgctccaagctgggctgtgtgcacgaaccccccgttcagcccgaccgctgcgccttatccggtaactatcgtcttgagtccaacccggtaagacacgacttatcgccactggcagcagccactggtaacaggattagcagagcgaggtatgtaggcggtgctacagagttcttgaagtggtggcctaactacggctacactagaagaacagtatttggtatctgcgctctgctgaagccagttaccttcggaaaaagagttggtagctcttgatccggcaaacaaaccaccgctggtagcggtggtttttttgtttgcaagcagcagattacgcgcagaaaaaaaggatctcaagaagatcctttgatcttttctacggggtctgacgctctattcaacaaagccgccgtcccgtcaagtcagcgtaaatgggtagggggcttcaaatcgtcctcgtgataccaattcggagcctgcttttttgtacaaacttgttgataatggcaattcaaggatcttcacctagatccttttaaattaaaaatgaagttttaaatcaatctaaagtatatatgagtaaacttggtctgacagttaccaatgcttaatcagtgaggcacctatctcagcgatctgtctatttcgttcatccatagttgcctgactccccgtcgtgtagataactacgatacgggagggcttaccatctggccccagtgctgcaatgataccgcgagagccacgctcaccggctccagatttatcagcaataaaccagccagccggaagggccgagcgcagaagtggtcctgcaactttatccgcctccatccagtctattaattgttgccgggaagctagagtaagtagttcgccagttaatagtttgcgcaacgttgttgccattgctacaggcatcgtggtgtcacgctcgtcgtttggtatggcttcattcagctccggttcccaacgatcaaggcgagttacatgatcccccatgttgtgcaaaaaagcggttagctccttcggtcctccgatcgttgtcagaagtaagttggccgcagtgttatcactcatggttatggcagcactgcataattctcttactgtcatgccatccgtaagatgcttttctgtgactggtgagtactcaaccaagtcattctgagaatagtgtatgcggcgaccgagttgctcttgcccggcgtcaatacgggataataccgcgccacatagcagaactttaaaagtgctcatcattggaaaacgttcttcggggcgaaaactctcaaggatcttaccgctgttgagatccagttcgatgtaacccactcgtgcacccaactgatcttcagcatcttttactttcaccagcgtttctgggtgagcaaaaacaggaaggcaaaatgccgcaaaaaagggaataagggcgacacggaaatgttgaatactcatactcttcctttttcaatattattgaagcatttatcagggttattgtctcatgagcggatacatatttgaatgtatttagaaaaataaacaaataggggttccgcgcacatttccccgaaaagtgccagatacctgaaacaaaacccatcgtacggccaaggaagtctccaataactgtgatccaccacaagcgccagggttttcccagtcacgacgttgtaaaacgacggccagtcatgcataatccgcacgcatctggaataaggaagtgccattccgcctgaccttaatacgactcactatagggagaccctcgaaaaaaaacacacacaccaaataattgagccttaaagaagaaattctttaagtggatgctctcaaactcagggaaacctaaatctagttatagacaaggcaatcctgagccaagccgaagtagtaattagtaagttaacaatagatgacttacaactaatcggaaggtgcagagactcgacgggagctaccctaacgtcaagacgagggtaaagagagagtccaattctcaaagccaataggcagtagcgaaagctgcaagagaatgaaaatccgtcggctcgcagcggaaacaccaaacaaaacaaacacaaaccaacaaaaattaaaacagcctgtgggttgatcccacccacaggcccattgggcgctagcactctggtatcacggtacctttgtgcgcctgttttataccccctcccccaactgtaacttagaagtaacacacaccgatcaacagtcagcgtggcacaccagccacgttttgatcaagcacttctgttaccccggactgagtatcaatagactgctcacgcggttgaaggagaaagcgttcgttatccggccaactacttcgaaaaacctagtaacaccgtggaagttgcagagtgtttcgctcagcactaccccagtgtagatcaggtcgatgagtcaccgcattccccacgggcgaccgtggcggtggctgcgttggcggcctgcccatggggaaacccatgggacgctctaatacagacatggtgcgaagagtctattgagctagttggtagtcctccggcccctgaatgcggctaatcctaactgcggagcacacaccctcaagccagagggcagtgtgtcgtaacgggcaactctgcagcggaaccgactactttgggtgtccgtgtttcattttattcctatactggctgcttatggtgacaattgagagatcgttaccatatagctattggattggccatccggtgactaatagagctattatatatccctttgttgggtttataccacttagcttgaaagaggttaaaacattacaattcattgttaagttgaatacagcaaaatggaagatgccaagaacatcaagaagggccctgctccattctaccctctggaagatggaacagccggcgagcagctgcacaaggccatgaagagatatgccctggtgcctggcacaatcgccttcacagatgcccacatcgaggtggacatcacctacgccgagtacttcgagatgtctgtgcggctggccgaagctatgaagcgctacggcctgaacaccaaccaccggatcgtcgtgtgcagcgagaacagcctgcagttcttcatgcctgtgctgggcgccctgttcatcggagttgctgtggcccctgccaacgacatctacaacgagcgcgagctgctgaacagcatgggcatctctcagcccaccgtggtgttcgtgtccaagaagggactgcagaaaatcctgaacgtgcagaagaagctgcccatcatccagaaaatcatcatcatggacagcaagaccgactaccagggcttccagagcatgtacaccttcgtgaccagccatctgccacctggcttcaacgagtacgacttcgtgcccgagagcttcgaccgggacaagacaatcgccctgatcatgaacagcagcggctctaccggactgcccaaaggtgttgccctgcctcatagaactgcctgcgtgcggtttagccacgccagagatcccatcttcggcaaccagatcatccccgacacagccatcctgagcgtggtgccttttcaccacggcttcggcatgttcaccacactgggctacctgatctgcggcttcagagtggtgctgatgtaccgcttcgaggaagaactgttcctgcggagcctgcaggactacaagatccagtctgctctgctggtgcctactctgttcagcttctttgccaagagcaccctgatcgataagtacgacctgagcaacctgcacgagatcgcctctggcggagcccctctgtctaaagaagtgggagaagccgtcgccaagcggttccatctgcctggcatcagacaaggctatggcctgaccgagacaaccagcgccattctgattacccctgagggcgacgataagcctggcgctgtgggaaaagtggtgccattcttcgaggccaaggtggtggatctggacaccggcaaaacactgggcgttaaccagaggggcgagctgtgtgttagaggccctatgatcatgagcggctacgtgaacaaccccgaggccacaaacgctctgatcgacaaggatggatggctgcacagcggcgacattgcctactgggacgaagatgagcacttcttcatcgtggaccggctgaagtccctgatcaagtacaagggctaccaggtggccccagccgagctggaatctattctgctgcaacaccccaacatcttcgatgccggcgttgcaggactgcccgatgatgatgctggcgaactgccagctgctgtggtggtgctggaacacggcaagaccatgaccgagaaagaaatcgtggactacgtggccagccaagtgaccaccgccaagaaactgagaggcggcgtggtgtttgtggacgaggtgccaaaaggcctgacaggcaagctggacgcccggaagatcagagagatcctgattaaggccaagaaaggcggcaagatcgccgtgtaatagctaactagacaaaacaccaaacaaacaaccgctgcgagccgacggacttaaaaacaaccaaaaaaaatctagatatcggatcccggg

SEQ ID NO: 3486 - DNA, 5061 bp, synthetic construct
  source 1..5061: mol_type = other DNA; note = Ana8 15ntIH
aggctaggtggaggctcagtgtgataagtctgcgatggtggatgcatgtgtcatggtcatagctgtttcctgtgtgaaattgttatccgctcagagggcacaatcctattccgcgctatccgacaatctccaagacattaggtggagttcagttcggcgtatggcatatgtcgctggaaagaacatgtgagcaaaaggccagcaaaaggccaggaaccgtaaaaaggccgcgttgctggcgtttttccataggctccgcccccctgacgagcatcacaaaaatcgacgctcaagtcagaggtggcgaaacccgacaggactataaagataccaggcgtttccccctggaagctccctcgtgcgctctcctgttccgaccctgccgcttaccggatacctgtccgcctttctcccttcgggaagcgtggcgctttctcatagctcacgctgtaggtatctcagttcggtgtaggtcgttcgctccaagctgggctgtgtgcacgaaccccccgttcagcccgaccgctgcgccttatccggtaactatcgtcttgagtccaacccggtaagacacgacttatcgccactggcagcagccactggtaacaggattagcagagcgaggtatgtaggcggtgctacagagttcttgaagtggtggcctaactacggctacactagaagaacagtatttggtatctgcgctctgctgaagccagttaccttcggaaaaagagttggtagctcttgatccggcaaacaaaccaccgctggtagcggtggtttttttgtttgcaagcagcagattacgcgcagaaaaaaaggatctcaagaagatcctttgatcttttctacggggtctgacgctctattcaacaaagccgccgtcccgtcaagtcagcgtaaatgggtagggggcttcaaatcgtcctcgtgataccaattcggagcctgcttttttgtacaaacttgttgataatggcaattcaaggatcttcacctagatccttttaaattaaaaatgaagttttaaatcaatctaaagtatatatgagtaaacttggtctgacagttaccaatgcttaatcagtgaggcacctatctcagcgatctgtctatttcgttcatccatagttgcctgactccccgtcgtgtagataactacgatacgggagggcttaccatctggccccagtgctgcaatgataccgcgagagccacgctcaccggctccagatttatcagcaataaaccagccagccggaagggccgagcgcagaagtggtcctgcaactttatccgcctccatccagtctattaattgttgccgggaagctagagtaagtagttcgccagttaatagtttgcgcaacgttgttgccattgctacaggcatcgtggtgtcacgctcgtcgtttggtatggcttcattcagctccggttcccaacgatcaaggcgagttacatgatcccccatgttgtgcaaaaaagcggttagctccttcggtcctccgatcgttgtcagaagtaagttggccgcagtgttatcactcatggttatggcagcactgcataattctcttactgtcatgccatccgtaagatgcttttctgtgactggtgagtactcaaccaagtcattctgagaatagtgtatgcggcgaccgagttgctcttgcccggcgtcaatacgggataataccgcgccacatagcagaactttaaaagtgctcatcattggaaaacgttcttcggggcgaaaactctcaaggatcttaccgctgttgagatccagttcgatgtaacccactcgtgcacccaactgatcttcagcatcttttactttcaccagcgtttctgggtgagcaaaaacaggaaggcaaaatgccgcaaaaaagggaataagggcgacacggaaatgttgaatactcatactcttcctttttcaatattattgaagcatttatcagggttattgtctcatgagcggatacatatttgaatgtatttagaaaaataaacaaataggggttccgcgcacatttccccgaaaagtgccagatacctgaaacaaaacccatcgtacggccaaggaagtctccaataactgtgatccaccacaagcgccagggttttcccagtcacgacgttgtaaaacgacggccagtcatgcataatccgcacgcatctggaataaggaagtgccattccgcctgaccttaatacgactcactatagggagaccctcgaaaaaaaacacacacaccaaataattgagccttaaagaagaaattctttaagtggatgctctcaaactcagggaaacctaaatctagttatagacaaggcaatcctgagccaagccgaagtagtaattagtaagttaacaatagatgacttacaactaatcggaaggtgcagagactcgacgggagctaccctaacgtcaagacgagggtaaagagagagtccaattctcaaagccaataggcagtagcgaaagctgcaagagaatgaaaatccgtgagcacgccggcgccaaacaccaaacaaaacaaacacaaaccaacaaaaattaaaacagcctgtgggttgatcccacccacaggcccattgggcgctagcactctggtatcacggtacctttgtgcgcctgttttataccccctcccccaactgtaacttagaagtaacacacaccgatcaacagtcagcgtggcacaccagccacgttttgatcaagcacttctgttaccccggactgagtatcaatagactgctcacgcggttgaaggagaaagcgttcgttatccggccaactacttcgaaaaacctagtaacaccgtggaagttgcagagtgtttcgctcagcactaccccagtgtagatcaggtcgatgagtcaccgcattccccacgggcgaccgtggcggtggctgcgttggcggcctgcccatggggaaacccatgggacgctctaatacagacatggtgcgaagagtctattgagctagttggtagtcctccggcccctgaatgcggctaatcctaactgcggagcacacaccctcaagccagagggcagtgtgtcgtaacgggcaactctgcagcggaaccgactactttgggtgtccgtgtttcattttattcctatactggctgcttatggtgacaattgagagatcgttaccatatagctattggattggccatccggtgactaatagagctattatatatccctttgttgggtttataccacttagcttgaaagaggttaaaacattacaattcattgttaagttgaatacagcaaaatggaagatgccaagaacatcaagaagggccctgctccattctaccctctggaagatggaacagccggcgagcagctgcacaaggccatgaagagatatgccctggtgcctggcacaatcgccttcacagatgcccacatcgaggtggacatcacctacgccgagtacttcgagatgtctgtgcggctggccgaagctatgaagcgctacggcctgaacaccaaccaccggatcgtcgtgtgcagcgagaacagcctgcagttcttcatgcctgtgctgggcgccctgttcatcggagttgctgtggcccctgccaacgacatctacaacgagcgcgagctgctgaacagcatgggcatctctcagcccaccgtggtgttcgtgtccaagaagggactgcagaaaatcctgaacgtgcagaagaagctgcccatcatccagaaaatcatcatcatggacagcaagaccgactaccagggcttccagagcatgtacaccttcgtgaccagccatctgccacctggcttcaacgagtacgacttcgtgcccgagagcttcgaccgggacaagacaatcgccctgatcatgaacagcagcggctctaccggactgcccaaaggtgttgccctgcctcatagaactgcctgcgtgcggtttagccacgccagagatcccatcttcggcaaccagatcatccccgacacagccatcctgagcgtggtgccttttcaccacggcttcggcatgttcaccacactgggctacctgatctgcggcttcagagtggtgctgatgtaccgcttcgaggaagaactgttcctgcggagcctgcaggactacaagatccagtctgctctgctggtgcctactctgttcagcttctttgccaagagcaccctgatcgataagtacgacctgagcaacctgcacgagatcgcctctggcggagcccctctgtctaaagaagtgggagaagccgtcgccaagcggttccatctgcctggcatcagacaaggctatggcctgaccgagacaaccagcgccattctgattacccctgagggcgacgataagcctggcgctgtgggaaaagtggtgccattcttcgaggccaaggtggtggatctggacaccggcaaaacactgggcgttaaccagaggggcgagctgtgtgttagaggccctatgatcatgagcggctacgtgaacaaccccgaggccacaaacgctctgatcgacaaggatggatggctgcacagcggcgacattgcctactgggacgaagatgagcacttcttcatcgtggaccggctgaagtccctgatcaagtacaagggctaccaggtggccccagccgagctggaatctattctgctgcaacaccccaacatcttcgatgccggcgttgcaggactgcccgatgatgatgctggcgaactgccagctgctgtggtggtgctggaacacggcaagaccatgaccgagaaagaaatcgtggactacgtggccagccaagtgaccaccgccaagaaactgagaggcggcgtggtgtttgtggacgaggtgccaaaaggcctgacaggcaagctggacgcccggaagatcagagagatcctgattaaggccaagaaaggcggcaagatcgccgtgtaatagctaactagacaaaacaccaaacaaacaaggcgccggcgtgctcacggacttaaaaacaaccaaaaaaaatctagatatcggatcccggg

SEQ ID NO: 3487 - DNA, 5131 bp, synthetic construct
  source 1..5131: mol_type = other DNA; note = Ana8 EH T60L40
aggctaggtggaggctcagtgtgataagtctgcgatggtggatgcatgtgtcatggtcatagctgtttcctgtgtgaaattgttatccgctcagagggcacaatcctattccgcgctatccgacaatctccaagacattaggtggagttcagttcggcgtatggcatatgtcgctggaaagaacatgtgagcaaaaggccagcaaaaggccaggaaccgtaaaaaggccgcgttgctggcgtttttccataggctccgcccccctgacgagcatcacaaaaatcgacgctcaagtcagaggtggcgaaacccgacaggactataaagataccaggcgtttccccctggaagctccctcgtgcgctctcctgttccgaccctgccgcttaccggatacctgtccgcctttctcccttcgggaagcgtggcgctttctcatagctcacgctgtaggtatctcagttcggtgtaggtcgttcgctccaagctgggctgtgtgcacgaaccccccgttcagcccgaccgctgcgccttatccggtaactatcgtcttgagtccaacccggtaagacacgacttatcgccactggcagcagccactggtaacaggattagcagagcgaggtatgtaggcggtgctacagagttcttgaagtggtggcctaactacggctacactagaagaacagtatttggtatctgcgctctgctgaagccagttaccttcggaaaaagagttggtagctcttgatccggcaaacaaaccaccgctggtagcggtggtttttttgtttgcaagcagcagattacgcgcagaaaaaaaggatctcaagaagatcctttgatcttttctacggggtctgacgctctattcaacaaagccgccgtcccgtcaagtcagcgtaaatgggtagggggcttcaaatcgtcctcgtgataccaattcggagcctgcttttttgtacaaacttgttgataatggcaattcaaggatcttcacctagatccttttaaattaaaaatgaagttttaaatcaatctaaagtatatatgagtaaacttggtctgacagttaccaatgcttaatcagtgaggcacctatctcagcgatctgtctatttcgttcatccatagttgcctgactccccgtcgtgtagataactacgatacgggagggcttaccatctggccccagtgctgcaatgataccgcgagagccacgctcaccggctccagatttatcagcaataaaccagccagccggaagggccgagcgcagaagtggtcctgcaactttatccgcctccatccagtctattaattgttgccgggaagctagagtaagtagttcgccagttaatagtttgcgcaacgttgttgccattgctacaggcatcgtggtgtcacgctcgtcgtttggtatggcttcattcagctccggttcccaacgatcaaggcgagttacatgatcccccatgttgtgcaaaaaagcggttagctccttcggtcctccgatcgttgtcagaagtaagttggccgcagtgttatcactcatggttatggcagcactgcataattctcttactgtcatgccatccgtaagatgcttttctgtgactggtgagtactcaaccaagtcattctgagaatagtgtatgcggcgaccgagttgctcttgcccggcgtcaatacgggataataccgcgccacatagcagaactttaaaagtgctcatcattggaaaacgttcttcggggcgaaaactctcaaggatcttaccgctgttgagatccagttcgatgtaacccactcgtgcacccaactgatcttcagcatcttttactttcaccagcgtttctgggtgagcaaaaacaggaaggcaaaatgccgcaaaaaagggaataagggcgacacggaaatgttgaatactcatactcttcctttttcaatattattgaagcatttatcagggttattgtctcatgagcggatacatatttgaatgtatttagaaaaataaacaaataggggttccgcgcacatttccccgaaaagtgccagatacctgaaacaaaacccatcgtacggccaaggaagtctccaataactgtgatccaccacaagcgccagggttttcccagtcacgacgttgtaaaacgacggccagtcatgcataatccgcacgcatctggaataaggaagtgccattccgcctgaccttaatacgactcactatagggagaccctcgaaaaaaaagcttcgaatgcgaccatctgctcaggctcaatctcgctcccacaaacaccaaataattgagccttaaagaagaaattctttaagtggatgctctcaaactcagggaaacctaaatctagttatagacaaggcaatcctgagccaagccgaagtagtaattagtaagttaacaatagatgacttacaactaatcggaaggtgcagagactcgacgggagctaccctaacgtcaagacgagggtaaagagagagtccaattctcaaagccaataggcagtagcgaaagctgcaagagaatgaaaatccgtggctcgcagcaaacaccaaacaaaacaaacacaaaccaacaaaaattaaaacagcctgtgggttgatcccacccacaggcccattgggcgctagcactctggtatcacggtacctttgtgcgcctgttttataccccctcccccaactgtaacttagaagtaacacacaccgatcaacagtcagcgtggcacaccagccacgttttgatcaagcacttctgttaccccggactgagtatcaatagactgctcacgcggttgaaggagaaagcgttcgttatccggccaactacttcgaaaaacctagtaacaccgtggaagttgcagagtgtttcgctcagcactaccccagtgtagatcaggtcgatgagtcaccgcattccccacgggcgaccgtggcggtggctgcgttggcggcctgcccatggggaaacccatgggacgctctaatacagacatggtgcgaagagtctattgagctagttggtagtcctccggcccctgaatgcggctaatcctaactgcggagcacacaccctcaagccagagggcagtgtgtcgtaacgggcaactctgcagcggaaccgactactttgggtgtccgtgtttcattttattcctatactggctgcttatggtgacaattgagagatcgttaccatatagctattggattggccatccggtgactaatagagctattatatatccctttgttgggtttataccacttagcttgaaagaggttaaaacattacaattcattgttaagttgaatacagcaaaatggaagatgccaagaacatcaagaagggccctgctccattctaccctctggaagatggaacagccggcgagcagctgcacaaggccatgaagagatatgccctggtgcctggcacaatcgccttcacagatgcccacatcgaggtggacatcacctacgccgagtacttcgagatgtctgtgcggctggccgaagctatgaagcgctacggcctgaacaccaaccaccggatcgtcgtgtgcagcgagaacagcctgcagttcttcatgcctgtgctgggcgccctgttcatcggagttgctgtggcccctgccaacgacatctacaacgagcgcgagctgctgaacagcatgggcatctctcagcccaccgtggtgttcgtgtccaagaagggactgcagaaaatcctgaacgtgcagaagaagctgcccatcatccagaaaatcatcatcatggacagcaagaccgactaccagggcttccagagcatgtacaccttcgtgaccagccatctgccacctggcttcaacgagtacgacttcgtgcccgagagcttcgaccgggacaagacaatcgccctgatcatgaacagcagcggctctaccggactgcccaaaggtgttgccctgcctcatagaactgcctgcgtgcggtttagccacgccagagatcccatcttcggcaaccagatcatccccgacacagccatcctgagcgtggtgccttttcaccacggcttcggcatgttcaccacactgggctacctgatctgcggcttcagagtggtgctgatgtaccgcttcgaggaagaactgttcctgcggagcctgcaggactacaagatccagtctgctctgctggtgcctactctgttcagcttctttgccaagagcaccctgatcgataagtacgacctgagcaacctgcacgagatcgcctctggcggagcccctctgtctaaagaagtgggagaagccgtcgccaagcggttccatctgcctggcatcagacaaggctatggcctgaccgagacaaccagcgccattctgattacccctgagggcgacgataagcctggcgctgtgggaaaagtggtgccattcttcgaggccaaggtggtggatctggacaccggcaaaacactgggcgttaaccagaggggcgagctgtgtgttagaggccctatgatcatgagcggctacgtgaacaaccccgaggccacaaacgctctgatcgacaaggatggatggctgcacagcggcgacattgcctactgggacgaagatgagcacttcttcatcgtggaccggctgaagtccctgatcaagtacaagggctaccaggtggccccagccgagctggaatctattctgctgcaacaccccaacatcttcgatgccggcgttgcaggactgcccgatgatgatgctggcgaactgccagctgctgtggtggtgctggaacacggcaagaccatgaccgagaaagaaatcgtggactacgtggccagccaagtgaccaccgccaagaaactgagaggcggcgtggtgtttgtggacgaggtgccaaaaggcctgacaggcaagctggacgcccggaagatcagagagatcctgattaaggccaagaaaggcggcaagatcgccgtgtaatagctaactagacaaaacaccaaacaaacaagctgcgagccacggacttaaaaacaaccggagcgagattgagcctgagcagatggtcgcattcgaagcaaaaaaaatctagatatcggatcccggg

SEQ ID NO: 3488 - DNA, 5111 bp, synthetic construct
  source 1..5111: mol_type = other DNA; note = Ana8 EH T75L30
aggctaggtggaggctcagtgtgataagtctgcgatggtggatgcatgtgtcatggtcatagctgtttcctgtgtgaaattgttatccgctcagagggcacaatcctattccgcgctatccgacaatctccaagacattaggtggagttcagttcggcgtatggcatatgtcgctggaaagaacatgtgagcaaaaggccagcaaaaggccaggaaccgtaaaaaggccgcgttgctggcgtttttccataggctccgcccccctgacgagcatcacaaaaatcgacgctcaagtcagaggtggcgaaacccgacaggactataaagataccaggcgtttccccctggaagctccctcgtgcgctctcctgttccgaccctgccgcttaccggatacctgtccgcctttctcccttcgggaagcgtggcgctttctcatagctcacgctgtaggtatctcagttcggtgtaggtcgttcgctccaagctgggctgtgtgcacgaaccccccgttcagcccgaccgctgcgccttatccggtaactatcgtcttgagtccaacccggtaagacacgacttatcgccactggcagcagccactggtaacaggattagcagagcgaggtatgtaggcggtgctacagagttcttgaagtggtggcctaactacggctacactagaagaacagtatttggtatctgcgctctgctgaagccagttaccttcggaaaaagagttggtagctcttgatccggcaaacaaaccaccgctggtagcggtggtttttttgtttgcaagcagcagattacgcgcagaaaaaaaggatctcaagaagatcctttgatcttttctacggggtctgacgctctattcaacaaagccgccgtcccgtcaagtcagcgtaaatgggtagggggcttcaaatcgtcctcgtgataccaattcggagcctgcttttttgtacaaacttgttgataatggcaattcaaggatcttcacctagatccttttaaattaaaaatgaagttttaaatcaatctaaagtatatatgagtaaacttggtctgacagttaccaatgcttaatcagtgaggcacctatctcagcgatctgtctatttcgttcatccatagttgcctgactccccgtcgtgtagataactacgatacgggagggcttaccatctggccccagtgctgcaatgataccgcgagagccacgctcaccggctccagatttatcagcaataaaccagccagccggaagggccgagcgcagaagtggtcctgcaactttatccgcctccatccagtctattaattgttgccgggaagctagagtaagtagttcgccagttaatagtttgcgcaacgttgttgccattgctacaggcatcgtggtgtcacgctcgtcgtttggtatggcttcattcagctccggttcccaacgatcaaggcgagttacatgatcccccatgttgtgcaaaaaagcggttagctccttcggtcctccgatcgttgtcagaagtaagttggccgcagtgttatcactcatggttatggcagcactgcataattctcttactgtcatgccatccgtaagatgcttttctgtgactggtgagtactcaaccaagtcattctgagaatagtgtatgcggcgaccgagttgctcttgcccggcgtcaatacgggataataccgcgccacatagcagaactttaaaagtgctcatcattggaaaacgttcttcggggcgaaaactctcaaggatcttaccgctgttgagatccagttcgatgtaacccactcgtgcacccaactgatcttcagcatcttttactttcaccagcgtttctgggtgagcaaaaacaggaaggcaaaatgccgcaaaaaagggaataagggcgacacggaaatgttgaatactcatactcttcctttttcaatattattgaagcatttatcagggttattgtctcatgagcggatacatatttgaatgtatttagaaaaataaacaaataggggttccgcgcacatttccccgaaaagtgccagatacctgaaacaaaacccatcgtacggccaaggaagtctccaataactgtgatccaccacaagcgccagggttttcccagtcacgacgttgtaaaacgacggccagtcatgcataatccgcacgcatctggaataaggaagtgccattccgcctgaccttaatacgactcactatagggagaccctcgaaaaaaaagctcgcactggccggaagctcgtcggagcgcacaaacaccaaataattgagccttaaagaagaaattctttaagtggatgctctcaaactcagggaaacctaaatctagttatagacaaggcaatcctgagccaagccgaagtagtaattagtaagttaacaatagatgacttacaactaatcggaaggtgcagagactcgacgggagctaccctaacgtcaagacgagggtaaagagagagtccaattctcaaagccaataggcagtagcgaaagctgcaagagaatgaaaatccgtggctcgcagcaaacaccaaacaaaacaaacacaaaccaacaaaaattaaaacagcctgtgggttgatcccacccacaggcccattgggcgctagcactctggtatcacggtacctttgtgcgcctgttttataccccctcccccaactgtaacttagaagtaacacacaccgatcaacagtcagcgtggcacaccagccacgttttgatcaagcacttctgttaccccggactgagtatcaatagactgctcacgcggttgaaggagaaagcgttcgttatccggccaactacttcgaaaaacctagtaacaccgtggaagttgcagagtgtttcgctcagcactaccccagtgtagatcaggtcgatgagtcaccgcattccccacgggcgaccgtggcggtggctgcgttggcggcctgcccatggggaaacccatgggacgctctaatacagacatggtgcgaagagtctattgagctagttggtagtcctccggcccctgaatgcggctaatcctaactgcggagcacacaccctcaagccagagggcagtgtgtcgtaacgggcaactctgcagcggaaccgactactttgggtgtccgtgtttcattttattcctatactggctgcttatggtgacaattgagagatcgttaccatatagctattggattggccatccggtgactaatagagctattatatatccctttgttgggtttataccacttagcttgaaagaggttaaaacattacaattcattgttaagttgaatacagcaaaatggaagatgccaagaacatcaagaagggccctgctccattctaccctctggaagatggaacagccggcgagcagctgcacaaggccatgaagagatatgccctggtgcctggcacaatcgccttcacagatgcccacatcgaggtggacatcacctacgccgagtacttcgagatgtctgtgcggctggccgaagctatgaagcgctacggcctgaacaccaaccaccggatcgtcgtgtgcagcgagaacagcctgcagttcttcatgcctgtgctgggcgccctgttcatcggagttgctgtggcccctgccaacgacatctacaacgagcgcgagctgctgaacagcatgggcatctctcagcccaccgtggtgttcgtgtccaagaagggactgcagaaaatcctgaacgtgcagaagaagctgcccatcatccagaaaatcatcatcatggacagcaagaccgactaccagggcttccagagcatgtacaccttcgtgaccagccatctgccacctggcttcaacgagtacgacttcgtgcccgagagcttcgaccgggacaagacaatcgccctgatcatgaacagcagcggctctaccggactgcccaaaggtgttgccctgcctcatagaactgcctgcgtgcggtttagccacgccagagatcccatcttcggcaaccagatcatccccgacacagccatcctgagcgtggtgccttttcaccacggcttcggcatgttcaccacactgggctacctgatctgcggcttcagagtggtgctgatgtaccgcttcgaggaagaactgttcctgcggagcctgcaggactacaagatccagtctgctctgctggtgcctactctgttcagcttctttgccaagagcaccctgatcgataagtacgacctgagcaacctgcacgagatcgcctctggcggagcccctctgtctaaagaagtgggagaagccgtcgccaagcggttccatctgcctggcatcagacaaggctatggcctgaccgagacaaccagcgccattctgattacccctgagggcgacgataagcctggcgctgtgggaaaagtggtgccattcttcgaggccaaggtggtggatctggacaccggcaaaacactgggcgttaaccagaggggcgagctgtgtgttagaggccctatgatcatgagcggctacgtgaacaaccccgaggccacaaacgctctgatcgacaaggatggatggctgcacagcggcgacattgcctactgggacgaagatgagcacttcttcatcgtggaccggctgaagtccctgatcaagtacaagggctaccaggtggccccagccgagctggaatctattctgctgcaacaccccaacatcttcgatgccggcgttgcaggactgcccgatgatgatgctggcgaactgccagctgctgtggtggtgctggaacacggcaagaccatgaccgagaaagaaatcgtggactacgtggccagccaagtgaccaccgccaagaaactgagaggcggcgtggtgtttgtggacgaggtgccaaaaggcctgacaggcaagctggacgcccggaagatcagagagatcctgattaaggccaagaaaggcggcaagatcgccgtgtaatagctaactagacaaaacaccaaacaaacaagctgcgagccacggacttaaaaacaacccgctccgacgagcttccggccagtgcgagcaaaaaaaatctagatatcggatcccggg

SEQ ID NO: 3489 - DNA, 5076 bp, synthetic construct
  source 1..5076: mol_type = other DNA; note = Ana8 40nt IS
aggctaggtggaggctcagtgtgataagtctgcgatggtggatgcatgtgtcatggtcatagctgtttcctgtgtgaaattgttatccgctcagagggcacaatcctattccgcgctatccgacaatctccaagacattaggtggagttcagttcggcgtatggcatatgtcgctggaaagaacatgtgagcaaaaggccagcaaaaggccaggaaccgtaaaaaggccgcgttgctggcgtttttccataggctccgcccccctgacgagcatcacaaaaatcgacgctcaagtcagaggtggcgaaacccgacaggactataaagataccaggcgtttccccctggaagctccctcgtgcgctctcctgttccgaccctgccgcttaccggatacctgtccgcctttctcccttcgggaagcgtggcgctttctcatagctcacgctgtaggtatctcagttcggtgtaggtcgttcgctccaagctgggctgtgtgcacgaaccccccgttcagcccgaccgctgcgccttatccggtaactatcgtcttgagtccaacccggtaagacacgacttatcgccactggcagcagccactggtaacaggattagcagagcgaggtatgtaggcggtgctacagagttcttgaagtggtggcctaactacggctacactagaagaacagtatttggtatctgcgctctgctgaagccagttaccttcggaaaaagagttggtagctcttgatccggcaaacaaaccaccgctggtagcggtggtttttttgtttgcaagcagcagattacgcgcagaaaaaaaggatctcaagaagatcctttgatcttttctacggggtctgacgctctattcaacaaagccgccgtcccgtcaagtcagcgtaaatgggtagggggcttcaaatcgtcctcgtgataccaattcggagcctgcttttttgtacaaacttgttgataatggcaattcaaggatcttcacctagatccttttaaattaaaaatgaagttttaaatcaatctaaagtatatatgagtaaacttggtctgacagttaccaatgcttaatcagtgaggcacctatctcagcgatctgtctatttcgttcatccatagttgcctgactccccgtcgtgtagataactacgatacgggagggcttaccatctggccccagtgctgcaatgataccgcgagagccacgctcaccggctccagatttatcagcaataaaccagccagccggaagggccgagcgcagaagtggtcctgcaactttatccgcctccatccagtctattaattgttgccgggaagctagagtaagtagttcgccagttaatagtttgcgcaacgttgttgccattgctacaggcatcgtggtgtcacgctcgtcgtttggtatggcttcattcagctccggttcccaacgatcaaggcgagttacatgatcccccatgttgtgcaaaaaagcggttagctccttcggtcctccgatcgttgtcagaagtaagttggccgcagtgttatcactcatggttatggcagcactgcataattctcttactgtcatgccatccgtaagatgcttttctgtgactggtgagtactcaaccaagtcattctgagaatagtgtatgcggcgaccgagttgctcttgcccggcgtcaatacgggataataccgcgccacatagcagaactttaaaagtgctcatcattggaaaacgttcttcggggcgaaaactctcaaggatcttaccgctgttgagatccagttcgatgtaacccactcgtgcacccaactgatcttcagcatcttttactttcaccagcgtttctgggtgagcaaaaacaggaaggcaaaatgccgcaaaaaagggaataagggcgacacggaaatgttgaatactcatactcttcctttttcaatattattgaagcatttatcagggttattgtctcatgagcggatacatatttgaatgtatttagaaaaataaacaaataggggttccgcgcacatttccccgaaaagtgccagatacctgaaacaaaacccatcgtacggccaaggaagtctccaataactgtgatccaccacaagcgccagggttttcccagtcacgacgttgtaaaacgacggccagtcatgcataatccgcacgcatctggaataaggaagtgccattccgcctgaccttaatacgactcactatagggagaccctcgaaaaaaaacacacacaccaaataattgagccttaaagaagaaattctttaagtggatgctctcaaactcagggaaacctaaatctagttatagacaaggcaatcctgagccaagccgaagtagtaattagtaagttaacaatagatgacttacaactaatcggaaggtgcagagactcgacgggagctaccctaacgtcaagacgagggtaaagagagagtccaattctcaaagccaataggcagtagcgaaagctgcaagagaatgaaaatccgtggctcgcagcaataatgccacactaagagaacaaacaaagagctaagcaattaaaacagcctgtgggttgatcccacccacaggcccattgggcgctagcactctggtatcacggtacctttgtgcgcctgttttataccccctcccccaactgtaacttagaagtaacacacaccgatcaacagtcagcgtggcacaccagccacgttttgatcaagcacttctgttaccccggactgagtatcaatagactgctcacgcggttgaaggagaaagcgttcgttatccggccaactacttcgaaaaacctagtaacaccgtggaagttgcagagtgtttcgctcagcactaccccagtgtagatcaggtcgatgagtcaccgcattccccacgggcgaccgtggcggtggctgcgttggcggcctgcccatggggaaacccatgggacgctctaatacagacatggtgcgaagagtctattgagctagttggtagtcctccggcccctgaatgcggctaatcctaactgcggagcacacaccctcaagccagagggcagtgtgtcgtaacgggcaactctgcagcggaaccgactactttgggtgtccgtgtttcattttattcctatactggctgcttatggtgacaattgagagatcgttaccatatagctattggattggccatccggtgactaatagagctattatatatccctttgttgggtttataccacttagcttgaaagaggttaaaacattacaattcattgttaagttgaatacagcaaaatggaagatgccaagaacatcaagaagggccctgctccattctaccctctggaagatggaacagccggcgagcagctgcacaaggccatgaagagatatgccctggtgcctggcacaatcgccttcacagatgcccacatcgaggtggacatcacctacgccgagtacttcgagatgtctgtgcggctggccgaagctatgaagcgctacggcctgaacaccaaccaccggatcgtcgtgtgcagcgagaacagcctgcagttcttcatgcctgtgctgggcgccctgttcatcggagttgctgtggcccctgccaacgacatctacaacgagcgcgagctgctgaacagcatgggcatctctcagcccaccgtggtgttcgtgtccaagaagggactgcagaaaatcctgaacgtgcagaagaagctgcccatcatccagaaaatcatcatcatggacagcaagaccgactaccagggcttccagagcatgtacaccttcgtgaccagccatctgccacctggcttcaacgagtacgacttcgtgcccgagagcttcgaccgggacaagacaatcgccctgatcatgaacagcagcggctctaccggactgcccaaaggtgttgccctgcctcatagaactgcctgcgtgcggtttagccacgccagagatcccatcttcggcaaccagatcatccccgacacagccatcctgagcgtggtgccttttcaccacggcttcggcatgttcaccacactgggctacctgatctgcggcttcagagtggtgctgatgtaccgcttcgaggaagaactgttcctgcggagcctgcaggactacaagatccagtctgctctgctggtgcctactctgttcagcttctttgccaagagcaccctgatcgataagtacgacctgagcaacctgcacgagatcgcctctggcggagcccctctgtctaaagaagtgggagaagccgtcgccaagcggttccatctgcctggcatcagacaaggctatggcctgaccgagacaaccagcgccattctgattacccctgagggcgacgataagcctggcgctgtgggaaaagtggtgccattcttcgaggccaaggtggtggatctggacaccggcaaaacactgggcgttaaccagaggggcgagctgtgtgttagaggccctatgatcatgagcggctacgtgaacaaccccgaggccacaaacgctctgatcgacaaggatggatggctgcacagcggcgacattgcctactgggacgaagatgagcacttcttcatcgtggaccggctgaagtccctgatcaagtacaagggctaccaggtggccccagccgagctggaatctattctgctgcaacaccccaacatcttcgatgccggcgttgcaggactgcccgatgatgatgctggcgaactgccagctgctgtggtggtgctggaacacggcaagaccatgaccgagaaagaaatcgtggactacgtggccagccaagtgaccaccgccaagaaactgagaggcggcgtggtgtttgtggacgaggtgccaaaaggcctgacaggcaagctggacgcccggaagatcagagagatcctgattaaggccaagaaaggcggcaagatcgccgtgtaatagctaactagaataatgacacacgacaagaacaatcataccactaagcaagctgcgagccacggacttaaaaacaaccaaaaaaaatctagatatcggatcccggg

SEQ ID NO: 3490 - DNA, 5036 bp, synthetic construct
  source 1..5036: mol_type = other DNA; note = Ana8 20nt IS
aggctaggtggaggctcagtgtgataagtctgcgatggtggatgcatgtgtcatggtcatagctgtttcctgtgtgaaattgttatccgctcagagggcacaatcctattccgcgctatccgacaatctccaagacattaggtggagttcagttcggcgtatggcatatgtcgctggaaagaacatgtgagcaaaaggccagcaaaaggccaggaaccgtaaaaaggccgcgttgctggcgtttttccataggctccgcccccctgacgagcatcacaaaaatcgacgctcaagtcagaggtggcgaaacccgacaggactataaagataccaggcgtttccccctggaagctccctcgtgcgctctcctgttccgaccctgccgcttaccggatacctgtccgcctttctcccttcgggaagcgtggcgctttctcatagctcacgctgtaggtatctcagttcggtgtaggtcgttcgctccaagctgggctgtgtgcacgaaccccccgttcagcccgaccgctgcgccttatccggtaactatcgtcttgagtccaacccggtaagacacgacttatcgccactggcagcagccactggtaacaggattagcagagcgaggtatgtaggcggtgctacagagttcttgaagtggtggcctaactacggctacactagaagaacagtatttggtatctgcgctctgctgaagccagttaccttcggaaaaagagttggtagctcttgatccggcaaacaaaccaccgctggtagcggtggtttttttgtttgcaagcagcagattacgcgcagaaaaaaaggatctcaagaagatcctttgatcttttctacggggtctgacgctctattcaacaaagccgccgtcccgtcaagtcagcgtaaatgggtagggggcttcaaatcgtcctcgtgataccaattcggagcctgcttttttgtacaaacttgttgataatggcaattcaaggatcttcacctagatccttttaaattaaaaatgaagttttaaatcaatctaaagtatatatgagtaaacttggtctgacagttaccaatgcttaatcagtgaggcacctatctcagcgatctgtctatttcgttcatccatagttgcctgactccccgtcgtgtagataactacgatacgggagggcttaccatctggccccagtgctgcaatgataccgcgagagccacgctcaccggctccagatttatcagcaataaaccagccagccggaagggccgagcgcagaagtggtcctgcaactttatccgcctccatccagtctattaattgttgccgggaagctagagtaagtagttcgccagttaatagtttgcgcaacgttgttgccattgctacaggcatcgtggtgtcacgctcgtcgtttggtatggcttcattcagctccggttcccaacgatcaaggcgagttacatgatcccccatgttgtgcaaaaaagcggttagctccttcggtcctccgatcgttgtcagaagtaagttggccgcagtgttatcactcatggttatggcagcactgcataattctcttactgtcatgccatccgtaagatgcttttctgtgactggtgagtactcaaccaagtcattctgagaatagtgtatgcggcgaccgagttgctcttgcccggcgtcaatacgggataataccgcgccacatagcagaactttaaaagtgctcatcattggaaaacgttcttcggggcgaaaactctcaaggatcttaccgctgttgagatccagttcgatgtaacccactcgtgcacccaactgatcttcagcatcttttactttcaccagcgtttctgggtgagcaaaaacaggaaggcaaaatgccgcaaaaaagggaataagggcgacacggaaatgttgaatactcatactcttcctttttcaatattattgaagcatttatcagggttattgtctcatgagcggatacatatttgaatgtatttagaaaaataaacaaataggggttccgcgcacatttccccgaaaagtgccagatacctgaaacaaaacccatcgtacggccaaggaagtctccaataactgtgatccaccacaagcgccagggttttcccagtcacgacgttgtaaaacgacggccagtcatgcataatccgcacgcatctggaataaggaagtgccattccgcctgaccttaatacgactcactatagggagaccctcgaaaaaaaacacacacaccaaataattgagccttaaagaagaaattctttaagtggatgctctcaaactcagggaaacctaaatctagttatagacaaggcaatcctgagccaagccgaagtagtaattagtaagttaacaatagatgacttacaactaatcggaaggtgcagagactcgacgggagctaccctaacgtcaagacgagggtaaagagagagtccaattctcaaagccaataggcagtagcgaaagctgcaagagaatgaaaatccgtggctcgcagcagatccactacaagtaagatttaaaacagcctgtgggttgatcccacccacaggcccattgggcgctagcactctggtatcacggtacctttgtgcgcctgttttataccccctcccccaactgtaacttagaagtaacacacaccgatcaacagtcagcgtggcacaccagccacgttttgatcaagcacttctgttaccccggactgagtatcaatagactgctcacgcggttgaaggagaaagcgttcgttatccggccaactacttcgaaaaacctagtaacaccgtggaagttgcagagtgtttcgctcagcactaccccagtgtagatcaggtcgatgagtcaccgcattccccacgggcgaccgtggcggtggctgcgttggcggcctgcccatggggaaacccatgggacgctctaatacagacatggtgcgaagagtctattgagctagttggtagtcctccggcccctgaatgcggctaatcctaactgcggagcacacaccctcaagccagagggcagtgtgtcgtaacgggcaactctgcagcggaaccgactactttgggtgtccgtgtttcattttattcctatactggctgcttatggtgacaattgagagatcgttaccatatagctattggattggccatccggtgactaatagagctattatatatccctttgttgggtttataccacttagcttgaaagaggttaaaacattacaattcattgttaagttgaatacagcaaaatggaagatgccaagaacatcaagaagggccctgctccattctaccctctggaagatggaacagccggcgagcagctgcacaaggccatgaagagatatgccctggtgcctggcacaatcgccttcacagatgcccacatcgaggtggacatcacctacgccgagtacttcgagatgtctgtgcggctggccgaagctatgaagcgctacggcctgaacaccaaccaccggatcgtcgtgtgcagcgagaacagcctgcagttcttcatgcctgtgctgggcgccctgttcatcggagttgctgtggcccctgccaacgacatctacaacgagcgcgagctgctgaacagcatgggcatctctcagcccaccgtggtgttcgtgtccaagaagggactgcagaaaatcctgaacgtgcagaagaagctgcccatcatccagaaaatcatcatcatggacagcaagaccgactaccagggcttccagagcatgtacaccttcgtgaccagccatctgccacctggcttcaacgagtacgacttcgtgcccgagagcttcgaccgggacaagacaatcgccctgatcatgaacagcagcggctctaccggactgcccaaaggtgttgccctgcctcatagaactgcctgcgtgcggtttagccacgccagagatcccatcttcggcaaccagatcatccccgacacagccatcctgagcgtggtgccttttcaccacggcttcggcatgttcaccacactgggctacctgatctgcggcttcagagtggtgctgatgtaccgcttcgaggaagaactgttcctgcggagcctgcaggactacaagatccagtctgctctgctggtgcctactctgttcagcttctttgccaagagcaccctgatcgataagtacgacctgagcaacctgcacgagatcgcctctggcggagcccctctgtctaaagaagtgggagaagccgtcgccaagcggttccatctgcctggcatcagacaaggctatggcctgaccgagacaaccagcgccattctgattacccctgagggcgacgataagcctggcgctgtgggaaaagtggtgccattcttcgaggccaaggtggtggatctggacaccggcaaaacactgggcgttaaccagaggggcgagctgtgtgttagaggccctatgatcatgagcggctacgtgaacaaccccgaggccacaaacgctctgatcgacaaggatggatggctgcacagcggcgacattgcctactgggacgaagatgagcacttcttcatcgtggaccggctgaagtccctgatcaagtacaagggctaccaggtggccccagccgagctggaatctattctgctgcaacaccccaacatcttcgatgccggcgttgcaggactgcccgatgatgatgctggcgaactgccagctgctgtggtggtgctggaacacggcaagaccatgaccgagaaagaaatcgtggactacgtggccagccaagtgaccaccgccaagaaactgagaggcggcgtggtgtttgtggacgaggtgccaaaaggcctgacaggcaagctggacgcccggaagatcagagagatcctgattaaggccaagaaaggcggcaagatcgccgtgtaatagctaactagagatagaatccaactaacctgctgcgagccacggacttaaaaacaaccaaaaaaaatctagatatcggatcccggg

SEQ ID NO: 3491 - DNA, 5109 bp, synthetic construct
  source 1..5109: mol_type = other DNA; note = Ana8 40nt ES
aggctaggtggaggctcagtgtgataagtctgcgatggtggatgcatgtgtcatggtcatagctgtttcctgtgtgaaattgttatccgctcagagggcacaatcctattccgcgctatccgacaatctccaagacattaggtggagttcagttcggcgtatggcatatgtcgctggaaagaacatgtgagcaaaaggccagcaaaaggccaggaaccgtaaaaaggccgcgttgctggcgtttttccataggctccgcccccctgacgagcatcacaaaaatcgacgctcaagtcagaggtggcgaaacccgacaggactataaagataccaggcgtttccccctggaagctccctcgtgcgctctcctgttccgaccctgccgcttaccggatacctgtccgcctttctcccttcgggaagcgtggcgctttctcatagctcacgctgtaggtatctcagttcggtgtaggtcgttcgctccaagctgggctgtgtgcacgaaccccccgttcagcccgaccgctgcgccttatccggtaactatcgtcttgagtccaacccggtaagacacgacttatcgccactggcagcagccactggtaacaggattagcagagcgaggtatgtaggcggtgctacagagttcttgaagtggtggcctaactacggctacactagaagaacagtatttggtatctgcgctctgctgaagccagttaccttcggaaaaagagttggtagctcttgatccggcaaacaaaccaccgctggtagcggtggtttttttgtttgcaagcagcagattacgcgcagaaaaaaaggatctcaagaagatcctttgatcttttctacggggtctgacgctctattcaacaaagccgccgtcccgtcaagtcagcgtaaatgggtagggggcttcaaatcgtcctcgtgataccaattcggagcctgcttttttgtacaaacttgttgataatggcaattcaaggatcttcacctagatccttttaaattaaaaatgaagttttaaatcaatctaaagtatatatgagtaaacttggtctgacagttaccaatgcttaatcagtgaggcacctatctcagcgatctgtctatttcgttcatccatagttgcctgactccccgtcgtgtagataactacgatacgggagggcttaccatctggccccagtgctgcaatgataccgcgagagccacgctcaccggctccagatttatcagcaataaaccagccagccggaagggccgagcgcagaagtggtcctgcaactttatccgcctccatccagtctattaattgttgccgggaagctagagtaagtagttcgccagttaatagtttgcgcaacgttgttgccattgctacaggcatcgtggtgtcacgctcgtcgtttggtatggcttcattcagctccggttcccaacgatcaaggcgagttacatgatcccccatgttgtgcaaaaaagcggttagctccttcggtcctccgatcgttgtcagaagtaagttggccgcagtgttatcactcatggttatggcagcactgcataattctcttactgtcatgccatccgtaagatgcttttctgtgactggtgagtactcaaccaagtcattctgagaatagtgtatgcggcgaccgagttgctcttgcccggcgtcaatacgggataataccgcgccacatagcagaactttaaaagtgctcatcattggaaaacgttcttcggggcgaaaactctcaaggatcttaccgctgttgagatccagttcgatgtaacccactcgtgcacccaactgatcttcagcatcttttactttcaccagcgtttctgggtgagcaaaaacaggaaggcaaaatgccgcaaaaaagggaataagggcgacacggaaatgttgaatactcatactcttcctttttcaatattattgaagcatttatcagggttattgtctcatgagcggatacatatttgaatgtatttagaaaaataaacaaataggggttccgcgcacatttccccgaaaagtgccagatacctgaaacaaaacccatcgtacggccaaggaagtctccaataactgtgatccaccacaagcgccagggttttcccagtcacgacgttgtaaaacgacggccagtcatgcataatccgcacgcatctggaataaggaagtgccattccgcctgaccttaatacgactcactatagggagaccctcgaaaaaaaaataatgacacactacgagaacaaccatagaactaagcaaaaataattgagccttaaagaagaaattctttaagtggatgctctcaaactcagggaaacctaaatctagttatagacaaggcaatcctgagccaagccgaagtagtaattagtaagttaacaatagatgacttacaactaatcggaaggtgcagagactcgacgggagctaccctaacgtcaagacgagggtaaagagagagtccaattctcaaagccaataggcagtagcgaaagctgcaagagaatgaaaatccgtggctcgcagcaaacaccaaacaaaacaaacacaaaccaacaaaaattaaaacagcctgtgggttgatcccacccacaggcccattgggcgctagcactctggtatcacggtacctttgtgcgcctgttttataccccctcccccaactgtaacttagaagtaacacacaccgatcaacagtcagcgtggcacaccagccacgttttgatcaagcacttctgttaccccggactgagtatcaatagactgctcacgcggttgaaggagaaagcgttcgttatccggccaactacttcgaaaaacctagtaacaccgtggaagttgcagagtgtttcgctcagcactaccccagtgtagatcaggtcgatgagtcaccgcattccccacgggcgaccgtggcggtggctgcgttggcggcctgcccatggggaaacccatgggacgctctaatacagacatggtgcgaagagtctattgagctagttggtagtcctccggcccctgaatgcggctaatcctaactgcggagcacacaccctcaagccagagggcagtgtgtcgtaacgggcaactctgcagcggaaccgactactttgggtgtccgtgtttcattttattcctatactggctgcttatggtgacaattgagagatcgttaccatatagctattggattggccatccggtgactaatagagctattatatatccctttgttgggtttataccacttagcttgaaagaggttaaaacattacaattcattgttaagttgaatacagcaaaatggaagatgccaagaacatcaagaagggccctgctccattctaccctctggaagatggaacagccggcgagcagctgcacaaggccatgaagagatatgccctggtgcctggcacaatcgccttcacagatgcccacatcgaggtggacatcacctacgccgagtacttcgagatgtctgtgcggctggccgaagctatgaagcgctacggcctgaacaccaaccaccggatcgtcgtgtgcagcgagaacagcctgcagttcttcatgcctgtgctgggcgccctgttcatcggagttgctgtggcccctgccaacgacatctacaacgagcgcgagctgctgaacagcatgggcatctctcagcccaccgtggtgttcgtgtccaagaagggactgcagaaaatcctgaacgtgcagaagaagctgcccatcatccagaaaatcatcatcatggacagcaagaccgactaccagggcttccagagcatgtacaccttcgtgaccagccatctgccacctggcttcaacgagtacgacttcgtgcccgagagcttcgaccgggacaagacaatcgccctgatcatgaacagcagcggctctaccggactgcccaaaggtgttgccctgcctcatagaactgcctgcgtgcggtttagccacgccagagatcccatcttcggcaaccagatcatccccgacacagccatcctgagcgtggtgccttttcaccacggcttcggcatgttcaccacactgggctacctgatctgcggcttcagagtggtgctgatgtaccgcttcgaggaagaactgttcctgcggagcctgcaggactacaagatccagtctgctctgctggtgcctactctgttcagcttctttgccaagagcaccctgatcgataagtacgacctgagcaacctgcacgagatcgcctctggcggagcccctctgtctaaagaagtgggagaagccgtcgccaagcggttccatctgcctggcatcagacaaggctatggcctgaccgagacaaccagcgccattctgattacccctgagggcgacgataagcctggcgctgtgggaaaagtggtgccattcttcgaggccaaggtggtggatctggacaccggcaaaacactgggcgttaaccagaggggcgagctgtgtgttagaggccctatgatcatgagcggctacgtgaacaaccccgaggccacaaacgctctgatcgacaaggatggatggctgcacagcggcgacattgcctactgggacgaagatgagcacttcttcatcgtggaccggctgaagtccctgatcaagtacaagggctaccaggtggccccagccgagctggaatctattctgctgcaacaccccaacatcttcgatgccggcgttgcaggactgcccgatgatgatgctggcgaactgccagctgctgtggtggtgctggaacacggcaagaccatgaccgagaaagaaatcgtggactacgtggccagccaagtgaccaccgccaagaaactgagaggcggcgtggtgtttgtggacgaggtgccaaaaggcctgacaggcaagctggacgcccggaagatcagagagatcctgattaaggccaagaaaggcggcaagatcgccgtgtaatagctaactagacaaaacaccaaacaaacaagctgcgagccacggacttaataatgaaagactacgagatcaaccatagagctaaccaaaaaaaaatctagatatcggatcccggg

SEQ ID NO: 3492 - DNA, 5071 bp, synthetic construct
  source 1..5071: mol_type = other DNA; note = Ana8 20nt ES
aggctaggtggaggctcagtgtgataagtctgcgatggtggatgcatgtgtcatggtcatagctgtttcctgtgtgaaattgttatccgctcagagggcacaatcctattccgcgctatccgacaatctccaagacattaggtggagttcagttcggcgtatggcatatgtcgctggaaagaacatgtgagcaaaaggccagcaaaaggccaggaaccgtaaaaaggccgcgttgctggcgtttttccataggctccgcccccctgacgagcatcacaaaaatcgacgctcaagtcagaggtggcgaaacccgacaggactataaagataccaggcgtttccccctggaagctccctcgtgcgctctcctgttccgaccctgccgcttaccggatacctgtccgcctttctcccttcgggaagcgtggcgctttctcatagctcacgctgtaggtatctcagttcggtgtaggtcgttcgctccaagctgggctgtgtgcacgaaccccccgttcagcccgaccgctgcgccttatccggtaactatcgtcttgagtccaacccggtaagacacgacttatcgccactggcagcagccactggtaacaggattagcagagcgaggtatgtaggcggtgctacagagttcttgaagtggtggcctaactacggctacactagaagaacagtatttggtatctgcgctctgctgaagccagttaccttcggaaaaagagttggtagctcttgatccggcaaacaaaccaccgctggtagcggtggtttttttgtttgcaagcagcagattacgcgcagaaaaaaaggatctcaagaagatcctttgatcttttctacggggtctgacgctctattcaacaaagccgccgtcccgtcaagtcagcgtaaatgggtagggggcttcaaatcgtcctcgtgataccaattcggagcctgcttttttgtacaaacttgttgataatggcaattcaaggatcttcacctagatccttttaaattaaaaatgaagttttaaatcaatctaaagtatatatgagtaaacttggtctgacagttaccaatgcttaatcagtgaggcacctatctcagcgatctgtctatttcgttcatccatagttgcctgactccccgtcgtgtagataactacgatacgggagggcttaccatctggccccagtgctgcaatgataccgcgagagccacgctcaccggctccagatttatcagcaataaaccagccagccggaagggccgagcgcagaagtggtcctgcaactttatccgcctccatccagtctattaattgttgccgggaagctagagtaagtagttcgccagttaatagtttgcgcaacgttgttgccattgctacaggcatcgtggtgtcacgctcgtcgtttggtatggcttcattcagctccggttcccaacgatcaaggcgagttacatgatcccccatgttgtgcaaaaaagcggttagctccttcggtcctccgatcgttgtcagaagtaagttggccgcagtgttatcactcatggttatggcagcactgcataattctcttactgtcatgccatccgtaagatgcttttctgtgactggtgagtactcaaccaagtcattctgagaatagtgtatgcggcgaccgagttgctcttgcccggcgtcaatacgggataataccgcgccacatagcagaactttaaaagtgctcatcattggaaaacgttcttcggggcgaaaactctcaaggatcttaccgctgttgagatccagttcgatgtaacccactcgtgcacccaactgatcttcagcatcttttactttcaccagcgtttctgggtgagcaaaaacaggaaggcaaaatgccgcaaaaaagggaataagggcgacacggaaatgttgaatactcatactcttcctttttcaatattattgaagcatttatcagggttattgtctcatgagcggatacatatttgaatgtatttagaaaaataaacaaataggggttccgcgcacatttccccgaaaagtgccagatacctgaaacaaaacccatcgtacggccaaggaagtctccaataactgtgatccaccacaagcgccagggttttcccagtcacgacgttgtaaaacgacggccagtcatgcataatccgcacgcatctggaataaggaagtgccattccgcctgaccttaatacgactcactatagggagaccctcgaaaaaaaaagatacacttcaactaagctaaataattgagccttaaagaagaaattctttaagtggatgctctcaaactcagggaaacctaaatctagttatagacaaggcaatcctgagccaagccgaagtagtaattagtaagttaacaatagatgacttacaactaatcggaaggtgcagagactcgacgggagctaccctaacgtcaagacgagggtaaagagagagtccaattctcaaagccaataggcagtagcgaaagctgcaagagaatgaaaatccgtggctcgcagcaaacaccaaacaaaacaaacacaaaccaacaaaaattaaaacagcctgtgggttgatcccacccacaggcccattgggcgctagcactctggtatcacggtacctttgtgcgcctgttttataccccctcccccaactgtaacttagaagtaacacacaccgatcaacagtcagcgtggcacaccagccacgttttgatcaagcacttctgttaccccggactgagtatcaatagactgctcacgcggttgaaggagaaagcgttcgttatccggccaactacttcgaaaaacctagtaacaccgtggaagttgcagagtgtttcgctcagcactaccccagtgtagatcaggtcgatgagtcaccgcattccccacgggcgaccgtggcggtggctgcgttggcggcctgcccatggggaaacccatgggacgctctaatacagacatggtgcgaagagtctattgagctagttggtagtcctccggcccctgaatgcggctaatcctaactgcggagcacacaccctcaagccagagggcagtgtgtcgtaacgggcaactctgcagcggaaccgactactttgggtgtccgtgtttcattttattcctatactggctgcttatggtgacaattgagagatcgttaccatatagctattggattggccatccggtgactaatagagctattatatatccctttgttgggtttataccacttagcttgaaagaggttaaaacattacaattcattgttaagttgaatacagcaaaatggaagatgccaagaacatcaagaagggccctgctccattctaccctctggaagatggaacagccggcgagcagctgcacaaggccatgaagagatatgccctggtgcctggcacaatcgccttcacagatgcccacatcgaggtggacatcacctacgccgagtacttcgagatgtctgtgcggctggccgaagctatgaagcgctacggcctgaacaccaaccaccggatcgtcgtgtgcagcgagaacagcctgcagttcttcatgcctgtgctgggcgccctgttcatcggagttgctgtggcccctgccaacgacatctacaacgagcgcgagctgctgaacagcatgggcatctctcagcccaccgtggtgttcgtgtccaagaagggactgcagaaaatcctgaacgtgcagaagaagctgcccatcatccagaaaatcatcatcatggacagcaagaccgactaccagggcttccagagcatgtacaccttcgtgaccagccatctgccacctggcttcaacgagtacgacttcgtgcccgagagcttcgaccgggacaagacaatcgccctgatcatgaacagcagcggctctaccggactgcccaaaggtgttgccctgcctcatagaactgcctgcgtgcggtttagccacgccagagatcccatcttcggcaaccagatcatccccgacacagccatcctgagcgtggtgccttttcaccacggcttcggcatgttcaccacactgggctacctgatctgcggcttcagagtggtgctgatgtaccgcttcgaggaagaactgttcctgcggagcctgcaggactacaagatccagtctgctctgctggtgcctactctgttcagcttctttgccaagagcaccctgatcgataagtacgacctgagcaacctgcacgagatcgcctctggcggagcccctctgtctaaagaagtgggagaagccgtcgccaagcggttccatctgcctggcatcagacaaggctatggcctgaccgagacaaccagcgccattctgattacccctgagggcgacgataagcctggcgctgtgggaaaagtggtgccattcttcgaggccaaggtggtggatctggacaccggcaaaacactgggcgttaaccagaggggcgagctgtgtgttagaggccctatgatcatgagcggctacgtgaacaaccccgaggccacaaacgctctgatcgacaaggatggatggctgcacagcggcgacattgcctactgggacgaagatgagcacttcttcatcgtggaccggctgaagtccctgatcaagtacaagggctaccaggtggccccagccgagctggaatctattctgctgcaacaccccaacatcttcgatgccggcgttgcaggactgcccgatgatgatgctggcgaactgccagctgctgtggtggtgctggaacacggcaagaccatgaccgagaaagaaatcgtggactacgtggccagccaagtgaccaccgccaagaaactgagaggcggcgtggtgtttgtggacgaggtgccaaaaggcctgacaggcaagctggacgcccggaagatcagagagatcctgattaaggccaagaaaggcggcaagatcgccgtgtaatagctaactagacaaaacaccaaacaaacaagctgcgagccacggacttacatacacatgaacttagctaaaaaaaatctagatatcggatcccggg

SEQ ID NO: 3493 - DNA, 5211 bp, synthetic construct
  source 1..5211: mol_type = other DNA; note = Ana8 rational design
aggctaggtggaggctcagtgtgataagtctgcgatggtggatgcatgtgtcatggtcatagctgtttcctgtgtgaaattgttatccgctcagagggcacaatcctattccgcgctatccgacaatctccaagacattaggtggagttcagttcggcgtatggcatatgtcgctggaaagaacatgtgagcaaaaggccagcaaaaggccaggaaccgtaaaaaggccgcgttgctggcgtttttccataggctccgcccccctgacgagcatcacaaaaatcgacgctcaagtcagaggtggcgaaacccgacaggactataaagataccaggcgtttccccctggaagctccctcgtgcgctctcctgttccgaccctgccgcttaccggatacctgtccgcctttctcccttcgggaagcgtggcgctttctcatagctcacgctgtaggtatctcagttcggtgtaggtcgttcgctccaagctgggctgtgtgcacgaaccccccgttcagcccgaccgctgcgccttatccggtaactatcgtcttgagtccaacccggtaagacacgacttatcgccactggcagcagccactggtaacaggattagcagagcgaggtatgtaggcggtgctacagagttcttgaagtggtggcctaactacggctacactagaagaacagtatttggtatctgcgctctgctgaagccagttaccttcggaaaaagagttggtagctcttgatccggcaaacaaaccaccgctggtagcggtggtttttttgtttgcaagcagcagattacgcgcagaaaaaaaggatctcaagaagatcctttgatcttttctacggggtctgacgctctattcaacaaagccgccgtcccgtcaagtcagcgtaaatgggtagggggcttcaaatcgtcctcgtgataccaattcggagcctgcttttttgtacaaacttgttgataatggcaattcaaggatcttcacctagatccttttaaattaaaaatgaagttttaaatcaatctaaagtatatatgagtaaacttggtctgacagttaccaatgcttaatcagtgaggcacctatctcagcgatctgtctatttcgttcatccatagttgcctgactccccgtcgtgtagataactacgatacgggagggcttaccatctggccccagtgctgcaatgataccgcgagagccacgctcaccggctccagatttatcagcaataaaccagccagccggaagggccgagcgcagaagtggtcctgcaactttatccgcctccatccagtctattaattgttgccgggaagctagagtaagtagttcgccagttaatagtttgcgcaacgttgttgccattgctacaggcatcgtggtgtcacgctcgtcgtttggtatggcttcattcagctccggttcccaacgatcaaggcgagttacatgatcccccatgttgtgcaaaaaagcggttagctccttcggtcctccgatcgttgtcagaagtaagttggccgcagtgttatcactcatggttatggcagcactgcataattctcttactgtcatgccatccgtaagatgcttttctgtgactggtgagtactcaaccaagtcattctgagaatagtgtatgcggcgaccgagttgctcttgcccggcgtcaatacgggataataccgcgccacatagcagaactttaaaagtgctcatcattggaaaacgttcttcggggcgaaaactctcaaggatcttaccgctgttgagatccagttcgatgtaacccactcgtgcacccaactgatcttcagcatcttttactttcaccagcgtttctgggtgagcaaaaacaggaaggcaaaatgccgcaaaaaagggaataagggcgacacggaaatgttgaatactcatactcttcctttttcaatattattgaagcatttatcagggttattgtctcatgagcggatacatatttgaatgtatttagaaaaataaacaaataggggttccgcgcacatttccccgaaaagtgccagatacctgaaacaaaacccatcgtacggccaaggaagtctccaataactgtgatccaccacaagcgccagggttttcccagtcacgacgttgtaaaacgacggccagtcatgcataatccgcacgcatctggaataaggaagtgccattccgcctgaccttaatacgactcactatagggagaccctcgaaaaaaaagcttcgaatgcgaccatctgctcaggctcaatctcgctccaataatgacacactacgagaacaaccatagaactaagcaaaaataattgagccttaaagaagaaattctttaagtggatgctctcaaactcagggaaacctaaatctagttatagacaaggcaatcctgagccaagccgaagtagtaattagtaagttaacaatagatgacttacaactaatcggaaggtgcagagactcgacgggagctaccctaacgtcaagacgagggtaaagagagagtccaattctcaaagccaataggcagtagcgaaagctgcaagagaatgaaaatccgttgaccttaaacggtcgtgtggggagcacgccggcgccaataatgccacactaagagaacaaacaaagagctaagcaattaaaacagcctgtgggttgatcccacccacaggcccattgggcgctagcactctggtatcacggtacctttgtgcgcctgttttataccccctcccccaactgtaacttagaagtaacacacaccgatcaacagtcagcgtggcacaccagccacgttttgatcaagcacttctgttaccccggactgagtatcaatagactgctcacgcggttgaaggagaaagcgttcgttatccggccaactacttcgaaaaacctagtaacaccgtggaagttgcagagtgtttcgctcagcactaccccagtgtagatcaggtcgatgagtcaccgcattccccacgggcgaccgtggcggtggctgcgttggcggcctgcccatggggaaacccatgggacgctctaatacagacatggtgcgaagagtctattgagctagttggtagtcctccggcccctgaatgcggctaatcctaactgcggagcacacaccctcaagccagagggcagtgtgtcgtaacgggcaactctgcagcggaaccgactactttgggtgtccgtgtttcattttattcctatactggctgcttatggtgacaattgagagatcgttaccatatagctattggattggccatccggtgactaatagagctattatatatccctttgttgggtttataccacttagcttgaaagaggttaaaacattacaattcattgttaagttgaatacagcaaaatggaagatgccaagaacatcaagaagggccctgctccattctaccctctggaagatggaacagccggcgagcagctgcacaaggccatgaagagatatgccctggtgcctggcacaatcgccttcacagatgcccacatcgaggtggacatcacctacgccgagtacttcgagatgtctgtgcggctggccgaagctatgaagcgctacggcctgaacaccaaccaccggatcgtcgtgtgcagcgagaacagcctgcagttcttcatgcctgtgctgggcgccctgttcatcggagttgctgtggcccctgccaacgacatctacaacgagcgcgagctgctgaacagcatgggcatctctcagcccaccgtggtgttcgtgtccaagaagggactgcagaaaatcctgaacgtgcagaagaagctgcccatcatccagaaaatcatcatcatggacagcaagaccgactaccagggcttccagagcatgtacaccttcgtgaccagccatctgccacctggcttcaacgagtacgacttcgtgcccgagagcttcgaccgggacaagacaatcgccctgatcatgaacagcagcggctctaccggactgcccaaaggtgttgccctgcctcatagaactgcctgcgtgcggtttagccacgccagagatcccatcttcggcaaccagatcatccccgacacagccatcctgagcgtggtgccttttcaccacggcttcggcatgttcaccacactgggctacctgatctgcggcttcagagtggtgctgatgtaccgcttcgaggaagaactgttcctgcggagcctgcaggactacaagatccagtctgctctgctggtgcctactctgttcagcttctttgccaagagcaccctgatcgataagtacgacctgagcaacctgcacgagatcgcctctggcggagcccctctgtctaaagaagtgggagaagccgtcgccaagcggttccatctgcctggcatcagacaaggctatggcctgaccgagacaaccagcgccattctgattacccctgagggcgacgataagcctggcgctgtgggaaaagtggtgccattcttcgaggccaaggtggtggatctggacaccggcaaaacactgggcgttaaccagaggggcgagctgtgtgttagaggccctatgatcatgagcggctacgtgaacaaccccgaggccacaaacgctctgatcgacaaggatggatggctgcacagcggcgacattgcctactgggacgaagatgagcacttcttcatcgtggaccggctgaagtccctgatcaagtacaagggctaccaggtggccccagccgagctggaatctattctgctgcaacaccccaacatcttcgatgccggcgttgcaggactgcccgatgatgatgctggcgaactgccagctgctgtggtggtgctggaacacggcaagaccatgaccgagaaagaaatcgtggactacgtggccagccaagtgaccaccgccaagaaactgagaggcggcgtggtgtttgtggacgaggtgccaaaaggcctgacaggcaagctggacgcccggaagatcagagagatcctgattaaggccaagaaaggcggcaagatcgccgtgtaatagctaactagagatagaatccaactaacctggcgccggcgtgctcgctacggacttacatacacatgaacttagctggagcgagattgagcctgagcagatggtcgcattcgaagcaaaaaaaatctagatatcggatcccggg

SEQ ID NO: 3494 - DNA, 5076 bp, synthetic construct
  source 1..5076: mol_type = other DNA; note = Ana 29 Exonextention
aggctaggtggaggctcagtgtgataagtctgcgatggtggatgcatgtgtcatggtcatagctgtttcctgtgtgaaattgttatccgctcagagggcacaatcctattccgcgctatccgacaatctccaagacattaggtggagttcagttcggcgtatggcatatgtcgctggaaagaacatgtgagcaaaaggccagcaaaaggccaggaaccgtaaaaaggccgcgttgctggcgtttttccataggctccgcccccctgacgagcatcacaaaaatcgacgctcaagtcagaggtggcgaaacccgacaggactataaagataccaggcgtttccccctggaagctccctcgtgcgctctcctgttccgaccctgccgcttaccggatacctgtccgcctttctcccttcgggaagcgtggcgctttctcatagctcacgctgtaggtatctcagttcggtgtaggtcgttcgctccaagctgggctgtgtgcacgaaccccccgttcagcccgaccgctgcgccttatccggtaactatcgtcttgagtccaacccggtaagacacgacttatcgccactggcagcagccactggtaacaggattagcagagcgaggtatgtaggcggtgctacagagttcttgaagtggtggcctaactacggctacactagaagaacagtatttggtatctgcgctctgctgaagccagttaccttcggaaaaagagttggtagctcttgatccggcaaacaaaccaccgctggtagcggtggtttttttgtttgcaagcagcagattacgcgcagaaaaaaaggatctcaagaagatcctttgatcttttctacggggtctgacgctctattcaacaaagccgccgtcccgtcaagtcagcgtaaatgggtagggggcttcaaatcgtcctcgtgataccaattcggagcctgcttttttgtacaaacttgttgataatggcaattcaaggatcttcacctagatccttttaaattaaaaatgaagttttaaatcaatctaaagtatatatgagtaaacttggtctgacagttaccaatgcttaatcagtgaggcacctatctcagcgatctgtctatttcgttcatccatagttgcctgactccccgtcgtgtagataactacgatacgggagggcttaccatctggccccagtgctgcaatgataccgcgagagccacgctcaccggctccagatttatcagcaataaaccagccagccggaagggccgagcgcagaagtggtcctgcaactttatccgcctccatccagtctattaattgttgccgggaagctagagtaagtagttcgccagttaatagtttgcgcaacgttgttgccattgctacaggcatcgtggtgtcacgctcgtcgtttggtatggcttcattcagctccggttcccaacgatcaaggcgagttacatgatcccccatgttgtgcaaaaaagcggttagctccttcggtcctccgatcgttgtcagaagtaagttggccgcagtgttatcactcatggttatggcagcactgcataattctcttactgtcatgccatccgtaagatgcttttctgtgactggtgagtactcaaccaagtcattctgagaatagtgtatgcggcgaccgagttgctcttgcccggcgtcaatacgggataataccgcgccacatagcagaactttaaaagtgctcatcattggaaaacgttcttcggggcgaaaactctcaaggatcttaccgctgttgagatccagttcgatgtaacccactcgtgcacccaactgatcttcagcatcttttactttcaccagcgtttctgggtgagcaaaaacaggaaggcaaaatgccgcaaaaaagggaataagggcgacacggaaatgttgaatactcatactcttcctttttcaatattattgaagcatttatcagggttattgtctcatgagcggatacatatttgaatgtatttagaaaaataaacaaataggggttccgcgcacatttccccgaaaagtgccagatacctgaaacaaaacccatcgtacggccaaggaagtctccaataactgtgatccaccacaagcgccagggttttcccagtcacgacgttgtaaaacgacggccagtcatgcataatccgcacgcatctggaataaggaagtgccattccgcctgaccttaatacgactcactatagggagaccctcgaaaaaaaacacaaacaccgaaattctttaagtggatgctctcaaactcagggaaacctaaatctagttatagacaaggcaatcctgagccaagccgaagtagtaattagtaagttaacaatagatgacttacaactaatcggaaggtgcagagactcgacgggagctaccctaacgtcaagacgagggtaaagagagagtccaattctcaaagccaataggcagtagcgaaagctgcaagagaatgaaaatccgttgaccttaaacggtcgtgtgggggctcgcagcaaacaccaaacaaaacaaacacaaaccaacaaaaattaaaacagcctgtgggttgatcccacccacaggcccattgggcgctagcactctggtatcacggtacctttgtgcgcctgttttataccccctcccccaactgtaacttagaagtaacacacaccgatcaacagtcagcgtggcacaccagccacgttttgatcaagcacttctgttaccccggactgagtatcaatagactgctcacgcggttgaaggagaaagcgttcgttatccggccaactacttcgaaaaacctagtaacaccgtggaagttgcagagtgtttcgctcagcactaccccagtgtagatcaggtcgatgagtcaccgcattccccacgggcgaccgtggcggtggctgcgttggcggcctgcccatggggaaacccatgggacgctctaatacagacatggtgcgaagagtctattgagctagttggtagtcctccggcccctgaatgcggctaatcctaactgcggagcacacaccctcaagccagagggcagtgtgtcgtaacgggcaactctgcagcggaaccgactactttgggtgtccgtgtttcattttattcctatactggctgcttatggtgacaattgagagatcgttaccatatagctattggattggccatccggtgactaatagagctattatatatccctttgttgggtttataccacttagcttgaaagaggttaaaacattacaattcattgttaagttgaatacagcaaaatggaagatgccaagaacatcaagaagggccctgctccattctaccctctggaagatggaacagccggcgagcagctgcacaaggccatgaagagatatgccctggtgcctggcacaatcgccttcacagatgcccacatcgaggtggacatcacctacgccgagtacttcgagatgtctgtgcggctggccgaagctatgaagcgctacggcctgaacaccaaccaccggatcgtcgtgtgcagcgagaacagcctgcagttcttcatgcctgtgctgggcgccctgttcatcggagttgctgtggcccctgccaacgacatctacaacgagcgcgagctgctgaacagcatgggcatctctcagcccaccgtggtgttcgtgtccaagaagggactgcagaaaatcctgaacgtgcagaagaagctgcccatcatccagaaaatcatcatcatggacagcaagaccgactaccagggcttccagagcatgtacaccttcgtgaccagccatctgccacctggcttcaacgagtacgacttcgtgcccgagagcttcgaccgggacaagacaatcgccctgatcatgaacagcagcggctctaccggactgcccaaaggtgttgccctgcctcatagaactgcctgcgtgcggtttagccacgccagagatcccatcttcggcaaccagatcatccccgacacagccatcctgagcgtggtgccttttcaccacggcttcggcatgttcaccacactgggctacctgatctgcggcttcagagtggtgctgatgtaccgcttcgaggaagaactgttcctgcggagcctgcaggactacaagatccagtctgctctgctggtgcctactctgttcagcttctttgccaagagcaccctgatcgataagtacgacctgagcaacctgcacgagatcgcctctggcggagcccctctgtctaaagaagtgggagaagccgtcgccaagcggttccatctgcctggcatcagacaaggctatggcctgaccgagacaaccagcgccattctgattacccctgagggcgacgataagcctggcgctgtgggaaaagtggtgccattcttcgaggccaaggtggtggatctggacaccggcaaaacactgggcgttaaccagaggggcgagctgtgtgttagaggccctatgatcatgagcggctacgtgaacaaccccgaggccacaaacgctctgatcgacaaggatggatggctgcacagcggcgacattgcctactgggacgaagatgagcacttcttcatcgtggaccggctgaagtccctgatcaagtacaagggctaccaggtggccccagccgagctggaatctattctgctgcaacaccccaacatcttcgatgccggcgttgcaggactgcccgatgatgatgctggcgaactgccagctgctgtggtggtgctggaacacggcaagaccatgaccgagaaagaaatcgtggactacgtggccagccaagtgaccaccgccaagaaactgagaggcggcgtggtgtttgtggacgaggtgccaaaaggcctgacaggcaagctggacgcccggaagatcagagagatcctgattaaggccaagaaaggcggcaagatcgccgtgtaatagctaactagacaaaacaccaaacaaacaagctgcgagccgctacggacttaaataattgagccttaaagaaaaaaacaaccaaaaaaaatctagatatcggatcccggg

SEQ ID NO: 3495 - DNA, 5061 bp, synthetic construct
  source 1..5061: mol_type = other DNA; note = Ana29 15ntIH
aggctaggtggaggctcagtgtgataagtctgcgatggtggatgcatgtgtcatggtcatagctgtttcctgtgtgaaattgttatccgctcagagggcacaatcctattccgcgctatccgacaatctccaagacattaggtggagttcagttcggcgtatggcatatgtcgctggaaagaacatgtgagcaaaaggccagcaaaaggccaggaaccgtaaaaaggccgcgttgctggcgtttttccataggctccgcccccctgacgagcatcacaaaaatcgacgctcaagtcagaggtggcgaaacccgacaggactataaagataccaggcgtttccccctggaagctccctcgtgcgctctcctgttccgaccctgccgcttaccggatacctgtccgcctttctcccttcgggaagcgtggcgctttctcatagctcacgctgtaggtatctcagttcggtgtaggtcgttcgctccaagctgggctgtgtgcacgaaccccccgttcagcccgaccgctgcgccttatccggtaactatcgtcttgagtccaacccggtaagacacgacttatcgccactggcagcagccactggtaacaggattagcagagcgaggtatgtaggcggtgctacagagttcttgaagtggtggcctaactacggctacactagaagaacagtatttggtatctgcgctctgctgaagccagttaccttcggaaaaagagttggtagctcttgatccggcaaacaaaccaccgctggtagcggtggtttttttgtttgcaagcagcagattacgcgcagaaaaaaaggatctcaagaagatcctttgatcttttctacggggtctgacgctctattcaacaaagccgccgtcccgtcaagtcagcgtaaatgggtagggggcttcaaatcgtcctcgtgataccaattcggagcctgcttttttgtacaaacttgttgataatggcaattcaaggatcttcacctagatccttttaaattaaaaatgaagttttaaatcaatctaaagtatatatgagtaaacttggtctgacagttaccaatgcttaatcagtgaggcacctatctcagcgatctgtctatttcgttcatccatagttgcctgactccccgtcgtgtagataactacgatacgggagggcttaccatctggccccagtgctgcaatgataccgcgagagccacgctcaccggctccagatttatcagcaataaaccagccagccggaagggccgagcgcagaagtggtcctgcaactttatccgcctccatccagtctattaattgttgccgggaagctagagtaagtagttcgccagttaatagtttgcgcaacgttgttgccattgctacaggcatcgtggtgtcacgctcgtcgtttggtatggcttcattcagctccggttcccaacgatcaaggcgagttacatgatcccccatgttgtgcaaaaaagcggttagctccttcggtcctccgatcgttgtcagaagtaagttggccgcagtgttatcactcatggttatggcagcactgcataattctcttactgtcatgccatccgtaagatgcttttctgtgactggtgagtactcaaccaagtcattctgagaatagtgtatgcggcgaccgagttgctcttgcccggcgtcaatacgggataataccgcgccacatagcagaactttaaaagtgctcatcattggaaaacgttcttcggggcgaaaactctcaaggatcttaccgctgttgagatccagttcgatgtaacccactcgtgcacccaactgatcttcagcatcttttactttcaccagcgtttctgggtgagcaaaaacaggaaggcaaaatgccgcaaaaaagggaataagggcgacacggaaatgttgaatactcatactcttcctttttcaatattattgaagcatttatcagggttattgtctcatgagcggatacatatttgaatgtatttagaaaaataaacaaataggggttccgcgcacatttccccgaaaagtgccagatacctgaaacaaaacccatcgtacggccaaggaagtctccaataactgtgatccaccacaagcgccagggttttcccagtcacgacgttgtaaaacgacggccagtcatgcataatccgcacgcatctggaataaggaagtgccattccgcctgaccttaatacgactcactatagggagaccctcgaaaaaaaacacaaacaccgaaattctttaagtggatgctctcaaactcagggaaacctaaatctagttatagacaaggcaatcctgagccaagccgaagtagtaattagtaagttaacaatagatgacttacaactaatcggaaggtgcagagactcgacgggagctaccctaacgtcaagacgagggtaaagagagagtccaattctcaaagccaataggcagtagcgaaagctgcaagagaatgaaaatccgtgagcacgccggcgccaaacaccaaacaaaacaaacacaaaccaacaaaaattaaaacagcctgtgggttgatcccacccacaggcccattgggcgctagcactctggtatcacggtacctttgtgcgcctgttttataccccctcccccaactgtaacttagaagtaacacacaccgatcaacagtcagcgtggcacaccagccacgttttgatcaagcacttctgttaccccggactgagtatcaatagactgctcacgcggttgaaggagaaagcgttcgttatccggccaactacttcgaaaaacctagtaacaccgtggaagttgcagagtgtttcgctcagcactaccccagtgtagatcaggtcgatgagtcaccgcattccccacgggcgaccgtggcggtggctgcgttggcggcctgcccatggggaaacccatgggacgctctaatacagacatggtgcgaagagtctattgagctagttggtagtcctccggcccctgaatgcggctaatcctaactgcggagcacacaccctcaagccagagggcagtgtgtcgtaacgggcaactctgcagcggaaccgactactttgggtgtccgtgtttcattttattcctatactggctgcttatggtgacaattgagagatcgttaccatatagctattggattggccatccggtgactaatagagctattatatatccctttgttgggtttataccacttagcttgaaagaggttaaaacattacaattcattgttaagttgaatacagcaaaatggaagatgccaagaacatcaagaagggccctgctccattctaccctctggaagatggaacagccggcgagcagctgcacaaggccatgaagagatatgccctggtgcctggcacaatcgccttcacagatgcccacatcgaggtggacatcacctacgccgagtacttcgagatgtctgtgcggctggccgaagctatgaagcgctacggcctgaacaccaaccaccggatcgtcgtgtgcagcgagaacagcctgcagttcttcatgcctgtgctgggcgccctgttcatcggagttgctgtggcccctgccaacgacatctacaacgagcgcgagctgctgaacagcatgggcatctctcagcccaccgtggtgttcgtgtccaagaagggactgcagaaaatcctgaacgtgcagaagaagctgcccatcatccagaaaatcatcatcatggacagcaagaccgactaccagggcttccagagcatgtacaccttcgtgaccagccatctgccacctggcttcaacgagtacgacttcgtgcccgagagcttcgaccgggacaagacaatcgccctgatcatgaacagcagcggctctaccggactgcccaaaggtgttgccctgcctcatagaactgcctgcgtgcggtttagccacgccagagatcccatcttcggcaaccagatcatccccgacacagccatcctgagcgtggtgccttttcaccacggcttcggcatgttcaccacactgggctacctgatctgcggcttcagagtggtgctgatgtaccgcttcgaggaagaactgttcctgcggagcctgcaggactacaagatccagtctgctctgctggtgcctactctgttcagcttctttgccaagagcaccctgatcgataagtacgacctgagcaacctgcacgagatcgcctctggcggagcccctctgtctaaagaagtgggagaagccgtcgccaagcggttccatctgcctggcatcagacaaggctatggcctgaccgagacaaccagcgccattctgattacccctgagggcgacgataagcctggcgctgtgggaaaagtggtgccattcttcgaggccaaggtggtggatctggacaccggcaaaacactgggcgttaaccagaggggcgagctgtgtgttagaggccctatgatcatgagcggctacgtgaacaaccccgaggccacaaacgctctgatcgacaaggatggatggctgcacagcggcgacattgcctactgggacgaagatgagcacttcttcatcgtggaccggctgaagtccctgatcaagtacaagggctaccaggtggccccagccgagctggaatctattctgctgcaacaccccaacatcttcgatgccggcgttgcaggactgcccgatgatgatgctggcgaactgccagctgctgtggtggtgctggaacacggcaagaccatgaccgagaaagaaatcgtggactacgtggccagccaagtgaccaccgccaagaaactgagaggcggcgtggtgtttgtggacgaggtgccaaaaggcctgacaggcaagctggacgcccggaagatcagagagatcctgattaaggccaagaaaggcggcaagatcgccgtgtaatagctaactagacaaaacaccaaacaaacaaggcgccggcgtgctcacggacttaaataattgagccttaaagaaaaaaacaaccaaaaaaaatctagatatcggatcccggg

SEQ ID NO: 3496 - DNA, 5131 bp, synthetic construct
  source 1..5131: mol_type = other DNA; note = Ana29 EH T60L40
aggctaggtggaggctcagtgtgataagtctgcgatggtggatgcatgtgtcatggtcatagctgtttcctgtgtgaaattgttatccgctcagagggcacaatcctattccgcgctatccgacaatctccaagacattaggtggagttcagttcggcgtatggcatatgtcgctggaaagaacatgtgagcaaaaggccagcaaaaggccaggaaccgtaaaaaggccgcgttgctggcgtttttccataggctccgcccccctgacgagcatcacaaaaatcgacgctcaagtcagaggtggcgaaacccgacaggactataaagataccaggcgtttccccctggaagctccctcgtgcgctctcctgttccgaccctgccgcttaccggatacctgtccgcctttctcccttcgggaagcgtggcgctttctcatagctcacgctgtaggtatctcagttcggtgtaggtcgttcgctccaagctgggctgtgtgcacgaaccccccgttcagcccgaccgctgcgccttatccggtaactatcgtcttgagtccaacccggtaagacacgacttatcgccactggcagcagccactggtaacaggattagcagagcgaggtatgtaggcggtgctacagagttcttgaagtggtggcctaactacggctacactagaagaacagtatttggtatctgcgctctgctgaagccagttaccttcggaaaaagagttggtagctcttgatccggcaaacaaaccaccgctggtagcggtggtttttttgtttgcaagcagcagattacgcgcagaaaaaaaggatctcaagaagatcctttgatcttttctacggggtctgacgctctattcaacaaagccgccgtcccgtcaagtcagcgtaaatgggtagggggcttcaaatcgtcctcgtgataccaattcggagcctgcttttttgtacaaacttgttgataatggcaattcaaggatcttcacctagatccttttaaattaaaaatgaagttttaaatcaatctaaagtatatatgagtaaacttggtctgacagttaccaatgcttaatcagtgaggcacctatctcagcgatctgtctatttcgttcatccatagttgcctgactccccgtcgtgtagataactacgatacgggagggcttaccatctggccccagtgctgcaatgataccgcgagagccacgctcaccggctccagatttatcagcaataaaccagccagccggaagggccgagcgcagaagtggtcctgcaactttatccgcctccatccagtctattaattgttgccgggaagctagagtaagtagttcgccagttaatagtttgcgcaacgttgttgccattgctacaggcatcgtggtgtcacgctcgtcgtttggtatggcttcattcagctccggttcccaacgatcaaggcgagttacatgatcccccatgttgtgcaaaaaagcggttagctccttcggtcctccgatcgttgtcagaagtaagttggccgcagtgttatcactcatggttatggcagcactgcataattctcttactgtcatgccatccgtaagatgcttttctgtgactggtgagtactcaaccaagtcattctgagaatagtgtatgcggcgaccgagttgctcttgcccggcgtcaatacgggataataccgcgccacatagcagaactttaaaagtgctcatcattggaaaacgttcttcggggcgaaaactctcaaggatcttaccgctgttgagatccagttcgatgtaacccactcgtgcacccaactgatcttcagcatcttttactttcaccagcgtttctgggtgagcaaaaacaggaaggcaaaatgccgcaaaaaagggaataagggcgacacggaaatgttgaatactcatactcttcctttttcaatattattgaagcatttatcagggttattgtctcatgagcggatacatatttgaatgtatttagaaaaataaacaaataggggttccgcgcacatttccccgaaaagtgccagatacctgaaacaaaacccatcgtacggccaaggaagtctccaataactgtgatccaccacaagcgccagggttttcccagtcacgacgttgtaaaacgacggccagtcatgcataatccgcacgcatctggaataaggaagtgccattccgcctgaccttaatacgactcactatagggagaccctcgaaaaaaaagcttcgaatgcgaccatctgctcaggctcaatctcgctcccacaaacaccgaaattctttaagtggatgctctcaaactcagggaaacctaaatctagttatagacaaggcaatcctgagccaagccgaagtagtaattagtaagttaacaatagatgacttacaactaatcggaaggtgcagagactcgacgggagctaccctaacgtcaagacgagggtaaagagagagtccaattctcaaagccaataggcagtagcgaaagctgcaagagaatgaaaatccgtggctcgcagcaaacaccaaacaaaacaaacacaaaccaacaaaaattaaaacagcctgtgggttgatcccacccacaggcccattgggcgctagcactctggtatcacggtacctttgtgcgcctgttttataccccctcccccaactgtaacttagaagtaacacacaccgatcaacagtcagcgtggcacaccagccacgttttgatcaagcacttctgttaccccggactgagtatcaatagactgctcacgcggttgaaggagaaagcgttcgttatccggccaactacttcgaaaaacctagtaacaccgtggaagttgcagagtgtttcgctcagcactaccccagtgtagatcaggtcgatgagtcaccgcattccccacgggcgaccgtggcggtggctgcgttggcggcctgcccatggggaaacccatgggacgctctaatacagacatggtgcgaagagtctattgagctagttggtagtcctccggcccctgaatgcggctaatcctaactgcggagcacacaccctcaagccagagggcagtgtgtcgtaacgggcaactctgcagcggaaccgactactttgggtgtccgtgtttcattttattcctatactggctgcttatggtgacaattgagagatcgttaccatatagctattggattggccatccggtgactaatagagctattatatatccctttgttgggtttataccacttagcttgaaagaggttaaaacattacaattcattgttaagttgaatacagcaaaatggaagatgccaagaacatcaagaagggccctgctccattctaccctctggaagatggaacagccggcgagcagctgcacaaggccatgaagagatatgccctggtgcctggcacaatcgccttcacagatgcccacatcgaggtggacatcacctacgccgagtacttcgagatgtctgtgcggctggccgaagctatgaagcgctacggcctgaacaccaaccaccggatcgtcgtgtgcagcgagaacagcctgcagttcttcatgcctgtgctgggcgccctgttcatcggagttgctgtggcccctgccaacgacatctacaacgagcgcgagctgctgaacagcatgggcatctctcagcccaccgtggtgttcgtgtccaagaagggactgcagaaaatcctgaacgtgcagaagaagctgcccatcatccagaaaatcatcatcatggacagcaagaccgactaccagggcttccagagcatgtacaccttcgtgaccagccatctgccacctggcttcaacgagtacgacttcgtgcccgagagcttcgaccgggacaagacaatcgccctgatcatgaacagcagcggctctaccggactgcccaaaggtgttgccctgcctcatagaactgcctgcgtgcggtttagccacgccagagatcccatcttcggcaaccagatcatccccgacacagccatcctgagcgtggtgccttttcaccacggcttcggcatgttcaccacactgggctacctgatctgcggcttcagagtggtgctgatgtaccgcttcgaggaagaactgttcctgcggagcctgcaggactacaagatccagtctgctctgctggtgcctactctgttcagcttctttgccaagagcaccctgatcgataagtacgacctgagcaacctgcacgagatcgcctctggcggagcccctctgtctaaagaagtgggagaagccgtcgccaagcggttccatctgcctggcatcagacaaggctatggcctgaccgagacaaccagcgccattctgattacccctgagggcgacgataagcctggcgctgtgggaaaagtggtgccattcttcgaggccaaggtggtggatctggacaccggcaaaacactgggcgttaaccagaggggcgagctgtgtgttagaggccctatgatcatgagcggctacgtgaacaaccccgaggccacaaacgctctgatcgacaaggatggatggctgcacagcggcgacattgcctactgggacgaagatgagcacttcttcatcgtggaccggctgaagtccctgatcaagtacaagggctaccaggtggccccagccgagctggaatctattctgctgcaacaccccaacatcttcgatgccggcgttgcaggactgcccgatgatgatgctggcgaactgccagctgctgtggtggtgctggaacacggcaagaccatgaccgagaaagaaatcgtggactacgtggccagccaagtgaccaccgccaagaaactgagaggcggcgtggtgtttgtggacgaggtgccaaaaggcctgacaggcaagctggacgcccggaagatcagagagatcctgattaaggccaagaaaggcggcaagatcgccgtgtaatagctaactagacaaaacaccaaacaaacaagctgcgagccacggacttaaataattgagccttaaagaaaaaaacaaccggagcgagattgagcctgagcagatggtcgcattcgaagcaaaaaaaatctagatatcggatcccggg

SEQ ID NO: 3497 - DNA, 5111 bp, synthetic construct
  source 1..5111: mol_type = other DNA; note = Ana29 EH T75L30
aggctaggtggaggctcagtgtgataagtctgcgatggtggatgcatgtgtcatggtcatagctgtttcctgtgtgaaattgttatccgctcagagggcacaatcctattccgcgctatccgacaatctccaagacattaggtggagttcagttcggcgtatggcatatgtcgctggaaagaacatgtgagcaaaaggccagcaaaaggccaggaaccgtaaaaaggccgcgttgctggcgtttttccataggctccgcccccctgacgagcatcacaaaaatcgacgctcaagtcagaggtggcgaaacccgacaggactataaagataccaggcgtttccccctggaagctccctcgtgcgctctcctgttccgaccctgccgcttaccggatacctgtccgcctttctcccttcgggaagcgtggcgctttctcatagctcacgctgtaggtatctcagttcggtgtaggtcgttcgctccaagctgggctgtgtgcacgaaccccccgttcagcccgaccgctgcgccttatccggtaactatcgtcttgagtccaacccggtaagacacgacttatcgccactggcagcagccactggtaacaggattagcagagcgaggtatgtaggcggtgctacagagttcttgaagtggtggcctaactacggctacactagaagaacagtatttggtatctgcgctctgctgaagccagttaccttcggaaaaagagttggtagctcttgatccggcaaacaaaccaccgctggtagcggtggtttttttgtttgcaagcagcagattacgcgcagaaaaaaaggatctcaagaagatcctttgatcttttctacggggtctgacgctctattcaacaaagccgccgtcccgtcaagtcagcgtaaatgggtagggggcttcaaatcgtcctcgtgataccaattcggagcctgcttttttgtacaaacttgttgataatggcaattcaaggatcttcacctagatccttttaaattaaaaatgaagttttaaatcaatctaaagtatatatgagtaaacttggtctgacagttaccaatgcttaatcagtgaggcacctatctcagcgatctgtctatttcgttcatccatagttgcctgactccccgtcgtgtagataactacgatacgggagggcttaccatctggccccagtgctgcaatgataccgcgagagccacgctcaccggctccagatttatcagcaataaaccagccagccggaagggccgagcgcagaagtggtcctgcaactttatccgcctccatccagtctattaattgttgccgggaagctagagtaagtagttcgccagttaatagtttgcgcaacgttgttgccattgctacaggcatcgtggtgtcacgctcgtcgtttggtatggcttcattcagctccggttcccaacgatcaaggcgagttacatgatcccccatgttgtgcaaaaaagcggttagctccttcggtcctccgatcgttgtcagaagtaagttggccgcagtgttatcactcatggttatggcagcactgcataattctcttactgtcatgccatccgtaagatgcttttctgtgactggtgagtactcaaccaagtcattctgagaatagtgtatgcggcgaccgagttgctcttgcccggcgtcaatacgggataataccgcgccacatagcagaactttaaaagtgctcatcattggaaaacgttcttcggggcgaaaactctcaaggatcttaccgctgttgagatccagttcgatgtaacccactcgtgcacccaactgatcttcagcatcttttactttcaccagcgtttctgggtgagcaaaaacaggaaggcaaaatgccgcaaaaaagggaataagggcgacacggaaatgttgaatactcatactcttcctttttcaatattattgaagcatttatcagggttattgtctcatgagcggatacatatttgaatgtatttagaaaaataaacaaataggggttccgcgcacatttccccgaaaagtgccagatacctgaaacaaaacccatcgtacggccaaggaagtctccaataactgtgatccaccacaagcgccagggttttcccagtcacgacgttgtaaaacgacggccagtcatgcataatccgcacgcatctggaataaggaagtgccattccgcctgaccttaatacgactcactatagggagaccctcgaaaaaaaagctcgcactggccggaagctcgtcggagcgcacaaacaccgaaattctttaagtggatgctctcaaactcagggaaacctaaatctagttatagacaaggcaatcctgagccaagccgaagtagtaattagtaagttaacaatagatgacttacaactaatcggaaggtgcagagactcgacgggagctaccctaacgtcaagacgagggtaaagagagagtccaattctcaaagccaataggcagtagcgaaagctgcaagagaatgaaaatccgtggctcgcagcaaacaccaaacaaaacaaacacaaaccaacaaaaattaaaacagcctgtgggttgatcccacccacaggcccattgggcgctagcactctggtatcacggtacctttgtgcgcctgttttataccccctcccccaactgtaacttagaagtaacacacaccgatcaacagtcagcgtggcacaccagccacgttttgatcaagcacttctgttaccccggactgagtatcaatagactgctcacgcggttgaaggagaaagcgttcgttatccggccaactacttcgaaaaacctagtaacaccgtggaagttgcagagtgtttcgctcagcactaccccagtgtagatcaggtcgatgagtcaccgcattccccacgggcgaccgtggcggtggctgcgttggcggcctgcccatggggaaacccatgggacgctctaatacagacatggtgcgaagagtctattgagctagttggtagtcctccggcccctgaatgcggctaatcctaactgcggagcacacaccctcaagccagagggcagtgtgtcgtaacgggcaactctgcagcggaaccgactactttgggtgtccgtgtttcattttattcctatactggctgcttatggtgacaattgagagatcgttaccatatagctattggattggccatccggtgactaatagagctattatatatccctttgttgggtttataccacttagcttgaaagaggttaaaacattacaattcattgttaagttgaatacagcaaaatggaagatgccaagaacatcaagaagggccctgctccattctaccctctggaagatggaacagccggcgagcagctgcacaaggccatgaagagatatgccctggtgcctggcacaatcgccttcacagatgcccacatcgaggtggacatcacctacgccgagtacttcgagatgtctgtgcggctggccgaagctatgaagcgctacggcctgaacaccaaccaccggatcgtcgtgtgcagcgagaacagcctgcagttcttcatgcctgtgctgggcgccctgttcatcggagttgctgtggcccctgccaacgacatctacaacgagcgcgagctgctgaacagcatgggcatctctcagcccaccgtggtgttcgtgtccaagaagggactgcagaaaatcctgaacgtgcagaagaagctgcccatcatccagaaaatcatcatcatggacagcaagaccgactaccagggcttccagagcatgtacaccttcgtgaccagccatctgccacctggcttcaacgagtacgacttcgtgcccgagagcttcgaccgggacaagacaatcgccctgatcatgaacagcagcggctctaccggactgcccaaaggtgttgccctgcctcatagaactgcctgcgtgcggtttagccacgccagagatcccatcttcggcaaccagatcatccccgacacagccatcctgagcgtggtgccttttcaccacggcttcggcatgttcaccacactgggctacctgatctgcggcttcagagtggtgctgatgtaccgcttcgaggaagaactgttcctgcggagcctgcaggactacaagatccagtctgctctgctggtgcctactctgttcagcttctttgccaagagcaccctgatcgataagtacgacctgagcaacctgcacgagatcgcctctggcggagcccctctgtctaaagaagtgggagaagccgtcgccaagcggttccatctgcctggcatcagacaaggctatggcctgaccgagacaaccagcgccattctgattacccctgagggcgacgataagcctggcgctgtgggaaaagtggtgccattcttcgaggccaaggtggtggatctggacaccggcaaaacactgggcgttaaccagaggggcgagctgtgtgttagaggccctatgatcatgagcggctacgtgaacaaccccgaggccacaaacgctctgatcgacaaggatggatggctgcacagcggcgacattgcctactgggacgaagatgagcacttcttcatcgtggaccggctgaagtccctgatcaagtacaagggctaccaggtggccccagccgagctggaatctattctgctgcaacaccccaacatcttcgatgccggcgttgcaggactgcccgatgatgatgctggcgaactgccagctgctgtggtggtgctggaacacggcaagaccatgaccgagaaagaaatcgtggactacgtggccagccaagtgaccaccgccaagaaactgagaggcggcgtggtgtttgtggacgaggtgccaaaaggcctgacaggcaagctggacgcccggaagatcagagagatcctgattaaggccaagaaaggcggcaagatcgccgtgtaatagctaactagacaaaacaccaaacaaacaagctgcgagccacggacttaaataattgagccttaaagaaaaaaacaacccgctccgacgagcttccggccagtgcgagcaaaaaaaatctagatatcggatcccggg

SEQ ID NO: 3498 - DNA, 5076 bp, synthetic construct
  source 1..5076: mol_type = other DNA; note = Ana29 40nt IS
aggctaggtggaggctcagtgtgataagtctgcgatggtggatgcatgtgtcatggtcatagctgtttcctgtgtgaaattgttatccgctcagagggcacaatcctattccgcgctatccgacaatctccaagacattaggtggagttcagttcggcgtatggcatatgtcgctggaaagaacatgtgagcaaaaggccagcaaaaggccaggaaccgtaaaaaggccgcgttgctggcgtttttccataggctccgcccccctgacgagcatcacaaaaatcgacgctcaagtcagaggtggcgaaacccgacaggactataaagataccaggcgtttccccctggaagctccctcgtgcgctctcctgttccgaccctgccgcttaccggatacctgtccgcctttctcccttcgggaagcgtggcgctttctcatagctcacgctgtaggtatctcagttcggtgtaggtcgttcgctccaagctgggctgtgtgcacgaaccccccgttcagcccgaccgctgcgccttatccggtaactatcgtcttgagtccaacccggtaagacacgacttatcgccactggcagcagccactggtaacaggattagcagagcgaggtatgtaggcggtgctacagagttcttgaagtggtggcctaactacggctacactagaagaacagtatttggtatctgcgctctgctgaagccagttaccttcggaaaaagagttggtagctcttgatccggcaaacaaaccaccgctggtagcggtggtttttttgtttgcaagcagcagattacgcgcagaaaaaaaggatctcaagaagatcctttgatcttttctacggggtctgacgctctattcaacaaagccgccgtcccgtcaagtcagcgtaaatgggtagggggcttcaaatcgtcctcgtgataccaattcggagcctgcttttttgtacaaacttgttgataatggcaattcaaggatcttcacctagatccttttaaattaaaaatgaagttttaaatcaatctaaagtatatatgagtaaacttggtctgacagttaccaatgcttaatcagtgaggcacctatctcagcgatctgtctatttcgttcatccatagttgcctgactccccgtcgtgtagataactacgatacgggagggcttaccatctggccccagtgctgcaatgataccgcgagagccacgctcaccggctccagatttatcagcaataaaccagccagccggaagggccgagcgcagaagtggtcctgcaactttatccgcctccatccagtctattaattgttgccgggaagctagagtaagtagttcgccagttaatagtttgcgcaacgttgttgccattgctacaggcatcgtggtgtcacgctcgtcgtttggtatggcttcattcagctccggttcccaacgatcaaggcgagttacatgatcccccatgttgtgcaaaaaagcggttagctccttcggtcctccgatcgttgtcagaagtaagttggccgcagtgttatcactcatggttatggcagcactgcataattctcttactgtcatgccatccgtaagatgcttttctgtgactggtgagtactcaaccaagtcattctgagaatagtgtatgcggcgaccgagttgctcttgcccggcgtcaatacgggataataccgcgccacatagcagaactttaaaagtgctcatcattggaaaacgttcttcggggcgaaaactctcaaggatcttaccgctgttgagatccagttcgatgtaacccactcgtgcacccaactgatcttcagcatcttttactttcaccagcgtttctgggtgagcaaaaacaggaaggcaaaatgccgcaaaaaagggaataagggcgacacggaaatgttgaatactcatactcttcctttttcaatattattgaagcatttatcagggttattgtctcatgagcggatacatatttgaatgtatttagaaaaataaacaaataggggttccgcgcacatttccccgaaaagtgccagatacctgaaacaaaacccatcgtacggccaaggaagtctccaataactgtgatccaccacaagcgccagggttttcccagtcacgacgttgtaaaacgacggccagtcatgcataatccgcacgcatctggaataaggaagtgccattccgcctgaccttaatacgactcactatagggagaccctcgaaaaaaaacacaaacaccgaaattctttaagtggatgctctcaaactcagggaaacctaaatctagttatagacaaggcaatcctgagccaagccgaagtagtaattagtaagttaacaatagatgacttacaactaatcggaaggtgcagagactcgacgggagctaccctaacgtcaagacgagggtaaagagagagtccaattctcaaagccaataggcagtagcgaaagctgcaagagaatgaaaatccgtggctcgcagcaataatgccacactaagagaacaaacaaagagctaagcaattaaaacagcctgtgggttgatcccacccacaggcccattgggcgctagcactctggtatcacggtacctttgtgcgcctgttttataccccctcccccaactgtaacttagaagtaacacacaccgatcaacagtcagcgtggcacaccagccacgttttgatcaagcacttctgttaccccggactgagtatcaatagactgctcacgcggttgaaggagaaagcgttcgttatccggccaactacttcgaaaaacctagtaacaccgtggaagttgcagagtgtttcgctcagcactaccccagtgtagatcaggtcgatgagtcaccgcattccccacgggcgaccgtggcggtggctgcgttggcggcctgcccatggggaaacccatgggacgctctaatacagacatggtgcgaagagtctattgagctagttggtagtcctccggcccctgaatgcggctaatcctaactgcggagcacacaccctcaagccagagggcagtgtgtcgtaacgggcaactctgcagcggaaccgactactttgggtgtccgtgtttcattttattcctatactggctgcttatggtgacaattgagagatcgttaccatatagctattggattggccatccggtgactaatagagctattatatatccctttgttgggtttataccacttagcttgaaagaggttaaaacattacaattcattgttaagttgaatacagcaaaatggaagatgccaagaacatcaagaagggccctgctccattctaccctctggaagatggaacagccggcgagcagctgcacaaggccatgaagagatatgccctggtgcctggcacaatcgccttcacagatgcccacatcgaggtggacatcacctacgccgagtacttcgagatgtctgtgcggctggccgaagctatgaagcgctacggcctgaacaccaaccaccggatcgtcgtgtgcagcgagaacagcctgcagttcttcatgcctgtgctgggcgccctgttcatcggagttgctgtggcccctgccaacgacatctacaacgagcgcgagctgctgaacagcatgggcatctctcagcccaccgtggtgttcgtgtccaagaagggactgcagaaaatcctgaacgtgcagaagaagctgcccatcatccagaaaatcatcatcatggacagcaagaccgactaccagggcttccagagcatgtacaccttcgtgaccagccatctgccacctggcttcaacgagtacgacttcgtgcccgagagcttcgaccgggacaagacaatcgccctgatcatgaacagcagcggctctaccggactgcccaaaggtgttgccctgcctcatagaactgcctgcgtgcggtttagccacgccagagatcccatcttcggcaaccagatcatccccgacacagccatcctgagcgtggtgccttttcaccacggcttcggcatgttcaccacactgggctacctgatctgcggcttcagagtggtgctgatgtaccgcttcgaggaagaactgttcctgcggagcctgcaggactacaagatccagtctgctctgctggtgcctactctgttcagcttctttgccaagagcaccctgatcgataagtacgacctgagcaacctgcacgagatcgcctctggcggagcccctctgtctaaagaagtgggagaagccgtcgccaagcggttccatctgcctggcatcagacaaggctatggcctgaccgagacaaccagcgccattctgattacccctgagggcgacgataagcctggcgctgtgggaaaagtggtgccattcttcgaggccaaggtggtggatctggacaccggcaaaacactgggcgttaaccagaggggcgagctgtgtgttagaggccctatgatcatgagcggctacgtgaacaaccccgaggccacaaacgctctgatcgacaaggatggatggctgcacagcggcgacattgcctactgggacgaagatgagcacttcttcatcgtggaccggctgaagtccctgatcaagtacaagggctaccaggtggccccagccgagctggaatctattctgctgcaacaccccaacatcttcgatgccggcgttgcaggactgcccgatgatgatgctggcgaactgccagctgctgtggtggtgctggaacacggcaagaccatgaccgagaaagaaatcgtggactacgtggccagccaagtgaccaccgccaagaaactgagaggcggcgtggtgtttgtggacgaggtgccaaaaggcctgacaggcaagctggacgcccggaagatcagagagatcctgattaaggccaagaaaggcggcaagatcgccgtgtaatagctaactagaataatgacacacgacaagaacaatcataccactaagcaagctgcgagccacggacttaaataattgagccttaaagaaaaaaacaaccaaaaaaaatctagatatcggatcccggg

SEQ ID NO: 3499 - DNA, 5036 bp, synthetic construct
  source 1..5036: mol_type = other DNA; note = Ana29 20nt IS
aggctaggtggaggctcagtgtgataagtctgcgatggtggatgcatgtgtcatggtcatagctgtttcctgtgtgaaattgttatccgctcagagggcacaatcctattccgcgctatccgacaatctccaagacattaggtggagttcagttcggcgtatggcatatgtcgctggaaagaacatgtgagcaaaaggccagcaaaaggccaggaaccgtaaaaaggccgcgttgctggcgtttttccataggctccgcccccctgacgagcatcacaaaaatcgacgctcaagtcagaggtggcgaaacccgacaggactataaagataccaggcgtttccccctggaagctccctcgtgcgctctcctgttccgaccctgccgcttaccggatacctgtccgcctttctcccttcgggaagcgtggcgctttctcatagctcacgctgtaggtatctcagttcggtgtaggtcgttcgctccaagctgggctgtgtgcacgaaccccccgttcagcccgaccgctgcgccttatccggtaactatcgtcttgagtccaacccggtaagacacgacttatcgccactggcagcagccactggtaacaggattagcagagcgaggtatgtaggcggtgctacagagttcttgaagtggtggcctaactacggctacactagaagaacagtatttggtatctgcgctctgctgaagccagttaccttcggaaaaagagttggtagctcttgatccggcaaacaaaccaccgctggtagcggtggtttttttgtttgcaagcagcagattacgcgcagaaaaaaaggatctcaagaagatcctttgatcttttctacggggtctgacgctctattcaacaaagccgccgtcccgtcaagtcagcgtaaatgggtagggggcttcaaatcgtcctcgtgataccaattcggagcctgcttttttgtacaaacttgttgataatggcaattcaaggatcttcacctagatccttttaaattaaaaatgaagttttaaatcaatctaaagtatatatgagtaaacttggtctgacagttaccaatgcttaatcagtgaggcacctatctcagcgatctgtctatttcgttcatccatagttgcctgactccccgtcgtgtagataactacgatacgggagggcttaccatctggccccagtgctgcaatgataccgcgagagccacgctcaccggctccagatttatcagcaataaaccagccagccggaagggccgagcgcagaagtggtcctgcaactttatccgcctccatccagtctattaattgttgccgggaagctagagtaagtagttcgccagttaatagtttgcgcaacgttgttgccattgctacaggcatcgtggtgtcacgctcgtcgtttggtatggcttcattcagctccggttcccaacgatcaaggcgagttacatgatcccccatgttgtgcaaaaaagcggttagctccttcggtcctccgatcgttgtcagaagtaagttggccgcagtgttatcactcatggttatggcagcactgcataattctcttactgtcatgccatccgtaagatgcttttctgtgactggtgagtactcaaccaagtcattctgagaatagtgtatgcggcgaccgagttgctcttgcccggcgtcaatacgggataataccgcgccacatagcagaactttaaaagtgctcatcattggaaaacgttcttcggggcgaaaactctcaaggatcttaccgctgttgagatccagttcgatgtaacccactcgtgcacccaactgatcttcagcatcttttactttcaccagcgtttctgggtgagcaaaaacaggaaggcaaaatgccgcaaaaaagggaataagggcgacacggaaatgttgaatactcatactcttcctttttcaatattattgaagcatttatcagggttattgtctcatgagcggatacatatttgaatgtatttagaaaaataaacaaataggggttccgcgcacatttccccgaaaagtgccagatacctgaaacaaaacccatcgtacggccaaggaagtctccaataactgtgatccaccacaagcgccagggttttcccagtcacgacgttgtaaaacgacggccagtcatgcataatccgcacgcatctggaataaggaagtgccattccgcctgaccttaatacgactcactatagggagaccctcgaaaaaaaacacaaacaccgaaattctttaagtggatgctctcaaactcagggaaacctaaatctagttatagacaaggcaatcctgagccaagccgaagtagtaattagtaagttaacaatagatgacttacaactaatcggaaggtgcagagactcgacgggagctaccctaacgtcaagacgagggtaaagagagagtccaattctcaaagccaataggcagtagcgaaagctgcaagagaatgaaaatccgtggctcgcagcagatccactacaagtaagatttaaaacagcctgtgggttgatcccacccacaggcccattgggcgctagcactctggtatcacggtacctttgtgcgcctgttttataccccctcccccaactgtaacttagaagtaacacacaccgatcaacagtcagcgtggcacaccagccacgttttgatcaagcacttctgttaccccggactgagtatcaatagactgctcacgcggttgaaggagaaagcgttcgttatccggccaactacttcgaaaaacctagtaacaccgtggaagttgcagagtgtttcgctcagcactaccccagtgtagatcaggtcgatgagtcaccgcattccccacgggcgaccgtggcggtggctgcgttggcggcctgcccatggggaaacccatgggacgctctaatacagacatggtgcgaagagtctattgagctagttggtagtcctccggcccctgaatgcggctaatcctaactgcggagcacacaccctcaagccagagggcagtgtgtcgtaacgggcaactctgcagcggaaccgactactttgggtgtccgtgtttcattttattcctatactggctgcttatggtgacaattgagagatcgttaccatatagctattggattggccatccggtgactaatagagctattatatatccctttgttgggtttataccacttagcttgaaagaggttaaaacattacaattcattgttaagttgaatacagcaaaatggaagatgccaagaacatcaagaagggccctgctccattctaccctctggaagatggaacagccggcgagcagctgcacaaggccatgaagagatatgccctggtgcctggcacaatcgccttcacagatgcccacatcgaggtggacatcacctacgccgagtacttcgagatgtctgtgcggctggccgaagctatgaagcgctacggcctgaacaccaaccaccggatcgtcgtgtgcagcgagaacagcctgcagttcttcatgcctgtgctgggcgccctgttcatcggagttgctgtggcccctgccaacgacatctacaacgagcgcgagctgctgaacagcatgggcatctctcagcccaccgtggtgttcgtgtccaagaagggactgcagaaaatcctgaacgtgcagaagaagctgcccatcatccagaaaatcatcatcatggacagcaagaccgactaccagggcttccagagcatgtacaccttcgtgaccagccatctgccacctggcttcaacgagtacgacttcgtgcccgagagcttcgaccgggacaagacaatcgccctgatcatgaacagcagcggctctaccggactgcccaaaggtgttgccctgcctcatagaactgcctgcgtgcggtttagccacgccagagatcccatcttcggcaaccagatcatccccgacacagccatcctgagcgtggtgccttttcaccacggcttcggcatgttcaccacactgggctacctgatctgcggcttcagagtggtgctgatgtaccgcttcgaggaagaactgttcctgcggagcctgcaggactacaagatccagtctgctctgctggtgcctactctgttcagcttctttgccaagagcaccctgatcgataagtacgacctgagcaacctgcacgagatcgcctctggcggagcccctctgtctaaagaagtgggagaagccgtcgccaagcggttccatctgcctggcatcagacaaggctatggcctgaccgagacaaccagcgccattctgattacccctgagggcgacgataagcctggcgctgtgggaaaagtggtgccattcttcgaggccaaggtggtggatctggacaccggcaaaacactgggcgttaaccagaggggcgagctgtgtgttagaggccctatgatcatgagcggctacgtgaacaaccccgaggccacaaacgctctgatcgacaaggatggatggctgcacagcggcgacattgcctactgggacgaagatgagcacttcttcatcgtggaccggctgaagtccctgatcaagtacaagggctaccaggtggccccagccgagctggaatctattctgctgcaacaccccaacatcttcgatgccggcgttgcaggactgcccgatgatgatgctggcgaactgccagctgctgtggtggtgctggaacacggcaagaccatgaccgagaaagaaatcgtggactacgtggccagccaagtgaccaccgccaagaaactgagaggcggcgtggtgtttgtggacgaggtgccaaaaggcctgacaggcaagctggacgcccggaagatcagagagatcctgattaaggccaagaaaggcggcaagatcgccgtgtaatagctaactagagatagaatccaactaacctgctgcgagccacggacttaaataattgagccttaaagaaaaaaacaaccaaaaaaaatctagatatcggatcccggg

SEQ ID NO: 3500 - DNA, 5109 bp, synthetic construct
  source 1..5109: mol_type = other DNA; note = Ana29 40nt ES
aggctaggtggaggctcagtgtgataagtctgcgatggtggatgcatgtgtcatggtcatagctgtttcctgtgtgaaattgttatccgctcagagggcacaatcctattccgcgctatccgacaatctccaagacattaggtggagttcagttcggcgtatggcatatgtcgctggaaagaacatgtgagcaaaaggccagcaaaaggccaggaaccgtaaaaaggccgcgttgctggcgtttttccataggctccgcccccctgacgagcatcacaaaaatcgacgctcaagtcagaggtggcgaaacccgacaggactataaagataccaggcgtttccccctggaagctccctcgtgcgctctcctgttccgaccctgccgcttaccggatacctgtccgcctttctcccttcgggaagcgtggcgctttctcatagctcacgctgtaggtatctcagttcggtgtaggtcgttcgctccaagctgggctgtgtgcacgaaccccccgttcagcccgaccgctgcgccttatccggtaactatcgtcttgagtccaacccggtaagacacgacttatcgccactggcagcagccactggtaacaggattagcagagcgaggtatgtaggcggtgctacagagttcttgaagtggtggcctaactacggctacactagaagaacagtatttggtatctgcgctctgctgaagccagttaccttcggaaaaagagttggtagctcttgatccggcaaacaaaccaccgctggtagcggtggtttttttgtttgcaagcagcagattacgcgcagaaaaaaaggatctcaagaagatcctttgatcttttctacggggtctgacgctctattcaacaaagccgccgtcccgtcaagtcagcgtaaatgggtagggggcttcaaatcgtcctcgtgataccaattcggagcctgcttttttgtacaaacttgttgataatggcaattcaaggatcttcacctagatccttttaaattaaaaatgaagttttaaatcaatctaaagtatatatgagtaaacttggtctgacagttaccaatgcttaatcagtgaggcacctatctcagcgatctgtctatttcgttcatccatagttgcctgactccccgtcgtgtagataactacgatacgggagggcttaccatctggccccagtgctgcaatgataccgcgagagccacgctcaccggctccagatttatcagcaataaaccagccagccggaagggccgagcgcagaagtggtcctgcaactttatccgcctccatccagtctattaattgttgccgggaagctagagtaagtagttcgccagttaatagtttgcgcaacgttgttgccattgctacaggcatcgtggtgtcacgctcgtcgtttggtatggcttcattcagctccggttcccaacgatcaaggcgagttacatgatcccccatgttgtgcaaaaaagcggttagctccttcggtcctccgatcgttgtcagaagtaagttggccgcagtgttatcactcatggttatggcagcactgcataattctcttactgtcatgccatccgtaagatgcttttctgtgactggtgagtactcaaccaagtcattctgagaatagtgtatgcggcgaccgagttgctcttgcccggcgtcaatacgggataataccgcgccacatagcagaactttaaaagtgctcatcattggaaaacgttcttcggggcgaaaactctcaaggatcttaccgctgttgagatccagttcgatgtaacccactcgtgcacccaactgatcttcagcatcttttactttcaccagcgtttctgggtgagcaaaaacaggaaggcaaaatgccgcaaaaaagggaataagggcgacacggaaatgttgaatactcatactcttcctttttcaatattattgaagcatttatcagggttattgtctcatgagcggatacatatttgaatgtatttagaaaaataaacaaataggggttccgcgcacatttccccgaaaagtgccagatacctgaaacaaaacccatcgtacggccaaggaagtctccaataactgtgatccaccacaagcgccagggttttcccagtcacgacgttgtaaaacgacggccagtcatgcataatccgcacgcatctggaataaggaagtgccattccgcctgaccttaatacgactcactatagggagaccctcgaaaaaaaaataatgacacactacgagaacaaccatagaactaagcaagaaattctttaagtggatgctctcaaactcagggaaacctaaatctagttatagacaaggcaatcctgagccaagccgaagtagtaattagtaagttaacaatagatgacttacaactaatcggaaggtgcagagactcgacgggagctaccctaacgtcaagacgagggtaaagagagagtccaattctcaaagccaataggcagtagcgaaagctgcaagagaatgaaaatccgtggctcgcagcaaacaccaaacaaaacaaacacaaaccaacaaaaattaaaacagcctgtgggttgatcccacccacaggcccattgggcgctagcactctggtatcacggtacctttgtgcgcctgttttataccccctcccccaactgtaacttagaagtaacacacaccgatcaacagtcagcgtggcacaccagccacgttttgatcaagcacttctgttaccccggactgagtatcaatagactgctcacgcggttgaaggagaaagcgttcgttatccggccaactacttcgaaaaacctagtaacaccgtggaagttgcagagtgtttcgctcagcactaccccagtgtagatcaggtcgatgagtcaccgcattccccacgggcgaccgtggcggtggctgcgttggcggcctgcccatggggaaacccatgggacgctctaatacagacatggtgcgaagagtctattgagctagttggtagtcctccggcccctgaatgcggctaatcctaactgcggagcacacaccctcaagccagagggcagtgtgtcgtaacgggcaactctgcagcggaaccgactactttgggtgtccgtgtttcattttattcctatactggctgcttatggtgacaattgagagatcgttaccatatagctattggattggccatccggtgactaatagagctattatatatccctttgttgggtttataccacttagcttgaaagaggttaaaacattacaattcattgttaagttgaatacagcaaaatggaagatgccaagaacatcaagaagggccctgctccattctaccctctggaagatggaacagccggcgagcagctgcacaaggccatgaagagatatgccctggtgcctggcacaatcgccttcacagatgcccacatcgaggtggacatcacctacgccgagtacttcgagatgtctgtgcggctggccgaagctatgaagcgctacggcctgaacaccaaccaccggatcgtcgtgtgcagcgagaacagcctgcagttcttcatgcctgtgctgggcgccctgttcatcggagttgctgtggcccctgccaacgacatctacaacgagcgcgagctgctgaacagcatgggcatctctcagcccaccgtggtgttcgtgtccaagaagggactgcagaaaatcctgaacgtgcagaagaagctgcccatcatccagaaaatcatcatcatggacagcaagaccgactaccagggcttccagagcatgtacaccttcgtgaccagccatctgccacctggcttcaacgagtacgacttcgtgcccgagagcttcgaccgggacaagacaatcgccctgatcatgaacagcagcggctctaccggactgcccaaaggtgttgccctgcctcatagaactgcctgcgtgcggtttagccacgccagagatcccatcttcggcaaccagatcatccccgacacagccatcctgagcgtggtgccttttcaccacggcttcggcatgttcaccacactgggctacctgatctgcggcttcagagtggtgctgatgtaccgcttcgaggaagaactgttcctgcggagcctgcaggactacaagatccagtctgctctgctggtgcctactctgttcagcttctttgccaagagcaccctgatcgataagtacgacctgagcaacctgcacgagatcgcctctggcggagcccctctgtctaaagaagtgggagaagccgtcgccaagcggttccatctgcctggcatcagacaaggctatggcctgaccgagacaaccagcgccattctgattacccctgagggcgacgataagcctggcgctgtgggaaaagtggtgccattcttcgaggccaaggtggtggatctggacaccggcaaaacactgggcgttaaccagaggggcgagctgtgtgttagaggccctatgatcatgagcggctacgtgaacaaccccgaggccacaaacgctctgatcgacaaggatggatggctgcacagcggcgacattgcctactgggacgaagatgagcacttcttcatcgtggaccggctgaagtccctgatcaagtacaagggctaccaggtggccccagccgagctggaatctattctgctgcaacaccccaacatcttcgatgccggcgttgcaggactgcccgatgatgatgctggcgaactgccagctgctgtggtggtgctggaacacggcaagaccatgaccgagaaagaaatcgtggactacgtggccagccaagtgaccaccgccaagaaactgagaggcggcgtggtgtttgtggacgaggtgccaaaaggcctgacaggcaagctggacgcccggaagatcagagagatcctgattaaggccaagaaaggcggcaagatcgccgtgtaatagctaactagacaaaacaccaaacaaacaagctgcgagccacggacttaaataattgagccttaaagaaaataatgaaagactacgagatcaaccatagagctaaccaaaaaaaaatctagatatcggatcccggg

SEQ ID NO: 3501 - DNA, 5071 bp, synthetic construct
  source 1..5071: mol_type = other DNA; note = Ana29 20nt ES
aggctaggtggaggctcagtgtgataagtctgcgatggtggatgcatgtgtcatggtcatagctgtttcctgtgtgaaattgttatccgctcagagggcacaatcctattccgcgctatccgacaatctccaagacattaggtggagttcagttcggcgtatggcatatgtcgctggaaagaacatgtgagcaaaaggccagcaaaaggccaggaaccgtaaaaaggccgcgttgctggcgtttttccataggctccgcccccctgacgagcatcacaaaaatcgacgctcaagtcagaggtggcgaaacccgacaggactataaagataccaggcgtttccccctggaagctccctcgtgcgctctcctgttccgaccctgccgcttaccggatacctgtccgcctttctcccttcgggaagcgtggcgctttctcatagctcacgctgtaggtatctcagttcggtgtaggtcgttcgctccaagctgggctgtgtgcacgaaccccccgttcagcccgaccgctgcgccttatccggtaactatcgtcttgagtccaacccggtaagacacgacttatcgccactggcagcagccactggtaacaggattagcagagcgaggtatgtaggcggtgctacagagttcttgaagtggtggcctaactacggctacactagaagaacagtatttggtatctgcgctctgctgaagccagttaccttcggaaaaagagttggtagctcttgatccggcaaacaaaccaccgctggtagcggtggtttttttgtttgcaagcagcagattacgcgcagaaaaaaaggatctcaagaagatcctttgatcttttctacggggtctgacgctctattcaacaaagccgccgtcccgtcaagtcagcgtaaatgggtagggggcttcaaatcgtcctcgtgataccaattcggagcctgcttttttgtacaaacttgttgataatggcaattcaaggatcttcacctagatccttttaaattaaaaatgaagttttaaatcaatctaaagtatatatgagtaaacttggtctgacagttaccaatgcttaatcagtgaggcacctatctcagcgatctgtctatttcgttcatccatagttgcctgactccccgtcgtgtagataactacgatacgggagggcttaccatctggccccagtgctgcaatgataccgcgagagccacgctcaccggctccagatttatcagcaataaaccagccagccggaagggccgagcgcagaagtggtcctgcaactttatccgcctccatccagtctattaattgttgccgggaagctagagtaagtagttcgccagttaatagtttgcgcaacgttgttgccattgctacaggcatcgtggtgtcacgctcgtcgtttggtatggcttcattcagctccggttcccaacgatcaaggcgagttacatgatcccccatgttgtgcaaaaaagcggttagctccttcggtcctccgatcgttgtcagaagtaagttggccgcagtgttatcactcatggttatggcagcactgcataattctcttactgtcatgccatccgtaagatgcttttctgtgactggtgagtactcaaccaagtcattctgagaatagtgtatgcggcgaccgagttgctcttgcccggcgtcaatacgggataataccgcgccacatagcagaactttaaaagtgctcatcattggaaaacgttcttcggggcgaaaactctcaaggatcttaccgctgttgagatccagttcgatgtaacccactcgtgcacccaactgatcttcagcatcttttactttcaccagcgtttctgggtgagcaaaaacaggaaggcaaaatgccgcaaaaaagggaataagggcgacacggaaatgttgaatactcatactcttcctttttcaatattattgaagcatttatcagggttattgtctcatgagcggatacatatttgaatgtatttagaaaaataaacaaataggggttccgcgcacatttccccgaaaagtgccagatacctgaaacaaaacccatcgtacggccaaggaagtctccaataactgtgatccaccacaagcgccagggttttcccagtcacgacgttgtaaaacgacggccagtcatgcataatccgcacgcatctggaataaggaagtgccattccgcctgaccttaatacgactcactatagggagaccctcgaaaaaaaaagatacacttcaactaagctgaaattctttaagtggatgctctcaaactcagggaaacctaaatctagttatagacaaggcaatcctgagccaagccgaagtagtaattagtaagttaacaatagatgacttacaactaatcggaaggtgcagagactcgacgggagctaccctaacgtcaagacgagggtaaagagagagtccaattctcaaagccaataggcagtagcgaaagctgcaagagaatgaaaatccgtggctcgcagcaaacaccaaacaaaacaaacacaaaccaacaaaaattaaaacagcctgtgggttgatcccacccacaggcccattgggcgctagcactctggtatcacggtacctttgtgcgcctgttttataccccctcccccaactgtaacttagaagtaacacacaccgatcaacagtcagcgtggcacaccagccacgttttgatcaagcacttctgttaccccggactgagtatcaatagactgctcacgcggttgaaggagaaagcgttcgttatccggccaactacttcgaaaaacctagtaacaccgtggaagttgcagagtgtttcgctcagcactaccccagtgtagatcaggtcgatgagtcaccgcattccccacgggcgaccgtggcggtggctgcgttggcggcctgcccatggggaaacccatgggacgctctaatacagacatggtgcgaagagtctattgagctagttggtagtcctccggcccctgaatgcggctaatcctaactgcggagcacacaccctcaagccagagggcagtgtgtcgtaacgggcaactctgcagcggaaccgactactttgggtgtccgtgtttcattttattcctatactggctgcttatggtgacaattgagagatcgttaccatatagctattggattggccatccggtgactaatagagctattatatatccctttgttgggtttataccacttagcttgaaagaggttaaaacattacaattcattgttaagttgaatacagcaaaatggaagatgccaagaacatcaagaagggccctgctccattctaccctctggaagatggaacagccggcgagcagctgcacaaggccatgaagagatatgccctggtgcctggcacaatcgccttcacagatgcccacatcgaggtggacatcacctacgccgagtacttcgagatgtctgtgcggctggccgaagctatgaagcgctacggcctgaacaccaaccaccggatcgtcgtgtgcagcgagaacagcctgcagttcttcatgcctgtgctgggcgccctgttcatcggagttgctgtggcccctgccaacgacatctacaacgagcgcgagctgctgaacagcatgggcatctctcagcccaccgtggtgttcgtgtccaagaagggactgcagaaaatcctgaacgtgcagaagaagctgcccatcatccagaaaatcatcatcatggacagcaagaccgactaccagggcttccagagcatgtacaccttcgtgaccagccatctgccacctggcttcaacgagtacgacttcgtgcccgagagcttcgaccgggacaagacaatcgccctgatcatgaacagcagcggctctaccggactgcccaaaggtgttgccctgcctcatagaactgcctgcgtgcggtttagccacgccagagatcccatcttcggcaaccagatcatccccgacacagccatcctgagcgtggtgccttttcaccacggcttcggcatgttcaccacactgggctacctgatctgcggcttcagagtggtgctgatgtaccgcttcgaggaagaactgttcctgcggagcctgcaggactacaagatccagtctgctctgctggtgcctactctgttcagcttctttgccaagagcaccctgatcgataagtacgacctgagcaacctgcacgagatcgcctctggcggagcccctctgtctaaagaagtgggagaagccgtcgccaagcggttccatctgcctggcatcagacaaggctatggcctgaccgagacaaccagcgccattctgattacccctgagggcgacgataagcctggcgctgtgggaaaagtggtgccattcttcgaggccaaggtggtggatctggacaccggcaaaacactgggcgttaaccagaggggcgagctgtgtgttagaggccctatgatcatgagcggctacgtgaacaaccccgaggccacaaacgctctgatcgacaaggatggatggctgcacagcggcgacattgcctactgggacgaagatgagcacttcttcatcgtggaccggctgaagtccctgatcaagtacaagggctaccaggtggccccagccgagctggaatctattctgctgcaacaccccaacatcttcgatgccggcgttgcaggactgcccgatgatgatgctggcgaactgccagctgctgtggtggtgctggaacacggcaagaccatgaccgagaaagaaatcgtggactacgtggccagccaagtgaccaccgccaagaaactgagaggcggcgtggtgtttgtggacgaggtgccaaaaggcctgacaggcaagctggacgcccggaagatcagagagatcctgattaaggccaagaaaggcggcaagatcgccgtgtaatagctaactagacaaaacaccaaacaaacaagctgcgagccacggacttaaataattgagccttaaagaaacatacacatgaacttagctaaaaaaaatctagatatcggatcccggg

SEQ ID NO: 3502 - DNA, 5211 bp, synthetic construct
  source 1..5211: mol_type = other DNA; note = Ana29 rational design
aggctaggtggaggctcagtgtgataagtctgcgatggtggatgcatgtgtcatggtcatagctgtttcctgtgtgaaattgttatccgctcagagggcacaatcctattccgcgctatccgacaatctccaagacattaggtggagttcagttcggcgtatggcatatgtcgctggaaagaacatgtgagcaaaaggccagcaaaaggccaggaaccgtaaaaaggccgcgttgctggcgtttttccataggctccgcccccctgacgagcatcacaaaaatcgacgctcaagtcagaggtggcgaaacccgacaggactataaagataccaggcgtttccccctggaagctccctcgtgcgctctcctgttccgaccctgccgcttaccggatacctgtccgcctttctcccttcgggaagcgtggcgctttctcatagctcacgctgtaggtatctcagttcggtgtaggtcgttcgctccaagctgggctgtgtgcacgaaccccccgttcagcccgaccgctgcgccttatccggtaactatcgtcttgagtccaacccggtaagacacgacttatcgccactggcagcagccactggtaacaggattagcagagcgaggtatgtaggcggtgctacagagttcttgaagtggtggcctaactacggctacactagaagaacagtatttggtatctgcgctctgctgaagccagttaccttcggaaaaagagttggtagctcttgatccggcaaacaaaccaccgctggtagcggtggtttttttgtttgcaagcagcagattacgcgcagaaaaaaaggatctcaagaagatcctttgatcttttctacggggtctgacgctctattcaacaaagccgccgtcccgtcaagtcagcgtaaatgggtagggggcttcaaatcgtcctcgtgataccaattcggagcctgcttttttgtacaaacttgttgataatggcaattcaaggatcttcacctagatccttttaaattaaaaatgaagttttaaatcaatctaaagtatatatgagtaaacttggtctgacagttaccaatgcttaatcagtgaggcacctatctcagcgatctgtctatttcgttcatccatagttgcctgactccccgtcgtgtagataactacgatacgggagggcttaccatctggccccagtgctgcaatgataccgcgagagccacgctcaccggctccagatttatcagcaataaaccagccagccggaagggccgagcgcagaagtggtcctgcaactttatccgcctccatccagtctattaattgttgccgggaagctagagtaagtagttcgccagttaatagtttgcgcaacgttgttgccattgctacaggcatcgtggtgtcacgctcgtcgtttggtatggcttcattcagctccggttcccaacgatcaaggcgagttacatgatcccccatgttgtgcaaaaaagcggttagctccttcggtcctccgatcgttgtcagaagtaagttggccgcagtgttatcactcatggttatggcagcactgcataattctcttactgtcatgccatccgtaagatgcttttctgtgactggtgagtactcaaccaagtcattctgagaatagtgtatgcggcgaccgagttgctcttgcccggcgtcaatacgggataataccgcgccacatagcagaactttaaaagtgctcatcattggaaaacgttcttcggggcgaaaactctcaaggatcttaccgctgttgagatccagttcgatgtaacccactcgtgcacccaactgatcttcagcatcttttactttcaccagcgtttctgggtgagcaaaaacaggaaggcaaaatgccgcaaaaaagggaataagggcgacacggaaatgttgaatactcatactcttcctttttcaatattattgaagcatttatcagggttattgtctcatgagcggatacatatttgaatgtatttagaaaaataaacaaataggggttccgcgcacatttccccgaaaagtgccagatacctgaaacaaaacccatcgtacggccaaggaagtctccaataactgtgatccaccacaagcgccagggttttcccagtcacgacgttgtaaaacgacggccagtcatgcataatccgcacgcatctggaataaggaagtgccattccgcctgaccttaatacgactcactatagggagaccctcgaaaaaaaagcttcgaatgcgaccatctgctcaggctcaatctcgctccaataatgacacactacgagaacaaccatagaactaagcaagaaattctttaagtggatgctctcaaactcagggaaacctaaatctagttatagacaaggcaatcctgagccaagccgaagtagtaattagtaagttaacaatagatgacttacaactaatcggaaggtgcagagactcgacgggagctaccctaacgtcaagacgagggtaaagagagagtccaattctcaaagccaataggcagtagcgaaagctgcaagagaatgaaaatccgttgaccttaaacggtcgtgtggggagcacgccggcgccaataatgccacactaagagaacaaacaaagagctaagcaattaaaacagcctgtgggttgatcccacccacaggcccattgggcgctagcactctggtatcacggtacctttgtgcgcctgttttataccccctcccccaactgtaacttagaagtaacacacaccgatcaacagtcagcgtggcacaccagccacgttttgatcaagcacttctgttaccccggactgagtatcaatagactgctcacgcggttgaaggagaaagcgttcgttatccggccaactacttcgaaaaacctagtaacaccgtggaagttgcagagtgtttcgctcagcactaccccagtgtagatcaggtcgatgagtcaccgcattccccacgggcgaccgtggcggtggctgcgttggcggcctgcccatggggaaacccatgggacgctctaatacagacatggtgcgaagagtctattgagctagttggtagtcctccggcccctgaatgcggctaatcctaactgcggagcacacaccctcaagccagagggcagtgtgtcgtaacgggcaactctgcagcggaaccgactactttgggtgtccgtgtttcattttattcctatactggctgcttatggtgacaattgagagatcgttaccatatagctattggattggccatccggtgactaatagagctattatatatccctttgttgggtttataccacttagcttgaaagaggttaaaacattacaattcattgttaagttgaatacagcaaaatggaagatgccaagaacatcaagaagggccctgctccattctaccctctggaagatggaacagccggcgagcagctgcacaaggccatgaagagatatgccctggtgcctggcacaatcgccttcacagatgcccacatcgaggtggacatcacctacgccgagtacttcgagatgtctgtgcggctggccgaagctatgaagcgctacggcctgaacaccaaccaccggatcgtcgtgtgcagcgagaacagcctgcagttcttcatgcctgtgctgggcgccctgttcatcggagttgctgtggcccctgccaacgacatctacaacgagcgcgagctgctgaacagcatgggcatctctcagcccaccgtggtgttcgtgtccaagaagggactgcagaaaatcctgaacgtgcagaagaagctgcccatcatccagaaaatcatcatcatggacagcaagaccgactaccagggcttccagagcatgtacaccttcgtgaccagccatctgccacctggcttcaacgagtacgacttcgtgcccgagagcttcgaccgggacaagacaatcgccctgatcatgaacagcagcggctctaccggactgcccaaaggtgttgccctgcctcatagaactgcctgcgtgcggtttagccacgccagagatcccatcttcggcaaccagatcatccccgacacagccatcctgagcgtggtgccttttcaccacggcttcggcatgttcaccacactgggctacctgatctgcggcttcagagtggtgctgatgtaccgcttcgaggaagaactgttcctgcggagcctgcaggactacaagatccagtctgctctgctggtgcctactctgttcagcttctttgccaagagcaccctgatcgataagtacgacctgagcaacctgcacgagatcgcctctggcggagcccctctgtctaaagaagtgggagaagccgtcgccaagcggttccatctgcctggcatcagacaaggctatggcctgaccgagacaaccagcgccattctgattacccctgagggcgacgataagcctggcgctgtgggaaaagtggtgccattcttcgaggccaaggtggtggatctggacaccggcaaaacactgggcgttaaccagaggggcgagctgtgtgttagaggccctatgatcatgagcggctacgtgaacaaccccgaggccacaaacgctctgatcgacaaggatggatggctgcacagcggcgacattgcctactgggacgaagatgagcacttcttcatcgtggaccggctgaagtccctgatcaagtacaagggctaccaggtggccccagccgagctggaatctattctgctgcaacaccccaacatcttcgatgccggcgttgcaggactgcccgatgatgatgctggcgaactgccagctgctgtggtggtgctggaacacggcaagaccatgaccgagaaagaaatcgtggactacgtggccagccaagtgaccaccgccaagaaactgagaggcggcgtggtgtttgtggacgaggtgccaaaaggcctgacaggcaagctggacgcccggaagatcagagagatcctgattaaggccaagaaaggcggcaagatcgccgtgtaatagctaactagagatagaatccaactaacctggcgccggcgtgctcgctacggacttaaataattgagccttaaagaaacatacacatgaacttagctggagcgagattgagcctgagcagatggtcgcattcgaagcaaaaaaaatctagatatcggatcccggg

SEQ ID NO: 3503 - DNA, 5076 bp, synthetic construct
  source 1..5076: mol_type = other DNA; note = Ana 78 Exonextention
aggctaggtggaggctcagtgtgataagtctgcgatggtggatgcatgtgtcatggtcatagctgtttcctgtgtgaaattgttatccgctcagagggcacaatcctattccgcgctatccgacaatctccaagacattaggtggagttcagttcggcgtatggcatatgtcgctggaaagaacatgtgagcaaaaggccagcaaaaggccaggaaccgtaaaaaggccgcgttgctggcgtttttccataggctccgcccccctgacgagcatcacaaaaatcgacgctcaagtcagaggtggcgaaacccgacaggactataaagataccaggcgtttccccctggaagctccctcgtgcgctctcctgttccgaccctgccgcttaccggatacctgtccgcctttctcccttcgggaagcgtggcgctttctcatagctcacgctgtaggtatctcagttcggtgtaggtcgttcgctccaagctgggctgtgtgcacgaaccccccgttcagcccgaccgctgcgccttatccggtaactatcgtcttgagtccaacccggtaagacacgacttatcgccactggcagcagccactggtaacaggattagcagagcgaggtatgtaggcggtgctacagagttcttgaagtggtggcctaactacggctacactagaagaacagtatttggtatctgcgctctgctgaagccagttaccttcggaaaaagagttggtagctcttgatccggcaaacaaaccaccgctggtagcggtggtttttttgtttgcaagcagcagattacgcgcagaaaaaaaggatctcaagaagatcctttgatcttttctacggggtctgacgctctattcaacaaagccgccgtcccgtcaagtcagcgtaaatgggtagggggcttcaaatcgtcctcgtgataccaattcggagcctgcttttttgtacaaacttgttgataatggcaattcaaggatcttcacctagatccttttaaattaaaaatgaagttttaaatcaatctaaagtatatatgagtaaacttggtctgacagttaccaatgcttaatcagtgaggcacctatctcagcgatctgtctatttcgttcatccatagttgcctgactccccgtcgtgtagataactacgatacgggagggcttaccatctggccccagtgctgcaatgataccgcgagagccacgctcaccggctccagatttatcagcaataaaccagccagccggaagggccgagcgcagaagtggtcctgcaactttatccgcctccatccagtctattaattgttgccgggaagctagagtaagtagttcgccagttaatagtttgcgcaacgttgttgccattgctacaggcatcgtggtgtcacgctcgtcgtttggtatggcttcattcagctccggttcccaacgatcaaggcgagttacatgatcccccatgttgtgcaaaaaagcggttagctccttcggtcctccgatcgttgtcagaagtaagttggccgcagtgttatcactcatggttatggcagcactgcataattctcttactgtcatgccatccgtaagatgcttttctgtgactggtgagtactcaaccaagtcattctgagaatagtgtatgcggcgaccgagttgctcttgcccggcgtcaatacgggataataccgcgccacatagcagaactttaaaagtgctcatcattggaaaacgttcttcggggcgaaaactctcaaggatcttaccgctgttgagatccagttcgatgtaacccactcgtgcacccaactgatcttcagcatcttttactttcaccagcgtttctgggtgagcaaaaacaggaaggcaaaatgccgcaaaaaagggaataagggcgacacggaaatgttgaatactcatactcttcctttttcaatattattgaagcatttatcagggttattgtctcatgagcggatacatatttgaatgtatttagaaaaataaacaaataggggttccgcgcacatttccccgaaaagtgccagatacctgaaacaaaacccatcgtacggccaaggaagtctccaataactgtgatccaccacaagcgccagggttttcccagtcacgacgttgtaaaacgacggccagtcatgcataatccgcacgcatctggaataaggaagtgccattccgcctgaccttaatacgactcactatagggagaccctcgaaaaaaaacacaaacacctatagacaaggcaatcctgagccaagccgaagtagtaattagtaagttaacaatagatgacttacaactaatcggaaggtgcagagactcgacgggagctaccctaacgtcaagacgagggtaaagagagagtccaattctcaaagccaataggcagtagcgaaagctgcaagagaatgaaaatccgttgaccttaaacggtcgtgtgggggctcgcagcaaacaccaaacaaaacaaacacaaaccaacaaaaattaaaacagcctgtgggttgatcccacccacaggcccattgggcgctagcactctggtatcacggtacctttgtgcgcctgttttataccccctcccccaactgtaacttagaagtaacacacaccgatcaacagtcagcgtggcacaccagccacgttttgatcaagcacttctgttaccccggactgagtatcaatagactgctcacgcggttgaaggagaaagcgttcgttatccggccaactacttcgaaaaacctagtaacaccgtggaagttgcagagtgtttcgctcagcactaccccagtgtagatcaggtcgatgagtcaccgcattccccacgggcgaccgtggcggtggctgcgttggcggcctgcccatggggaaacccatgggacgctctaatacagacatggtgcgaagagtctattgagctagttggtagtcctccggcccctgaatgcggctaatcctaactgcggagcacacaccctcaagccagagggcagtgtgtcgtaacgggcaactctgcagcggaaccgactactttgggtgtccgtgtttcattttattcctatactggctgcttatggtgacaattgagagatcgttaccatatagctattggattggccatccggtgactaatagagctattatatatccctttgttgggtttataccacttagcttgaaagaggttaaaacattacaattcattgttaagttgaatacagcaaaatggaagatgccaagaacatcaagaagggccctgctccattctaccctctggaagatggaacagccggcgagcagctgcacaaggccatgaagagatatgccctggtgcctggcacaatcgccttcacagatgcccacatcgaggtggacatcacctacgccgagtacttcgagatgtctgtgcggctggccgaagctatgaagcgctacggcctgaacaccaaccaccggatcgtcgtgtgcagcgagaacagcctgcagttcttcatgcctgtgctgggcgccctgttcatcggagttgctgtggcccctgccaacgacatctacaacgagcgcgagctgctgaacagcatgggcatctctcagcccaccgtggtgttcgtgtccaagaagggactgcagaaaatcctgaacgtgcagaagaagctgcccatcatccagaaaatcatcatcatggacagcaagaccgactaccagggcttccagagcatgtacaccttcgtgaccagccatctgccacctggcttcaacgagtacgacttcgtgcccgagagcttcgaccgggacaagacaatcgccctgatcatgaacagcagcggctctaccggactgcccaaaggtgttgccctgcctcatagaactgcctgcgtgcggtttagccacgccagagatcccatcttcggcaaccagatcatccccgacacagccatcctgagcgtggtgccttttcaccacggcttcggcatgttcaccacactgggctacctgatctgcggcttcagagtggtgctgatgtaccgcttcgaggaagaactgttcctgcggagcctgcaggactacaagatccagtctgctctgctggtgcctactctgttcagcttctttgccaagagcaccctgatcgataagtacgacctgagcaacctgcacgagatcgcctctggcggagcccctctgtctaaagaagtgggagaagccgtcgccaagcggttccatctgcctggcatcagacaaggctatggcctgaccgagacaaccagcgccattctgattacccctgagggcgacgataagcctggcgctgtgggaaaagtggtgccattcttcgaggccaaggtggtggatctggacaccggcaaaacactgggcgttaaccagaggggcgagctgtgtgttagaggccctatgatcatgagcggctacgtgaacaaccccgaggccacaaacgctctgatcgacaaggatggatggctgcacagcggcgacattgcctactgggacgaagatgagcacttcttcatcgtggaccggctgaagtccctgatcaagtacaagggctaccaggtggccccagccgagctggaatctattctgctgcaacaccccaacatcttcgatgccggcgttgcaggactgcccgatgatgatgctggcgaactgccagctgctgtggtggtgctggaacacggcaagaccatgaccgagaaagaaatcgtggactacgtggccagccaagtgaccaccgccaagaaactgagaggcggcgtggtgtttgtggacgaggtgccaaaaggcctgacaggcaagctggacgcccggaagatcagagagatcctgattaaggccaagaaaggcggcaagatcgccgtgtaatagctaactagacaaaacaccaaacaaacaagctgcgagccgctacggacttaaataattgagccttaaagaagaaattctttaagtggatgctctcaaactcagggaaacctaaatctagtaaaaacaaccaaaaaaaatctagatatcggatcccggg

SEQ ID NO: 3504 - DNA, 5057 bp, synthetic construct
  source 1..5057: mol_type = other DNA; note = Ana78 13ntIH
aggctaggtggaggctcagtgtgataagtctgcgatggtggatgcatgtgtcatggtcatagctgtttcctgtgtgaaattgttatccgctcagagggcacaatcctattccgcgctatccgacaatctccaagacattaggtggagttcagttcggcgtatggcatatgtcgctggaaagaacatgtgagcaaaaggccagcaaaaggccaggaaccgtaaaaaggccgcgttgctggcgtttttccataggctccgcccccctgacgagcatcacaaaaatcgacgctcaagtcagaggtggcgaaacccgacaggactataaagataccaggcgtttccccctggaagctccctcgtgcgctctcctgttccgaccctgccgcttaccggatacctgtccgcctttctcccttcgggaagcgtggcgctttctcatagctcacgctgtaggtatctcagttcggtgtaggtcgttcgctccaagctgggctgtgtgcacgaaccccccgttcagcccgaccgctgcgccttatccggtaactatcgtcttgagtccaacccggtaagacacgacttatcgccactggcagcagccactggtaacaggattagcagagcgaggtatgtaggcggtgctacagagttcttgaagtggtggcctaactacggctacactagaagaacagtatttggtatctgcgctctgctgaagccagttaccttcggaaaaagagttggtagctcttgatccggcaaacaaaccaccgctggtagcggtggtttttttgtttgcaagcagcagattacgcgcagaaaaaaaggatctcaagaagatcctttgatcttttctacggggtctgacgctctattcaacaaagccgccgtcccgtcaagtcagcgtaaatgggtagggggcttcaaatcgtcctcgtgataccaattcggagcctgcttttttgtacaaacttgttgataatggcaattcaaggatcttcacctagatccttttaaattaaaaatgaagttttaaatcaatctaaagtatatatgagtaaacttggtctgacagttaccaatgcttaatcagtgaggcacctatctcagcgatctgtctatttcgttcatccatagttgcctgactccccgtcgtgtagataactacgatacgggagggcttaccatctggccccagtgctgcaatgataccgcgagagccacgctcaccggctccagatttatcagcaataaaccagccagccggaagggccgagcgcagaagtggtcctgcaactttatccgcctccatccagtctattaattgttgccgggaagctagagtaagtagttcgccagttaatagtttgcgcaacgttgttgccattgctacaggcatcgtggtgtcacgctcgtcgtttggtatggcttcattcagctccggttcccaacgatcaaggcgagttacatgatcccccatgttgtgcaaaaaagcggttagctccttcggtcctccgatcgttgtcagaagtaagttggccgcagtgttatcactcatggttatggcagcactgcataattctcttactgtcatgccatccgtaagatgcttttctgtgactggtgagtactcaaccaagtcattctgagaatagtgtatgcggcgaccgagttgctcttgcccggcgtcaatacgggataataccgcgccacatagcagaactttaaaagtgctcatcattggaaaacgttcttcggggcgaaaactctcaaggatcttaccgctgttgagatccagttcgatgtaacccactcgtgcacccaactgatcttcagcatcttttactttcaccagcgtttctgggtgagcaaaaacaggaaggcaaaatgccgcaaaaaagggaataagggcgacacggaaatgttgaatactcatactcttcctttttcaatattattgaagcatttatcagggttattgtctcatgagcggatacatatttgaatgtatttagaaaaataaacaaataggggttccgcgcacatttccccgaaaagtgccagatacctgaaacaaaacccatcgtacggccaaggaagtctccaataactgtgatccaccacaagcgccagggttttcccagtcacgacgttgtaaaacgacggccagtcatgcataatccgcacgcatctggaataaggaagtgccattccgcctgaccttaatacgactcactatagggagaccctcgaaaaaaaacacaaacacctatagacaaggcaatcctgagccaagccgaagtagtaattagtaagttaacaatagatgacttacaactaatcggaaggtgcagagactcgacgggagctaccctaacgtcaagacgagggtaaagagagagtccaattctcaaagccaataggcagtagcgaaagctgcaagagaatgaaaatccgtcggctcgcagcggaaacaccaaacaaaacaaacacaaaccaacaaaaattaaaacagcctgtgggttgatcccacccacaggcccattgggcgctagcactctggtatcacggtacctttgtgcgcctgttttataccccctcccccaactgtaacttagaagtaacacacaccgatcaacagtcagcgtggcacaccagccacgttttgatcaagcacttctgttaccccggactgagtatcaatagactgctcacgcggttgaaggagaaagcgttcgttatccggccaactacttcgaaaaacctagtaacaccgtggaagttgcagagtgtttcgctcagcactaccccagtgtagatcaggtcgatgagtcaccgcattccccacgggcgaccgtggcggtggctgcgttggcggcctgcccatggggaaacccatgggacgctctaatacagacatggtgcgaagagtctattgagctagttggtagtcctccggcccctgaatgcggctaatcctaactgcggagcacacaccctcaagccagagggcagtgtgtcgtaacgggcaactctgcagcggaaccgactactttgggtgtccgtgtttcattttattcctatactggctgcttatggtgacaattgagagatcgttaccatatagctattggattggccatccggtgactaatagagctattatatatccctttgttgggtttataccacttagcttgaaagaggttaaaacattacaattcattgttaagttgaatacagcaaaatggaagatgccaagaacatcaagaagggccctgctccattctaccctctggaagatggaacagccggcgagcagctgcacaaggccatgaagagatatgccctggtgcctggcacaatcgccttcacagatgcccacatcgaggtggacatcacctacgccgagtacttcgagatgtctgtgcggctggccgaagctatgaagcgctacggcctgaacaccaaccaccggatcgtcgtgtgcagcgagaacagcctgcagttcttcatgcctgtgctgggcgccctgttcatcggagttgctgtggcccctgccaacgacatctacaacgagcgcgagctgctgaacagcatgggcatctctcagcccaccgtggtgttcgtgtccaagaagggactgcagaaaatcctgaacgtgcagaagaagctgcccatcatccagaaaatcatcatcatggacagcaagaccgactaccagggcttccagagcatgtacaccttcgtgaccagccatctgccacctggcttcaacgagtacgacttcgtgcccgagagcttcgaccgggacaagacaatcgccctgatcatgaacagcagcggctctaccggactgcccaaaggtgttgccctgcctcatagaactgcctgcgtgcggtttagccacgccagagatcccatcttcggcaaccagatcatccccgacacagccatcctgagcgtggtgccttttcaccacggcttcggcatgttcaccacactgggctacctgatctgcggcttcagagtggtgctgatgtaccgcttcgaggaagaactgttcctgcggagcctgcaggactacaagatccagtctgctctgctggtgcctactctgttcagcttctttgccaagagcaccctgatcgataagtacgacctgagcaacctgcacgagatcgcctctggcggagcccctctgtctaaagaagtgggagaagccgtcgccaagcggttccatctgcctggcatcagacaaggctatggcctgaccgagacaaccagcgccattctgattacccctgagggcgacgataagcctggcgctgtgggaaaagtggtgccattcttcgaggccaaggtggtggatctggacaccggcaaaacactgggcgttaaccagaggggcgagctgtgtgttagaggccctatgatcatgagcggctacgtgaacaaccccgaggccacaaacgctctgatcgacaaggatggatggctgcacagcggcgacattgcctactgggacgaagatgagcacttcttcatcgtggaccggctgaagtccctgatcaagtacaagggctaccaggtggccccagccgagctggaatctattctgctgcaacaccccaacatcttcgatgccggcgttgcaggactgcccgatgatgatgctggcgaactgccagctgctgtggtggtgctggaacacggcaagaccatgaccgagaaagaaatcgtggactacgtggccagccaagtgaccaccgccaagaaactgagaggcggcgtggtgtttgtggacgaggtgccaaaaggcctgacaggcaagctggacgcccggaagatcagagagatcctgattaaggccaagaaaggcggcaagatcgccgtgtaatagctaactagacaaaacaccaaacaaacaaccgctgcgagccgacggacttaaataattgagccttaaagaagaaattctttaagtggatgctctcaaactcagggaaacctaaatctagtaaaaacaaccaaaaaaaatctagatatcggatcccggg

SEQ ID NO: 3505 - DNA, 5061 bp, synthetic construct
  source 1..5061: mol_type = other DNA; note = Ana78 15ntIH
aggctaggtggaggctcagtgtgataagtctgcgatggtggatgcatgtgtcatggtcatagctgtttcctgtgtgaaattgttatccgctcagagggcacaatcctattccgcgctatccgacaatctccaagacattaggtggagttcagttcggcgtatggcatatgtcgctggaaagaacatgtgagcaaaaggccagcaaaaggccaggaaccgtaaaaaggccgcgttgctggcgtttttccataggctccgcccccctgacgagcatcacaaaaatcgacgctcaagtcagaggtggcgaaacccgacaggactataaagataccaggcgtttccccctggaagctccctcgtgcgctctcctgttccgaccctgccgcttaccggatacctgtccgcctttctcccttcgggaagcgtggcgctttctcatagctcacgctgtaggtatctcagttcggtgtaggtcgttcgctccaagctgggctgtgtgcacgaaccccccgttcagcccgaccgctgcgccttatccggtaactatcgtcttgagtccaacccggtaagacacgacttatcgccactggcagcagccactggtaacaggattagcagagcgaggtatgtaggcggtgctacagagttcttgaagtggtggcctaactacggctacactagaagaacagtatttggtatctgcgctctgctgaagccagttaccttcggaaaaagagttggtagctcttgatccggcaaacaaaccaccgctggtagcggtggtttttttgtttgcaagcagcagattacgcgcagaaaaaaaggatctcaagaagatcctttgatcttttctacggggtctgacgctctattcaacaaagccgccgtcccgtcaagtcagcgtaaatgggtagggggcttcaaatcgtcctcgtgataccaattcggagcctgcttttttgtacaaacttgttgataatggcaattcaaggatcttcacctagatccttttaaattaaaaatgaagttttaaatcaatctaaagtatatatgagtaaacttggtctgacagttaccaatgcttaatcagtgaggcacctatctcagcgatctgtctatttcgttcatccatagttgcctgactccccgtcgtgtagataactacgatacgggagggcttaccatctggccccagtgctgcaatgataccgcgagagccacgctcaccggctccagatttatcagcaataaaccagccagccggaagggccgagcgcagaagtggtcctgcaactttatccgcctccatccagtctattaattgttgccgggaagctagagtaagtagttcgccagttaatagtttgcgcaacgttgttgccattgctacaggcatcgtggtgtcacgctcgtcgtttggtatggcttcattcagctccggttcccaacgatcaaggcgagttacatgatcccccatgttgtgcaaaaaagcggttagctccttcggtcctccgatcgttgtcagaagtaagttggccgcagtgttatcactcatggttatggcagcactgcataattctcttactgtcatgccatccgtaagatgcttttctgtgactggtgagtactcaaccaagtcattctgagaatagtgtatgcggcgaccgagttgctcttgcccggcgtcaatacgggataataccgcgccacatagcagaactttaaaagtgctcatcattggaaaacgttcttcggggcgaaaactctcaaggatcttaccgctgttgagatccagttcgatgtaacccactcgtgcacccaactgatcttcagcatcttttactttcaccagcgtttctgggtgagcaaaaacaggaaggcaaaatgccgcaaaaaagggaataagggcgacacggaaatgttgaatactcatactcttcctttttcaatattattgaagcatttatcagggttattgtctcatgagcggatacatatttgaatgtatttagaaaaataaacaaataggggttccgcgcacatttccccgaaaagtgccagatacctgaaacaaaacccatcgtacggccaaggaagtctccaataactgtgatccaccacaagcgccagggttttcccagtcacgacgttgtaaaacgacggccagtcatgcataatccgcacgcatctggaataaggaagtgccattccgcctgaccttaatacgactcactatagggagaccctcgaaaaaaaacacaaacacctatagacaaggcaatcctgagccaagccgaagtagtaattagtaagttaacaatagatgacttacaactaatcggaaggtgcagagactcgacgggagctaccctaacgtcaagacgagggtaaagagagagtccaattctcaaagccaataggcagtagcgaaagctgcaagagaatgaaaatccgtgagcacgccggcgccaaacaccaaacaaaacaaacacaaaccaacaaaaattaaaacagcctgtgggttgatcccacccacaggcccattgggcgctagcactctggtatcacggtacctttgtgcgcctgttttataccccctcccccaactgtaacttagaagtaacacacaccgatcaacagtcagcgtggcacaccagccacgttttgatcaagcacttctgttaccccggactgagtatcaatagactgctcacgcggttgaaggagaaagcgttcgttatccggccaactacttcgaaaaacctagtaacaccgtggaagttgcagagtgtttcgctcagcactaccccagtgtagatcaggtcgatgagtcaccgcattccccacgggcgaccgtggcggtggctgcgttggcggcctgcccatggggaaacccatgggacgctctaatacagacatggtgcgaagagtctattgagctagttggtagtcctccggcccctgaatgcggctaatcctaactgcggagcacacaccctcaagccagagggcagtgtgtcgtaacgggcaactctgcagcggaaccgactactttgggtgtccgtgtttcattttattcctatactggctgcttatggtgacaattgagagatcgttaccatatagctattggattggccatccggtgactaatagagctattatatatccctttgttgggtttataccacttagcttgaaagaggttaaaacattacaattcattgttaagttgaatacagcaaaatggaagatgccaagaacatcaagaagggccctgctccattctaccctctggaagatggaacagccggcgagcagctgcacaaggccatgaagagatatgccctggtgcctggcacaatcgccttcacagatgcccacatcgaggtggacatcacctacgccgagtacttcgagatgtctgtgcggctggccgaagctatgaagcgctacggcctgaacaccaaccaccggatcgtcgtgtgcagcgagaacagcctgcagttcttcatgcctgtgctgggcgccctgttcatcggagttgctgtggcccctgccaacgacatctacaacgagcgcgagctgctgaacagcatgggcatctctcagcccaccgtggtgttcgtgtccaagaagggactgcagaaaatcctgaacgtgcagaagaagctgcccatcatccagaaaatcatcatcatggacagcaagaccgactaccagggcttccagagcatgtacaccttcgtgaccagccatctgccacctggcttcaacgagtacgacttcgtgcccgagagcttcgaccgggacaagacaatcgccctgatcatgaacagcagcggctctaccggactgcccaaaggtgttgccctgcctcatagaactgcctgcgtgcggtttagccacgccagagatcccatcttcggcaaccagatcatccccgacacagccatcctgagcgtggtgccttttcaccacggcttcggcatgttcaccacactgggctacctgatctgcggcttcagagtggtgctgatgtaccgcttcgaggaagaactgttcctgcggagcctgcaggactacaagatccagtctgctctgctggtgcctactctgttcagcttctttgccaagagcaccctgatcgataagtacgacctgagcaacctgcacgagatcgcctctggcggagcccctctgtctaaagaagtgggagaagccgtcgccaagcggttccatctgcctggcatcagacaaggctatggcctgaccgagacaaccagcgccattctgattacccctgagggcgacgataagcctggcgctgtgggaaaagtggtgccattcttcgaggccaaggtggtggatctggacaccggcaaaacactgggcgttaaccagaggggcgagctgtgtgttagaggccctatgatcatgagcggctacgtgaacaaccccgaggccacaaacgctctgatcgacaaggatggatggctgcacagcggcgacattgcctactgggacgaagatgagcacttcttcatcgtggaccggctgaagtccctgatcaagtacaagggctaccaggtggccccagccgagctggaatctattctgctgcaacaccccaacatcttcgatgccggcgttgcaggactgcccgatgatgatgctggcgaactgccagctgctgtggtggtgctggaacacggcaagaccatgaccgagaaagaaatcgtggactacgtggccagccaagtgaccaccgccaagaaactgagaggcggcgtggtgtttgtggacgaggtgccaaaaggcctgacaggcaagctggacgcccggaagatcagagagatcctgattaaggccaagaaaggcggcaagatcgccgtgtaatagctaactagacaaaacaccaaacaaacaaggcgccggcgtgctcacggacttaaataattgagccttaaagaagaaattctttaagtggatgctctcaaactcagggaaacctaaatctagtaaaaacaaccaaaaaaaatctagatatcggatcccggg

SEQ ID NO: 3506 - DNA, 5131 bp, synthetic construct
  source 1..5131: mol_type = other DNA; note = Ana78 EH T60L40
aggctaggtggaggctcagtgtgataagtctgcgatggtggatgcatgtgtcatggtcatagctgtttcctgtgtgaaattgttatccgctcagagggcacaatcctattccgcgctatccgacaatctccaagacattaggtggagttcagttcggcgtatggcatatgtcgctggaaagaacatgtgagcaaaaggccagcaaaaggccaggaaccgtaaaaaggccgcgttgctggcgtttttccataggctccgcccccctgacgagcatcacaaaaatcgacgctcaagtcagaggtggcgaaacccgacaggactataaagataccaggcgtttccccctggaagctccctcgtgcgctctcctgttccgaccctgccgcttaccggatacctgtccgcctttctcccttcgggaagcgtggcgctttctcatagctcacgctgtaggtatctcagttcggtgtaggtcgttcgctccaagctgggctgtgtgcacgaaccccccgttcagcccgaccgctgcgccttatccggtaactatcgtcttgagtccaacccggtaagacacgacttatcgccactggcagcagccactggtaacaggattagcagagcgaggtatgtaggcggtgctacagagttcttgaagtggtggcctaactacggctacactagaagaacagtatttggtatctgcgctctgctgaagccagttaccttcggaaaaagagttggtagctcttgatccggcaaacaaaccaccgctggtagcggtggtttttttgtttgcaagcagcagattacgcgcagaaaaaaaggatctcaagaagatcctttgatcttttctacggggtctgacgctctattcaacaaagccgccgtcccgtcaagtcagcgtaaatgggtagggggcttcaaatcgtcctcgtgataccaattcggagcctgcttttttgtacaaacttgttgataatggcaattcaaggatcttcacctagatccttttaaattaaaaatgaagttttaaatcaatctaaagtatatatgagtaaacttggtctgacagttaccaatgcttaatcagtgaggcacctatctcagcgatctgtctatttcgttcatccatagttgcctgactccccgtcgtgtagataactacgatacgggagggcttaccatctggccccagtgctgcaatgataccgcgagagccacgctcaccggctccagatttatcagcaataaaccagccagccggaagggccgagcgcagaagtggtcctgcaactttatccgcctccatccagtctattaattgttgccgggaagctagagtaagtagttcgccagttaatagtttgcgcaacgttgttgccattgctacaggcatcgtggtgtcacgctcgtcgtttggtatggcttcattcagctccggttcccaacgatcaaggcgagttacatgatcccccatgttgtgcaaaaaagcggttagctccttcggtcctccgatcgttgtcagaagtaagttggccgcagtgttatcactcatggttatggcagcactgcataattctcttactgtcatgccatccgtaagatgcttttctgtgactggtgagtactcaaccaagtcattctgagaatagtgtatgcggcgaccgagttgctcttgcccggcgtcaatacgggataataccgcgccacatagcagaactttaaaagtgctcatcattggaaaacgttcttcggggcgaaaactctcaaggatcttaccgctgttgagatccagttcgatgtaacccactcgtgcacccaactgatcttcagcatcttttactttcaccagcgtttctgggtgagcaaaaacaggaaggcaaaatgccgcaaaaaagggaataagggcgacacggaaatgttgaatactcatactcttcctttttcaatattattgaagcatttatcagggttattgtctcatgagcggatacatatttgaatgtatttagaaaaataaacaaataggggttccgcgcacatttccccgaaaagtgccagatacctgaaacaaaacccatcgtacggccaaggaagtctccaataactgtgatccaccacaagcgccagggttttcccagtcacgacgttgtaaaacgacggccagtcatgcataatccgcacgcatctggaataaggaagtgccattccgcctgaccttaatacgactcactatagggagaccctcgaaaaaaaagcttcgaatgcgaccatctgctcaggctcaatctcgctcccacaaacacctatagacaaggcaatcctgagccaagccgaagtagtaattagtaagttaacaatagatgacttacaactaatcggaaggtgcagagactcgacgggagctaccctaacgtcaagacgagggtaaagagagagtccaattctcaaagccaataggcagtagcgaaagctgcaagagaatgaaaatccgtggctcgcagcaaacaccaaacaaaacaaacacaaaccaacaaaaattaaaacagcctgtgggttgatcccacccacaggcccattgggcgctagcactctggtatcacggtacctttgtgcgcctgttttataccccctcccccaactgtaacttagaagtaacacacaccgatcaacagtcagcgtggcacaccagccacgttttgatcaagcacttctgttaccccggactgagtatcaatagactgctcacgcggttgaaggagaaagcgttcgttatccggccaactacttcgaaaaacctagtaacaccgtggaagttgcagagtgtttcgctcagcactaccccagtgtagatcaggtcgatgagtcaccgcattccccacgggcgaccgtggcggtggctgcgttggcggcctgcccatggggaaacccatgggacgctctaatacagacatggtgcgaagagtctattgagctagttggtagtcctccggcccctgaatgcggctaatcctaactgcggagcacacaccctcaagccagagggcagtgtgtcgtaacgggcaactctgcagcggaaccgactactttgggtgtccgtgtttcattttattcctatactggctgcttatggtgacaattgagagatcgttaccatatagctattggattggccatccggtgactaatagagctattatatatccctttgttgggtttataccacttagcttgaaagaggttaaaacattacaattcattgttaagttgaatacagcaaaatggaagatgccaagaacatcaagaagggccctgctccattctaccctctggaagatggaacagccggcgagcagctgcacaaggccatgaagagatatgccctggtgcctggcacaatcgccttcacagatgcccacatcgaggtggacatcacctacgccgagtacttcgagatgtctgtgcggctggccgaagctatgaagcgctacggcctgaacaccaaccaccggatcgtcgtgtgcagcgagaacagcctgcagttcttcatgcctgtgctgggcgccctgttcatcggagttgctgtggcccctgccaacgacatctacaacgagcgcgagctgctgaacagcatgggcatctctcagcccaccgtggtgttcgtgtccaagaagggactgcagaaaatcctgaacgtgcagaagaagctgcccatcatccagaaaatcatcatcatggacagcaagaccgactaccagggcttccagagcatgtacaccttcgtgaccagccatctgccacctggcttcaacgagtacgacttcgtgcccgagagcttcgaccgggacaagacaatcgccctgatcatgaacagcagcggctctaccggactgcccaaaggtgttgccctgcctcatagaactgcctgcgtgcggtttagccacgccagagatcccatcttcggcaaccagatcatccccgacacagccatcctgagcgtggtgccttttcaccacggcttcggcatgttcaccacactgggctacctgatctgcggcttcagagtggtgctgatgtaccgcttcgaggaagaactgttcctgcggagcctgcaggactacaagatccagtctgctctgctggtgcctactctgttcagcttctttgccaagagcaccctgatcgataagtacgacctgagcaacctgcacgagatcgcctctggcggagcccctctgtctaaagaagtgggagaagccgtcgccaagcggttccatctgcctggcatcagacaaggctatggcctgaccgagacaaccagcgccattctgattacccctgagggcgacgataagcctggcgctgtgggaaaagtggtgccattcttcgaggccaaggtggtggatctggacaccggcaaaacactgggcgttaaccagaggggcgagctgtgtgttagaggccctatgatcatgagcggctacgtgaacaaccccgaggccacaaacgctctgatcgacaaggatggatggctgcacagcggcgacattgcctactgggacgaagatgagcacttcttcatcgtggaccggctgaagtccctgatcaagtacaagggctaccaggtggccccagccgagctggaatctattctgctgcaacaccccaacatcttcgatgccggcgttgcaggactgcccgatgatgatgctggcgaactgccagctgctgtggtggtgctggaacacggcaagaccatgaccgagaaagaaatcgtggactacgtggccagccaagtgaccaccgccaagaaactgagaggcggcgtggtgtttgtggacgaggtgccaaaaggcctgacaggcaagctggacgcccggaagatcagagagatcctgattaaggccaagaaaggcggcaagatcgccgtgtaatagctaactagacaaaacaccaaacaaacaagctgcgagccacggacttaaataattgagccttaaagaagaaattctttaagtggatgctctcaaactcagggaaacctaaatctagtaaaaacaaccggagcgagattgagcctgagcagatggtcgcattcgaagcaaaaaaaatctagatatcggatcccggg

SEQ ID NO: 3507 - DNA, 5111 bp, synthetic construct
  source 1..5111: mol_type = other DNA; note = Ana78 EH T75L30
aggctaggtggaggctcagtgtgataagtctgcgatggtggatgcatgtgtcatggtcatagctgtttcctgtgtgaaattgttatccgctcagagggcacaatcctattccgcgctatccgacaatctccaagacattaggtggagttcagttcggcgtatggcatatgtcgctggaaagaacatgtgagcaaaaggccagcaaaaggccaggaaccgtaaaaaggccgcgttgctggcgtttttccataggctccgcccccctgacgagcatcacaaaaatcgacgctcaagtcagaggtggcgaaacccgacaggactataaagataccaggcgtttccccctggaagctccctcgtgcgctctcctgttccgaccctgccgcttaccggatacctgtccgcctttctcccttcgggaagcgtggcgctttctcatagctcacgctgtaggtatctcagttcggtgtaggtcgttcgctccaagctgggctgtgtgcacgaaccccccgttcagcccgaccgctgcgccttatccggtaactatcgtcttgagtccaacccggtaagacacgacttatcgccactggcagcagccactggtaacaggattagcagagcgaggtatgtaggcggtgctacagagttcttgaagtggtggcctaactacggctacactagaagaacagtatttggtatctgcgctctgctgaagccagttaccttcggaaaaagagttggtagctcttgatccggcaaacaaaccaccgctggtagcggtggtttttttgtttgcaagcagcagattacgcgcagaaaaaaaggatctcaagaagatcctttgatcttttctacggggtctgacgctctattcaacaaagccgccgtcccgtcaagtcagcgtaaatgggtagggggcttcaaatcgtcctcgtgataccaattcggagcctgcttttttgtacaaacttgttgataatggcaattcaaggatcttcacctagatccttttaaattaaaaatgaagttttaaatcaatctaaagtatatatgagtaaacttggtctgacagttaccaatgcttaatcagtgaggcacctatctcagcgatctgtctatttcgttcatccatagttgcctgactccccgtcgtgtagataactacgatacgggagggcttaccatctggccccagtgctgcaatgataccgcgagagccacgctcaccggctccagatttatcagcaataaaccagccagccggaagggccgagcgcagaagtggtcctgcaactttatccgcctccatccagtctattaattgttgccgggaagctagagtaagtagttcgccagttaatagtttgcgcaacgttgttgccattgctacaggcatcgtggtgtcacgctcgtcgtttggtatggcttcattcagctccggttcccaacgatcaaggcgagttacatgatcccccatgttgtgcaaaaaagcggttagctccttcggtcctccgatcgttgtcagaagtaagttggccgcagtgttatcactcatggttatggcagcactgcataattctcttactgtcatgccatccgtaagatgcttttctgtgactggtgagtactcaaccaagtcattctgagaatagtgtatgcggcgaccgagttgctcttgcccggcgtcaatacgggataataccgcgccacatagcagaactttaaaagtgctcatcattggaaaacgttcttcggggcgaaaactctcaaggatcttaccgctgttgagatccagttcgatgtaacccactcgtgcacccaactgatcttcagcatcttttactttcaccagcgtttctgggtgagcaaaaacaggaaggcaaaatgccgcaaaaaagggaataagggcgacacggaaatgttgaatactcatactcttcctttttcaatattattgaagcatttatcagggttattgtctcatgagcggatacatatttgaatgtatttagaaaaataaacaaataggggttccgcgcacatttccccgaaaagtgccagatacctgaaacaaaacccatcgtacggccaaggaagtctccaataactgtgatccaccacaagcgccagggttttcccagtcacgacgttgtaaaacgacggccagtcatgcataatccgcacgcatctggaataaggaagtgccattccgcctgaccttaatacgactcactatagggagaccctcgaaaaaaaagctcgcactggccggaagctcgtcggagcgcacaaacacctatagacaaggcaatcctgagccaagccgaagtagtaattagtaagttaacaatagatgacttacaactaatcggaaggtgcagagactcgacgggagctaccctaacgtcaagacgagggtaaagagagagtccaattctcaaagccaataggcagtagcgaaagctgcaagagaatgaaaatccgtggctcgcagcaaacaccaaacaaaacaaacacaaaccaacaaaaattaaaacagcctgtgggttgatcccacccacaggcccattgggcgctagcactctggtatcacggtacctttgtgcgcctgttttataccccctcccccaactgtaacttagaagtaacacacaccgatcaacagtcagcgtggcacaccagccacgttttgatcaagcacttctgttaccccggactgagtatcaatagactgctcacgcggttgaaggagaaagcgttcgttatccggccaactacttcgaaaaacctagtaacaccgtggaagttgcagagtgtttcgctcagcactaccccagtgtagatcaggtcgatgagtcaccgcattccccacgggcgaccgtggcggtggctgcgttggcggcctgcccatggggaaacccatgggacgctctaatacagacatggtgcgaagagtctattgagctagttggtagtcctccggcccctgaatgcggctaatcctaactgcggagcacacaccctcaagccagagggcagtgtgtcgtaacgggcaactctgcagcggaaccgactactttgggtgtccgtgtttcattttattcctatactggctgcttatggtgacaattgagagatcgttaccatatagctattggattggccatccggtgactaatagagctattatatatccctttgttgggtttataccacttagcttgaaagaggttaaaacattacaattcattgttaagttgaatacagcaaaatggaagatgccaagaacatcaagaagggccctgctccattctaccctctggaagatggaacagccggcgagcagctgcacaaggccatgaagagatatgccctggtgcctggcacaatcgccttcacagatgcccacatcgaggtggacatcacctacgccgagtacttcgagatgtctgtgcggctggccgaagctatgaagcgctacggcctgaacaccaaccaccggatcgtcgtgtgcagcgagaacagcctgcagttcttcatgcctgtgctgggcgccctgttcatcggagttgctgtggcccctgccaacgacatctacaacgagcgcgagctgctgaacagcatgggcatctctcagcccaccgtggtgttcgtgtccaagaagggactgcagaaaatcctgaacgtgcagaagaagctgcccatcatccagaaaatcatcatcatggacagcaagaccgactaccagggcttccagagcatgtacaccttcgtgaccagccatctgccacctggcttcaacgagtacgacttcgtgcccgagagcttcgaccgggacaagacaatcgccctgatcatgaacagcagcggctctaccggactgcccaaaggtgttgccctgcctcatagaactgcctgcgtgcggtttagccacgccagagatcccatcttcggcaaccagatcatccccgacacagccatcctgagcgtggtgccttttcaccacggcttcggcatgttcaccacactgggctacctgatctgcggcttcagagtggtgctgatgtaccgcttcgaggaagaactgttcctgcggagcctgcaggactacaagatccagtctgctctgctggtgcctactctgttcagcttctttgccaagagcaccctgatcgataagtacgacctgagcaacctgcacgagatcgcctctggcggagcccctctgtctaaagaagtgggagaagccgtcgccaagcggttccatctgcctggcatcagacaaggctatggcctgaccgagacaaccagcgccattctgattacccctgagggcgacgataagcctggcgctgtgggaaaagtggtgccattcttcgaggccaaggtggtggatctggacaccggcaaaacactgggcgttaaccagaggggcgagctgtgtgttagaggccctatgatcatgagcggctacgtgaacaaccccgaggccacaaacgctctgatcgacaaggatggatggctgcacagcggcgacattgcctactgggacgaagatgagcacttcttcatcgtggaccggctgaagtccctgatcaagtacaagggctaccaggtggccccagccgagctggaatctattctgctgcaacaccccaacatcttcgatgccggcgttgcaggactgcccgatgatgatgctggcgaactgccagctgctgtggtggtgctggaacacggcaagaccatgaccgagaaagaaatcgtggactacgtggccagccaagtgaccaccgccaagaaactgagaggcggcgtggtgtttgtggacgaggtgccaaaaggcctgacaggcaagctggacgcccggaagatcagagagatcctgattaaggccaagaaaggcggcaagatcgccgtgtaatagctaactagacaaaacaccaaacaaacaagctgcgagccacggacttaaataattgagccttaaagaagaaattctttaagtggatgctctcaaactcagggaaacctaaatctagtaaaaacaacccgctccgacgagcttccggccagtgcgagcaaaaaaaatctagatatcggatcccggg

SEQ ID NO: 3508 - DNA, 5076 bp, synthetic construct
  source 1..5076: mol_type = other DNA; note = Ana78 40nt IS
aggctaggtggaggctcagtgtgataagtctgcgatggtggatgcatgtgtcatggtcatagctgtttcctgtgtgaaattgttatccgctcagagggcacaatcctattccgcgctatccgacaatctccaagacattaggtggagttcagttcggcgtatggcatatgtcgctggaaagaacatgtgagcaaaaggccagcaaaaggccaggaaccgtaaaaaggccgcgttgctggcgtttttccataggctccgcccccctgacgagcatcacaaaaatcgacgctcaagtcagaggtggcgaaacccgacaggactataaagataccaggcgtttccccctggaagctccctcgtgcgctctcctgttccgaccctgccgcttaccggatacctgtccgcctttctcccttcgggaagcgtggcgctttctcatagctcacgctgtaggtatctcagttcggtgtaggtcgttcgctccaagctgggctgtgtgcacgaaccccccgttcagcccgaccgctgcgccttatccggtaactatcgtcttgagtccaacccggtaagacacgacttatcgccactggcagcagccactggtaacaggattagcagagcgaggtatgtaggcggtgctacagagttcttgaagtggtggcctaactacggctacactagaagaacagtatttggtatctgcgctctgctgaagccagttaccttcggaaaaagagttggtagctcttgatccggcaaacaaaccaccgctggtagcggtggtttttttgtttgcaagcagcagattacgcgcagaaaaaaaggatctcaagaagatcctttgatcttttctacggggtctgacgctctattcaacaaagccgccgtcccgtcaagtcagcgtaaatgggtagggggcttcaaatcgtcctcgtgataccaattcggagcctgcttttttgtacaaacttgttgataatggcaattcaaggatcttcacctagatccttttaaattaaaaatgaagttttaaatcaatctaaagtatatatgagtaaacttggtctgacagttaccaatgcttaatcagtgaggcacctatctcagcgatctgtctatttcgttcatccatagttgcctgactccccgtcgtgtagataactacgatacgggagggcttaccatctggccccagtgctgcaatgataccgcgagagccacgctcaccggctccagatttatcagcaataaaccagccagccggaagggccgagcgcagaagtggtcctgcaactttatccgcctccatccagtctattaattgttgccgggaagctagagtaagtagttcgccagttaatagtttgcgcaacgttgttgccattgctacaggcatcgtggtgtcacgctcgtcgtttggtatggcttcattcagctccggttcccaacgatcaaggcgagttacatgatcccccatgttgtgcaaaaaagcggttagctccttcggtcctccgatcgttgtcagaagtaagttggccgcagtgttatcactcatggttatggcagcactgcataattctcttactgtcatgccatccgtaagatgcttttctgtgactggtgagtactcaaccaagtcattctgagaatagtgtatgcggcgaccgagttgctcttgcccggcgtcaatacgggataataccgcgccacatagcagaactttaaaagtgctcatcattggaaaacgttcttcggggcgaaaactctcaaggatcttaccgctgttgagatccagttcgatgtaacccactcgtgcacccaactgatcttcagcatcttttactttcaccagcgtttctgggtgagcaaaaacaggaaggcaaaatgccgcaaaaaagggaataagggcgacacggaaatgttgaatactcatactcttcctttttcaatattattgaagcatttatcagggttattgtctcatgagcggatacatatttgaatgtatttagaaaaataaacaaataggggttccgcgcacatttccccgaaaagtgccagatacctgaaacaaaacccatcgtacggccaaggaagtctccaataactgtgatccaccacaagcgccagggttttcccagtcacgacgttgtaaaacgacggccagtcatgcataatccgcacgcatctggaataaggaagtgccattccgcctgaccttaatacgactcactatagggagaccctcgaaaaaaaacacaaacacctatagacaaggcaatcctgagccaagccgaagtagtaattagtaagttaacaatagatgacttacaactaatcggaaggtgcagagactcgacgggagctaccctaacgtcaagacgagggtaaagagagagtccaattctcaaagccaataggcagtagcgaaagctgcaagagaatgaaaatccgtggctcgcagcaataatgccacactaagagaacaaacaaagagctaagcaattaaaacagcctgtgggttgatcccacccacaggcccattgggcgctagcactctggtatcacggtacctttgtgcgcctgttttataccccctcccccaactgtaacttagaagtaacacacaccgatcaacagtcagcgtggcacaccagccacgttttgatcaagcacttctgttaccccggactgagtatcaatagactgctcacgcggttgaaggagaaagcgttcgttatccggccaactacttcgaaaaacctagtaacaccgtggaagttgcagagtgtttcgctcagcactaccccagtgtagatcaggtcgatgagtcaccgcattccccacgggcgaccgtggcggtggctgcgttggcggcctgcccatggggaaacccatgggacgctctaatacagacatggtgcgaagagtctattgagctagttggtagtcctccggcccctgaatgcggctaatcctaactgcggagcacacaccctcaagccagagggcagtgtgtcgtaacgggcaactctgcagcggaaccgactactttgggtgtccgtgtttcattttattcctatactggctgcttatggtgacaattgagagatcgttaccatatagctattggattggccatccggtgactaatagagctattatatatccctttgttgggtttataccacttagcttgaaagaggttaaaacattacaattcattgttaagttgaatacagcaaaatggaagatgccaagaacatcaagaagggccctgctccattctaccctctggaagatggaacagccggcgagcagctgcacaaggccatgaagagatatgccctggtgcctggcacaatcgccttcacagatgcccacatcgaggtggacatcacctacgccgagtacttcgagatgtctgtgcggctggccgaagctatgaagcgctacggcctgaacaccaaccaccggatcgtcgtgtgcagcgagaacagcctgcagttcttcatgcctgtgctgggcgccctgttcatcggagttgctgtggcccctgccaacgacatctacaacgagcgcgagctgctgaacagcatgggcatctctcagcccaccgtggtgttcgtgtccaagaagggactgcagaaaatcctgaacgtgcagaagaagctgcccatcatccagaaaatcatcatcatggacagcaagaccgactaccagggcttccagagcatgtacaccttcgtgaccagccatctgccacctggcttcaacgagtacgacttcgtgcccgagagcttcgaccgggacaagacaatcgccctgatcatgaacagcagcggctctaccggactgcccaaaggtgttgccctgcctcatagaactgcctgcgtgcggtttagccacgccagagatcccatcttcggcaaccagatcatccccgacacagccatcctgagcgtggtgccttttcaccacggcttcggcatgttcaccacactgggctacctgatctgcggcttcagagtggtgctgatgtaccgcttcgaggaagaactgttcctgcggagcctgcaggactacaagatccagtctgctctgctggtgcctactctgttcagcttctttgccaagagcaccctgatcgataagtacgacctgagcaacctgcacgagatcgcctctggcggagcccctctgtctaaagaagtgggagaagccgtcgccaagcggttccatctgcctggcatcagacaaggctatggcctgaccgagacaaccagcgccattctgattacccctgagggcgacgataagcctggcgctgtgggaaaagtggtgccattcttcgaggccaaggtggtggatctggacaccggcaaaacactgggcgttaaccagaggggcgagctgtgtgttagaggccctatgatcatgagcggctacgtgaacaaccccgaggccacaaacgctctgatcgacaaggatggatggctgcacagcggcgacattgcctactgggacgaagatgagcacttcttcatcgtggaccggctgaagtccctgatcaagtacaagggctaccaggtggccccagccgagctggaatctattctgctgcaacaccccaacatcttcgatgccggcgttgcaggactgcccgatgatgatgctggcgaactgccagctgctgtggtggtgctggaacacggcaagaccatgaccgagaaagaaatcgtggactacgtggccagccaagtgaccaccgccaagaaactgagaggcggcgtggtgtttgtggacgaggtgccaaaaggcctgacaggcaagctggacgcccggaagatcagagagatcctgattaaggccaagaaaggcggcaagatcgccgtgtaatagctaactagaataatgacacacgacaagaacaatcataccactaagcaagctgcgagccacggacttaaataattgagccttaaagaagaaattctttaagtggatgctctcaaactcagggaaacctaaatctagtaaaaacaaccaaaaaaaatctagatatcggatcccggg

SEQ ID NO: 3509 - DNA, 5036 bp, synthetic construct
  source 1..5036: mol_type = other DNA; note = Ana78 20nt IS
aggctaggtggaggctcagtgtgataagtctgcgatggtggatgcatgtgtcatggtcatagctgtttcctgtgtgaaattgttatccgctcagagggcacaatcctattccgcgctatccgacaatctccaagacattaggtggagttcagttcggcgtatggcatatgtcgctggaaagaacatgtgagcaaaaggccagcaaaaggccaggaaccgtaaaaaggccgcgttgctggcgtttttccataggctccgcccccctgacgagcatcacaaaaatcgacgctcaagtcagaggtggcgaaacccgacaggactataaagataccaggcgtttccccctggaagctccctcgtgcgctctcctgttccgaccctgccgcttaccggatacctgtccgcctttctcccttcgggaagcgtggcgctttctcatagctcacgctgtaggtatctcagttcggtgtaggtcgttcgctccaagctgggctgtgtgcacgaaccccccgttcagcccgaccgctgcgccttatccggtaactatcgtcttgagtccaacccggtaagacacgacttatcgccactggcagcagccactggtaacaggattagcagagcgaggtatgtaggcggtgctacagagttcttgaagtggtggcctaactacggctacactagaagaacagtatttggtatctgcgctctgctgaagccagttaccttcggaaaaagagttggtagctcttgatccggcaaacaaaccaccgctggtagcggtggtttttttgtttgcaagcagcagattacgcgcagaaaaaaaggatctcaagaagatcctttgatcttttctacggggtctgacgctctattcaacaaagccgccgtcccgtcaagtcagcgtaaatgggtagggggcttcaaatcgtcctcgtgataccaattcggagcctgcttttttgtacaaacttgttgataatggcaattcaaggatcttcacctagatccttttaaattaaaaatgaagttttaaatcaatctaaagtatatatgagtaaacttggtctgacagttaccaatgcttaatcagtgaggcacctatctcagcgatctgtctatttcgttcatccatagttgcctgactccccgtcgtgtagataactacgatacgggagggcttaccatctggccccagtgctgcaatgataccgcgagagccacgctcaccggctccagatttatcagcaataaaccagccagccggaagggccgagcgcagaagtggtcctgcaactttatccgcctccatccagtctattaattgttgccgggaagctagagtaagtagttcgccagttaatagtttgcgcaacgttgttgccattgctacaggcatcgtggtgtcacgctcgtcgtttggtatggcttcattcagctccggttcccaacgatcaaggcgagttacatgatcccccatgttgtgcaaaaaagcggttagctccttcggtcctccgatcgttgtcagaagtaagttggccgcagtgttatcactcatggttatggcagcactgcataattctcttactgtcatgccatccgtaagatgcttttctgtgactggtgagtactcaaccaagtcattctgagaatagtgtatgcggcgaccgagttgctcttgcccggcgtcaatacgggataataccgcgccacatagcagaactttaaaagtgctcatcattggaaaacgttcttcggggcgaaaactctcaaggatcttaccgctgttgagatccagttcgatgtaacccactcgtgcacccaactgatcttcagcatcttttactttcaccagcgtttctgggtgagcaaaaacaggaaggcaaaatgccgcaaaaaagggaataagggcgacacggaaatgttgaatactcatactcttcctttttcaatattattgaagcatttatcagggttattgtctcatgagcggatacatatttgaatgtatttagaaaaataaacaaataggggttccgcgcacatttccccgaaaagtgccagatacctgaaacaaaacccatcgtacggccaaggaagtctccaataactgtgatccaccacaagcgccagggttttcccagtcacgacgttgtaaaacgacggccagtcatgcataatccgcacgcatctggaataaggaagtgccattccgcctgaccttaatacgactcactatagggagaccctcgaaaaaaaacacaaacacctatagacaaggcaatcctgagccaagccgaagtagtaattagtaagttaacaatagatgacttacaactaatcggaaggtgcagagactcgacgggagctaccctaacgtcaagacgagggtaaagagagagtccaattctcaaagccaataggcagtagcgaaagctgcaagagaatgaaaatccgtggctcgcagcagatccactacaagtaagatttaaaacagcctgtgggttgatcccacccacaggcccattgggcgctagcactctggtatcacggtacctttgtgcgcctgttttataccccctcccccaactgtaacttagaagtaacacacaccgatcaacagtcagcgtggcacaccagccacgttttgatcaagcacttctgttaccccggactgagtatcaatagactgctcacgcggttgaaggagaaagcgttcgttatccggccaactacttcgaaaaacctagtaacaccgtggaagttgcagagtgtttcgctcagcactaccccagtgtagatcaggtcgatgagtcaccgcattccccacgggcgaccgtggcggtggctgcgttggcggcctgcccatggggaaacccatgggacgctctaatacagacatggtgcgaagagtctattgagctagttggtagtcctccggcccctgaatgcggctaatcctaactgcggagcacacaccctcaagccagagggcagtgtgtcgtaacgggcaactctgcagcggaaccgactactttgggtgtccgtgtttcattttattcctatactggctgcttatggtgacaattgagagatcgttaccatatagctattggattggccatccggtgactaatagagctattatatatccctttgttgggtttataccacttagcttgaaagaggttaaaacattacaattcattgttaagttgaatacagcaaaatggaagatgccaagaacatcaagaagggccctgctccattctaccctctggaagatggaacagccggcgagcagctgcacaaggccatgaagagatatgccctggtgcctggcacaatcgccttcacagatgcccacatcgaggtggacatcacctacgccgagtacttcgagatgtctgtgcggctggccgaagctatgaagcgctacggcctgaacaccaaccaccggatcgtcgtgtgcagcgagaacagcctgcagttcttcatgcctgtgctgggcgccctgttcatcggagttgctgtggcccctgccaacgacatctacaacgagcgcgagctgctgaacagcatgggcatctctcagcccaccgtggtgttcgtgtccaagaagggactgcagaaaatcctgaacgtgcagaagaagctgcccatcatccagaaaatcatcatcatggacagcaagaccgactaccagggcttccagagcatgtacaccttcgtgaccagccatctgccacctggcttcaacgagtacgacttcgtgcccgagagcttcgaccgggacaagacaatcgccctgatcatgaacagcagcggctctaccggactgcccaaaggtgttgccctgcctcatagaactgcctgcgtgcggtttagccacgccagagatcccatcttcggcaaccagatcatccccgacacagccatcctgagcgtggtgccttttcaccacggcttcggcatgttcaccacactgggctacctgatctgcggcttcagagtggtgctgatgtaccgcttcgaggaagaactgttcctgcggagcctgcaggactacaagatccagtctgctctgctggtgcctactctgttcagcttctttgccaagagcaccctgatcgataagtacgacctgagcaacctgcacgagatcgcctctggcggagcccctctgtctaaagaagtgggagaagccgtcgccaagcggttccatctgcctggcatcagacaaggctatggcctgaccgagacaaccagcgccattctgattacccctgagggcgacgataagcctggcgctgtgggaaaagtggtgccattcttcgaggccaaggtggtggatctggacaccggcaaaacactgggcgttaaccagaggggcgagctgtgtgttagaggccctatgatcatgagcggctacgtgaacaaccccgaggccacaaacgctctgatcgacaaggatggatggctgcacagcggcgacattgcctactgggacgaagatgagcacttcttcatcgtggaccggctgaagtccctgatcaagtacaagggctaccaggtggccccagccgagctggaatctattctgctgcaacaccccaacatcttcgatgccggcgttgcaggactgcccgatgatgatgctggcgaactgccagctgctgtggtggtgctggaacacggcaagaccatgaccgagaaagaaatcgtggactacgtggccagccaagtgaccaccgccaagaaactgagaggcggcgtggtgtttgtggacgaggtgccaaaaggcctgacaggcaagctggacgcccggaagatcagagagatcctgattaaggccaagaaaggcggcaagatcgccgtgtaatagctaactagagatagaatccaactaacctgctgcgagccacggacttaaataattgagccttaaagaagaaattctttaagtggatgctctcaaactcagggaaacctaaatctagtaaaaacaaccaaaaaaaatctagatatcggatcccggg

SEQ ID NO: 3510 - DNA, 5109 bp, synthetic construct
  source 1..5109: mol_type = other DNA; note = Ana78 40nt ES
aggctaggtggaggctcagtgtgataagtctgcgatggtggatgcatgtgtcatggtcatagctgtttcctgtgtgaaattgttatccgctcagagggcacaatcctattccgcgctatccgacaatctccaagacattaggtggagttcagttcggcgtatggcatatgtcgctggaaagaacatgtgagcaaaaggccagcaaaaggccaggaaccgtaaaaaggccgcgttgctggcgtttttccataggctccgcccccctgacgagcatcacaaaaatcgacgctcaagtcagaggtggcgaaacccgacaggactataaagataccaggcgtttccccctggaagctccctcgtgcgctctcctgttccgaccctgccgcttaccggatacctgtccgcctttctcccttcgggaagcgtggcgctttctcatagctcacgctgtaggtatctcagttcggtgtaggtcgttcgctccaagctgggctgtgtgcacgaaccccccgttcagcccgaccgctgcgccttatccggtaactatcgtcttgagtccaacccggtaagacacgacttatcgccactggcagcagccactggtaacaggattagcagagcgaggtatgtaggcggtgctacagagttcttgaagtggtggcctaactacggctacactagaagaacagtatttggtatctgcgctctgctgaagccagttaccttcggaaaaagagttggtagctcttgatccggcaaacaaaccaccgctggtagcggtggtttttttgtttgcaagcagcagattacgcgcagaaaaaaaggatctcaagaagatcctttgatcttttctacggggtctgacgctctattcaacaaagccgccgtcccgtcaagtcagcgtaaatgggtagggggcttcaaatcgtcctcgtgataccaattcggagcctgcttttttgtacaaacttgttgataatggcaattcaaggatcttcacctagatccttttaaattaaaaatgaagttttaaatcaatctaaagtatatatgagtaaacttggtctgacagttaccaatgcttaatcagtgaggcacctatctcagcgatctgtctatttcgttcatccatagttgcctgactccccgtcgtgtagataactacgatacgggagggcttaccatctggccccagtgctgcaatgataccgcgagagccacgctcaccggctccagatttatcagcaataaaccagccagccggaagggccgagcgcagaagtggtcctgcaactttatccgcctccatccagtctattaattgttgccgggaagctagagtaagtagttcgccagttaatagtttgcgcaacgttgttgccattgctacaggcatcgtggtgtcacgctcgtcgtttggtatggcttcattcagctccggttcccaacgatcaaggcgagttacatgatcccccatgttgtgcaaaaaagcggttagctccttcggtcctccgatcgttgtcagaagtaagttggccgcagtgttatcactcatggttatggcagcactgcataattctcttactgtcatgccatccgtaagatgcttttctgtgactggtgagtactcaaccaagtcattctgagaatagtgtatgcggcgaccgagttgctcttgcccggcgtcaatacgggataataccgcgccacatagcagaactttaaaagtgctcatcattggaaaacgttcttcggggcgaaaactctcaaggatcttaccgctgttgagatccagttcgatgtaacccactcgtgcacccaactgatcttcagcatcttttactttcaccagcgtttctgggtgagcaaaaacaggaaggcaaaatgccgcaaaaaagggaataagggcgacacggaaatgttgaatactcatactcttcctttttcaatattattgaagcatttatcagggttattgtctcatgagcggatacatatttgaatgtatttagaaaaataaacaaataggggttccgcgcacatttccccgaaaagtgccagatacctgaaacaaaacccatcgtacggccaaggaagtctccaataactgtgatccaccacaagcgccagggttttcccagtcacgacgttgtaaaacgacggccagtcatgcataatccgcacgcatctggaataaggaagtgccattccgcctgaccttaatacgactcactatagggagaccctcgaaaaaaaaataatgacacactacgagaacaaccatagaactaagcaatatagacaaggcaatcctgagccaagccgaagtagtaattagtaagttaacaatagatgacttacaactaatcggaaggtgcagagactcgacgggagctaccctaacgtcaagacgagggtaaagagagagtccaattctcaaagccaataggcagtagcgaaagctgcaagagaatgaaaatccgtggctcgcagcaaacaccaaacaaaacaaacacaaaccaacaaaaattaaaacagcctgtgggttgatcccacccacaggcccattgggcgctagcactctggtatcacggtacctttgtgcgcctgttttataccccctcccccaactgtaacttagaagtaacacacaccgatcaacagtcagcgtggcacaccagccacgttttgatcaagcacttctgttaccccggactgagtatcaatagactgctcacgcggttgaaggagaaagcgttcgttatccggccaactacttcgaaaaacctagtaacaccgtggaagttgcagagtgtttcgctcagcactaccccagtgtagatcaggtcgatgagtcaccgcattccccacgggcgaccgtggcggtggctgcgttggcggcctgcccatggggaaacccatgggacgctctaatacagacatggtgcgaagagtctattgagctagttggtagtcctccggcccctgaatgcggctaatcctaactgcggagcacacaccctcaagccagagggcagtgtgtcgtaacgggcaactctgcagcggaaccgactactttgggtgtccgtgtttcattttattcctatactggctgcttatggtgacaattgagagatcgttaccatatagctattggattggccatccggtgactaatagagctattatatatccctttgttgggtttataccacttagcttgaaagaggttaaaacattacaattcattgttaagttgaatacagcaaaatggaagatgccaagaacatcaagaagggccctgctccattctaccctctggaagatggaacagccggcgagcagctgcacaaggccatgaagagatatgccctggtgcctggcacaatcgccttcacagatgcccacatcgaggtggacatcacctacgccgagtacttcgagatgtctgtgcggctggccgaagctatgaagcgctacggcctgaacaccaaccaccggatcgtcgtgtgcagcgagaacagcctgcagttcttcatgcctgtgctgggcgccctgttcatcggagttgctgtggcccctgccaacgacatctacaacgagcgcgagctgctgaacagcatgggcatctctcagcccaccgtggtgttcgtgtccaagaagggactgcagaaaatcctgaacgtgcagaagaagctgcccatcatccagaaaatcatcatcatggacagcaagaccgactaccagggcttccagagcatgtacaccttcgtgaccagccatctgccacctggcttcaacgagtacgacttcgtgcccgagagcttcgaccgggacaagacaatcgccctgatcatgaacagcagcggctctaccggactgcccaaaggtgttgccctgcctcatagaactgcctgcgtgcggtttagccacgccagagatcccatcttcggcaaccagatcatccccgacacagccatcctgagcgtggtgccttttcaccacggcttcggcatgttcaccacactgggctacctgatctgcggcttcagagtggtgctgatgtaccgcttcgaggaagaactgttcctgcggagcctgcaggactacaagatccagtctgctctgctggtgcctactctgttcagcttctttgccaagagcaccctgatcgataagtacgacctgagcaacctgcacgagatcgcctctggcggagcccctctgtctaaagaagtgggagaagccgtcgccaagcggttccatctgcctggcatcagacaaggctatggcctgaccgagacaaccagcgccattctgattacccctgagggcgacgataagcctggcgctgtgggaaaagtggtgccattcttcgaggccaaggtggtggatctggacaccggcaaaacactgggcgttaaccagaggggcgagctgtgtgttagaggccctatgatcatgagcggctacgtgaacaaccccgaggccacaaacgctctgatcgacaaggatggatggctgcacagcggcgacattgcctactgggacgaagatgagcacttcttcatcgtggaccggctgaagtccctgatcaagtacaagggctaccaggtggccccagccgagctggaatctattctgctgcaacaccccaacatcttcgatgccggcgttgcaggactgcccgatgatgatgctggcgaactgccagctgctgtggtggtgctggaacacggcaagaccatgaccgagaaagaaatcgtggactacgtggccagccaagtgaccaccgccaagaaactgagaggcggcgtggtgtttgtggacgaggtgccaaaaggcctgacaggcaagctggacgcccggaagatcagagagatcctgattaaggccaagaaaggcggcaagatcgccgtgtaatagctaactagacaaaacaccaaacaaacaagctgcgagccacggacttaaataattgagccttaaagaagaaattctttaagtggatgctctcaaactcagggaaacctaaatctagtaataatgaaagactacgagatcaaccatagagctaaccaaaaaaaaatctagatatcggatcccggg

SEQ ID NO: 3511 - DNA, 5211 bp, synthetic construct
  source 1..5211: mol_type = other DNA; note = Ana78 rational design 1
aggctaggtggaggctcagtgtgataagtctgcgatggtggatgcatgtgtcatggtcatagctgtttcctgtgtgaaattgttatccgctcagagggcacaatcctattccgcgctatccgacaatctccaagacattaggtggagttcagttcggcgtatggcatatgtcgctggaaagaacatgtgagcaaaaggccagcaaaaggccaggaaccgtaaaaaggccgcgttgctggcgtttttccataggctccgcccccctgacgagcatcacaaaaatcgacgctcaagtcagaggtggcgaaacccgacaggactataaagataccaggcgtttccccctggaagctccctcgtgcgctctcctgttccgaccctgccgcttaccggatacctgtccgcctttctcccttcgggaagcgtggcgctttctcatagctcacgctgtaggtatctcagttcggtgtaggtcgttcgctccaagctgggctgtgtgcacgaaccccccgttcagcccgaccgctgcgccttatccggtaactatcgtcttgagtccaacccggtaagacacgacttatcgccactggcagcagccactggtaacaggattagcagagcgaggtatgtaggcggtgctacagagttcttgaagtggtggcctaactacggctacactagaagaacagtatttggtatctgcgctctgctgaagccagttaccttcggaaaaagagttggtagctcttgatccggcaaacaaaccaccgctggtagcggtggtttttttgtttgcaagcagcagattacgcgcagaaaaaaaggatctcaagaagatcctttgatcttttctacggggtctgacgctctattcaacaaagccgccgtcccgtcaagtcagcgtaaatgggtagggggcttcaaatcgtcctcgtgataccaattcggagcctgcttttttgtacaaacttgttgataatggcaattcaaggatcttcacctagatccttttaaattaaaaatgaagttttaaatcaatctaaagtatatatgagtaaacttggtctgacagttaccaatgcttaatcagtgaggcacctatctcagcgatctgtctatttcgttcatccatagttgcctgactccccgtcgtgtagataactacgatacgggagggcttaccatctggccccagtgctgcaatgataccgcgagagccacgctcaccggctccagatttatcagcaataaaccagccagccggaagggccgagcgcagaagtggtcctgcaactttatccgcctccatccagtctattaattgttgccgggaagctagagtaagtagttcgccagttaatagtttgcgcaacgttgttgccattgctacaggcatcgtggtgtcacgctcgtcgtttggtatggcttcattcagctccggttcccaacgatcaaggcgagttacatgatcccccatgttgtgcaaaaaagcggttagctccttcggtcctccgatcgttgtcagaagtaagttggccgcagtgttatcactcatggttatggcagcactgcataattctcttactgtcatgccatccgtaagatgcttttctgtgactggtgagtactcaaccaagtcattctgagaatagtgtatgcggcgaccgagttgctcttgcccggcgtcaatacgggataataccgcgccacatagcagaactttaaaagtgctcatcattggaaaacgttcttcggggcgaaaactctcaaggatcttaccgctgttgagatccagttcgatgtaacccactcgtgcacccaactgatcttcagcatcttttactttcaccagcgtttctgggtgagcaaaaacaggaaggcaaaatgccgcaaaaaagggaataagggcgacacggaaatgttgaatactcatactcttcctttttcaatattattgaagcatttatcagggttattgtctcatgagcggatacatatttgaatgtatttagaaaaataaacaaataggggttccgcgcacatttccccgaaaagtgccagatacctgaaacaaaacccatcgtacggccaaggaagtctccaataactgtgatccaccacaagcgccagggttttcccagtcacgacgttgtaaaacgacggccagtcatgcataatccgcacgcatctggaataaggaagtgccattccgcctgaccttaatacgactcactatagggagaccctcgaaaaaaaagcttcgaatgcgaccatctgctcaggctcaatctcgctccaataatgacacactacgagaacaaccatagaactaagcaatatagacaaggcaatcctgagccaagccgaagtagtaattagtaagttaacaatagatgacttacaactaatcggaaggtgcagagactcgacgggagctaccctaacgtcaagacgagggtaaagagagagtccaattctcaaagccaataggcagtagcgaaagctgcaagagaatgaaaatccgttgaccttaaacggtcgtgtggggagcacgccggcgccaataatgccacactaagagaacaaacaaagagctaagcaattaaaacagcctgtgggttgatcccacccacaggcccattgggcgctagcactctggtatcacggtacctttgtgcgcctgttttataccccctcccccaactgtaacttagaagtaacacacaccgatcaacagtcagcgtggcacaccagccacgttttgatcaagcacttctgttaccccggactgagtatcaatagactgctcacgcggttgaaggagaaagcgttcgttatccggccaactacttcgaaaaacctagtaacaccgtggaagttgcagagtgtttcgctcagcactaccccagtgtagatcaggtcgatgagtcaccgcattccccacgggcgaccgtggcggtggctgcgttggcggcctgcccatggggaaacccatgggacgctctaatacagacatggtgcgaagagtctattgagctagttggtagtcctccggcccctgaatgcggctaatcctaactgcggagcacacaccctcaagccagagggcagtgtgtcgtaacgggcaactctgcagcggaaccgactactttgggtgtccgtgtttcattttattcctatactggctgcttatggtgacaattgagagatcgttaccatatagctattggattggccatccggtgactaatagagctattatatatccctttgttgggtttataccacttagcttgaaagaggttaaaacattacaattcattgttaagttgaatacagcaaaatggaagatgccaagaacatcaagaagggccctgctccattctaccctctggaagatggaacagccggcgagcagctgcacaaggccatgaagagatatgccctggtgcctggcacaatcgccttcacagatgcccacatcgaggtggacatcacctacgccgagtacttcgagatgtctgtgcggctggccgaagctatgaagcgctacggcctgaacaccaaccaccggatcgtcgtgtgcagcgagaacagcctgcagttcttcatgcctgtgctgggcgccctgttcatcggagttgctgtggcccctgccaacgacatctacaacgagcgcgagctgctgaacagcatgggcatctctcagcccaccgtggtgttcgtgtccaagaagggactgcagaaaatcctgaacgtgcagaagaagctgcccatcatccagaaaatcatcatcatggacagcaagaccgactaccagggcttccagagcatgtacaccttcgtgaccagccatctgccacctggcttcaacgagtacgacttcgtgcccgagagcttcgaccgggacaagacaatcgccctgatcatgaacagcagcggctctaccggactgcccaaaggtgttgccctgcctcatagaactgcctgcgtgcggtttagccacgccagagatcccatcttcggcaaccagatcatccccgacacagccatcctgagcgtggtgccttttcaccacggcttcggcatgttcaccacactgggctacctgatctgcggcttcagagtggtgctgatgtaccgcttcgaggaagaactgttcctgcggagcctgcaggactacaagatccagtctgctctgctggtgcctactctgttcagcttctttgccaagagcaccctgatcgataagtacgacctgagcaacctgcacgagatcgcctctggcggagcccctctgtctaaagaagtgggagaagccgtcgccaagcggttccatctgcctggcatcagacaaggctatggcctgaccgagacaaccagcgccattctgattacccctgagggcgacgataagcctggcgctgtgggaaaagtggtgccattcttcgaggccaaggtggtggatctggacaccggcaaaacactgggcgttaaccagaggggcgagctgtgtgttagaggccctatgatcatgagcggctacgtgaacaaccccgaggccacaaacgctctgatcgacaaggatggatggctgcacagcggcgacattgcctactgggacgaagatgagcacttcttcatcgtggaccggctgaagtccctgatcaagtacaagggctaccaggtggccccagccgagctggaatctattctgctgcaacaccccaacatcttcgatgccggcgttgcaggactgcccgatgatgatgctggcgaactgccagctgctgtggtggtgctggaacacggcaagaccatgaccgagaaagaaatcgtggactacgtggccagccaagtgaccaccgccaagaaactgagaggcggcgtggtgtttgtggacgaggtgccaaaaggcctgacaggcaagctggacgcccggaagatcagagagatcctgattaaggccaagaaaggcggcaagatcgccgtgtaatagctaactagagatagaatccaactaacctggcgccggcgtgctcgctacggacttaaataattgagccttaaagaagaaattctttaagtggatgctctcaaactcagggaaacctaaatctagtacatacacatgaacttagctggagcgagattgagcctgagcagatggtcgcattcgaagcaaaaaaaatctagatatcggatcccggg

SEQ ID NO: 3512 - DNA, 5130 bp, synthetic construct
  source 1..5130: mol_type = other DNA; note = Ana78 rational design 2
aggctaggtggaggctcagtgtgataagtctgcgatggtggatgcatgtgtcatggtcatagctgtttcctgtgtgaaattgttatccgctcagagggcacaatcctattccgcgctatccgacaatctccaagacattaggtggagttcagttcggcgtatggcatatgtcgctggaaagaacatgtgagcaaaaggccagcaaaaggccaggaaccgtaaaaaggccgcgttgctggcgtttttccataggctccgcccccctgacgagcatcacaaaaatcgacgctcaagtcagaggtggcgaaacccgacaggactataaagataccaggcgtttccccctggaagctccctcgtgcgctctcctgttccgaccctgccgcttaccggatacctgtccgcctttctcccttcgggaagcgtggcgctttctcatagctcacgctgtaggtatctcagttcggtgtaggtcgttcgctccaagctgggctgtgtgcacgaaccccccgttcagcccgaccgctgcgccttatccggtaactatcgtcttgagtccaacccggtaagacacgacttatcgccactggcagcagccactggtaacaggattagcagagcgaggtatgtaggcggtgctacagagttcttgaagtggtggcctaactacggctacactagaagaacagtatttggtatctgcgctctgctgaagccagttaccttcggaaaaagagttggtagctcttgatccggcaaacaaaccaccgctggtagcggtggtttttttgtttgcaagcagcagattacgcgcagaaaaaaaggatctcaagaagatcctttgatcttttctacggggtctgacgctctattcaacaaagccgccgtcccgtcaagtcagcgtaaatgggtagggggcttcaaatcgtcctcgtgataccaattcggagcctgcttttttgtacaaacttgttgataatggcaattcaaggatcttcacctagatccttttaaattaaaaatgaagttttaaatcaatctaaagtatatatgagtaaacttggtctgacagttaccaatgcttaatcagtgaggcacctatctcagcgatctgtctatttcgttcatccatagttgcctgactccccgtcgtgtagataactacgatacgggagggcttaccatctggccccagtgctgcaatgataccgcgagagccacgctcaccggctccagatttatcagcaataaaccagccagccggaagggccgagcgcagaagtggtcctgcaactttatccgcctccatccagtctattaattgttgccgggaagctagagtaagtagttcgccagttaatagtttgcgcaacgttgttgccattgctacaggcatcgtggtgtcacgctcgtcgtttggtatggcttcattcagctccggttcccaacgatcaaggcgagttacatgatcccccatgttgtgcaaaaaagcggttagctccttcggtcctccgatcgttgtcagaagtaagttggccgcagtgttatcactcatggttatggcagcactgcataattctcttactgtcatgccatccgtaagatgcttttctgtgactggtgagtactcaaccaagtcattctgagaatagtgtatgcggcgaccgagttgctcttgcccggcgtcaatacgggataataccgcgccacatagcagaactttaaaagtgctcatcattggaaaacgttcttcggggcgaaaactctcaaggatcttaccgctgttgagatccagttcgatgtaacccactcgtgcacccaactgatcttcagcatcttttactttcaccagcgtttctgggtgagcaaaaacaggaaggcaaaatgccgcaaaaaagggaataagggcgacacggaaatgttgaatactcatactcttcctttttcaatattattgaagcatttatcagggttattgtctcatgagcggatacatatttgaatgtatttagaaaaataaacaaataggggttccgcgcacatttccccgaaaagtgccagatacctgaaacaaaacccatcgtacggccaaggaagtctccaataactgtgatccaccacaagcgccagggttttcccagtcacgacgttgtaaaacgacggccagtcatgcataatccgcacgcatctggaataaggaagtgccattccgcctgaccttaatacgactcactatagggagaccctcgaaaaaaaaataatgacacactacgagaacaaccatagaactaagcaatatagacaaggcaatcctgagccaagccgaagtagtaattagtaagttaacaatagatgacttacaactaatcggaaggtgcagagactcgacgggagctaccctaacgtcaagacgagggtaaagagagagtccaattctcaaagccaataggcagtagcgaaagctgcaagagaatgaaaatccgttgaccttaaacggtcgtgtggggagcacgccggcgccaataatgccacactaagagaacaaacaaagagctaagcaattaaaacagcctgtgggttgatcccacccacaggcccattgggcgctagcactctggtatcacggtacctttgtgcgcctgttttataccccctcccccaactgtaacttagaagtaacacacaccgatcaacagtcagcgtggcacaccagccacgttttgatcaagcacttctgttaccccggactgagtatcaatagactgctcacgcggttgaaggagaaagcgttcgttatccggccaactacttcgaaaaacctagtaacaccgtggaagttgcagagtgtttcgctcagcactaccccagtgtagatcaggtcgatgagtcaccgcattccccacgggcgaccgtggcggtggctgcgttggcggcctgcccatggggaaacccatgggacgctctaatacagacatggtgcgaagagtctattgagctagttggtagtcctccggcccctgaatgcggctaatcctaactgcggagcacacaccctcaagccagagggcagtgtgtcgtaacgggcaactctgcagcggaaccgactactttgggtgtccgtgtttcattttattcctatactggctgcttatggtgacaattgagagatcgttaccatatagctattggattggccatccggtgactaatagagctattatatatccctttgttgggtttataccacttagcttgaaagaggttaaaacattacaattcattgttaagttgaatacagcaaaatggaagatgccaagaacatcaagaagggccctgctccattctaccctctggaagatggaacagccggcgagcagctgcacaaggccatgaagagatatgccctggtgcctggcacaatcgccttcacagatgcccacatcgaggtggacatcacctacgccgagtacttcgagatgtctgtgcggctggccgaagctatgaagcgctacggcctgaacaccaaccaccggatcgtcgtgtgcagcgagaacagcctgcagttcttcatgcctgtgctgggcgccctgttcatcggagttgctgtggcccctgccaacgacatctacaacgagcgcgagctgctgaacagcatgggcatctctcagcccaccgtggtgttcgtgtccaagaagggactgcagaaaatcctgaacgtgcagaagaagctgcccatcatccagaaaatcatcatcatggacagcaagaccgactaccagggcttccagagcatgtacaccttcgtgaccagccatctgccacctggcttcaacgagtacgacttcgtgcccgagagcttcgaccgggacaagacaatcgccctgatcatgaacagcagcggctctaccggactgcccaaaggtgttgccctgcctcatagaactgcctgcgtgcggtttagccacgccagagatcccatcttcggcaaccagatcatccccgacacagccatcctgagcgtggtgccttttcaccacggcttcggcatgttcaccacactgggctacctgatctgcggcttcagagtggtgctgatgtaccgcttcgaggaagaactgttcctgcggagcctgcaggactacaagatccagtctgctctgctggtgcctactctgttcagcttctttgccaagagcaccctgatcgataagtacgacctgagcaacctgcacgagatcgcctctggcggagcccctctgtctaaagaagtgggagaagccgtcgccaagcggttccatctgcctggcatcagacaaggctatggcctgaccgagacaaccagcgccattctgattacccctgagggcgacgataagcctggcgctgtgggaaaagtggtgccattcttcgaggccaaggtggtggatctggacaccggcaaaacactgggcgttaaccagaggggcgagctgtgtgttagaggccctatgatcatgagcggctacgtgaacaaccccgaggccacaaacgctctgatcgacaaggatggatggctgcacagcggcgacattgcctactgggacgaagatgagcacttcttcatcgtggaccggctgaagtccctgatcaagtacaagggctaccaggtggccccagccgagctggaatctattctgctgcaacaccccaacatcttcgatgccggcgttgcaggactgcccgatgatgatgctggcgaactgccagctgctgtggtggtgctggaacacggcaagaccatgaccgagaaagaaatcgtggactacgtggccagccaagtgaccaccgccaagaaactgagaggcggcgtggtgtttgtggacgaggtgccaaaaggcctgacaggcaagctggacgcccggaagatcagagagatcctgattaaggccaagaaaggcggcaagatcgccgtgtaatagctaactagagatagaatccaactaacctggcgccggcgtgctcgctacggacttaaataattgagccttaaagaagaaattctttaagtggatgctctcaaactcagggaaacctaaatctagtacatacacatgaacttagctaaaaaaaatctagatatcggatcccggg

SEQ ID NO: 3513 - DNA, 5076 bp, synthetic construct
  source 1..5076: mol_type = other DNA; note = Ana 128 Exonextention
aggctaggtggaggctcagtgtgataagtctgcgatggtggatgcatgtgtcatggtcatagctgtttcctgtgtgaaattgttatccgctcagagggcacaatcctattccgcgctatccgacaatctccaagacattaggtggagttcagttcggcgtatggcatatgtcgctggaaagaacatgtgagcaaaaggccagcaaaaggccaggaaccgtaaaaaggccgcgttgctggcgtttttccataggctccgcccccctgacgagcatcacaaaaatcgacgctcaagtcagaggtggcgaaacccgacaggactataaagataccaggcgtttccccctggaagctccctcgtgcgctctcctgttccgaccctgccgcttaccggatacctgtccgcctttctcccttcgggaagcgtggcgctttctcatagctcacgctgtaggtatctcagttcggtgtaggtcgttcgctccaagctgggctgtgtgcacgaaccccccgttcagcccgaccgctgcgccttatccggtaactatcgtcttgagtccaacccggtaagacacgacttatcgccactggcagcagccactggtaacaggattagcagagcgaggtatgtaggcggtgctacagagttcttgaagtggtggcctaactacggctacactagaagaacagtatttggtatctgcgctctgctgaagccagttaccttcggaaaaagagttggtagctcttgatccggcaaacaaaccaccgctggtagcggtggtttttttgtttgcaagcagcagattacgcgcagaaaaaaaggatctcaagaagatcctttgatcttttctacggggtctgacgctctattcaacaaagccgccgtcccgtcaagtcagcgtaaatgggtagggggcttcaaatcgtcctcgtgataccaattcggagcctgcttttttgtacaaacttgttgataatggcaattcaaggatcttcacctagatccttttaaattaaaaatgaagttttaaatcaatctaaagtatatatgagtaaacttggtctgacagttaccaatgcttaatcagtgaggcacctatctcagcgatctgtctatttcgttcatccatagttgcctgactccccgtcgtgtagataactacgatacgggagggcttaccatctggccccagtgctgcaatgataccgcgagagccacgctcaccggctccagatttatcagcaataaaccagccagccggaagggccgagcgcagaagtggtcctgcaactttatccgcctccatccagtctattaattgttgccgggaagctagagtaagtagttcgccagttaatagtttgcgcaacgttgttgccattgctacaggcatcgtggtgtcacgctcgtcgtttggtatggcttcattcagctccggttcccaacgatcaaggcgagttacatgatcccccatgttgtgcaaaaaagcggttagctccttcggtcctccgatcgttgtcagaagtaagttggccgcagtgttatcactcatggttatggcagcactgcataattctcttactgtcatgccatccgtaagatgcttttctgtgactggtgagtactcaaccaagtcattctgagaatagtgtatgcggcgaccgagttgctcttgcccggcgtcaatacgggataataccgcgccacatagcagaactttaaaagtgctcatcattggaaaacgttcttcggggcgaaaactctcaaggatcttaccgctgttgagatccagttcgatgtaacccactcgtgcacccaactgatcttcagcatcttttactttcaccagcgtttctgggtgagcaaaaacaggaaggcaaaatgccgcaaaaaagggaataagggcgacacggaaatgttgaatactcatactcttcctttttcaatattattgaagcatttatcagggttattgtctcatgagcggatacatatttgaatgtatttagaaaaataaacaaataggggttccgcgcacatttccccgaaaagtgccagatacctgaaacaaaacccatcgtacggccaaggaagtctccaataactgtgatccaccacaagcgccagggttttcccagtcacgacgttgtaaaacgacggccagtcatgcataatccgcacgcatctggaataaggaagtgccattccgcctgaccttaatacgactcactatagggagaccctcgaaaaaaaacacaaacacccaatagatgacttacaactaatcggaaggtgcagagactcgacgggagctaccctaacgtcaagacgagggtaaagagagagtccaattctcaaagccaataggcagtagcgaaagctgcaagagaatgaaaatccgttgaccttaaacggtcgtgtgggggctcgcagcaaacaccaaacaaaacaaacacaaaccaacaaaaattaaaacagcctgtgggttgatcccacccacaggcccattgggcgctagcactctggtatcacggtacctttgtgcgcctgttttataccccctcccccaactgtaacttagaagtaacacacaccgatcaacagtcagcgtggcacaccagccacgttttgatcaagcacttctgttaccccggactgagtatcaatagactgctcacgcggttgaaggagaaagcgttcgttatccggccaactacttcgaaaaacctagtaacaccgtggaagttgcagagtgtttcgctcagcactaccccagtgtagatcaggtcgatgagtcaccgcattccccacgggcgaccgtggcggtggctgcgttggcggcctgcccatggggaaacccatgggacgctctaatacagacatggtgcgaagagtctattgagctagttggtagtcctccggcccctgaatgcggctaatcctaactgcggagcacacaccctcaagccagagggcagtgtgtcgtaacgggcaactctgcagcggaaccgactactttgggtgtccgtgtttcattttattcctatactggctgcttatggtgacaattgagagatcgttaccatatagctattggattggccatccggtgactaatagagctattatatatccctttgttgggtttataccacttagcttgaaagaggttaaaacattacaattcattgttaagttgaatacagcaaaatggaagatgccaagaacatcaagaagggccctgctccattctaccctctggaagatggaacagccggcgagcagctgcacaaggccatgaagagatatgccctggtgcctggcacaatcgccttcacagatgcccacatcgaggtggacatcacctacgccgagtacttcgagatgtctgtgcggctggccgaagctatgaagcgctacggcctgaacaccaaccaccggatcgtcgtgtgcagcgagaacagcctgcagttcttcatgcctgtgctgggcgccctgttcatcggagttgctgtggcccctgccaacgacatctacaacgagcgcgagctgctgaacagcatgggcatctctcagcccaccgtggtgttcgtgtccaagaagggactgcagaaaatcctgaacgtgcagaagaagctgcccatcatccagaaaatcatcatcatggacagcaagaccgactaccagggcttccagagcatgtacaccttcgtgaccagccatctgccacctggcttcaacgagtacgacttcgtgcccgagagcttcgaccgggacaagacaatcgccctgatcatgaacagcagcggctctaccggactgcccaaaggtgttgccctgcctcatagaactgcctgcgtgcggtttagccacgccagagatcccatcttcggcaaccagatcatccccgacacagccatcctgagcgtggtgccttttcaccacggcttcggcatgttcaccacactgggctacctgatctgcggcttcagagtggtgctgatgtaccgcttcgaggaagaactgttcctgcggagcctgcaggactacaagatccagtctgctctgctggtgcctactctgttcagcttctttgccaagagcaccctgatcgataagtacgacctgagcaacctgcacgagatcgcctctggcggagcccctctgtctaaagaagtgggagaagccgtcgccaagcggttccatctgcctggcatcagacaaggctatggcctgaccgagacaaccagcgccattctgattacccctgagggcgacgataagcctggcgctgtgggaaaagtggtgccattcttcgaggccaaggtggtggatctggacaccggcaaaacactgggcgttaaccagaggggcgagctgtgtgttagaggccctatgatcatgagcggctacgtgaacaaccccgaggccacaaacgctctgatcgacaaggatggatggctgcacagcggcgacattgcctactgggacgaagatgagcacttcttcatcgtggaccggctgaagtccctgatcaagtacaagggctaccaggtggccccagccgagctggaatctattctgctgcaacaccccaacatcttcgatgccggcgttgcaggactgcccgatgatgatgctggcgaactgccagctgctgtggtggtgctggaacacggcaagaccatgaccgagaaagaaatcgtggactacgtggccagccaagtgaccaccgccaagaaactgagaggcggcgtggtgtttgtggacgaggtgccaaaaggcctgacaggcaagctggacgcccggaagatcagagagatcctgattaaggccaagaaaggcggcaagatcgccgtgtaatagctaactagacaaaacaccaaacaaacaagctgcgagccgctacggacttaaataattgagccttaaagaagaaattctttaagtggatgctctcaaactcagggaaacctaaatctagttatagacaaggcaatcctgagccaagccgaagtagtaattagtaagttaaaaaaacaaccaaaaaaaatctagatatcggatcccggg

SEQ ID NO: 3514 - DNA, 5057 bp, synthetic construct
  source 1..5057: mol_type = other DNA; note = Ana128 13ntIH
aggctaggtggaggctcagtgtgataagtctgcgatggtggatgcatgtgtcatggtcatagctgtttcctgtgtgaaattgttatccgctcagagggcacaatcctattccgcgctatccgacaatctccaagacattaggtggagttcagttcggcgtatggcatatgtcgctggaaagaacatgtgagcaaaaggccagcaaaaggccaggaaccgtaaaaaggccgcgttgctggcgtttttccataggctccgcccccctgacgagcatcacaaaaatcgacgctcaagtcagaggtggcgaaacccgacaggactataaagataccaggcgtttccccctggaagctccctcgtgcgctctcctgttccgaccctgccgcttaccggatacctgtccgcctttctcccttcgggaagcgtggcgctttctcatagctcacgctgtaggtatctcagttcggtgtaggtcgttcgctccaagctgggctgtgtgcacgaaccccccgttcagcccgaccgctgcgccttatccggtaactatcgtcttgagtccaacccggtaagacacgacttatcgccactggcagcagccactggtaacaggattagcagagcgaggtatgtaggcggtgctacagagttcttgaagtggtggcctaactacggctacactagaagaacagtatttggtatctgcgctctgctgaagccagttaccttcggaaaaagagttggtagctcttgatccggcaaacaaaccaccgctggtagcggtggtttttttgtttgcaagcagcagattacgcgcagaaaaaaaggatctcaagaagatcctttgatcttttctacggggtctgacgctctattcaacaaagccgccgtcccgtcaagtcagcgtaaatgggtagggggcttcaaatcgtcctcgtgataccaattcggagcctgcttttttgtacaaacttgttgataatggcaattcaaggatcttcacctagatccttttaaattaaaaatgaagttttaaatcaatctaaagtatatatgagtaaacttggtctgacagttaccaatgcttaatcagtgaggcacctatctcagcgatctgtctatttcgttcatccatagttgcctgactccccgtcgtgtagataactacgatacgggagggcttaccatctggccccagtgctgcaatgataccgcgagagccacgctcaccggctccagatttatcagcaataaaccagccagccggaagggccgagcgcagaagtggtcctgcaactttatccgcctccatccagtctattaattgttgccgggaagctagagtaagtagttcgccagttaatagtttgcgcaacgttgttgccattgctacaggcatcgtggtgtcacgctcgtcgtttggtatggcttcattcagctccggttcccaacgatcaaggcgagttacatgatcccccatgttgtgcaaaaaagcggttagctccttcggtcctccgatcgttgtcagaagtaagttggccgcagtgttatcactcatggttatggcagcactgcataattctcttactgtcatgccatccgtaagatgcttttctgtgactggtgagtactcaaccaagtcattctgagaatagtgtatgcggcgaccgagttgctcttgcccggcgtcaatacgggataataccgcgccacatagcagaactttaaaagtgctcatcattggaaaacgttcttcggggcgaaaactctcaaggatcttaccgctgttgagatccagttcgatgtaacccactcgtgcacccaactgatcttcagcatcttttactttcaccagcgtttctgggtgagcaaaaacaggaaggcaaaatgccgcaaaaaagggaataagggcgacacggaaatgttgaatactcatactcttcctttttcaatattattgaagcatttatcagggttattgtctcatgagcggatacatatttgaatgtatttagaaaaataaacaaataggggttccgcgcacatttccccgaaaagtgccagatacctgaaacaaaacccatcgtacggccaaggaagtctccaataactgtgatccaccacaagcgccagggttttcccagtcacgacgttgtaaaacgacggccagtcatgcataatccgcacgcatctggaataaggaagtgccattccgcctgaccttaatacgactcactatagggagaccctcgaaaaaaaacacaaacacccaatagatgacttacaactaatcggaaggtgcagagactcgacgggagctaccctaacgtcaagacgagggtaaagagagagtccaattctcaaagccaataggcagtagcgaaagctgcaagagaatgaaaatccgtcggctcgcagcggaaacaccaaacaaaacaaacacaaaccaacaaaaattaaaacagcctgtgggttgatcccacccacaggcccattgggcgctagcactctggtatcacggtacctttgtgcgcctgttttataccccctcccccaactgtaacttagaagtaacacacaccgatcaacagtcagcgtggcacaccagccacgttttgatcaagcacttctgttaccccggactgagtatcaatagactgctcacgcggttgaaggagaaagcgttcgttatccggccaactacttcgaaaaacctagtaacaccgtggaagttgcagagtgtttcgctcagcactaccccagtgtagatcaggtcgatgagtcaccgcattccccacgggcgaccgtggcggtggctgcgttggcggcctgcccatggggaaacccatgggacgctctaatacagacatggtgcgaagagtctattgagctagttggtagtcctccggcccctgaatgcggctaatcctaactgcggagcacacaccctcaagccagagggcagtgtgtcgtaacgggcaactctgcagcggaaccgactactttgggtgtccgtgtttcattttattcctatactggctgcttatggtgacaattgagagatcgttaccatatagctattggattggccatccggtgactaatagagctattatatatccctttgttgggtttataccacttagcttgaaagaggttaaaacattacaattcattgttaagttgaatacagcaaaatggaagatgccaagaacatcaagaagggccctgctccattctaccctctggaagatggaacagccggcgagcagctgcacaaggccatgaagagatatgccctggtgcctggcacaatcgccttcacagatgcccacatcgaggtggacatcacctacgccgagtacttcgagatgtctgtgcggctggccgaagctatgaagcgctacggcctgaacaccaaccaccggatcgtcgtgtgcagcgagaacagcctgcagttcttcatgcctgtgctgggcgccctgttcatcggagttgctgtggcccctgccaacgacatctacaacgagcgcgagctgctgaacagcatgggcatctctcagcccaccgtggtgttcgtgtccaagaagggactgcagaaaatcctgaacgtgcagaagaagctgcccatcatccagaaaatcatcatcatggacagcaagaccgactaccagggcttccagagcatgtacaccttcgtgaccagccatctgccacctggcttcaacgagtacgacttcgtgcccgagagcttcgaccgggacaagacaatcgccctgatcatgaacagcagcggctctaccggactgcccaaaggtgttgccctgcctcatagaactgcctgcgtgcggtttagccacgccagagatcccatcttcggcaaccagatcatccccgacacagccatcctgagcgtggtgccttttcaccacggcttcggcatgttcaccacactgggctacctgatctgcggcttcagagtggtgctgatgtaccgcttcgaggaagaactgttcctgcggagcctgcaggactacaagatccagtctgctctgctggtgcctactctgttcagcttctttgccaagagcaccctgatcgataagtacgacctgagcaacctgcacgagatcgcctctggcggagcccctctgtctaaagaagtgggagaagccgtcgccaagcggttccatctgcctggcatcagacaaggctatggcctgaccgagacaaccagcgccattctgattacccctgagggcgacgataagcctggcgctgtgggaaaagtggtgccattcttcgaggccaaggtggtggatctggacaccggcaaaacactgggcgttaaccagaggggcgagctgtgtgttagaggccctatgatcatgagcggctacgtgaacaaccccgaggccacaaacgctctgatcgacaaggatggatggctgcacagcggcgacattgcctactgggacgaagatgagcacttcttcatcgtggaccggctgaagtccctgatcaagtacaagggctaccaggtggccccagccgagctggaatctattctgctgcaacaccccaacatcttcgatgccggcgttgcaggactgcccgatgatgatgctggcgaactgccagctgctgtggtggtgctggaacacggcaagaccatgaccgagaaagaaatcgtggactacgtggccagccaagtgaccaccgccaagaaactgagaggcggcgtggtgtttgtggacgaggtgccaaaaggcctgacaggcaagctggacgcccggaagatcagagagatcctgattaaggccaagaaaggcggcaagatcgccgtgtaatagctaactagacaaaacaccaaacaaacaaccgctgcgagccgacggacttaaataattgagccttaaagaagaaattctttaagtggatgctctcaaactcagggaaacctaaatctagttatagacaaggcaatcctgagccaagccgaagtagtaattagtaagttaaaaaaacaaccaaaaaaaatctagatatcggatcccggg

SEQ ID NO: 3515 - DNA, 5061 bp, synthetic construct
  source 1..5061: mol_type = other DNA; note = Ana128 15ntIH
aggctaggtggaggctcagtgtgataagtctgcgatggtggatgcatgtgtcatggtcatagctgtttcctgtgtgaaattgttatccgctcagagggcacaatcctattccgcgctatccgacaatctccaagacattaggtggagttcagttcggcgtatggcatatgtcgctggaaagaacatgtgagcaaaaggccagcaaaaggccaggaaccgtaaaaaggccgcgttgctggcgtttttccataggctccgcccccctgacgagcatcacaaaaatcgacgctcaagtcagaggtggcgaaacccgacaggactataaagataccaggcgtttccccctggaagctccctcgtgcgctctcctgttccgaccctgccgcttaccggatacctgtccgcctttctcccttcgggaagcgtggcgctttctcatagctcacgctgtaggtatctcagttcggtgtaggtcgttcgctccaagctgggctgtgtgcacgaaccccccgttcagcccgaccgctgcgccttatccggtaactatcgtcttgagtccaacccggtaagacacgacttatcgccactggcagcagccactggtaacaggattagcagagcgaggtatgtaggcggtgctacagagttcttgaagtggtggcctaactacggctacactagaagaacagtatttggtatctgcgctctgctgaagccagttaccttcggaaaaagagttggtagctcttgatccggcaaacaaaccaccgctggtagcggtggtttttttgtttgcaagcagcagattacgcgcagaaaaaaaggatctcaagaagatcctttgatcttttctacggggtctgacgctctattcaacaaagccgccgtcccgtcaagtcagcgtaaatgggtagggggcttcaaatcgtcctcgtgataccaattcggagcctgcttttttgtacaaacttgttgataatggcaattcaaggatcttcacctagatccttttaaattaaaaatgaagttttaaatcaatctaaagtatatatgagtaaacttggtctgacagttaccaatgcttaatcagtgaggcacctatctcagcgatctgtctatttcgttcatccatagttgcctgactccccgtcgtgtagataactacgatacgggagggcttaccatctggccccagtgctgcaatgataccgcgagagccacgctcaccggctccagatttatcagcaataaaccagccagccggaagggccgagcgcagaagtggtcctgcaactttatccgcctccatccagtctattaattgttgccgggaagctagagtaagtagttcgccagttaatagtttgcgcaacgttgttgccattgctacaggcatcgtggtgtcacgctcgtcgtttggtatggcttcattcagctccggttcccaacgatcaaggcgagttacatgatcccccatgttgtgcaaaaaagcggttagctccttcggtcctccgatcgttgtcagaagtaagttggccgcagtgttatcactcatggttatggcagcactgcataattctcttactgtcatgccatccgtaagatgcttttctgtgactggtgagtactcaaccaagtcattctgagaatagtgtatgcggcgaccgagttgctcttgcccggcgtcaatacgggataataccgcgccacatagcagaactttaaaagtgctcatcattggaaaacgttcttcggggcgaaaactctcaaggatcttaccgctgttgagatccagttcgatgtaacccactcgtgcacccaactgatcttcagcatcttttactttcaccagcgtttctgggtgagcaaaaacaggaaggcaaaatgccgcaaaaaagggaataagggcgacacggaaatgttgaatactcatactcttcctttttcaatattattgaagcatttatcagggttattgtctcatgagcggatacatatttgaatgtatttagaaaaataaacaaataggggttccgcgcacatttccccgaaaagtgccagatacctgaaacaaaacccatcgtacggccaaggaagtctccaataactgtgatccaccacaagcgccagggttttcccagtcacgacgttgtaaaacgacggccagtcatgcataatccgcacgcatctggaataaggaagtgccattccgcctgaccttaatacgactcactatagggagaccctcgaaaaaaaacacaaacacccaatagatgacttacaactaatcggaaggtgcagagactcgacgggagctaccctaacgtcaagacgagggtaaagagagagtccaattctcaaagccaataggcagtagcgaaagctgcaagagaatgaaaatccgtgagcacgccggcgccaaacaccaaacaaaacaaacacaaaccaacaaaaattaaaacagcctgtgggttgatcccacccacaggcccattgggcgctagcactctggtatcacggtacctttgtgcgcctgttttataccccctcccccaactgtaacttagaagtaacacacaccgatcaacagtcagcgtggcacaccagccacgttttgatcaagcacttctgttaccccggactgagtatcaatagactgctcacgcggttgaaggagaaagcgttcgttatccggccaactacttcgaaaaacctagtaacaccgtggaagttgcagagtgtttcgctcagcactaccccagtgtagatcaggtcgatgagtcaccgcattccccacgggcgaccgtggcggtggctgcgttggcggcctgcccatggggaaacccatgggacgctctaatacagacatggtgcgaagagtctattgagctagttggtagtcctccggcccctgaatgcggctaatcctaactgcggagcacacaccctcaagccagagggcagtgtgtcgtaacgggcaactctgcagcggaaccgactactttgggtgtccgtgtttcattttattcctatactggctgcttatggtgacaattgagagatcgttaccatatagctattggattggccatccggtgactaatagagctattatatatccctttgttgggtttataccacttagcttgaaagaggttaaaacattacaattcattgttaagttgaatacagcaaaatggaagatgccaagaacatcaagaagggccctgctccattctaccctctggaagatggaacagccggcgagcagctgcacaaggccatgaagagatatgccctggtgcctggcacaatcgccttcacagatgcccacatcgaggtggacatcacctacgccgagtacttcgagatgtctgtgcggctggccgaagctatgaagcgctacggcctgaacaccaaccaccggatcgtcgtgtgcagcgagaacagcctgcagttcttcatgcctgtgctgggcgccctgttcatcggagttgctgtggcccctgccaacgacatctacaacgagcgcgagctgctgaacagcatgggcatctctcagcccaccgtggtgttcgtgtccaagaagggactgcagaaaatcctgaacgtgcagaagaagctgcccatcatccagaaaatcatcatcatggacagcaagaccgactaccagggcttccagagcatgtacaccttcgtgaccagccatctgccacctggcttcaacgagtacgacttcgtgcccgagagcttcgaccgggacaagacaatcgccctgatcatgaacagcagcggctctaccggactgcccaaaggtgttgccctgcctcatagaactgcctgcgtgcggtttagccacgccagagatcccatcttcggcaaccagatcatccccgacacagccatcctgagcgtggtgccttttcaccacggcttcggcatgttcaccacactgggctacctgatctgcggcttcagagtggtgctgatgtaccgcttcgaggaagaactgttcctgcggagcctgcaggactacaagatccagtctgctctgctggtgcctactctgttcagcttctttgccaagagcaccctgatcgataagtacgacctgagcaacctgcacgagatcgcctctggcggagcccctctgtctaaagaagtgggagaagccgtcgccaagcggttccatctgcctggcatcagacaaggctatggcctgaccgagacaaccagcgccattctgattacccctgagggcgacgataagcctggcgctgtgggaaaagtggtgccattcttcgaggccaaggtggtggatctggacaccggcaaaacactgggcgttaaccagaggggcgagctgtgtgttagaggccctatgatcatgagcggctacgtgaacaaccccgaggccacaaacgctctgatcgacaaggatggatggctgcacagcggcgacattgcctactgggacgaagatgagcacttcttcatcgtggaccggctgaagtccctgatcaagtacaagggctaccaggtggccccagccgagctggaatctattctgctgcaacaccccaacatcttcgatgccggcgttgcaggactgcccgatgatgatgctggcgaactgccagctgctgtggtggtgctggaacacggcaagaccatgaccgagaaagaaatcgtggactacgtggccagccaagtgaccaccgccaagaaactgagaggcggcgtggtgtttgtggacgaggtgccaaaaggcctgacaggcaagctggacgcccggaagatcagagagatcctgattaaggccaagaaaggcggcaagatcgccgtgtaatagctaactagacaaaacaccaaacaaacaaggcgccggcgtgctcacggacttaaataattgagccttaaagaagaaattctttaagtggatgctctcaaactcagggaaacctaaatctagttatagacaaggcaatcctgagccaagccgaagtagtaattagtaagttaaaaaaacaaccaaaaaaaatctagatatcggatcccggg

SEQ ID NO: 3516 - DNA, 5111 bp, synthetic construct
  source 1..5111: mol_type = other DNA; note = Ana128 EH T75L30
aggctaggtggaggctcagtgtgataagtctgcgatggtggatgcatgtgtcatggtcatagctgtttcctgtgtgaaattgttatccgctcagagggcacaatcctattccgcgctatccgacaatctccaagacattaggtggagttcagttcggcgtatggcatatgtcgctggaaagaacatgtgagcaaaaggccagcaaaaggccaggaaccgtaaaaaggccgcgttgctggcgtttttccataggctccgcccccctgacgagcatcacaaaaatcgacgctcaagtcagaggtggcgaaacccgacaggactataaagataccaggcgtttccccctggaagctccctcgtgcgctctcctgttccgaccctgccgcttaccggatacctgtccgcctttctcccttcgggaagcgtggcgctttctcatagctcacgctgtaggtatctcagttcggtgtaggtcgttcgctccaagctgggctgtgtgcacgaaccccccgttcagcccgaccgctgcgccttatccggtaactatcgtcttgagtccaacccggtaagacacgacttatcgccactggcagcagccactggtaacaggattagcagagcgaggtatgtaggcggtgctacagagttcttgaagtggtggcctaactacggctacactagaagaacagtatttggtatctgcgctctgctgaagccagttaccttcggaaaaagagttggtagctcttgatccggcaaacaaaccaccgctggtagcggtggtttttttgtttgcaagcagcagattacgcgcagaaaaaaaggatctcaagaagatcctttgatcttttctacggggtctgacgctctattcaacaaagccgccgtcccgtcaagtcagcgtaaatgggtagggggcttcaaatcgtcctcgtgataccaattcggagcctgcttttttgtacaaacttgttgataatggcaattcaaggatcttcacctagatccttttaaattaaaaatgaagttttaaatcaatctaaagtatatatgagtaaacttggtctgacagttaccaatgcttaatcagtgaggcacctatctcagcgatctgtctatttcgttcatccatagttgcctgactccccgtcgtgtagataactacgatacgggagggcttaccatctggccccagtgctgcaatgataccgcgagagccacgctcaccggctccagatttatcagcaataaaccagccagccggaagggccgagcgcagaagtggtcctgcaactttatccgcctccatccagtctattaattgttgccgggaagctagagtaagtagttcgccagttaatagtttgcgcaacgttgttgccattgctacaggcatcgtggtgtcacgctcgtcgtttggtatggcttcattcagctccggttcccaacgatcaaggcgagttacatgatcccccatgttgtgcaaaaaagcggttagctccttcggtcctccgatcgttgtcagaagtaagttggccgcagtgttatcactcatggttatggcagcactgcataattctcttactgtcatgccatccgtaagatgcttttctgtgactggtgagtactcaaccaagtcattctgagaatagtgtatgcggcgaccgagttgctcttgcccggcgtcaatacgggataataccgcgccacatagcagaactttaaaagtgctcatcattggaaaacgttcttcggggcgaaaactctcaaggatcttaccgctgttgagatccagttcgatgtaacccactcgtgcacccaactgatcttcagcatcttttactttcaccagcgtttctgggtgagcaaaaacaggaaggcaaaatgccgcaaaaaagggaataagggcgacacggaaatgttgaatactcatactcttcctttttcaatattattgaagcatttatcagggttattgtctcatgagcggatacatatttgaatgtatttagaaaaataaacaaataggggttccgcgcacatttccccgaaaagtgccagatacctgaaacaaaacccatcgtacggccaaggaagtctccaataactgtgatccaccacaagcgccagggttttcccagtcacgacgttgtaaaacgacggccagtcatgcataatccgcacgcatctggaataaggaagtgccattccgcctgaccttaatacgactcactatagggagaccctcgaaaaaaaagctcgcactggccggaagctcgtcggagcgcacaaacacccaatagatgacttacaactaatcggaaggtgcagagactcgacgggagctaccctaacgtcaagacgagggtaaagagagagtccaattctcaaagccaataggcagtagcgaaagctgcaagagaatgaaaatccgtggctcgcagcaaacaccaaacaaaacaaacacaaaccaacaaaaattaaaacagcctgtgggttgatcccacccacaggcccattgggcgctagcactctggtatcacggtacctttgtgcgcctgttttataccccctcccccaactgtaacttagaagtaacacacaccgatcaacagtcagcgtggcacaccagccacgttttgatcaagcacttctgttaccccggactgagtatcaatagactgctcacgcggttgaaggagaaagcgttcgttatccggccaactacttcgaaaaacctagtaacaccgtggaagttgcagagtgtttcgctcagcactaccccagtgtagatcaggtcgatgagtcaccgcattccccacgggcgaccgtggcggtggctgcgttggcggcctgcccatggggaaacccatgggacgctctaatacagacatggtgcgaagagtctattgagctagttggtagtcctccggcccctgaatgcggctaatcctaactgcggagcacacaccctcaagccagagggcagtgtgtcgtaacgggcaactctgcagcggaaccgactactttgggtgtccgtgtttcattttattcctatactggctgcttatggtgacaattgagagatcgttaccatatagctattggattggccatccggtgactaatagagctattatatatccctttgttgggtttataccacttagcttgaaagaggttaaaacattacaattcattgttaagttgaatacagcaaaatggaagatgccaagaacatcaagaagggccctgctccattctaccctctggaagatggaacagccggcgagcagctgcacaaggccatgaagagatatgccctggtgcctggcacaatcgccttcacagatgcccacatcgaggtggacatcacctacgccgagtacttcgagatgtctgtgcggctggccgaagctatgaagcgctacggcctgaacaccaaccaccggatcgtcgtgtgcagcgagaacagcctgcagttcttcatgcctgtgctgggcgccctgttcatcggagttgctgtggcccctgccaacgacatctacaacgagcgcgagctgctgaacagcatgggcatctctcagcccaccgtggtgttcgtgtccaagaagggactgcagaaaatcctgaacgtgcagaagaagctgcccatcatccagaaaatcatcatcatggacagcaagaccgactaccagggcttccagagcatgtacaccttcgtgaccagccatctgccacctggcttcaacgagtacgacttcgtgcccgagagcttcgaccgggacaagacaatcgccctgatcatgaacagcagcggctctaccggactgcccaaaggtgttgccctgcctcatagaactgcctgcgtgcggtttagccacgccagagatcccatcttcggcaaccagatcatccccgacacagccatcctgagcgtggtgccttttcaccacggcttcggcatgttcaccacactgggctacctgatctgcggcttcagagtggtgctgatgtaccgcttcgaggaagaactgttcctgcggagcctgcaggactacaagatccagtctgctctgctggtgcctactctgttcagcttctttgccaagagcaccctgatcgataagtacgacctgagcaacctgcacgagatcgcctctggcggagcccctctgtctaaagaagtgggagaagccgtcgccaagcggttccatctgcctggcatcagacaaggctatggcctgaccgagacaaccagcgccattctgattacccctgagggcgacgataagcctggcgctgtgggaaaagtggtgccattcttcgaggccaaggtggtggatctggacaccggcaaaacactgggcgttaaccagaggggcgagctgtgtgttagaggccctatgatcatgagcggctacgtgaacaaccccgaggccacaaacgctctgatcgacaaggatggatggctgcacagcggcgacattgcctactgggacgaagatgagcacttcttcatcgtggaccggctgaagtccctgatcaagtacaagggctaccaggtggccccagccgagctggaatctattctgctgcaacaccccaacatcttcgatgccggcgttgcaggactgcccgatgatgatgctggcgaactgccagctgctgtggtggtgctggaacacggcaagaccatgaccgagaaagaaatcgtggactacgtggccagccaagtgaccaccgccaagaaactgagaggcggcgtggtgtttgtggacgaggtgccaaaaggcctgacaggcaagctggacgcccggaagatcagagagatcctgattaaggccaagaaaggcggcaagatcgccgtgtaatagctaactagacaaaacaccaaacaaacaagctgcgagccacggacttaaataattgagccttaaagaagaaattctttaagtggatgctctcaaactcagggaaacctaaatctagttatagacaaggcaatcctgagccaagccgaagtagtaattagtaagttaaaaaaacaacccgctccgacgagcttccggccagtgcgagcaaaaaaaatctagatatcggatcccggg

SEQ ID NO: 3517 - DNA, 5076 bp, synthetic construct
  source 1..5076: mol_type = other DNA; note = Ana128 40nt IS
aggctaggtggaggctcagtgtgataagtctgcgatggtggatgcatgtgtcatggtcatagctgtttcctgtgtgaaattgttatccgctcagagggcacaatcctattccgcgctatccgacaatctccaagacattaggtggagttcagttcggcgtatggcatatgtcgctggaaagaacatgtgagcaaaaggccagcaaaaggccaggaaccgtaaaaaggccgcgttgctggcgtttttccataggctccgcccccctgacgagcatcacaaaaatcgacgctcaagtcagaggtggcgaaacccgacaggactataaagataccaggcgtttccccctggaagctccctcgtgcgctctcctgttccgaccctgccgcttaccggatacctgtccgcctttctcccttcgggaagcgtggcgctttctcatagctcacgctgtaggtatctcagttcggtgtaggtcgttcgctccaagctgggctgtgtgcacgaaccccccgttcagcccgaccgctgcgccttatccggtaactatcgtcttgagtccaacccggtaagacacgacttatcgccactggcagcagccactggtaacaggattagcagagcgaggtatgtaggcggtgctacagagttcttgaagtggtggcctaactacggctacactagaagaacagtatttggtatctgcgctctgctgaagccagttaccttcggaaaaagagttggtagctcttgatccggcaaacaaaccaccgctggtagcggtggtttttttgtttgcaagcagcagattacgcgcagaaaaaaaggatctcaagaagatcctttgatcttttctacggggtctgacgctctattcaacaaagccgccgtcccgtcaagtcagcgtaaatgggtagggggcttcaaatcgtcctcgtgataccaattcggagcctgcttttttgtacaaacttgttgataatggcaattcaaggatcttcacctagatccttttaaattaaaaatgaagttttaaatcaatctaaagtatatatgagtaaacttggtctgacagttaccaatgcttaatcagtgaggcacctatctcagcgatctgtctatttcgttcatccatagttgcctgactccccgtcgtgtagataactacgatacgggagggcttaccatctggccccagtgctgcaatgataccgcgagagccacgctcaccggctccagatttatcagcaataaaccagccagccggaagggccgagcgcagaagtggtcctgcaactttatccgcctccatccagtctattaattgttgccgggaagctagagtaagtagttcgccagttaatagtttgcgcaacgttgttgccattgctacaggcatcgtggtgtcacgctcgtcgtttggtatggcttcattcagctccggttcccaacgatcaaggcgagttacatgatcccccatgttgtgcaaaaaagcggttagctccttcggtcctccgatcgttgtcagaagtaagttggccgcagtgttatcactcatggttatggcagcactgcataattctcttactgtcatgccatccgtaagatgcttttctgtgactggtgagtactcaaccaagtcattctgagaatagtgtatgcggcgaccgagttgctcttgcccggcgtcaatacgggataataccgcgccacatagcagaactttaaaagtgctcatcattggaaaacgttcttcggggcgaaaactctcaaggatcttaccgctgttgagatccagttcgatgtaacccactcgtgcacccaactgatcttcagcatcttttactttcaccagcgtttctgggtgagcaaaaacaggaaggcaaaatgccgcaaaaaagggaataagggcgacacggaaatgttgaatactcatactcttcctttttcaatattattgaagcatttatcagggttattgtctcatgagcggatacatatttgaatgtatttagaaaaataaacaaataggggttccgcgcacatttccccgaaaagtgccagatacctgaaacaaaacccatcgtacggccaaggaagtctccaataactgtgatccaccacaagcgccagggttttcccagtcacgacgttgtaaaacgacggccagtcatgcataatccgcacgcatctggaataaggaagtgccattccgcctgaccttaatacgactcactatagggagaccctcgaaaaaaaacacaaacacccaatagatgacttacaactaatcggaaggtgcagagactcgacgggagctaccctaacgtcaagacgagggtaaagagagagtccaattctcaaagccaataggcagtagcgaaagctgcaagagaatgaaaatccgtggctcgcagcaataatgccacactaagagaacaaacaaagagctaagcaattaaaacagcctgtgggttgatcccacccacaggcccattgggcgctagcactctggtatcacggtacctttgtgcgcctgttttataccccctcccccaactgtaacttagaagtaacacacaccgatcaacagtcagcgtggcacaccagccacgttttgatcaagcacttctgttaccccggactgagtatcaatagactgctcacgcggttgaaggagaaagcgttcgttatccggccaactacttcgaaaaacctagtaacaccgtggaagttgcagagtgtttcgctcagcactaccccagtgtagatcaggtcgatgagtcaccgcattccccacgggcgaccgtggcggtggctgcgttggcggcctgcccatggggaaacccatgggacgctctaatacagacatggtgcgaagagtctattgagctagttggtagtcctccggcccctgaatgcggctaatcctaactgcggagcacacaccctcaagccagagggcagtgtgtcgtaacgggcaactctgcagcggaaccgactactttgggtgtccgtgtttcattttattcctatactggctgcttatggtgacaattgagagatcgttaccatatagctattggattggccatccggtgactaatagagctattatatatccctttgttgggtttataccacttagcttgaaagaggttaaaacattacaattcattgttaagttgaatacagcaaaatggaagatgccaagaacatcaagaagggccctgctccattctaccctctggaagatggaacagccggcgagcagctgcacaaggccatgaagagatatgccctggtgcctggcacaatcgccttcacagatgcccacatcgaggtggacatcacctacgccgagtacttcgagatgtctgtgcggctggccgaagctatgaagcgctacggcctgaacaccaaccaccggatcgtcgtgtgcagcgagaacagcctgcagttcttcatgcctgtgctgggcgccctgttcatcggagttgctgtggcccctgccaacgacatctacaacgagcgcgagctgctgaacagcatgggcatctctcagcccaccgtggtgttcgtgtccaagaagggactgcagaaaatcctgaacgtgcagaagaagctgcccatcatccagaaaatcatcatcatggacagcaagaccgactaccagggcttccagagcatgtacaccttcgtgaccagccatctgccacctggcttcaacgagtacgacttcgtgcccgagagcttcgaccgggacaagacaatcgccctgatcatgaacagcagcggctctaccggactgcccaaaggtgttgccctgcctcatagaactgcctgcgtgcggtttagccacgccagagatcccatcttcggcaaccagatcatccccgacacagccatcctgagcgtggtgccttttcaccacggcttcggcatgttcaccacactgggctacctgatctgcggcttcagagtggtgctgatgtaccgcttcgaggaagaactgttcctgcggagcctgcaggactacaagatccagtctgctctgctggtgcctactctgttcagcttctttgccaagagcaccctgatcgataagtacgacctgagcaacctgcacgagatcgcctctggcggagcccctctgtctaaagaagtgggagaagccgtcgccaagcggttccatctgcctggcatcagacaaggctatggcctgaccgagacaaccagcgccattctgattacccctgagggcgacgataagcctggcgctgtgggaaaagtggtgccattcttcgaggccaaggtggtggatctggacaccggcaaaacactgggcgttaaccagaggggcgagctgtgtgttagaggccctatgatcatgagcggctacgtgaacaaccccgaggccacaaacgctctgatcgacaaggatggatggctgcacagcggcgacattgcctactgggacgaagatgagcacttcttcatcgtggaccggctgaagtccctgatcaagtacaagggctaccaggtggccccagccgagctggaatctattctgctgcaacaccccaacatcttcgatgccggcgttgcaggactgcccgatgatgatgctggcgaactgccagctgctgtggtggtgctggaacacggcaagaccatgaccgagaaagaaatcgtggactacgtggccagccaagtgaccaccgccaagaaactgagaggcggcgtggtgtttgtggacgaggtgccaaaaggcctgacaggcaagctggacgcccggaagatcagagagatcctgattaaggccaagaaaggcggcaagatcgccgtgtaatagctaactagaataatgacacacgacaagaacaatcataccactaagcaagctgcgagccacggacttaaataattgagccttaaagaagaaattctttaagtggatgctctcaaactcagggaaacctaaatctagttatagacaaggcaatcctgagccaagccgaagtagtaattagtaagttaaaaaaacaaccaaaaaaaatctagatatcggatcccggg

SEQ ID NO: 3518 - DNA, 5036 bp, synthetic construct
  source 1..5036: mol_type = other DNA; note = Ana128 20nt IS
aggctaggtggaggctcagtgtgataagtctgcgatggtggatgcatgtgtcatggtcatagctgtttcctgtgtgaaattgttatccgctcagagggcacaatcctattccgcgctatccgacaatctccaagacattaggtggagttcagttcggcgtatggcatatgtcgctggaaagaacatgtgagcaaaaggccagcaaaaggccaggaaccgtaaaaaggccgcgttgctggcgtttttccataggctccgcccccctgacgagcatcacaaaaatcgacgctcaagtcagaggtggcgaaacccgacaggactataaagataccaggcgtttccccctggaagctccctcgtgcgctctcctgttccgaccctgccgcttaccggatacctgtccgcctttctcccttcgggaagcgtggcgctttctcatagctcacgctgtaggtatctcagttcggtgtaggtcgttcgctccaagctgggctgtgtgcacgaaccccccgttcagcccgaccgctgcgccttatccggtaactatcgtcttgagtccaacccggtaagacacgacttatcgccactggcagcagccactggtaacaggattagcagagcgaggtatgtaggcggtgctacagagttcttgaagtggtggcctaactacggctacactagaagaacagtatttggtatctgcgctctgctgaagccagttaccttcggaaaaagagttggtagctcttgatccggcaaacaaaccaccgctggtagcggtggtttttttgtttgcaagcagcagattacgcgcagaaaaaaaggatctcaagaagatcctttgatcttttctacggggtctgacgctctattcaacaaagccgccgtcccgtcaagtcagcgtaaatgggtagggggcttcaaatcgtcctcgtgataccaattcggagcctgcttttttgtacaaacttgttgataatggcaattcaaggatcttcacctagatccttttaaattaaaaatgaagttttaaatcaatctaaagtatatatgagtaaacttggtctgacagttaccaatgcttaatcagtgaggcacctatctcagcgatctgtctatttcgttcatccatagttgcctgactccccgtcgtgtagataactacgatacgggagggcttaccatctggccccagtgctgcaatgataccgcgagagccacgctcaccggctccagatttatcagcaataaaccagccagccggaagggccgagcgcagaagtggtcctgcaactttatccgcctccatccagtctattaattgttgccgggaagctagagtaagtagttcgccagttaatagtttgcgcaacgttgttgccattgctacaggcatcgtggtgtcacgctcgtcgtttggtatggcttcattcagctccggttcccaacgatcaaggcgagttacatgatcccccatgttgtgcaaaaaagcggttagctccttcggtcctccgatcgttgtcagaagtaagttggccgcagtgttatcactcatggttatggcagcactgcataattctcttactgtcatgccatccgtaagatgcttttctgtgactggtgagtactcaaccaagtcattctgagaatagtgtatgcggcgaccgagttgctcttgcccggcgtcaatacgggataataccgcgccacatagcagaactttaaaagtgctcatcattggaaaacgttcttcggggcgaaaactctcaaggatcttaccgctgttgagatccagttcgatgtaacccactcgtgcacccaactgatcttcagcatcttttactttcaccagcgtttctgggtgagcaaaaacaggaaggcaaaatgccgcaaaaaagggaataagggcgacacggaaatgttgaatactcatactcttcctttttcaatattattgaagcatttatcagggttattgtctcatgagcggatacatatttgaatgtatttagaaaaataaacaaataggggttccgcgcacatttccccgaaaagtgccagatacctgaaacaaaacccatcgtacggccaaggaagtctccaataactgtgatccaccacaagcgccagggttttcccagtcacgacgttgtaaaacgacggccagtcatgcataatccgcacgcatctggaataaggaagtgccattccgcctgaccttaatacgactcactatagggagaccctcgaaaaaaaacacaaacacccaatagatgacttacaactaatcggaaggtgcagagactcgacgggagctaccctaacgtcaagacgagggtaaagagagagtccaattctcaaagccaataggcagtagcgaaagctgcaagagaatgaaaatccgtggctcgcagcagatccactacaagtaagatttaaaacagcctgtgggttgatcccacccacaggcccattgggcgctagcactctggtatcacggtacctttgtgcgcctgttttataccccctcccccaactgtaacttagaagtaacacacaccgatcaacagtcagcgtggcacaccagccacgttttgatcaagcacttctgttaccccggactgagtatcaatagactgctcacgcggttgaaggagaaagcgttcgttatccggccaactacttcgaaaaacctagtaacaccgtggaagttgcagagtgtttcgctcagcactaccccagtgtagatcaggtcgatgagtcaccgcattccccacgggcgaccgtggcggtggctgcgttggcggcctgcccatggggaaacccatgggacgctctaatacagacatggtgcgaagagtctattgagctagttggtagtcctccggcccctgaatgcggctaatcctaactgcggagcacacaccctcaagccagagggcagtgtgtcgtaacgggcaactctgcagcggaaccgactactttgggtgtccgtgtttcattttattcctatactggctgcttatggtgacaattgagagatcgttaccatatagctattggattggccatccggtgactaatagagctattatatatccctttgttgggtttataccacttagcttgaaagaggttaaaacattacaattcattgttaagttgaatacagcaaaatggaagatgccaagaacatcaagaagggccctgctccattctaccctctggaagatggaacagccggcgagcagctgcacaaggccatgaagagatatgccctggtgcctggcacaatcgccttcacagatgcccacatcgaggtggacatcacctacgccgagtacttcgagatgtctgtgcggctggccgaagctatgaagcgctacggcctgaacaccaaccaccggatcgtcgtgtgcagcgagaacagcctgcagttcttcatgcctgtgctgggcgccctgttcatcggagttgctgtggcccctgccaacgacatctacaacgagcgcgagctgctgaacagcatgggcatctctcagcccaccgtggtgttcgtgtccaagaagggactgcagaaaatcctgaacgtgcagaagaagctgcccatcatccagaaaatcatcatcatggacagcaagaccgactaccagggcttccagagcatgtacaccttcgtgaccagccatctgccacctggcttcaacgagtacgacttcgtgcccgagagcttcgaccgggacaagacaatcgccctgatcatgaacagcagcggctctaccggactgcccaaaggtgttgccctgcctcatagaactgcctgcgtgcggtttagccacgccagagatcccatcttcggcaaccagatcatccccgacacagccatcctgagcgtggtgccttttcaccacggcttcggcatgttcaccacactgggctacctgatctgcggcttcagagtggtgctgatgtaccgcttcgaggaagaactgttcctgcggagcctgcaggactacaagatccagtctgctctgctggtgcctactctgttcagcttctttgccaagagcaccctgatcgataagtacgacctgagcaacctgcacgagatcgcctctggcggagcccctctgtctaaagaagtgggagaagccgtcgccaagcggttccatctgcctggcatcagacaaggctatggcctgaccgagacaaccagcgccattctgattacccctgagggcgacgataagcctggcgctgtgggaaaagtggtgccattcttcgaggccaaggtggtggatctggacaccggcaaaacactgggcgttaaccagaggggcgagctgtgtgttagaggccctatgatcatgagcggctacgtgaacaaccccgaggccacaaacgctctgatcgacaaggatggatggctgcacagcggcgacattgcctactgggacgaagatgagcacttcttcatcgtggaccggctgaagtccctgatcaagtacaagggctaccaggtggccccagccgagctggaatctattctgctgcaacaccccaacatcttcgatgccggcgttgcaggactgcccgatgatgatgctggcgaactgccagctgctgtggtggtgctggaacacggcaagaccatgaccgagaaagaaatcgtggactacgtggccagccaagtgaccaccgccaagaaactgagaggcggcgtggtgtttgtggacgaggtgccaaaaggcctgacaggcaagctggacgcccggaagatcagagagatcctgattaaggccaagaaaggcggcaagatcgccgtgtaatagctaactagagatagaatccaactaacctgctgcgagccacggacttaaataattgagccttaaagaagaaattctttaagtggatgctctcaaactcagggaaacctaaatctagttatagacaaggcaatcctgagccaagccgaagtagtaattagtaagttaaaaaaacaaccaaaaaaaatctagatatcggatcccggg

SEQ ID NO: 3519 - DNA, 5109 bp, synthetic construct
  source 1..5109: mol_type = other DNA; note = Ana128 40nt ES
aggctaggtggaggctcagtgtgataagtctgcgatggtggatgcatgtgtcatggtcatagctgtttcctgtgtgaaattgttatccgctcagagggcacaatcctattccgcgctatccgacaatctccaagacattaggtggagttcagttcggcgtatggcatatgtcgctggaaagaacatgtgagcaaaaggccagcaaaaggccaggaaccgtaaaaaggccgcgttgctggcgtttttccataggctccgcccccctgacgagcatcacaaaaatcgacgctcaagtcagaggtggcgaaacccgacaggactataaagataccaggcgtttccccctggaagctccctcgtgcgctctcctgttccgaccctgccgcttaccggatacctgtccgcctttctcccttcgggaagcgtggcgctttctcatagctcacgctgtaggtatctcagttcggtgtaggtcgttcgctccaagctgggctgtgtgcacgaaccccccgttcagcccgaccgctgcgccttatccggtaactatcgtcttgagtccaacccggtaagacacgacttatcgccactggcagcagccactggtaacaggattagcagagcgaggtatgtaggcggtgctacagagttcttgaagtggtggcctaactacggctacactagaagaacagtatttggtatctgcgctctgctgaagccagttaccttcggaaaaagagttggtagctcttgatccggcaaacaaaccaccgctggtagcggtggtttttttgtttgcaagcagcagattacgcgcagaaaaaaaggatctcaagaagatcctttgatcttttctacggggtctgacgctctattcaacaaagccgccgtcccgtcaagtcagcgtaaatgggtagggggcttcaaatcgtcctcgtgataccaattcggagcctgcttttttgtacaaacttgttgataatggcaattcaaggatcttcacctagatccttttaaattaaaaatgaagttttaaatcaatctaaagtatatatgagtaaacttggtctgacagttaccaatgcttaatcagtgaggcacctatctcagcgatctgtctatttcgttcatccatagttgcctgactccccgtcgtgtagataactacgatacgggagggcttaccatctggccccagtgctgcaatgataccgcgagagccacgctcaccggctccagatttatcagcaataaaccagccagccggaagggccgagcgcagaagtggtcctgcaactttatccgcctccatccagtctattaattgttgccgggaagctagagtaagtagttcgccagttaatagtttgcgcaacgttgttgccattgctacaggcatcgtggtgtcacgctcgtcgtttggtatggcttcattcagctccggttcccaacgatcaaggcgagttacatgatcccccatgttgtgcaaaaaagcggttagctccttcggtcctccgatcgttgtcagaagtaagttggccgcagtgttatcactcatggttatggcagcactgcataattctcttactgtcatgccatccgtaagatgcttttctgtgactggtgagtactcaaccaagtcattctgagaatagtgtatgcggcgaccgagttgctcttgcccggcgtcaatacgggataataccgcgccacatagcagaactttaaaagtgctcatcattggaaaacgttcttcggggcgaaaactctcaaggatcttaccgctgttgagatccagttcgatgtaacccactcgtgcacccaactgatcttcagcatcttttactttcaccagcgtttctgggtgagcaaaaacaggaaggcaaaatgccgcaaaaaagggaataagggcgacacggaaatgttgaatactcatactcttcctttttcaatattattgaagcatttatcagggttattgtctcatgagcggatacatatttgaatgtatttagaaaaataaacaaataggggttccgcgcacatttccccgaaaagtgccagatacctgaaacaaaacccatcgtacggccaaggaagtctccaataactgtgatccaccacaagcgccagggttttcccagtcacgacgttgtaaaacgacggccagtcatgcataatccgcacgcatctggaataaggaagtgccattccgcctgaccttaatacgactcactatagggagaccctcgaaaaaaaaataatgacacactacgagaacaaccatagaactaagcaacaatagatgacttacaactaatcggaaggtgcagagactcgacgggagctaccctaacgtcaagacgagggtaaagagagagtccaattctcaaagccaataggcagtagcgaaagctgcaagagaatgaaaatccgtggctcgcagcaaacaccaaacaaaacaaacacaaaccaacaaaaattaaaacagcctgtgggttgatcccacccacaggcccattgggcgctagcactctggtatcacggtacctttgtgcgcctgttttataccccctcccccaactgtaacttagaagtaacacacaccgatcaacagtcagcgtggcacaccagccacgttttgatcaagcacttctgttaccccggactgagtatcaatagactgctcacgcggttgaaggagaaagcgttcgttatccggccaactacttcgaaaaacctagtaacaccgtggaagttgcagagtgtttcgctcagcactaccccagtgtagatcaggtcgatgagtcaccgcattccccacgggcgaccgtggcggtggctgcgttggcggcctgcccatggggaaacccatgggacgctctaatacagacatggtgcgaagagtctattgagctagttggtagtcctccggcccctgaatgcggctaatcctaactgcggagcacacaccctcaagccagagggcagtgtgtcgtaacgggcaactctgcagcggaaccgactactttgggtgtccgtgtttcattttattcctatactggctgcttatggtgacaattgagagatcgttaccatatagctattggattggccatccggtgactaatagagctattatatatccctttgttgggtttataccacttagcttgaaagaggttaaaacattacaattcattgttaagttgaatacagcaaaatggaagatgccaagaacatcaagaagggccctgctccattctaccctctggaagatggaacagccggcgagcagctgcacaaggccatgaagagatatgccctggtgcctggcacaatcgccttcacagatgcccacatcgaggtggacatcacctacgccgagtacttcgagatgtctgtgcggctggccgaagctatgaagcgctacggcctgaacaccaaccaccggatcgtcgtgtgcagcgagaacagcctgcagttcttcatgcctgtgctgggcgccctgttcatcggagttgctgtggcccctgccaacgacatctacaacgagcgcgagctgctgaacagcatgggcatctctcagcccaccgtggtgttcgtgtccaagaagggactgcagaaaatcctgaacgtgcagaagaagctgcccatcatccagaaaatcatcatcatggacagcaagaccgactaccagggcttccagagcatgtacaccttcgtgaccagccatctgccacctggcttcaacgagtacgacttcgtgcccgagagcttcgaccgggacaagacaatcgccctgatcatgaacagcagcggctctaccggactgcccaaaggtgttgccctgcctcatagaactgcctgcgtgcggtttagccacgccagagatcccatcttcggcaaccagatcatccccgacacagccatcctgagcgtggtgccttttcaccacggcttcggcatgttcaccacactgggctacctgatctgcggcttcagagtggtgctgatgtaccgcttcgaggaagaactgttcctgcggagcctgcaggactacaagatccagtctgctctgctggtgcctactctgttcagcttctttgccaagagcaccctgatcgataagtacgacctgagcaacctgcacgagatcgcctctggcggagcccctctgtctaaagaagtgggagaagccgtcgccaagcggttccatctgcctggcatcagacaaggctatggcctgaccgagacaaccagcgccattctgattacccctgagggcgacgataagcctggcgctgtgggaaaagtggtgccattcttcgaggccaaggtggtggatctggacaccggcaaaacactgggcgttaaccagaggggcgagctgtgtgttagaggccctatgatcatgagcggctacgtgaacaaccccgaggccacaaacgctctgatcgacaaggatggatggctgcacagcggcgacattgcctactgggacgaagatgagcacttcttcatcgtggaccggctgaagtccctgatcaagtacaagggctaccaggtggccccagccgagctggaatctattctgctgcaacaccccaacatcttcgatgccggcgttgcaggactgcccgatgatgatgctggcgaactgccagctgctgtggtggtgctggaacacggcaagaccatgaccgagaaagaaatcgtggactacgtggccagccaagtgaccaccgccaagaaactgagaggcggcgtggtgtttgtggacgaggtgccaaaaggcctgacaggcaagctggacgcccggaagatcagagagatcctgattaaggccaagaaaggcggcaagatcgccgtgtaatagctaactagacaaaacaccaaacaaacaagctgcgagccacggacttaaataattgagccttaaagaagaaattctttaagtggatgctctcaaactcagggaaacctaaatctagttatagacaaggcaatcctgagccaagccgaagtagtaattagtaagttaaaataatgaaagactacgagatcaaccatagagctaaccaaaaaaaaatctagatatcggatcccggg

SEQ ID NO: 3520 - DNA, 5071 bp, synthetic construct
  source 1..5071: mol_type = other DNA; note = Ana128 20nt ES
aggctaggtggaggctcagtgtgataagtctgcgatggtggatgcatgtgtcatggtcatagctgtttcctgtgtgaaattgttatccgctcagagggcacaatcctattccgcgctatccgacaatctccaagacattaggtggagttcagttcggcgtatggcatatgtcgctggaaagaacatgtgagcaaaaggccagcaaaaggccaggaaccgtaaaaaggccgcgttgctggcgtttttccataggctccgcccccctgacgagcatcacaaaaatcgacgctcaagtcagaggtggcgaaacccgacaggactataaagataccaggcgtttccccctggaagctccctcgtgcgctctcctgttccgaccctgccgcttaccggatacctgtccgcctttctcccttcgggaagcgtggcgctttctcatagctcacgctgtaggtatctcagttcggtgtaggtcgttcgctccaagctgggctgtgtgcacgaaccccccgttcagcccgaccgctgcgccttatccggtaactatcgtcttgagtccaacccggtaagacacgacttatcgccactggcagcagccactggtaacaggattagcagagcgaggtatgtaggcggtgctacagagttcttgaagtggtggcctaactacggctacactagaagaacagtatttggtatctgcgctctgctgaagccagttaccttcggaaaaagagttggtagctcttgatccggcaaacaaaccaccgctggtagcggtggtttttttgtttgcaagcagcagattacgcgcagaaaaaaaggatctcaagaagatcctttgatcttttctacggggtctgacgctctattcaacaaagccgccgtcccgtcaagtcagcgtaaatgggtagggggcttcaaatcgtcctcgtgataccaattcggagcctgcttttttgtacaaacttgttgataatggcaattcaaggatcttcacctagatccttttaaattaaaaatgaagttttaaatcaatctaaagtatatatgagtaaacttggtctgacagttaccaatgcttaatcagtgaggcacctatctcagcgatctgtctatttcgttcatccatagttgcctgactccccgtcgtgtagataactacgatacgggagggcttaccatctggccccagtgctgcaatgataccgcgagagccacgctcaccggctccagatttatcagcaataaaccagccagccggaagggccgagcgcagaagtggtcctgcaactttatccgcctccatccagtctattaattgttgccgggaagctagagtaagtagttcgccagttaatagtttgcgcaacgttgttgccattgctacaggcatcgtggtgtcacgctcgtcgtttggtatggcttcattcagctccggttcccaacgatcaaggcgagttacatgatcccccatgttgtgcaaaaaagcggttagctccttcggtcctccgatcgttgtcagaagtaagttggccgcagtgttatcactcatggttatggcagcactgcataattctcttactgtcatgccatccgtaagatgcttttctgtgactggtgagtactcaaccaagtcattctgagaatagtgtatgcggcgaccgagttgctcttgcccggcgtcaatacgggataataccgcgccacatagcagaactttaaaagtgctcatcattggaaaacgttcttcggggcgaaaactctcaaggatcttaccgctgttgagatccagttcgatgtaacccactcgtgcacccaactgatcttcagcatcttttactttcaccagcgtttctgggtgagcaaaaacaggaaggcaaaatgccgcaaaaaagggaataagggcgacacggaaatgttgaatactcatactcttcctttttcaatattattgaagcatttatcagggttattgtctcatgagcggatacatatttgaatgtatttagaaaaataaacaaataggggttccgcgcacatttccccgaaaagtgccagatacctgaaacaaaacccatcgtacggccaaggaagtctccaataactgtgatccaccacaagcgccagggttttcccagtcacgacgttgtaaaacgacggccagtcatgcataatccgcacgcatctggaataaggaagtgccattccgcctgaccttaatacgactcactatagggagaccctcgaaaaaaaaagatacacttcaactaagctcaatagatgacttacaactaatcggaaggtgcagagactcgacgggagctaccctaacgtcaagacgagggtaaagagagagtccaattctcaaagccaataggcagtagcgaaagctgcaagagaatgaaaatccgtggctcgcagcaaacaccaaacaaaacaaacacaaaccaacaaaaattaaaacagcctgtgggttgatcccacccacaggcccattgggcgctagcactctggtatcacggtacctttgtgcgcctgttttataccccctcccccaactgtaacttagaagtaacacacaccgatcaacagtcagcgtggcacaccagccacgttttgatcaagcacttctgttaccccggactgagtatcaatagactgctcacgcggttgaaggagaaagcgttcgttatccggccaactacttcgaaaaacctagtaacaccgtggaagttgcagagtgtttcgctcagcactaccccagtgtagatcaggtcgatgagtcaccgcattccccacgggcgaccgtggcggtggctgcgttggcggcctgcccatggggaaacccatgggacgctctaatacagacatggtgcgaagagtctattgagctagttggtagtcctccggcccctgaatgcggctaatcctaactgcggagcacacaccctcaagccagagggcagtgtgtcgtaacgggcaactctgcagcggaaccgactactttgggtgtccgtgtttcattttattcctatactggctgcttatggtgacaattgagagatcgttaccatatagctattggattggccatccggtgactaatagagctattatatatccctttgttgggtttataccacttagcttgaaagaggttaaaacattacaattcattgttaagttgaatacagcaaaatggaagatgccaagaacatcaagaagggccctgctccattctaccctctggaagatggaacagccggcgagcagctgcacaaggccatgaagagatatgccctggtgcctggcacaatcgccttcacagatgcccacatcgaggtggacatcacctacgccgagtacttcgagatgtctgtgcggctggccgaagctatgaagcgctacggcctgaacaccaaccaccggatcgtcgtgtgcagcgagaacagcctgcagttcttcatgcctgtgctgggcgccctgttcatcggagttgctgtggcccctgccaacgacatctacaacgagcgcgagctgctgaacagcatgggcatctctcagcccaccgtggtgttcgtgtccaagaagggactgcagaaaatcctgaacgtgcagaagaagctgcccatcatccagaaaatcatcatcatggacagcaagaccgactaccagggcttccagagcatgtacaccttcgtgaccagccatctgccacctggcttcaacgagtacgacttcgtgcccgagagcttcgaccgggacaagacaatcgccctgatcatgaacagcagcggctctaccggactgcccaaaggtgttgccctgcctcatagaactgcctgcgtgcggtttagccacgccagagatcccatcttcggcaaccagatcatccccgacacagccatcctgagcgtggtgccttttcaccacggcttcggcatgttcaccacactgggctacctgatctgcggcttcagagtggtgctgatgtaccgcttcgaggaagaactgttcctgcggagcctgcaggactacaagatccagtctgctctgctggtgcctactctgttcagcttctttgccaagagcaccctgatcgataagtacgacctgagcaacctgcacgagatcgcctctggcggagcccctctgtctaaagaagtgggagaagccgtcgccaagcggttccatctgcctggcatcagacaaggctatggcctgaccgagacaaccagcgccattctgattacccctgagggcgacgataagcctggcgctgtgggaaaagtggtgccattcttcgaggccaaggtggtggatctggacaccggcaaaacactgggcgttaaccagaggggcgagctgtgtgttagaggccctatgatcatgagcggctacgtgaacaaccccgaggccacaaacgctctgatcgacaaggatggatggctgcacagcggcgacattgcctactgggacgaagatgagcacttcttcatcgtggaccggctgaagtccctgatcaagtacaagggctaccaggtggccccagccgagctggaatctattctgctgcaacaccccaacatcttcgatgccggcgttgcaggactgcccgatgatgatgctggcgaactgccagctgctgtggtggtgctggaacacggcaagaccatgaccgagaaagaaatcgtggactacgtggccagccaagtgaccaccgccaagaaactgagaggcggcgtggtgtttgtggacgaggtgccaaaaggcctgacaggcaagctggacgcccggaagatcagagagatcctgattaaggccaagaaaggcggcaagatcgccgtgtaatagctaactagacaaaacaccaaacaaacaagctgcgagccacggacttaaataattgagccttaaagaagaaattctttaagtggatgctctcaaactcagggaaacctaaatctagttatagacaaggcaatcctgagccaagccgaagtagtaattagtaagttaaacatacacatgaacttagctaaaaaaaatctagatatcggatcccggg

SEQ ID NO: 3521 - DNA, 5211 bp, synthetic construct
  source 1..5211: mol_type = other DNA; note = Ana128 rational design 1
aggctaggtggaggctcagtgtgataagtctgcgatggtggatgcatgtgtcatggtcatagctgtttcctgtgtgaaattgttatccgctcagagggcacaatcctattccgcgctatccgacaatctccaagacattaggtggagttcagttcggcgtatggcatatgtcgctggaaagaacatgtgagcaaaaggccagcaaaaggccaggaaccgtaaaaaggccgcgttgctggcgtttttccataggctccgcccccctgacgagcatcacaaaaatcgacgctcaagtcagaggtggcgaaacccgacaggactataaagataccaggcgtttccccctggaagctccctcgtgcgctctcctgttccgaccctgccgcttaccggatacctgtccgcctttctcccttcgggaagcgtggcgctttctcatagctcacgctgtaggtatctcagttcggtgtaggtcgttcgctccaagctgggctgtgtgcacgaaccccccgttcagcccgaccgctgcgccttatccggtaactatcgtcttgagtccaacccggtaagacacgacttatcgccactggcagcagccactggtaacaggattagcagagcgaggtatgtaggcggtgctacagagttcttgaagtggtggcctaactacggctacactagaagaacagtatttggtatctgcgctctgctgaagccagttaccttcggaaaaagagttggtagctcttgatccggcaaacaaaccaccgctggtagcggtggtttttttgtttgcaagcagcagattacgcgcagaaaaaaaggatctcaagaagatcctttgatcttttctacggggtctgacgctctattcaacaaagccgccgtcccgtcaagtcagcgtaaatgggtagggggcttcaaatcgtcctcgtgataccaattcggagcctgcttttttgtacaaacttgttgataatggcaattcaaggatcttcacctagatccttttaaattaaaaatgaagttttaaatcaatctaaagtatatatgagtaaacttggtctgacagttaccaatgcttaatcagtgaggcacctatctcagcgatctgtctatttcgttcatccatagttgcctgactccccgtcgtgtagataactacgatacgggagggcttaccatctggccccagtgctgcaatgataccgcgagagccacgctcaccggctccagatttatcagcaataaaccagccagccggaagggccgagcgcagaagtggtcctgcaactttatccgcctccatccagtctattaattgttgccgggaagctagagtaagtagttcgccagttaatagtttgcgcaacgttgttgccattgctacaggcatcgtggtgtcacgctcgtcgtttggtatggcttcattcagctccggttcccaacgatcaaggcgagttacatgatcccccatgttgtgcaaaaaagcggttagctccttcggtcctccgatcgttgtcagaagtaagttggccgcagtgttatcactcatggttatggcagcactgcataattctcttactgtcatgccatccgtaagatgcttttctgtgactggtgagtactcaaccaagtcattctgagaatagtgtatgcggcgaccgagttgctcttgcccggcgtcaatacgggataataccgcgccacatagcagaactttaaaagtgctcatcattggaaaacgttcttcggggcgaaaactctcaaggatcttaccgctgttgagatccagttcgatgtaacccactcgtgcacccaactgatcttcagcatcttttactttcaccagcgtttctgggtgagcaaaaacaggaaggcaaaatgccgcaaaaaagggaataagggcgacacggaaatgttgaatactcatactcttcctttttcaatattattgaagcatttatcagggttattgtctcatgagcggatacatatttgaatgtatttagaaaaataaacaaataggggttccgcgcacatttccccgaaaagtgccagatacctgaaacaaaacccatcgtacggccaaggaagtctccaataactgtgatccaccacaagcgccagggttttcccagtcacgacgttgtaaaacgacggccagtcatgcataatccgcacgcatctggaataaggaagtgccattccgcctgaccttaatacgactcactatagggagaccctcgaaaaaaaagcttcgaatgcgaccatctgctcaggctcaatctcgctccaataatgacacactacgagaacaaccatagaactaagcaacaatagatgacttacaactaatcggaaggtgcagagactcgacgggagctaccctaacgtcaagacgagggtaaagagagagtccaattctcaaagccaataggcagtagcgaaagctgcaagagaatgaaaatccgttgaccttaaacggtcgtgtggggagcacgccggcgccaataatgccacactaagagaacaaacaaagagctaagcaattaaaacagcctgtgggttgatcccacccacaggcccattgggcgctagcactctggtatcacggtacctttgtgcgcctgttttataccccctcccccaactgtaacttagaagtaacacacaccgatcaacagtcagcgtggcacaccagccacgttttgatcaagcacttctgttaccccggactgagtatcaatagactgctcacgcggttgaaggagaaagcgttcgttatccggccaactacttcgaaaaacctagtaacaccgtggaagttgcagagtgtttcgctcagcactaccccagtgtagatcaggtcgatgagtcaccgcattccccacgggcgaccgtggcggtggctgcgttggcggcctgcccatggggaaacccatgggacgctctaatacagacatggtgcgaagagtctattgagctagttggtagtcctccggcccctgaatgcggctaatcctaactgcggagcacacaccctcaagccagagggcagtgtgtcgtaacgggcaactctgcagcggaaccgactactttgggtgtccgtgtttcattttattcctatactggctgcttatggtgacaattgagagatcgttaccatatagctattggattggccatccggtgactaatagagctattatatatccctttgttgggtttataccacttagcttgaaagaggttaaaacattacaattcattgttaagttgaatacagcaaaatggaagatgccaagaacatcaagaagggccctgctccattctaccctctggaagatggaacagccggcgagcagctgcacaaggccatgaagagatatgccctggtgcctggcacaatcgccttcacagatgcccacatcgaggtggacatcacctacgccgagtacttcgagatgtctgtgcggctggccgaagctatgaagcgctacggcctgaacaccaaccaccggatcgtcgtgtgcagcgagaacagcctgcagttcttcatgcctgtgctgggcgccctgttcatcggagttgctgtggcccctgccaacgacatctacaacgagcgcgagctgctgaacagcatgggcatctctcagcccaccgtggtgttcgtgtccaagaagggactgcagaaaatcctgaacgtgcagaagaagctgcccatcatccagaaaatcatcatcatggacagcaagaccgactaccagggcttccagagcatgtacaccttcgtgaccagccatctgccacctggcttcaacgagtacgacttcgtgcccgagagcttcgaccgggacaagacaatcgccctgatcatgaacagcagcggctctaccggactgcccaaaggtgttgccctgcctcatagaactgcctgcgtgcggtttagccacgccagagatcccatcttcggcaaccagatcatccccgacacagccatcctgagcgtggtgccttttcaccacggcttcggcatgttcaccacactgggctacctgatctgcggcttcagagtggtgctgatgtaccgcttcgaggaagaactgttcctgcggagcctgcaggactacaagatccagtctgctctgctggtgcctactctgttcagcttctttgccaagagcaccctgatcgataagtacgacctgagcaacctgcacgagatcgcctctggcggagcccctctgtctaaagaagtgggagaagccgtcgccaagcggttccatctgcctggcatcagacaaggctatggcctgaccgagacaaccagcgccattctgattacccctgagggcgacgataagcctggcgctgtgggaaaagtggtgccattcttcgaggccaaggtggtggatctggacaccggcaaaacactgggcgttaaccagaggggcgagctgtgtgttagaggccctatgatcatgagcggctacgtgaacaaccccgaggccacaaacgctctgatcgacaaggatggatggctgcacagcggcgacattgcctactgggacgaagatgagcacttcttcatcgtggaccggctgaagtccctgatcaagtacaagggctaccaggtggccccagccgagctggaatctattctgctgcaacaccccaacatcttcgatgccggcgttgcaggactgcccgatgatgatgctggcgaactgccagctgctgtggtggtgctggaacacggcaagaccatgaccgagaaagaaatcgtggactacgtggccagccaagtgaccaccgccaagaaactgagaggcggcgtggtgtttgtggacgaggtgccaaaaggcctgacaggcaagctggacgcccggaagatcagagagatcctgattaaggccaagaaaggcggcaagatcgccgtgtaatagctaactagagatagaatccaactaacctggcgccggcgtgctcgctacggacttaaataattgagccttaaagaagaaattctttaagtggatgctctcaaactcagggaaacctaaatctagttatagacaaggcaatcctgagccaagccgaagtagtaattagtaagttaaacatacacatgaacttagctggagcgagattgagcctgagcagatggtcgcattcgaagcaaaaaaaatctagatatcggatcccggg

SEQ ID NO: 3522 - DNA, 5130 bp, synthetic construct
  source 1..5130: mol_type = other DNA; note = Ana128 rational design 2
aggctaggtggaggctcagtgtgataagtctgcgatggtggatgcatgtgtcatggtcatagctgtttcctgtgtgaaattgttatccgctcagagggcacaatcctattccgcgctatccgacaatctccaagacattaggtggagttcagttcggcgtatggcatatgtcgctggaaagaacatgtgagcaaaaggccagcaaaaggccaggaaccgtaaaaaggccgcgttgctggcgtttttccataggctccgcccccctgacgagcatcacaaaaatcgacgctcaagtcagaggtggcgaaacccgacaggactataaagataccaggcgtttccccctggaagctccctcgtgcgctctcctgttccgaccctgccgcttaccggatacctgtccgcctttctcccttcgggaagcgtggcgctttctcatagctcacgctgtaggtatctcagttcggtgtaggtcgttcgctccaagctgggctgtgtgcacgaaccccccgttcagcccgaccgctgcgccttatccggtaactatcgtcttgagtccaacccggtaagacacgacttatcgccactggcagcagccactggtaacaggattagcagagcgaggtatgtaggcggtgctacagagttcttgaagtggtggcctaactacggctacactagaagaacagtatttggtatctgcgctctgctgaagccagttaccttcggaaaaagagttggtagctcttgatccggcaaacaaaccaccgctggtagcggtggtttttttgtttgcaagcagcagattacgcgcagaaaaaaaggatctcaagaagatcctttgatcttttctacggggtctgacgctctattcaacaaagccgccgtcccgtcaagtcagcgtaaatgggtagggggcttcaaatcgtcctcgtgataccaattcggagcctgcttttttgtacaaacttgttgataatggcaattcaaggatcttcacctagatccttttaaattaaaaatgaagttttaaatcaatctaaagtatatatgagtaaacttggtctgacagttaccaatgcttaatcagtgaggcacctatctcagcgatctgtctatttcgttcatccatagttgcctgactccccgtcgtgtagataactacgatacgggagggcttaccatctggccccagtgctgcaatgataccgcgagagccacgctcaccggctccagatttatcagcaataaaccagccagccggaagggccgagcgcagaagtggtcctgcaactttatccgcctccatccagtctattaattgttgccgggaagctagagtaagtagttcgccagttaatagtttgcgcaacgttgttgccattgctacaggcatcgtggtgtcacgctcgtcgtttggtatggcttcattcagctccggttcccaacgatcaaggcgagttacatgatcccccatgttgtgcaaaaaagcggttagctccttcggtcctccgatcgttgtcagaagtaagttggccgcagtgttatcactcatggttatggcagcactgcataattctcttactgtcatgccatccgtaagatgcttttctgtgactggtgagtactcaaccaagtcattctgagaatagtgtatgcggcgaccgagttgctcttgcccggcgtcaatacgggataataccgcgccacatagcagaactttaaaagtgctcatcattggaaaacgttcttcggggcgaaaactctcaaggatcttaccgctgttgagatccagttcgatgtaacccactcgtgcacccaactgatcttcagcatcttttactttcaccagcgtttctgggtgagcaaaaacaggaaggcaaaatgccgcaaaaaagggaataagggcgacacggaaatgttgaatactcatactcttcctttttcaatattattgaagcatttatcagggttattgtctcatgagcggatacatatttgaatgtatttagaaaaataaacaaataggggttccgcgcacatttccccgaaaagtgccagatacctgaaacaaaacccatcgtacggccaaggaagtctccaataactgtgatccaccacaagcgccagggttttcccagtcacgacgttgtaaaacgacggccagtcatgcataatccgcacgcatctggaataaggaagtgccattccgcctgaccttaatacgactcactatagggagaccctcgaaaaaaaaataatgacacactacgagaacaaccatagaactaagcaacaatagatgacttacaactaatcggaaggtgcagagactcgacgggagctaccctaacgtcaagacgagggtaaagagagagtccaattctcaaagccaataggcagtagcgaaagctgcaagagaatgaaaatccgttgaccttaaacggtcgtgtggggagcacgccggcgccaataatgccacactaagagaacaaacaaagagctaagcaattaaaacagcctgtgggttgatcccacccacaggcccattgggcgctagcactctggtatcacggtacctttgtgcgcctgttttataccccctcccccaactgtaacttagaagtaacacacaccgatcaacagtcagcgtggcacaccagccacgttttgatcaagcacttctgttaccccggactgagtatcaatagactgctcacgcggttgaaggagaaagcgttcgttatccggccaactacttcgaaaaacctagtaacaccgtggaagttgcagagtgtttcgctcagcactaccccagtgtagatcaggtcgatgagtcaccgcattccccacgggcgaccgtggcggtggctgcgttggcggcctgcccatggggaaacccatgggacgctctaatacagacatggtgcgaagagtctattgagctagttggtagtcctccggcccctgaatgcggctaatcctaactgcggagcacacaccctcaagccagagggcagtgtgtcgtaacgggcaactctgcagcggaaccgactactttgggtgtccgtgtttcattttattcctatactggctgcttatggtgacaattgagagatcgttaccatatagctattggattggccatccggtgactaatagagctattatatatccctttgttgggtttataccacttagcttgaaagaggttaaaacattacaattcattgttaagttgaatacagcaaaatggaagatgccaagaacatcaagaagggccctgctccattctaccctctggaagatggaacagccggcgagcagctgcacaaggccatgaagagatatgccctggtgcctggcacaatcgccttcacagatgcccacatcgaggtggacatcacctacgccgagtacttcgagatgtctgtgcggctggccgaagctatgaagcgctacggcctgaacaccaaccaccggatcgtcgtgtgcagcgagaacagcctgcagttcttcatgcctgtgctgggcgccctgttcatcggagttgctgtggcccctgccaacgacatctacaacgagcgcgagctgctgaacagcatgggcatctctcagcccaccgtggtgttcgtgtccaagaagggactgcagaaaatcctgaacgtgcagaagaagctgcccatcatccagaaaatcatcatcatggacagcaagaccgactaccagggcttccagagcatgtacaccttcgtgaccagccatctgccacctggcttcaacgagtacgacttcgtgcccgagagcttcgaccgggacaagacaatcgccctgatcatgaacagcagcggctctaccggactgcccaaaggtgttgccctgcctcatagaactgcctgcgtgcggtttagccacgccagagatcccatcttcggcaaccagatcatccccgacacagccatcctgagcgtggtgccttttcaccacggcttcggcatgttcaccacactgggctacctgatctgcggcttcagagtggtgctgatgtaccgcttcgaggaagaactgttcctgcggagcctgcaggactacaagatccagtctgctctgctggtgcctactctgttcagcttctttgccaagagcaccctgatcgataagtacgacctgagcaacctgcacgagatcgcctctggcggagcccctctgtctaaagaagtgggagaagccgtcgccaagcggttccatctgcctggcatcagacaaggctatggcctgaccgagacaaccagcgccattctgattacccctgagggcgacgataagcctggcgctgtgggaaaagtggtgccattcttcgaggccaaggtggtggatctggacaccggcaaaacactgggcgttaaccagaggggcgagctgtgtgttagaggccctatgatcatgagcggctacgtgaacaaccccgaggccacaaacgctctgatcgacaaggatggatggctgcacagcggcgacattgcctactgggacgaagatgagcacttcttcatcgtggaccggctgaagtccctgatcaagtacaagggctaccaggtggccccagccgagctggaatctattctgctgcaacaccccaacatcttcgatgccggcgttgcaggactgcccgatgatgatgctggcgaactgccagctgctgtggtggtgctggaacacggcaagaccatgaccgagaaagaaatcgtggactacgtggccagccaagtgaccaccgccaagaaactgagaggcggcgtggtgtttgtggacgaggtgccaaaaggcctgacaggcaagctggacgcccggaagatcagagagatcctgattaaggccaagaaaggcggcaagatcgccgtgtaatagctaactagagatagaatccaactaacctggcgccggcgtgctcgctacggacttaaataattgagccttaaagaagaaattctttaagtggatgctctcaaactcagggaaacctaaatctagttatagacaaggcaatcctgagccaagccgaagtagtaattagtaagttaaacatacacatgaacttagctaaaaaaaatctagatatcggatcccggg

SEQ ID NO: 3523 - DNA, 5076 bp, synthetic construct
  source 1..5076: mol_type = other DNA; note = Ana 185 Exonextention
aggctaggtggaggctcagtgtgataagtctgcgatggtggatgcatgtgtcatggtcatagctgtttcctgtgtgaaattgttatccgctcagagggcacaatcctattccgcgctatccgacaatctccaagacattaggtggagttcagttcggcgtatggcatatgtcgctggaaagaacatgtgagcaaaaggccagcaaaaggccaggaaccgtaaaaaggccgcgttgctggcgtttttccataggctccgcccccctgacgagcatcacaaaaatcgacgctcaagtcagaggtggcgaaacccgacaggactataaagataccaggcgtttccccctggaagctccctcgtgcgctctcctgttccgaccctgccgcttaccggatacctgtccgcctttctcccttcgggaagcgtggcgctttctcatagctcacgctgtaggtatctcagttcggtgtaggtcgttcgctccaagctgggctgtgtgcacgaaccccccgttcagcccgaccgctgcgccttatccggtaactatcgtcttgagtccaacccggtaagacacgacttatcgccactggcagcagccactggtaacaggattagcagagcgaggtatgtaggcggtgctacagagttcttgaagtggtggcctaactacggctacactagaagaacagtatttggtatctgcgctctgctgaagccagttaccttcggaaaaagagttggtagctcttgatccggcaaacaaaccaccgctggtagcggtggtttttttgtttgcaagcagcagattacgcgcagaaaaaaaggatctcaagaagatcctttgatcttttctacggggtctgacgctctattcaacaaagccgccgtcccgtcaagtcagcgtaaatgggtagggggcttcaaatcgtcctcgtgataccaattcggagcctgcttttttgtacaaacttgttgataatggcaattcaaggatcttcacctagatccttttaaattaaaaatgaagttttaaatcaatctaaagtatatatgagtaaacttggtctgacagttaccaatgcttaatcagtgaggcacctatctcagcgatctgtctatttcgttcatccatagttgcctgactccccgtcgtgtagataactacgatacgggagggcttaccatctggccccagtgctgcaatgataccgcgagagccacgctcaccggctccagatttatcagcaataaaccagccagccggaagggccgagcgcagaagtggtcctgcaactttatccgcctccatccagtctattaattgttgccgggaagctagagtaagtagttcgccagttaatagtttgcgcaacgttgttgccattgctacaggcatcgtggtgtcacgctcgtcgtttggtatggcttcattcagctccggttcccaacgatcaaggcgagttacatgatcccccatgttgtgcaaaaaagcggttagctccttcggtcctccgatcgttgtcagaagtaagttggccgcagtgttatcactcatggttatggcagcactgcataattctcttactgtcatgccatccgtaagatgcttttctgtgactggtgagtactcaaccaagtcattctgagaatagtgtatgcggcgaccgagttgctcttgcccggcgtcaatacgggataataccgcgccacatagcagaactttaaaagtgctcatcattggaaaacgttcttcggggcgaaaactctcaaggatcttaccgctgttgagatccagttcgatgtaacccactcgtgcacccaactgatcttcagcatcttttactttcaccagcgtttctgggtgagcaaaaacaggaaggcaaaatgccgcaaaaaagggaataagggcgacacggaaatgttgaatactcatactcttcctttttcaatattattgaagcatttatcagggttattgtctcatgagcggatacatatttgaatgtatttagaaaaataaacaaataggggttccgcgcacatttccccgaaaagtgccagatacctgaaacaaaacccatcgtacggccaaggaagtctccaataactgtgatccaccacaagcgccagggttttcccagtcacgacgttgtaaaacgacggccagtcatgcataatccgcacgcatctggaataaggaagtgccattccgcctgaccttaatacgactcactatagggagaccctcgaaaaaaaacacaaacacccgtcaagacgagggtaaagagagagtccaattctcaaagccaataggcagtagcgaaagctgcaagagaatgaaaatccgttgaccttaaacggtcgtgtgggggctcgcagcaaacaccaaacaaaacaaacacaaaccaacaaaaattaaaacagcctgtgggttgatcccacccacaggcccattgggcgctagcactctggtatcacggtacctttgtgcgcctgttttataccccctcccccaactgtaacttagaagtaacacacaccgatcaacagtcagcgtggcacaccagccacgttttgatcaagcacttctgttaccccggactgagtatcaatagactgctcacgcggttgaaggagaaagcgttcgttatccggccaactacttcgaaaaacctagtaacaccgtggaagttgcagagtgtttcgctcagcactaccccagtgtagatcaggtcgatgagtcaccgcattccccacgggcgaccgtggcggtggctgcgttggcggcctgcccatggggaaacccatgggacgctctaatacagacatggtgcgaagagtctattgagctagttggtagtcctccggcccctgaatgcggctaatcctaactgcggagcacacaccctcaagccagagggcagtgtgtcgtaacgggcaactctgcagcggaaccgactactttgggtgtccgtgtttcattttattcctatactggctgcttatggtgacaattgagagatcgttaccatatagctattggattggccatccggtgactaatagagctattatatatccctttgttgggtttataccacttagcttgaaagaggttaaaacattacaattcattgttaagttgaatacagcaaaatggaagatgccaagaacatcaagaagggccctgctccattctaccctctggaagatggaacagccggcgagcagctgcacaaggccatgaagagatatgccctggtgcctggcacaatcgccttcacagatgcccacatcgaggtggacatcacctacgccgagtacttcgagatgtctgtgcggctggccgaagctatgaagcgctacggcctgaacaccaaccaccggatcgtcgtgtgcagcgagaacagcctgcagttcttcatgcctgtgctgggcgccctgttcatcggagttgctgtggcccctgccaacgacatctacaacgagcgcgagctgctgaacagcatgggcatctctcagcccaccgtggtgttcgtgtccaagaagggactgcagaaaatcctgaacgtgcagaagaagctgcccatcatccagaaaatcatcatcatggacagcaagaccgactaccagggcttccagagcatgtacaccttcgtgaccagccatctgccacctggcttcaacgagtacgacttcgtgcccgagagcttcgaccgggacaagacaatcgccctgatcatgaacagcagcggctctaccggactgcccaaaggtgttgccctgcctcatagaactgcctgcgtgcggtttagccacgccagagatcccatcttcggcaaccagatcatccccgacacagccatcctgagcgtggtgccttttcaccacggcttcggcatgttcaccacactgggctacctgatctgcggcttcagagtggtgctgatgtaccgcttcgaggaagaactgttcctgcggagcctgcaggactacaagatccagtctgctctgctggtgcctactctgttcagcttctttgccaagagcaccctgatcgataagtacgacctgagcaacctgcacgagatcgcctctggcggagcccctctgtctaaagaagtgggagaagccgtcgccaagcggttccatctgcctggcatcagacaaggctatggcctgaccgagacaaccagcgccattctgattacccctgagggcgacgataagcctggcgctgtgggaaaagtggtgccattcttcgaggccaaggtggtggatctggacaccggcaaaacactgggcgttaaccagaggggcgagctgtgtgttagaggccctatgatcatgagcggctacgtgaacaaccccgaggccacaaacgctctgatcgacaaggatggatggctgcacagcggcgacattgcctactgggacgaagatgagcacttcttcatcgtggaccggctgaagtccctgatcaagtacaagggctaccaggtggccccagccgagctggaatctattctgctgcaacaccccaacatcttcgatgccggcgttgcaggactgcccgatgatgatgctggcgaactgccagctgctgtggtggtgctggaacacggcaagaccatgaccgagaaagaaatcgtggactacgtggccagccaagtgaccaccgccaagaaactgagaggcggcgtggtgtttgtggacgaggtgccaaaaggcctgacaggcaagctggacgcccggaagatcagagagatcctgattaaggccaagaaaggcggcaagatcgccgtgtaatagctaactagacaaaacaccaaacaaacaagctgcgagccgctacggacttaaataattgagccttaaagaagaaattctttaagtggatgctctcaaactcagggaaacctaaatctagttatagacaaggcaatcctgagccaagccgaagtagtaattagtaagttaacaatagatgacttacaactaatcggaaggtgcagagactcgacgggagctaccctaaaaaaacaaccaaaaaaaatctagatatcggatcccggg

SEQ ID NO: 3524 - DNA, 5057 bp, synthetic construct
  source 1..5057: mol_type = other DNA; note = Ana185 13ntIH
aggctaggtggaggctcagtgtgataagtctgcgatggtggatgcatgtgtcatggtcatagctgtttcctgtgtgaaattgttatccgctcagagggcacaatcctattccgcgctatccgacaatctccaagacattaggtggagttcagttcggcgtatggcatatgtcgctggaaagaacatgtgagcaaaaggccagcaaaaggccaggaaccgtaaaaaggccgcgttgctggcgtttttccataggctccgcccccctgacgagcatcacaaaaatcgacgctcaagtcagaggtggcgaaacccgacaggactataaagataccaggcgtttccccctggaagctccctcgtgcgctctcctgttccgaccctgccgcttaccggatacctgtccgcctttctcccttcgggaagcgtggcgctttctcatagctcacgctgtaggtatctcagttcggtgtaggtcgttcgctccaagctgggctgtgtgcacgaaccccccgttcagcccgaccgctgcgccttatccggtaactatcgtcttgagtccaacccggtaagacacgacttatcgccactggcagcagccactggtaacaggattagcagagcgaggtatgtaggcggtgctacagagttcttgaagtggtggcctaactacggctacactagaagaacagtatttggtatctgcgctctgctgaagccagttaccttcggaaaaagagttggtagctcttgatccggcaaacaaaccaccgctggtagcggtggtttttttgtttgcaagcagcagattacgcgcagaaaaaaaggatctcaagaagatcctttgatcttttctacggggtctgacgctctattcaacaaagccgccgtcccgtcaagtcagcgtaaatgggtagggggcttcaaatcgtcctcgtgataccaattcggagcctgcttttttgtacaaacttgttgataatggcaattcaaggatcttcacctagatccttttaaattaaaaatgaagttttaaatcaatctaaagtatatatgagtaaacttggtctgacagttaccaatgcttaatcagtgaggcacctatctcagcgatctgtctatttcgttcatccatagttgcctgactccccgtcgtgtagataactacgatacgggagggcttaccatctggccccagtgctgcaatgataccgcgagagccacgctcaccggctccagatttatcagcaataaaccagccagccggaagggccgagcgcagaagtggtcctgcaactttatccgcctccatccagtctattaattgttgccgggaagctagagtaagtagttcgccagttaatagtttgcgcaacgttgttgccattgctacaggcatcgtggtgtcacgctcgtcgtttggtatggcttcattcagctccggttcccaacgatcaaggcgagttacatgatcccccatgttgtgcaaaaaagcggttagctccttcggtcctccgatcgttgtcagaagtaagttggccgcagtgttatcactcatggttatggcagcactgcataattctcttactgtcatgccatccgtaagatgcttttctgtgactggtgagtactcaaccaagtcattctgagaatagtgtatgcggcgaccgagttgctcttgcccggcgtcaatacgggataataccgcgccacatagcagaactttaaaagtgctcatcattggaaaacgttcttcggggcgaaaactctcaaggatcttaccgctgttgagatccagttcgatgtaacccactcgtgcacccaactgatcttcagcatcttttactttcaccagcgtttctgggtgagcaaaaacaggaaggcaaaatgccgcaaaaaagggaataagggcgacacggaaatgttgaatactcatactcttcctttttcaatattattgaagcatttatcagggttattgtctcatgagcggatacatatttgaatgtatttagaaaaataaacaaataggggttccgcgcacatttccccgaaaagtgccagatacctgaaacaaaacccatcgtacggccaaggaagtctccaataactgtgatccaccacaagcgccagggttttcccagtcacgacgttgtaaaacgacggccagtcatgcataatccgcacgcatctggaataaggaagtgccattccgcctgaccttaatacgactcactatagggagaccctcgaaaaaaaacacaaacacccgtcaagacgagggtaaagagagagtccaattctcaaagccaataggcagtagcgaaagctgcaagagaatgaaaatccgtcggctcgcagcggaaacaccaaacaaaacaaacacaaaccaacaaaaattaaaacagcctgtgggttgatcccacccacaggcccattgggcgctagcactctggtatcacggtacctttgtgcgcctgttttataccccctcccccaactgtaacttagaagtaacacacaccgatcaacagtcagcgtggcacaccagccacgttttgatcaagcacttctgttaccccggactgagtatcaatagactgctcacgcggttgaaggagaaagcgttcgttatccggccaactacttcgaaaaacctagtaacaccgtggaagttgcagagtgtttcgctcagcactaccccagtgtagatcaggtcgatgagtcaccgcattccccacgggcgaccgtggcggtggctgcgttggcggcctgcccatggggaaacccatgggacgctctaatacagacatggtgcgaagagtctattgagctagttggtagtcctccggcccctgaatgcggctaatcctaactgcggagcacacaccctcaagccagagggcagtgtgtcgtaacgggcaactctgcagcggaaccgactactttgggtgtccgtgtttcattttattcctatactggctgcttatggtgacaattgagagatcgttaccatatagctattggattggccatccggtgactaatagagctattatatatccctttgttgggtttataccacttagcttgaaagaggttaaaacattacaattcattgttaagttgaatacagcaaaatggaagatgccaagaacatcaagaagggccctgctccattctaccctctggaagatggaacagccggcgagcagctgcacaaggccatgaagagatatgccctggtgcctggcacaatcgccttcacagatgcccacatcgaggtggacatcacctacgccgagtacttcgagatgtctgtgcggctggccgaagctatgaagcgctacggcctgaacaccaaccaccggatcgtcgtgtgcagcgagaacagcctgcagttcttcatgcctgtgctgggcgccctgttcatcggagttgctgtggcccctgccaacgacatctacaacgagcgcgagctgctgaacagcatgggcatctctcagcccaccgtggtgttcgtgtccaagaagggactgcagaaaatcctgaacgtgcagaagaagctgcccatcatccagaaaatcatcatcatggacagcaagaccgactaccagggcttccagagcatgtacaccttcgtgaccagccatctgccacctggcttcaacgagtacgacttcgtgcccgagagcttcgaccgggacaagacaatcgccctgatcatgaacagcagcggctctaccggactgcccaaaggtgttgccctgcctcatagaactgcctgcgtgcggtttagccacgccagagatcccatcttcggcaaccagatcatccccgacacagccatcctgagcgtggtgccttttcaccacggcttcggcatgttcaccacactgggctacctgatctgcggcttcagagtggtgctgatgtaccgcttcgaggaagaactgttcctgcggagcctgcaggactacaagatccagtctgctctgctggtgcctactctgttcagcttctttgccaagagcaccctgatcgataagtacgacctgagcaacctgcacgagatcgcctctggcggagcccctctgtctaaagaagtgggagaagccgtcgccaagcggttccatctgcctggcatcagacaaggctatggcctgaccgagacaaccagcgccattctgattacccctgagggcgacgataagcctggcgctgtgggaaaagtggtgccattcttcgaggccaaggtggtggatctggacaccggcaaaacactgggcgttaaccagaggggcgagctgtgtgttagaggccctatgatcatgagcggctacgtgaacaaccccgaggccacaaacgctctgatcgacaaggatggatggctgcacagcggcgacattgcctactgggacgaagatgagcacttcttcatcgtggaccggctgaagtccctgatcaagtacaagggctaccaggtggccccagccgagctggaatctattctgctgcaacaccccaacatcttcgatgccggcgttgcaggactgcccgatgatgatgctggcgaactgccagctgctgtggtggtgctggaacacggcaagaccatgaccgagaaagaaatcgtggactacgtggccagccaagtgaccaccgccaagaaactgagaggcggcgtggtgtttgtggacgaggtgccaaaaggcctgacaggcaagctggacgcccggaagatcagagagatcctgattaaggccaagaaaggcggcaagatcgccgtgtaatagctaactagacaaaacaccaaacaaacaaccgctgcgagccgacggacttaaataattgagccttaaagaagaaattctttaagtggatgctctcaaactcagggaaacctaaatctagttatagacaaggcaatcctgagccaagccgaagtagtaattagtaagttaacaatagatgacttacaactaatcggaaggtgcagagactcgacgggagctaccctaaaaaaacaaccaaaaaaaatctagatatcggatcccggg

SEQ ID NO: 3525 - DNA, 5061 bp, synthetic construct
  source 1..5061: mol_type = other DNA; note = Ana185 15ntIH
aggctaggtggaggctcagtgtgataagtctgcgatggtggatgcatgtgtcatggtcatagctgtttcctgtgtgaaattgttatccgctcagagggcacaatcctattccgcgctatccgacaatctccaagacattaggtggagttcagttcggcgtatggcatatgtcgctggaaagaacatgtgagcaaaaggccagcaaaaggccaggaaccgtaaaaaggccgcgttgctggcgtttttccataggctccgcccccctgacgagcatcacaaaaatcgacgctcaagtcagaggtggcgaaacccgacaggactataaagataccaggcgtttccccctggaagctccctcgtgcgctctcctgttccgaccctgccgcttaccggatacctgtccgcctttctcccttcgggaagcgtggcgctttctcatagctcacgctgtaggtatctcagttcggtgtaggtcgttcgctccaagctgggctgtgtgcacgaaccccccgttcagcccgaccgctgcgccttatccggtaactatcgtcttgagtccaacccggtaagacacgacttatcgccactggcagcagccactggtaacaggattagcagagcgaggtatgtaggcggtgctacagagttcttgaagtggtggcctaactacggctacactagaagaacagtatttggtatctgcgctctgctgaagccagttaccttcggaaaaagagttggtagctcttgatccggcaaacaaaccaccgctggtagcggtggtttttttgtttgcaagcagcagattacgcgcagaaaaaaaggatctcaagaagatcctttgatcttttctacggggtctgacgctctattcaacaaagccgccgtcccgtcaagtcagcgtaaatgggtagggggcttcaaatcgtcctcgtgataccaattcggagcctgcttttttgtacaaacttgttgataatggcaattcaaggatcttcacctagatccttttaaattaaaaatgaagttttaaatcaatctaaagtatatatgagtaaacttggtctgacagttaccaatgcttaatcagtgaggcacctatctcagcgatctgtctatttcgttcatccatagttgcctgactccccgtcgtgtagataactacgatacgggagggcttaccatctggccccagtgctgcaatgataccgcgagagccacgctcaccggctccagatttatcagcaataaaccagccagccggaagggccgagcgcagaagtggtcctgcaactttatccgcctccatccagtctattaattgttgccgggaagctagagtaagtagttcgccagttaatagtttgcgcaacgttgttgccattgctacaggcatcgtggtgtcacgctcgtcgtttggtatggcttcattcagctccggttcccaacgatcaaggcgagttacatgatcccccatgttgtgcaaaaaagcggttagctccttcggtcctccgatcgttgtcagaagtaagttggccgcagtgttatcactcatggttatggcagcactgcataattctcttactgtcatgccatccgtaagatgcttttctgtgactggtgagtactcaaccaagtcattctgagaatagtgtatgcggcgaccgagttgctcttgcccggcgtcaatacgggataataccgcgccacatagcagaactttaaaagtgctcatcattggaaaacgttcttcggggcgaaaactctcaaggatcttaccgctgttgagatccagttcgatgtaacccactcgtgcacccaactgatcttcagcatcttttactttcaccagcgtttctgggtgagcaaaaacaggaaggcaaaatgccgcaaaaaagggaataagggcgacacggaaatgttgaatactcatactcttcctttttcaatattattgaagcatttatcagggttattgtctcatgagcggatacatatttgaatgtatttagaaaaataaacaaataggggttccgcgcacatttccccgaaaagtgccagatacctgaaacaaaacccatcgtacggccaaggaagtctccaataactgtgatccaccacaagcgccagggttttcccagtcacgacgttgtaaaacgacggccagtcatgcataatccgcacgcatctggaataaggaagtgccattccgcctgaccttaatacgactcactatagggagaccctcgaaaaaaaacacaaacacccgtcaagacgagggtaaagagagagtccaattctcaaagccaataggcagtagcgaaagctgcaagagaatgaaaatccgtgagcacgccggcgccaaacaccaaacaaaacaaacacaaaccaacaaaaattaaaacagcctgtgggttgatcccacccacaggcccattgggcgctagcactctggtatcacggtacctttgtgcgcctgttttataccccctcccccaactgtaacttagaagtaacacacaccgatcaacagtcagcgtggcacaccagccacgttttgatcaagcacttctgttaccccggactgagtatcaatagactgctcacgcggttgaaggagaaagcgttcgttatccggccaactacttcgaaaaacctagtaacaccgtggaagttgcagagtgtttcgctcagcactaccccagtgtagatcaggtcgatgagtcaccgcattccccacgggcgaccgtggcggtggctgcgttggcggcctgcccatggggaaacccatgggacgctctaatacagacatggtgcgaagagtctattgagctagttggtagtcctccggcccctgaatgcggctaatcctaactgcggagcacacaccctcaagccagagggcagtgtgtcgtaacgggcaactctgcagcggaaccgactactttgggtgtccgtgtttcattttattcctatactggctgcttatggtgacaattgagagatcgttaccatatagctattggattggccatccggtgactaatagagctattatatatccctttgttgggtttataccacttagcttgaaagaggttaaaacattacaattcattgttaagttgaatacagcaaaatggaagatgccaagaacatcaagaagggccctgctccattctaccctctggaagatggaacagccggcgagcagctgcacaaggccatgaagagatatgccctggtgcctggcacaatcgccttcacagatgcccacatcgaggtggacatcacctacgccgagtacttcgagatgtctgtgcggctggccgaagctatgaagcgctacggcctgaacaccaaccaccggatcgtcgtgtgcagcgagaacagcctgcagttcttcatgcctgtgctgggcgccctgttcatcggagttgctgtggcccctgccaacgacatctacaacgagcgcgagctgctgaacagcatgggcatctctcagcccaccgtggtgttcgtgtccaagaagggactgcagaaaatcctgaacgtgcagaagaagctgcccatcatccagaaaatcatcatcatggacagcaagaccgactaccagggcttccagagcatgtacaccttcgtgaccagccatctgccacctggcttcaacgagtacgacttcgtgcccgagagcttcgaccgggacaagacaatcgccctgatcatgaacagcagcggctctaccggactgcccaaaggtgttgccctgcctcatagaactgcctgcgtgcggtttagccacgccagagatcccatcttcggcaaccagatcatccccgacacagccatcctgagcgtggtgccttttcaccacggcttcggcatgttcaccacactgggctacctgatctgcggcttcagagtggtgctgatgtaccgcttcgaggaagaactgttcctgcggagcctgcaggactacaagatccagtctgctctgctggtgcctactctgttcagcttctttgccaagagcaccctgatcgataagtacgacctgagcaacctgcacgagatcgcctctggcggagcccctctgtctaaagaagtgggagaagccgtcgccaagcggttccatctgcctggcatcagacaaggctatggcctgaccgagacaaccagcgccattctgattacccctgagggcgacgataagcctggcgctgtgggaaaagtggtgccattcttcgaggccaaggtggtggatctggacaccggcaaaacactgggcgttaaccagaggggcgagctgtgtgttagaggccctatgatcatgagcggctacgtgaacaaccccgaggccacaaacgctctgatcgacaaggatggatggctgcacagcggcgacattgcctactgggacgaagatgagcacttcttcatcgtggaccggctgaagtccctgatcaagtacaagggctaccaggtggccccagccgagctggaatctattctgctgcaacaccccaacatcttcgatgccggcgttgcaggactgcccgatgatgatgctggcgaactgccagctgctgtggtggtgctggaacacggcaagaccatgaccgagaaagaaatcgtggactacgtggccagccaagtgaccaccgccaagaaactgagaggcggcgtggtgtttgtggacgaggtgccaaaaggcctgacaggcaagctggacgcccggaagatcagagagatcctgattaaggccaagaaaggcggcaagatcgccgtgtaatagctaactagacaaaacaccaaacaaacaaggcgccggcgtgctcacggacttaaataattgagccttaaagaagaaattctttaagtggatgctctcaaactcagggaaacctaaatctagttatagacaaggcaatcctgagccaagccgaagtagtaattagtaagttaacaatagatgacttacaactaatcggaaggtgcagagactcgacgggagctaccctaaaaaaacaaccaaaaaaaatctagatatcggatcccggg

SEQ ID NO: 3526 - DNA, 5111 bp, synthetic construct
  source 1..5111: mol_type = other DNA; note = Ana185 EH T75L30
aggctaggtggaggctcagtgtgataagtctgcgatggtggatgcatgtgtcatggtcatagctgtttcctgtgtgaaattgttatccgctcagagggcacaatcctattccgcgctatccgacaatctccaagacattaggtggagttcagttcggcgtatggcatatgtcgctggaaagaacatgtgagcaaaaggccagcaaaaggccaggaaccgtaaaaaggccgcgttgctggcgtttttccataggctccgcccccctgacgagcatcacaaaaatcgacgctcaagtcagaggtggcgaaacccgacaggactataaagataccaggcgtttccccctggaagctccctcgtgcgctctcctgttccgaccctgccgcttaccggatacctgtccgcctttctcccttcgggaagcgtggcgctttctcatagctcacgctgtaggtatctcagttcggtgtaggtcgttcgctccaagctgggctgtgtgcacgaaccccccgttcagcccgaccgctgcgccttatccggtaactatcgtcttgagtccaacccggtaagacacgacttatcgccactggcagcagccactggtaacaggattagcagagcgaggtatgtaggcggtgctacagagttcttgaagtggtggcctaactacggctacactagaagaacagtatttggtatctgcgctctgctgaagccagttaccttcggaaaaagagttggtagctcttgatccggcaaacaaaccaccgctggtagcggtggtttttttgtttgcaagcagcagattacgcgcagaaaaaaaggatctcaagaagatcctttgatcttttctacggggtctgacgctctattcaacaaagccgccgtcccgtcaagtcagcgtaaatgggtagggggcttcaaatcgtcctcgtgataccaattcggagcctgcttttttgtacaaacttgttgataatggcaattcaaggatcttcacctagatccttttaaattaaaaatgaagttttaaatcaatctaaagtatatatgagtaaacttggtctgacagttaccaatgcttaatcagtgaggcacctatctcagcgatctgtctatttcgttcatccatagttgcctgactccccgtcgtgtagataactacgatacgggagggcttaccatctggccccagtgctgcaatgataccgcgagagccacgctcaccggctccagatttatcagcaataaaccagccagccggaagggccgagcgcagaagtggtcctgcaactttatccgcctccatccagtctattaattgttgccgggaagctagagtaagtagttcgccagttaatagtttgcgcaacgttgttgccattgctacaggcatcgtggtgtcacgctcgtcgtttggtatggcttcattcagctccggttcccaacgatcaaggcgagttacatgatcccccatgttgtgcaaaaaagcggttagctccttcggtcctccgatcgttgtcagaagtaagttggccgcagtgttatcactcatggttatggcagcactgcataattctcttactgtcatgccatccgtaagatgcttttctgtgactggtgagtactcaaccaagtcattctgagaatagtgtatgcggcgaccgagttgctcttgcccggcgtcaatacgggataataccgcgccacatagcagaactttaaaagtgctcatcattggaaaacgttcttcggggcgaaaactctcaaggatcttaccgctgttgagatccagttcgatgtaacccactcgtgcacccaactgatcttcagcatcttttactttcaccagcgtttctgggtgagcaaaaacaggaaggcaaaatgccgcaaaaaagggaataagggcgacacggaaatgttgaatactcatactcttcctttttcaatattattgaagcatttatcagggttattgtctcatgagcggatacatatttgaatgtatttagaaaaataaacaaataggggttccgcgcacatttccccgaaaagtgccagatacctgaaacaaaacccatcgtacggccaaggaagtctccaataactgtgatccaccacaagcgccagggttttcccagtcacgacgttgtaaaacgacggccagtcatgcataatccgcacgcatctggaataaggaagtgccattccgcctgaccttaatacgactcactatagggagaccctcgaaaaaaaagctcgcactggccggaagctcgtcggagcgcacaaacacccgtcaagacgagggtaaagagagagtccaattctcaaagccaataggcagtagcgaaagctgcaagagaatgaaaatccgtggctcgcagcaaacaccaaacaaaacaaacacaaaccaacaaaaattaaaacagcctgtgggttgatcccacccacaggcccattgggcgctagcactctggtatcacggtacctttgtgcgcctgttttataccccctcccccaactgtaacttagaagtaacacacaccgatcaacagtcagcgtggcacaccagccacgttttgatcaagcacttctgttaccccggactgagtatcaatagactgctcacgcggttgaaggagaaagcgttcgttatccggccaactacttcgaaaaacctagtaacaccgtggaagttgcagagtgtttcgctcagcactaccccagtgtagatcaggtcgatgagtcaccgcattccccacgggcgaccgtggcggtggctgcgttggcggcctgcccatggggaaacccatgggacgctctaatacagacatggtgcgaagagtctattgagctagttggtagtcctccggcccctgaatgcggctaatcctaactgcggagcacacaccctcaagccagagggcagtgtgtcgtaacgggcaactctgcagcggaaccgactactttgggtgtccgtgtttcattttattcctatactggctgcttatggtgacaattgagagatcgttaccatatagctattggattggccatccggtgactaatagagctattatatatccctttgttgggtttataccacttagcttgaaagaggttaaaacattacaattcattgttaagttgaatacagcaaaatggaagatgccaagaacatcaagaagggccctgctccattctaccctctggaagatggaacagccggcgagcagctgcacaaggccatgaagagatatgccctggtgcctggcacaatcgccttcacagatgcccacatcgaggtggacatcacctacgccgagtacttcgagatgtctgtgcggctggccgaagctatgaagcgctacggcctgaacaccaaccaccggatcgtcgtgtgcagcgagaacagcctgcagttcttcatgcctgtgctgggcgccctgttcatcggagttgctgtggcccctgccaacgacatctacaacgagcgcgagctgctgaacagcatgggcatctctcagcccaccgtggtgttcgtgtccaagaagggactgcagaaaatcctgaacgtgcagaagaagctgcccatcatccagaaaatcatcatcatggacagcaagaccgactaccagggcttccagagcatgtacaccttcgtgaccagccatctgccacctggcttcaacgagtacgacttcgtgcccgagagcttcgaccgggacaagacaatcgccctgatcatgaacagcagcggctctaccggactgcccaaaggtgttgccctgcctcatagaactgcctgcgtgcggtttagccacgccagagatcccatcttcggcaaccagatcatccccgacacagccatcctgagcgtggtgccttttcaccacggcttcggcatgttcaccacactgggctacctgatctgcggcttcagagtggtgctgatgtaccgcttcgaggaagaactgttcctgcggagcctgcaggactacaagatccagtctgctctgctggtgcctactctgttcagcttctttgccaagagcaccctgatcgataagtacgacctgagcaacctgcacgagatcgcctctggcggagcccctctgtctaaagaagtgggagaagccgtcgccaagcggttccatctgcctggcatcagacaaggctatggcctgaccgagacaaccagcgccattctgattacccctgagggcgacgataagcctggcgctgtgggaaaagtggtgccattcttcgaggccaaggtggtggatctggacaccggcaaaacactgggcgttaaccagaggggcgagctgtgtgttagaggccctatgatcatgagcggctacgtgaacaaccccgaggccacaaacgctctgatcgacaaggatggatggctgcacagcggcgacattgcctactgggacgaagatgagcacttcttcatcgtggaccggctgaagtccctgatcaagtacaagggctaccaggtggccccagccgagctggaatctattctgctgcaacaccccaacatcttcgatgccggcgttgcaggactgcccgatgatgatgctggcgaactgccagctgctgtggtggtgctggaacacggcaagaccatgaccgagaaagaaatcgtggactacgtggccagccaagtgaccaccgccaagaaactgagaggcggcgtggtgtttgtggacgaggtgccaaaaggcctgacaggcaagctggacgcccggaagatcagagagatcctgattaaggccaagaaaggcggcaagatcgccgtgtaatagctaactagacaaaacaccaaacaaacaagctgcgagccacggacttaaataattgagccttaaagaagaaattctttaagtggatgctctcaaactcagggaaacctaaatctagttatagacaaggcaatcctgagccaagccgaagtagtaattagtaagttaacaatagatgacttacaactaatcggaaggtgcagagactcgacgggagctaccctaaaaaaacaacccgctccgacgagcttccggccagtgcgagcaaaaaaaatctagatatcggatcccggg

SEQ ID NO: 3527 - DNA, 5076 bp, synthetic construct
  source 1..5076: mol_type = other DNA; note = Ana185 40nt IS
aggctaggtggaggctcagtgtgataagtctgcgatggtggatgcatgtgtcatggtcatagctgtttcctgtgtgaaattgttatccgctcagagggcacaatcctattccgcgctatccgacaatctccaagacattaggtggagttcagttcggcgtatggcatatgtcgctggaaagaacatgtgagcaaaaggccagcaaaaggccaggaaccgtaaaaaggccgcgttgctggcgtttttccataggctccgcccccctgacgagcatcacaaaaatcgacgctcaagtcagaggtggcgaaacccgacaggactataaagataccaggcgtttccccctggaagctccctcgtgcgctctcctgttccgaccctgccgcttaccggatacctgtccgcctttctcccttcgggaagcgtggcgctttctcatagctcacgctgtaggtatctcagttcggtgtaggtcgttcgctccaagctgggctgtgtgcacgaaccccccgttcagcccgaccgctgcgccttatccggtaactatcgtcttgagtccaacccggtaagacacgacttatcgccactggcagcagccactggtaacaggattagcagagcgaggtatgtaggcggtgctacagagttcttgaagtggtggcctaactacggctacactagaagaacagtatttggtatctgcgctctgctgaagccagttaccttcggaaaaagagttggtagctcttgatccggcaaacaaaccaccgctggtagcggtggtttttttgtttgcaagcagcagattacgcgcagaaaaaaaggatctcaagaagatcctttgatcttttctacggggtctgacgctctattcaacaaagccgccgtcccgtcaagtcagcgtaaatgggtagggggcttcaaatcgtcctcgtgataccaattcggagcctgcttttttgtacaaacttgttgataatggcaattcaaggatcttcacctagatccttttaaattaaaaatgaagttttaaatcaatctaaagtatatatgagtaaacttggtctgacagttaccaatgcttaatcagtgaggcacctatctcagcgatctgtctatttcgttcatccatagttgcctgactccccgtcgtgtagataactacgatacgggagggcttaccatctggccccagtgctgcaatgataccgcgagagccacgctcaccggctccagatttatcagcaataaaccagccagccggaagggccgagcgcagaagtggtcctgcaactttatccgcctccatccagtctattaattgttgccgggaagctagagtaagtagttcgccagttaatagtttgcgcaacgttgttgccattgctacaggcatcgtggtgtcacgctcgtcgtttggtatggcttcattcagctccggttcccaacgatcaaggcgagttacatgatcccccatgttgtgcaaaaaagcggttagctccttcggtcctccgatcgttgtcagaagtaagttggccgcagtgttatcactcatggttatggcagcactgcataattctcttactgtcatgccatccgtaagatgcttttctgtgactggtgagtactcaaccaagtcattctgagaatagtgtatgcggcgaccgagttgctcttgcccggcgtcaatacgggataataccgcgccacatagcagaactttaaaagtgctcatcattggaaaacgttcttcggggcgaaaactctcaaggatcttaccgctgttgagatccagttcgatgtaacccactcgtgcacccaactgatcttcagcatcttttactttcaccagcgtttctgggtgagcaaaaacaggaaggcaaaatgccgcaaaaaagggaataagggcgacacggaaatgttgaatactcatactcttcctttttcaatattattgaagcatttatcagggttattgtctcatgagcggatacatatttgaatgtatttagaaaaataaacaaataggggttccgcgcacatttccccgaaaagtgccagatacctgaaacaaaacccatcgtacggccaaggaagtctccaataactgtgatccaccacaagcgccagggttttcccagtcacgacgttgtaaaacgacggccagtcatgcataatccgcacgcatctggaataaggaagtgccattccgcctgaccttaatacgactcactatagggagaccctcgaaaaaaaacacaaacacccgtcaagacgagggtaaagagagagtccaattctcaaagccaataggcagtagcgaaagctgcaagagaatgaaaatccgtggctcgcagcaataatgccacactaagagaacaaacaaagagctaagcaattaaaacagcctgtgggttgatcccacccacaggcccattgggcgctagcactctggtatcacggtacctttgtgcgcctgttttataccccctcccccaactgtaacttagaagtaacacacaccgatcaacagtcagcgtggcacaccagccacgttttgatcaagcacttctgttaccccggactgagtatcaatagactgctcacgcggttgaaggagaaagcgttcgttatccggccaactacttcgaaaaacctagtaacaccgtggaagttgcagagtgtttcgctcagcactaccccagtgtagatcaggtcgatgagtcaccgcattccccacgggcgaccgtggcggtggctgcgttggcggcctgcccatggggaaacccatgggacgctctaatacagacatggtgcgaagagtctattgagctagttggtagtcctccggcccctgaatgcggctaatcctaactgcggagcacacaccctcaagccagagggcagtgtgtcgtaacgggcaactctgcagcggaaccgactactttgggtgtccgtgtttcattttattcctatactggctgcttatggtgacaattgagagatcgttaccatatagctattggattggccatccggtgactaatagagctattatatatccctttgttgggtttataccacttagcttgaaagaggttaaaacattacaattcattgttaagttgaatacagcaaaatggaagatgccaagaacatcaagaagggccctgctccattctaccctctggaagatggaacagccggcgagcagctgcacaaggccatgaagagatatgccctggtgcctggcacaatcgccttcacagatgcccacatcgaggtggacatcacctacgccgagtacttcgagatgtctgtgcggctggccgaagctatgaagcgctacggcctgaacaccaaccaccggatcgtcgtgtgcagcgagaacagcctgcagttcttcatgcctgtgctgggcgccctgttcatcggagttgctgtggcccctgccaacgacatctacaacgagcgcgagctgctgaacagcatgggcatctctcagcccaccgtggtgttcgtgtccaagaagggactgcagaaaatcctgaacgtgcagaagaagctgcccatcatccagaaaatcatcatcatggacagcaagaccgactaccagggcttccagagcatgtacaccttcgtgaccagccatctgccacctggcttcaacgagtacgacttcgtgcccgagagcttcgaccgggacaagacaatcgccctgatcatgaacagcagcggctctaccggactgcccaaaggtgttgccctgcctcatagaactgcctgcgtgcggtttagccacgccagagatcccatcttcggcaaccagatcatccccgacacagccatcctgagcgtggtgccttttcaccacggcttcggcatgttcaccacactgggctacctgatctgcggcttcagagtggtgctgatgtaccgcttcgaggaagaactgttcctgcggagcctgcaggactacaagatccagtctgctctgctggtgcctactctgttcagcttctttgccaagagcaccctgatcgataagtacgacctgagcaacctgcacgagatcgcctctggcggagcccctctgtctaaagaagtgggagaagccgtcgccaagcggttccatctgcctggcatcagacaaggctatggcctgaccgagacaaccagcgccattctgattacccctgagggcgacgataagcctggcgctgtgggaaaagtggtgccattcttcgaggccaaggtggtggatctggacaccggcaaaacactgggcgttaaccagaggggcgagctgtgtgttagaggccctatgatcatgagcggctacgtgaacaaccccgaggccacaaacgctctgatcgacaaggatggatggctgcacagcggcgacattgcctactgggacgaagatgagcacttcttcatcgtggaccggctgaagtccctgatcaagtacaagggctaccaggtggccccagccgagctggaatctattctgctgcaacaccccaacatcttcgatgccggcgttgcaggactgcccgatgatgatgctggcgaactgccagctgctgtggtggtgctggaacacggcaagaccatgaccgagaaagaaatcgtggactacgtggccagccaagtgaccaccgccaagaaactgagaggcggcgtggtgtttgtggacgaggtgccaaaaggcctgacaggcaagctggacgcccggaagatcagagagatcctgattaaggccaagaaaggcggcaagatcgccgtgtaatagctaactagaataatgacacacgacaagaacaatcataccactaagcaagctgcgagccacggacttaaataattgagccttaaagaagaaattctttaagtggatgctctcaaactcagggaaacctaaatctagttatagacaaggcaatcctgagccaagccgaagtagtaattagtaagttaacaatagatgacttacaactaatcggaaggtgcagagactcgacgggagctaccctaaaaaaacaaccaaaaaaaatctagatatcggatcccggg

SEQ ID NO: 3528 - DNA, 5036 bp, synthetic construct
  source 1..5036: mol_type = other DNA; note = Ana185 20nt IS
aggctaggtggaggctcagtgtgataagtctgcgatggtggatgcatgtgtcatggtcatagctgtttcctgtgtgaaattgttatccgctcagagggcacaatcctattccgcgctatccgacaatctccaagacattaggtggagttcagttcggcgtatggcatatgtcgctggaaagaacatgtgagcaaaaggccagcaaaaggccaggaaccgtaaaaaggccgcgttgctggcgtttttccataggctccgcccccctgacgagcatcacaaaaatcgacgctcaagtcagaggtggcgaaacccgacaggactataaagataccaggcgtttccccctggaagctccctcgtgcgctctcctgttccgaccctgccgcttaccggatacctgtccgcctttctcccttcgggaagcgtggcgctttctcatagctcacgctgtaggtatctcagttcggtgtaggtcgttcgctccaagctgggctgtgtgcacgaaccccccgttcagcccgaccgctgcgccttatccggtaactatcgtcttgagtccaacccggtaagacacgacttatcgccactggcagcagccactggtaacaggattagcagagcgaggtatgtaggcggtgctacagagttcttgaagtggtggcctaactacggctacactagaagaacagtatttggtatctgcgctctgctgaagccagttaccttcggaaaaagagttggtagctcttgatccggcaaacaaaccaccgctggtagcggtggtttttttgtttgcaagcagcagattacgcgcagaaaaaaaggatctcaagaagatcctttgatcttttctacggggtctgacgctctattcaacaaagccgccgtcccgtcaagtcagcgtaaatgggtagggggcttcaaatcgtcctcgtgataccaattcggagcctgcttttttgtacaaacttgttgataatggcaattcaaggatcttcacctagatccttttaaattaaaaatgaagttttaaatcaatctaaagtatatatgagtaaacttggtctgacagttaccaatgcttaatcagtgaggcacctatctcagcgatctgtctatttcgttcatccatagttgcctgactccccgtcgtgtagataactacgatacgggagggcttaccatctggccccagtgctgcaatgataccgcgagagccacgctcaccggctccagatttatcagcaataaaccagccagccggaagggccgagcgcagaagtggtcctgcaactttatccgcctccatccagtctattaattgttgccgggaagctagagtaagtagttcgccagttaatagtttgcgcaacgttgttgccattgctacaggcatcgtggtgtcacgctcgtcgtttggtatggcttcattcagctccggttcccaacgatcaaggcgagttacatgatcccccatgttgtgcaaaaaagcggttagctccttcggtcctccgatcgttgtcagaagtaagttggccgcagtgttatcactcatggttatggcagcactgcataattctcttactgtcatgccatccgtaagatgcttttctgtgactggtgagtactcaaccaagtcattctgagaatagtgtatgcggcgaccgagttgctcttgcccggcgtcaatacgggataataccgcgccacatagcagaactttaaaagtgctcatcattggaaaacgttcttcggggcgaaaactctcaaggatcttaccgctgttgagatccagttcgatgtaacccactcgtgcacccaactgatcttcagcatcttttactttcaccagcgtttctgggtgagcaaaaacaggaaggcaaaatgccgcaaaaaagggaataagggcgacacggaaatgttgaatactcatactcttcctttttcaatattattgaagcatttatcagggttattgtctcatgagcggatacatatttgaatgtatttagaaaaataaacaaataggggttccgcgcacatttccccgaaaagtgccagatacctgaaacaaaacccatcgtacggccaaggaagtctccaataactgtgatccaccacaagcgccagggttttcccagtcacgacgttgtaaaacgacggccagtcatgcataatccgcacgcatctggaataaggaagtgccattccgcctgaccttaatacgactcactatagggagaccctcgaaaaaaaacacaaacacccgtcaagacgagggtaaagagagagtccaattctcaaagccaataggcagtagcgaaagctgcaagagaatgaaaatccgtggctcgcagcagatccactacaagtaagatttaaaacagcctgtgggttgatcccacccacaggcccattgggcgctagcactctggtatcacggtacctttgtgcgcctgttttataccccctcccccaactgtaacttagaagtaacacacaccgatcaacagtcagcgtggcacaccagccacgttttgatcaagcacttctgttaccccggactgagtatcaatagactgctcacgcggttgaaggagaaagcgttcgttatccggccaactacttcgaaaaacctagtaacaccgtggaagttgcagagtgtttcgctcagcactaccccagtgtagatcaggtcgatgagtcaccgcattccccacgggcgaccgtggcggtggctgcgttggcggcctgcccatggggaaacccatgggacgctctaatacagacatggtgcgaagagtctattgagctagttggtagtcctccggcccctgaatgcggctaatcctaactgcggagcacacaccctcaagccagagggcagtgtgtcgtaacgggcaactctgcagcggaaccgactactttgggtgtccgtgtttcattttattcctatactggctgcttatggtgacaattgagagatcgttaccatatagctattggattggccatccggtgactaatagagctattatatatccctttgttgggtttataccacttagcttgaaagaggttaaaacattacaattcattgttaagttgaatacagcaaaatggaagatgccaagaacatcaagaagggccctgctccattctaccctctggaagatggaacagccggcgagcagctgcacaaggccatgaagagatatgccctggtgcctggcacaatcgccttcacagatgcccacatcgaggtggacatcacctacgccgagtacttcgagatgtctgtgcggctggccgaagctatgaagcgctacggcctgaacaccaaccaccggatcgtcgtgtgcagcgagaacagcctgcagttcttcatgcctgtgctgggcgccctgttcatcggagttgctgtggcccctgccaacgacatctacaacgagcgcgagctgctgaacagcatgggcatctctcagcccaccgtggtgttcgtgtccaagaagggactgcagaaaatcctgaacgtgcagaagaagctgcccatcatccagaaaatcatcatcatggacagcaagaccgactaccagggcttccagagcatgtacaccttcgtgaccagccatctgccacctggcttcaacgagtacgacttcgtgcccgagagcttcgaccgggacaagacaatcgccctgatcatgaacagcagcggctctaccggactgcccaaaggtgttgccctgcctcatagaactgcctgcgtgcggtttagccacgccagagatcccatcttcggcaaccagatcatccccgacacagccatcctgagcgtggtgccttttcaccacggcttcggcatgttcaccacactgggctacctgatctgcggcttcagagtggtgctgatgtaccgcttcgaggaagaactgttcctgcggagcctgcaggactacaagatccagtctgctctgctggtgcctactctgttcagcttctttgccaagagcaccctgatcgataagtacgacctgagcaacctgcacgagatcgcctctggcggagcccctctgtctaaagaagtgggagaagccgtcgccaagcggttccatctgcctggcatcagacaaggctatggcctgaccgagacaaccagcgccattctgattacccctgagggcgacgataagcctggcgctgtgggaaaagtggtgccattcttcgaggccaaggtggtggatctggacaccggcaaaacactgggcgttaaccagaggggcgagctgtgtgttagaggccctatgatcatgagcggctacgtgaacaaccccgaggccacaaacgctctgatcgacaaggatggatggctgcacagcggcgacattgcctactgggacgaagatgagcacttcttcatcgtggaccggctgaagtccctgatcaagtacaagggctaccaggtggccccagccgagctggaatctattctgctgcaacaccccaacatcttcgatgccggcgttgcaggactgcccgatgatgatgctggcgaactgccagctgctgtggtggtgctggaacacggcaagaccatgaccgagaaagaaatcgtggactacgtggccagccaagtgaccaccgccaagaaactgagaggcggcgtggtgtttgtggacgaggtgccaaaaggcctgacaggcaagctggacgcccggaagatcagagagatcctgattaaggccaagaaaggcggcaagatcgccgtgtaatagctaactagagatagaatccaactaacctgctgcgagccacggacttaaataattgagccttaaagaagaaattctttaagtggatgctctcaaactcagggaaacctaaatctagttatagacaaggcaatcctgagccaagccgaagtagtaattagtaagttaacaatagatgacttacaactaatcggaaggtgcagagactcgacgggagctaccctaaaaaaacaaccaaaaaaaatctagatatcggatcccggg

SEQ ID NO: 3529 - DNA, 5109 bp, synthetic construct
  source 1..5109: mol_type = other DNA; note = Ana185 40nt ES
aggctaggtggaggctcagtgtgataagtctgcgatggtggatgcatgtgtcatggtcatagctgtttcctgtgtgaaattgttatccgctcagagggcacaatcctattccgcgctatccgacaatctccaagacattaggtggagttcagttcggcgtatggcatatgtcgctggaaagaacatgtgagcaaaaggccagcaaaaggccaggaaccgtaaaaaggccgcgttgctggcgtttttccataggctccgcccccctgacgagcatcacaaaaatcgacgctcaagtcagaggtggcgaaacccgacaggactataaagataccaggcgtttccccctggaagctccctcgtgcgctctcctgttccgaccctgccgcttaccggatacctgtccgcctttctcccttcgggaagcgtggcgctttctcatagctcacgctgtaggtatctcagttcggtgtaggtcgttcgctccaagctgggctgtgtgcacgaaccccccgttcagcccgaccgctgcgccttatccggtaactatcgtcttgagtccaacccggtaagacacgacttatcgccactggcagcagccactggtaacaggattagcagagcgaggtatgtaggcggtgctacagagttcttgaagtggtggcctaactacggctacactagaagaacagtatttggtatctgcgctctgctgaagccagttaccttcggaaaaagagttggtagctcttgatccggcaaacaaaccaccgctggtagcggtggtttttttgtttgcaagcagcagattacgcgcagaaaaaaaggatctcaagaagatcctttgatcttttctacggggtctgacgctctattcaacaaagccgccgtcccgtcaagtcagcgtaaatgggtagggggcttcaaatcgtcctcgtgataccaattcggagcctgcttttttgtacaaacttgttgataatggcaattcaaggatcttcacctagatccttttaaattaaaaatgaagttttaaatcaatctaaagtatatatgagtaaacttggtctgacagttaccaatgcttaatcagtgaggcacctatctcagcgatctgtctatttcgttcatccatagttgcctgactccccgtcgtgtagataactacgatacgggagggcttaccatctggccccagtgctgcaatgataccgcgagagccacgctcaccggctccagatttatcagcaataaaccagccagccggaagggccgagcgcagaagtggtcctgcaactttatccgcctccatccagtctattaattgttgccgggaagctagagtaagtagttcgccagttaatagtttgcgcaacgttgttgccattgctacaggcatcgtggtgtcacgctcgtcgtttggtatggcttcattcagctccggttcccaacgatcaaggcgagttacatgatcccccatgttgtgcaaaaaagcggttagctccttcggtcctccgatcgttgtcagaagtaagttggccgcagtgttatcactcatggttatggcagcactgcataattctcttactgtcatgccatccgtaagatgcttttctgtgactggtgagtactcaaccaagtcattctgagaatagtgtatgcggcgaccgagttgctcttgcccggcgtcaatacgggataataccgcgccacatagcagaactttaaaagtgctcatcattggaaaacgttcttcggggcgaaaactctcaaggatcttaccgctgttgagatccagttcgatgtaacccactcgtgcacccaactgatcttcagcatcttttactttcaccagcgtttctgggtgagcaaaaacaggaaggcaaaatgccgcaaaaaagggaataagggcgacacggaaatgttgaatactcatactcttcctttttcaatattattgaagcatttatcagggttattgtctcatgagcggatacatatttgaatgtatttagaaaaataaacaaataggggttccgcgcacatttccccgaaaagtgccagatacctgaaacaaaacccatcgtacggccaaggaagtctccaataactgtgatccaccacaagcgccagggttttcccagtcacgacgttgtaaaacgacggccagtcatgcataatccgcacgcatctggaataaggaagtgccattccgcctgaccttaatacgactcactatagggagaccctcgaaaaaaaaataatgacacactacgagaacaaccatagaactaagcaacgtcaagacgagggtaaagagagagtccaattctcaaagccaataggcagtagcgaaagctgcaagagaatgaaaatccgtggctcgcagcaaacaccaaacaaaacaaacacaaaccaacaaaaattaaaacagcctgtgggttgatcccacccacaggcccattgggcgctagcactctggtatcacggtacctttgtgcgcctgttttataccccctcccccaactgtaacttagaagtaacacacaccgatcaacagtcagcgtggcacaccagccacgttttgatcaagcacttctgttaccccggactgagtatcaatagactgctcacgcggttgaaggagaaagcgttcgttatccggccaactacttcgaaaaacctagtaacaccgtggaagttgcagagtgtttcgctcagcactaccccagtgtagatcaggtcgatgagtcaccgcattccccacgggcgaccgtggcggtggctgcgttggcggcctgcccatggggaaacccatgggacgctctaatacagacatggtgcgaagagtctattgagctagttggtagtcctccggcccctgaatgcggctaatcctaactgcggagcacacaccctcaagccagagggcagtgtgtcgtaacgggcaactctgcagcggaaccgactactttgggtgtccgtgtttcattttattcctatactggctgcttatggtgacaattgagagatcgttaccatatagctattggattggccatccggtgactaatagagctattatatatccctttgttgggtttataccacttagcttgaaagaggttaaaacattacaattcattgttaagttgaatacagcaaaatggaagatgccaagaacatcaagaagggccctgctccattctaccctctggaagatggaacagccggcgagcagctgcacaaggccatgaagagatatgccctggtgcctggcacaatcgccttcacagatgcccacatcgaggtggacatcacctacgccgagtacttcgagatgtctgtgcggctggccgaagctatgaagcgctacggcctgaacaccaaccaccggatcgtcgtgtgcagcgagaacagcctgcagttcttcatgcctgtgctgggcgccctgttcatcggagttgctgtggcccctgccaacgacatctacaacgagcgcgagctgctgaacagcatgggcatctctcagcccaccgtggtgttcgtgtccaagaagggactgcagaaaatcctgaacgtgcagaagaagctgcccatcatccagaaaatcatcatcatggacagcaagaccgactaccagggcttccagagcatgtacaccttcgtgaccagccatctgccacctggcttcaacgagtacgacttcgtgcccgagagcttcgaccgggacaagacaatcgccctgatcatgaacagcagcggctctaccggactgcccaaaggtgttgccctgcctcatagaactgcctgcgtgcggtttagccacgccagagatcccatcttcggcaaccagatcatccccgacacagccatcctgagcgtggtgccttttcaccacggcttcggcatgttcaccacactgggctacctgatctgcggcttcagagtggtgctgatgtaccgcttcgaggaagaactgttcctgcggagcctgcaggactacaagatccagtctgctctgctggtgcctactctgttcagcttctttgccaagagcaccctgatcgataagtacgacctgagcaacctgcacgagatcgcctctggcggagcccctctgtctaaagaagtgggagaagccgtcgccaagcggttccatctgcctggcatcagacaaggctatggcctgaccgagacaaccagcgccattctgattacccctgagggcgacgataagcctggcgctgtgggaaaagtggtgccattcttcgaggccaaggtggtggatctggacaccggcaaaacactgggcgttaaccagaggggcgagctgtgtgttagaggccctatgatcatgagcggctacgtgaacaaccccgaggccacaaacgctctgatcgacaaggatggatggctgcacagcggcgacattgcctactgggacgaagatgagcacttcttcatcgtggaccggctgaagtccctgatcaagtacaagggctaccaggtggccccagccgagctggaatctattctgctgcaacaccccaacatcttcgatgccggcgttgcaggactgcccgatgatgatgctggcgaactgccagctgctgtggtggtgctggaacacggcaagaccatgaccgagaaagaaatcgtggactacgtggccagccaagtgaccaccgccaagaaactgagaggcggcgtggtgtttgtggacgaggtgccaaaaggcctgacaggcaagctggacgcccggaagatcagagagatcctgattaaggccaagaaaggcggcaagatcgccgtgtaatagctaactagacaaaacaccaaacaaacaagctgcgagccacggacttaaataattgagccttaaagaagaaattctttaagtggatgctctcaaactcagggaaacctaaatctagttatagacaaggcaatcctgagccaagccgaagtagtaattagtaagttaacaatagatgacttacaactaatcggaaggtgcagagactcgacgggagctaccctaaaataatgaaagactacgagatcaaccatagagctaaccaaaaaaaaatctagatatcggatcccggg

SEQ ID NO: 3530 - DNA, 5071 bp, synthetic construct
  source 1..5071: mol_type = other DNA; note = Ana185 20nt ES
aggctaggtggaggctcagtgtgataagtctgcgatggtggatgcatgtgtcatggtcatagctgtttcctgtgtgaaattgttatccgctcagagggcacaatcctattccgcgctatccgacaatctccaagacattaggtggagttcagttcggcgtatggcatatgtcgctggaaagaacatgtgagcaaaaggccagcaaaaggccaggaaccgtaaaaaggccgcgttgctggcgtttttccataggctccgcccccctgacgagcatcacaaaaatcgacgctcaagtcagaggtggcgaaacccgacaggactataaagataccaggcgtttccccctggaagctccctcgtgcgctctcctgttccgaccctgccgcttaccggatacctgtccgcctttctcccttcgggaagcgtggcgctttctcatagctcacgctgtaggtatctcagttcggtgtaggtcgttcgctccaagctgggctgtgtgcacgaaccccccgttcagcccgaccgctgcgccttatccggtaactatcgtcttgagtccaacccggtaagacacgacttatcgccactggcagcagccactggtaacaggattagcagagcgaggtatgtaggcggtgctacagagttcttgaagtggtggcctaactacggctacactagaagaacagtatttggtatctgcgctctgctgaagccagttaccttcggaaaaagagttggtagctcttgatccggcaaacaaaccaccgctggtagcggtggtttttttgtttgcaagcagcagattacgcgcagaaaaaaaggatctcaagaagatcctttgatcttttctacggggtctgacgctctattcaacaaagccgccgtcccgtcaagtcagcgtaaatgggtagggggcttcaaatcgtcctcgtgataccaattcggagcctgcttttttgtacaaacttgttgataatggcaattcaaggatcttcacctagatccttttaaattaaaaatgaagttttaaatcaatctaaagtatatatgagtaaacttggtctgacagttaccaatgcttaatcagtgaggcacctatctcagcgatctgtctatttcgttcatccatagttgcctgactccccgtcgtgtagataactacgatacgggagggcttaccatctggccccagtgctgcaatgataccgcgagagccacgctcaccggctccagatttatcagcaataaaccagccagccggaagggccgagcgcagaagtggtcctgcaactttatccgcctccatccagtctattaattgttgccgggaagctagagtaagtagttcgccagttaatagtttgcgcaacgttgttgccattgctacaggcatcgtggtgtcacgctcgtcgtttggtatggcttcattcagctccggttcccaacgatcaaggcgagttacatgatcccccatgttgtgcaaaaaagcggttagctccttcggtcctccgatcgttgtcagaagtaagttggccgcagtgttatcactcatggttatggcagcactgcataattctcttactgtcatgccatccgtaagatgcttttctgtgactggtgagtactcaaccaagtcattctgagaatagtgtatgcggcgaccgagttgctcttgcccggcgtcaatacgggataataccgcgccacatagcagaactttaaaagtgctcatcattggaaaacgttcttcggggcgaaaactctcaaggatcttaccgctgttgagatccagttcgatgtaacccactcgtgcacccaactgatcttcagcatcttttactttcaccagcgtttctgggtgagcaaaaacaggaaggcaaaatgccgcaaaaaagggaataagggcgacacggaaatgttgaatactcatactcttcctttttcaatattattgaagcatttatcagggttattgtctcatgagcggatacatatttgaatgtatttagaaaaataaacaaataggggttccgcgcacatttccccgaaaagtgccagatacctgaaacaaaacccatcgtacggccaaggaagtctccaataactgtgatccaccacaagcgccagggttttcccagtcacgacgttgtaaaacgacggccagtcatgcataatccgcacgcatctggaataaggaagtgccattccgcctgaccttaatacgactcactatagggagaccctcgaaaaaaaaagatacacttcaactaagctcgtcaagacgagggtaaagagagagtccaattctcaaagccaataggcagtagcgaaagctgcaagagaatgaaaatccgtggctcgcagcaaacaccaaacaaaacaaacacaaaccaacaaaaattaaaacagcctgtgggttgatcccacccacaggcccattgggcgctagcactctggtatcacggtacctttgtgcgcctgttttataccccctcccccaactgtaacttagaagtaacacacaccgatcaacagtcagcgtggcacaccagccacgttttgatcaagcacttctgttaccccggactgagtatcaatagactgctcacgcggttgaaggagaaagcgttcgttatccggccaactacttcgaaaaacctagtaacaccgtggaagttgcagagtgtttcgctcagcactaccccagtgtagatcaggtcgatgagtcaccgcattccccacgggcgaccgtggcggtggctgcgttggcggcctgcccatggggaaacccatgggacgctctaatacagacatggtgcgaagagtctattgagctagttggtagtcctccggcccctgaatgcggctaatcctaactgcggagcacacaccctcaagccagagggcagtgtgtcgtaacgggcaactctgcagcggaaccgactactttgggtgtccgtgtttcattttattcctatactggctgcttatggtgacaattgagagatcgttaccatatagctattggattggccatccggtgactaatagagctattatatatccctttgttgggtttataccacttagcttgaaagaggttaaaacattacaattcattgttaagttgaatacagcaaaatggaagatgccaagaacatcaagaagggccctgctccattctaccctctggaagatggaacagccggcgagcagctgcacaaggccatgaagagatatgccctggtgcctggcacaatcgccttcacagatgcccacatcgaggtggacatcacctacgccgagtacttcgagatgtctgtgcggctggccgaagctatgaagcgctacggcctgaacaccaaccaccggatcgtcgtgtgcagcgagaacagcctgcagttcttcatgcctgtgctgggcgccctgttcatcggagttgctgtggcccctgccaacgacatctacaacgagcgcgagctgctgaacagcatgggcatctctcagcccaccgtggtgttcgtgtccaagaagggactgcagaaaatcctgaacgtgcagaagaagctgcccatcatccagaaaatcatcatcatggacagcaagaccgactaccagggcttccagagcatgtacaccttcgtgaccagccatctgccacctggcttcaacgagtacgacttcgtgcccgagagcttcgaccgggacaagacaatcgccctgatcatgaacagcagcggctctaccggactgcccaaaggtgttgccctgcctcatagaactgcctgcgtgcggtttagccacgccagagatcccatcttcggcaaccagatcatccccgacacagccatcctgagcgtggtgccttttcaccacggcttcggcatgttcaccacactgggctacctgatctgcggcttcagagtggtgctgatgtaccgcttcgaggaagaactgttcctgcggagcctgcaggactacaagatccagtctgctctgctggtgcctactctgttcagcttctttgccaagagcaccctgatcgataagtacgacctgagcaacctgcacgagatcgcctctggcggagcccctctgtctaaagaagtgggagaagccgtcgccaagcggttccatctgcctggcatcagacaaggctatggcctgaccgagacaaccagcgccattctgattacccctgagggcgacgataagcctggcgctgtgggaaaagtggtgccattcttcgaggccaaggtggtggatctggacaccggcaaaacactgggcgttaaccagaggggcgagctgtgtgttagaggccctatgatcatgagcggctacgtgaacaaccccgaggccacaaacgctctgatcgacaaggatggatggctgcacagcggcgacattgcctactgggacgaagatgagcacttcttcatcgtggaccggctgaagtccctgatcaagtacaagggctaccaggtggccccagccgagctggaatctattctgctgcaacaccccaacatcttcgatgccggcgttgcaggactgcccgatgatgatgctggcgaactgccagctgctgtggtggtgctggaacacggcaagaccatgaccgagaaagaaatcgtggactacgtggccagccaagtgaccaccgccaagaaactgagaggcggcgtggtgtttgtggacgaggtgccaaaaggcctgacaggcaagctggacgcccggaagatcagagagatcctgattaaggccaagaaaggcggcaagatcgccgtgtaatagctaactagacaaaacaccaaacaaacaagctgcgagccacggacttaaataattgagccttaaagaagaaattctttaagtggatgctctcaaactcagggaaacctaaatctagttatagacaaggcaatcctgagccaagccgaagtagtaattagtaagttaacaatagatgacttacaactaatcggaaggtgcagagactcgacgggagctaccctaaacatacacatgaacttagctaaaaaaaatctagatatcggatcccggg

SEQ ID NO: 3531 - DNA, 5231 bp, synthetic construct
  source 1..5231: mol_type = other DNA; note = Ana185 rational design
aggctaggtggaggctcagtgtgataagtctgcgatggtggatgcatgtgtcatggtcatagctgtttcctgtgtgaaattgttatccgctcagagggcacaatcctattccgcgctatccgacaatctccaagacattaggtggagttcagttcggcgtatggcatatgtcgctggaaagaacatgtgagcaaaaggccagcaaaaggccaggaaccgtaaaaaggccgcgttgctggcgtttttccataggctccgcccccctgacgagcatcacaaaaatcgacgctcaagtcagaggtggcgaaacccgacaggactataaagataccaggcgtttccccctggaagctccctcgtgcgctctcctgttccgaccctgccgcttaccggatacctgtccgcctttctcccttcgggaagcgtggcgctttctcatagctcacgctgtaggtatctcagttcggtgtaggtcgttcgctccaagctgggctgtgtgcacgaaccccccgttcagcccgaccgctgcgccttatccggtaactatcgtcttgagtccaacccggtaagacacgacttatcgccactggcagcagccactggtaacaggattagcagagcgaggtatgtaggcggtgctacagagttcttgaagtggtggcctaactacggctacactagaagaacagtatttggtatctgcgctctgctgaagccagttaccttcggaaaaagagttggtagctcttgatccggcaaacaaaccaccgctggtagcggtggtttttttgtttgcaagcagcagattacgcgcagaaaaaaaggatctcaagaagatcctttgatcttttctacggggtctgacgctctattcaacaaagccgccgtcccgtcaagtcagcgtaaatgggtagggggcttcaaatcgtcctcgtgataccaattcggagcctgcttttttgtacaaacttgttgataatggcaattcaaggatcttcacctagatccttttaaattaaaaatgaagttttaaatcaatctaaagtatatatgagtaaacttggtctgacagttaccaatgcttaatcagtgaggcacctatctcagcgatctgtctatttcgttcatccatagttgcctgactccccgtcgtgtagataactacgatacgggagggcttaccatctggccccagtgctgcaatgataccgcgagagccacgctcaccggctccagatttatcagcaataaaccagccagccggaagggccgagcgcagaagtggtcctgcaactttatccgcctccatccagtctattaattgttgccgggaagctagagtaagtagttcgccagttaatagtttgcgcaacgttgttgccattgctacaggcatcgtggtgtcacgctcgtcgtttggtatggcttcattcagctccggttcccaacgatcaaggcgagttacatgatcccccatgttgtgcaaaaaagcggttagctccttcggtcctccgatcgttgtcagaagtaagttggccgcagtgttatcactcatggttatggcagcactgcataattctcttactgtcatgccatccgtaagatgcttttctgtgactggtgagtactcaaccaagtcattctgagaatagtgtatgcggcgaccgagttgctcttgcccggcgtcaatacgggataataccgcgccacatagcagaactttaaaagtgctcatcattggaaaacgttcttcggggcgaaaactctcaaggatcttaccgctgttgagatccagttcgatgtaacccactcgtgcacccaactgatcttcagcatcttttactttcaccagcgtttctgggtgagcaaaaacaggaaggcaaaatgccgcaaaaaagggaataagggcgacacggaaatgttgaatactcatactcttcctttttcaatattattgaagcatttatcagggttattgtctcatgagcggatacatatttgaatgtatttagaaaaataaacaaataggggttccgcgcacatttccccgaaaagtgccagatacctgaaacaaaacccatcgtacggccaaggaagtctccaataactgtgatccaccacaagcgccagggttttcccagtcacgacgttgtaaaacgacggccagtcatgcataatccgcacgcatctggaataaggaagtgccattccgcctgaccttaatacgactcactatagggagaccctcgaaaaaaaagcttcgaatgcgaccatctgctcaggctcaatctcgctccaataatgacacactacgagaacaaccatagaactaagcaacgtcaagacgagggtaaagagagagtccaattctcaaagccaataggcagtagcgaaagctgcaagagaatgaaaatccgttgaccttaaacggtcgtgtggggagcacgccggcgccaataatgccacactaagagaacaaacaaagagctaagcaattaaaacagcctgtgggttgatcccacccacaggcccattgggcgctagcactctggtatcacggtacctttgtgcgcctgttttataccccctcccccaactgtaacttagaagtaacacacaccgatcaacagtcagcgtggcacaccagccacgttttgatcaagcacttctgttaccccggactgagtatcaatagactgctcacgcggttgaaggagaaagcgttcgttatccggccaactacttcgaaaaacctagtaacaccgtggaagttgcagagtgtttcgctcagcactaccccagtgtagatcaggtcgatgagtcaccgcattccccacgggcgaccgtggcggtggctgcgttggcggcctgcccatggggaaacccatgggacgctctaatacagacatggtgcgaagagtctattgagctagttggtagtcctccggcccctgaatgcggctaatcctaactgcggagcacacaccctcaagccagagggcagtgtgtcgtaacgggcaactctgcagcggaaccgactactttgggtgtccgtgtttcattttattcctatactggctgcttatggtgacaattgagagatcgttaccatatagctattggattggccatccggtgactaatagagctattatatatccctttgttgggtttataccacttagcttgaaagaggttaaaacattacaattcattgttaagttgaatacagcaaaatggaagatgccaagaacatcaagaagggccctgctccattctaccctctggaagatggaacagccggcgagcagctgcacaaggccatgaagagatatgccctggtgcctggcacaatcgccttcacagatgcccacatcgaggtggacatcacctacgccgagtacttcgagatgtctgtgcggctggccgaagctatgaagcgctacggcctgaacaccaaccaccggatcgtcgtgtgcagcgagaacagcctgcagttcttcatgcctgtgctgggcgccctgttcatcggagttgctgtggcccctgccaacgacatctacaacgagcgcgagctgctgaacagcatgggcatctctcagcccaccgtggtgttcgtgtccaagaagggactgcagaaaatcctgaacgtgcagaagaagctgcccatcatccagaaaatcatcatcatggacagcaagaccgactaccagggcttccagagcatgtacaccttcgtgaccagccatctgccacctggcttcaacgagtacgacttcgtgcccgagagcttcgaccgggacaagacaatcgccctgatcatgaacagcagcggctctaccggactgcccaaaggtgttgccctgcctcatagaactgcctgcgtgcggtttagccacgccagagatcccatcttcggcaaccagatcatccccgacacagccatcctgagcgtggtgccttttcaccacggcttcggcatgttcaccacactgggctacctgatctgcggcttcagagtggtgctgatgtaccgcttcgaggaagaactgttcctgcggagcctgcaggactacaagatccagtctgctctgctggtgcctactctgttcagcttctttgccaagagcaccctgatcgataagtacgacctgagcaacctgcacgagatcgcctctggcggagcccctctgtctaaagaagtgggagaagccgtcgccaagcggttccatctgcctggcatcagacaaggctatggcctgaccgagacaaccagcgccattctgattacccctgagggcgacgataagcctggcgctgtgggaaaagtggtgccattcttcgaggccaaggtggtggatctggacaccggcaaaacactgggcgttaaccagaggggcgagctgtgtgttagaggccctatgatcatgagcggctacgtgaacaaccccgaggccacaaacgctctgatcgacaaggatggatggctgcacagcggcgacattgcctactgggacgaagatgagcacttcttcatcgtggaccggctgaagtccctgatcaagtacaagggctaccaggtggccccagccgagctggaatctattctgctgcaacaccccaacatcttcgatgccggcgttgcaggactgcccgatgatgatgctggcgaactgccagctgctgtggtggtgctggaacacggcaagaccatgaccgagaaagaaatcgtggactacgtggccagccaagtgaccaccgccaagaaactgagaggcggcgtggtgtttgtggacgaggtgccaaaaggcctgacaggcaagctggacgcccggaagatcagagagatcctgattaaggccaagaaaggcggcaagatcgccgtgtaatagctaactagagatagaatccaactaacctggcgccggcgtgctcgctacggacttaaataattgagccttaaagaagaaattctttaagtggatgctctcaaactcagggaaacctaaatctagttatagacaaggcaatcctgagccaagccgaagtagtaattagtaagttaacaatagatgacttacaactaatcggaaggtgcagagactcgacgggagctaccctaaaataatgaaagactacgagatcaaccatagagctaaccaaggagcgagattgagcctgagcagatggtcgcattcgaagcaaaaaaaatctagatatcggatcccggg

SEQ ID NO: 3532 - DNA, 5076 bp, synthetic construct
  source 1..5076: mol_type = other DNA; note = Ana 188 Exonextention
aggctaggtggaggctcagtgtgataagtctgcgatggtggatgcatgtgtcatggtcatagctgtttcctgtgtgaaattgttatccgctcagagggcacaatcctattccgcgctatccgacaatctccaagacattaggtggagttcagttcggcgtatggcatatgtcgctggaaagaacatgtgagcaaaaggccagcaaaaggccaggaaccgtaaaaaggccgcgttgctggcgtttttccataggctccgcccccctgacgagcatcacaaaaatcgacgctcaagtcagaggtggcgaaacccgacaggactataaagataccaggcgtttccccctggaagctccctcgtgcgctctcctgttccgaccctgccgcttaccggatacctgtccgcctttctcccttcgggaagcgtggcgctttctcatagctcacgctgtaggtatctcagttcggtgtaggtcgttcgctccaagctgggctgtgtgcacgaaccccccgttcagcccgaccgctgcgccttatccggtaactatcgtcttgagtccaacccggtaagacacgacttatcgccactggcagcagccactggtaacaggattagcagagcgaggtatgtaggcggtgctacagagttcttgaagtggtggcctaactacggctacactagaagaacagtatttggtatctgcgctctgctgaagccagttaccttcggaaaaagagttggtagctcttgatccggcaaacaaaccaccgctggtagcggtggtttttttgtttgcaagcagcagattacgcgcagaaaaaaaggatctcaagaagatcctttgatcttttctacggggtctgacgctctattcaacaaagccgccgtcccgtcaagtcagcgtaaatgggtagggggcttcaaatcgtcctcgtgataccaattcggagcctgcttttttgtacaaacttgttgataatggcaattcaaggatcttcacctagatccttttaaattaaaaatgaagttttaaatcaatctaaagtatatatgagtaaacttggtctgacagttaccaatgcttaatcagtgaggcacctatctcagcgatctgtctatttcgttcatccatagttgcctgactccccgtcgtgtagataactacgatacgggagggcttaccatctggccccagtgctgcaatgataccgcgagagccacgctcaccggctccagatttatcagcaataaaccagccagccggaagggccgagcgcagaagtggtcctgcaactttatccgcctccatccagtctattaattgttgccgggaagctagagtaagtagttcgccagttaatagtttgcgcaacgttgttgccattgctacaggcatcgtggtgtcacgctcgtcgtttggtatggcttcattcagctccggttcccaacgatcaaggcgagttacatgatcccccatgttgtgcaaaaaagcggttagctccttcggtcctccgatcgttgtcagaagtaagttggccgcagtgttatcactcatggttatggcagcactgcataattctcttactgtcatgccatccgtaagatgcttttctgtgactggtgagtactcaaccaagtcattctgagaatagtgtatgcggcgaccgagttgctcttgcccggcgtcaatacgggataataccgcgccacatagcagaactttaaaagtgctcatcattggaaaacgttcttcggggcgaaaactctcaaggatcttaccgctgttgagatccagttcgatgtaacccactcgtgcacccaactgatcttcagcatcttttactttcaccagcgtttctgggtgagcaaaaacaggaaggcaaaatgccgcaaaaaagggaataagggcgacacggaaatgttgaatactcatactcttcctttttcaatattattgaagcatttatcagggttattgtctcatgagcggatacatatttgaatgtatttagaaaaataaacaaataggggttccgcgcacatttccccgaaaagtgccagatacctgaaacaaaacccatcgtacggccaaggaagtctccaataactgtgatccaccacaagcgccagggttttcccagtcacgacgttgtaaaacgacggccagtcatgcataatccgcacgcatctggaataaggaagtgccattccgcctgaccttaatacgactcactatagggagaccctcgaaaaaaaacacaaacacccaagacgagggtaaagagagagtccaattctcaaagccaataggcagtagcgaaagctgcaagagaatgaaaatccgttgaccttaaacggtcgtgtgggggctcgcagcaaacaccaaacaaaacaaacacaaaccaacaaaaattaaaacagcctgtgggttgatcccacccacaggcccattgggcgctagcactctggtatcacggtacctttgtgcgcctgttttataccccctcccccaactgtaacttagaagtaacacacaccgatcaacagtcagcgtggcacaccagccacgttttgatcaagcacttctgttaccccggactgagtatcaatagactgctcacgcggttgaaggagaaagcgttcgttatccggccaactacttcgaaaaacctagtaacaccgtggaagttgcagagtgtttcgctcagcactaccccagtgtagatcaggtcgatgagtcaccgcattccccacgggcgaccgtggcggtggctgcgttggcggcctgcccatggggaaacccatgggacgctctaatacagacatggtgcgaagagtctattgagctagttggtagtcctccggcccctgaatgcggctaatcctaactgcggagcacacaccctcaagccagagggcagtgtgtcgtaacgggcaactctgcagcggaaccgactactttgggtgtccgtgtttcattttattcctatactggctgcttatggtgacaattgagagatcgttaccatatagctattggattggccatccggtgactaatagagctattatatatccctttgttgggtttataccacttagcttgaaagaggttaaaacattacaattcattgttaagttgaatacagcaaaatggaagatgccaagaacatcaagaagggccctgctccattctaccctctggaagatggaacagccggcgagcagctgcacaaggccatgaagagatatgccctggtgcctggcacaatcgccttcacagatgcccacatcgaggtggacatcacctacgccgagtacttcgagatgtctgtgcggctggccgaagctatgaagcgctacggcctgaacaccaaccaccggatcgtcgtgtgcagcgagaacagcctgcagttcttcatgcctgtgctgggcgccctgttcatcggagttgctgtggcccctgccaacgacatctacaacgagcgcgagctgctgaacagcatgggcatctctcagcccaccgtggtgttcgtgtccaagaagggactgcagaaaatcctgaacgtgcagaagaagctgcccatcatccagaaaatcatcatcatggacagcaagaccgactaccagggcttccagagcatgtacaccttcgtgaccagccatctgccacctggcttcaacgagtacgacttcgtgcccgagagcttcgaccgggacaagacaatcgccctgatcatgaacagcagcggctctaccggactgcccaaaggtgttgccctgcctcatagaactgcctgcgtgcggtttagccacgccagagatcccatcttcggcaaccagatcatccccgacacagccatcctgagcgtggtgccttttcaccacggcttcggcatgttcaccacactgggctacctgatctgcggcttcagagtggtgctgatgtaccgcttcgaggaagaactgttcctgcggagcctgcaggactacaagatccagtctgctctgctggtgcctactctgttcagcttctttgccaagagcaccctgatcgataagtacgacctgagcaacctgcacgagatcgcctctggcggagcccctctgtctaaagaagtgggagaagccgtcgccaagcggttccatctgcctggcatcagacaaggctatggcctgaccgagacaaccagcgccattctgattacccctgagggcgacgataagcctggcgctgtgggaaaagtggtgccattcttcgaggccaaggtggtggatctggacaccggcaaaacactgggcgttaaccagaggggcgagctgtgtgttagaggccctatgatcatgagcggctacgtgaacaaccccgaggccacaaacgctctgatcgacaaggatggatggctgcacagcggcgacattgcctactgggacgaagatgagcacttcttcatcgtggaccggctgaagtccctgatcaagtacaagggctaccaggtggccccagccgagctggaatctattctgctgcaacaccccaacatcttcgatgccggcgttgcaggactgcccgatgatgatgctggcgaactgccagctgctgtggtggtgctggaacacggcaagaccatgaccgagaaagaaatcgtggactacgtggccagccaagtgaccaccgccaagaaactgagaggcggcgtggtgtttgtggacgaggtgccaaaaggcctgacaggcaagctggacgcccggaagatcagagagatcctgattaaggccaagaaaggcggcaagatcgccgtgtaatagctaactagacaaaacaccaaacaaacaagctgcgagccgctacggacttaaataattgagccttaaagaagaaattctttaagtggatgctctcaaactcagggaaacctaaatctagttatagacaaggcaatcctgagccaagccgaagtagtaattagtaagttaacaatagatgacttacaactaatcggaaggtgcagagactcgacgggagctaccctaacgtaaaaacaaccaaaaaaaatctagatatcggatcccggg

SEQ ID NO: 3533 - DNA, 5057 bp, synthetic construct
  source 1..5057: mol_type = other DNA; note = Ana188 13ntIH
aggctaggtggaggctcagtgtgataagtctgcgatggtggatgcatgtgtcatggtcatagctgtttcctgtgtgaaattgttatccgctcagagggcacaatcctattccgcgctatccgacaatctccaagacattaggtggagttcagttcggcgtatggcatatgtcgctggaaagaacatgtgagcaaaaggccagcaaaaggccaggaaccgtaaaaaggccgcgttgctggcgtttttccataggctccgcccccctgacgagcatcacaaaaatcgacgctcaagtcagaggtggcgaaacccgacaggactataaagataccaggcgtttccccctggaagctccctcgtgcgctctcctgttccgaccctgccgcttaccggatacctgtccgcctttctcccttcgggaagcgtggcgctttctcatagctcacgctgtaggtatctcagttcggtgtaggtcgttcgctccaagctgggctgtgtgcacgaaccccccgttcagcccgaccgctgcgccttatccggtaactatcgtcttgagtccaacccggtaagacacgacttatcgccactggcagcagccactggtaacaggattagcagagcgaggtatgtaggcggtgctacagagttcttgaagtggtggcctaactacggctacactagaagaacagtatttggtatctgcgctctgctgaagccagttaccttcggaaaaagagttggtagctcttgatccggcaaacaaaccaccgctggtagcggtggtttttttgtttgcaagcagcagattacgcgcagaaaaaaaggatctcaagaagatcctttgatcttttctacggggtctgacgctctattcaacaaagccgccgtcccgtcaagtcagcgtaaatgggtagggggcttcaaatcgtcctcgtgataccaattcggagcctgcttttttgtacaaacttgttgataatggcaattcaaggatcttcacctagatccttttaaattaaaaatgaagttttaaatcaatctaaagtatatatgagtaaacttggtctgacagttaccaatgcttaatcagtgaggcacctatctcagcgatctgtctatttcgttcatccatagttgcctgactccccgtcgtgtagataactacgatacgggagggcttaccatctggccccagtgctgcaatgataccgcgagagccacgctcaccggctccagatttatcagcaataaaccagccagccggaagggccgagcgcagaagtggtcctgcaactttatccgcctccatccagtctattaattgttgccgggaagctagagtaagtagttcgccagttaatagtttgcgcaacgttgttgccattgctacaggcatcgtggtgtcacgctcgtcgtttggtatggcttcattcagctccggttcccaacgatcaaggcgagttacatgatcccccatgttgtgcaaaaaagcggttagctccttcggtcctccgatcgttgtcagaagtaagttggccgcagtgttatcactcatggttatggcagcactgcataattctcttactgtcatgccatccgtaagatgcttttctgtgactggtgagtactcaaccaagtcattctgagaatagtgtatgcggcgaccgagttgctcttgcccggcgtcaatacgggataataccgcgccacatagcagaactttaaaagtgctcatcattggaaaacgttcttcggggcgaaaactctcaaggatcttaccgctgttgagatccagttcgatgtaacccactcgtgcacccaactgatcttcagcatcttttactttcaccagcgtttctgggtgagcaaaaacaggaaggcaaaatgccgcaaaaaagggaataagggcgacacggaaatgttgaatactcatactcttcctttttcaatattattgaagcatttatcagggttattgtctcatgagcggatacatatttgaatgtatttagaaaaataaacaaataggggttccgcgcacatttccccgaaaagtgccagatacctgaaacaaaacccatcgtacggccaaggaagtctccaataactgtgatccaccacaagcgccagggttttcccagtcacgacgttgtaaaacgacggccagtcatgcataatccgcacgcatctggaataaggaagtgccattccgcctgaccttaatacgactcactatagggagaccctcgaaaaaaaacacaaacacccaagacgagggtaaagagagagtccaattctcaaagccaataggcagtagcgaaagctgcaagagaatgaaaatccgtcggctcgcagcggaaacaccaaacaaaacaaacacaaaccaacaaaaattaaaacagcctgtgggttgatcccacccacaggcccattgggcgctagcactctggtatcacggtacctttgtgcgcctgttttataccccctcccccaactgtaacttagaagtaacacacaccgatcaacagtcagcgtggcacaccagccacgttttgatcaagcacttctgttaccccggactgagtatcaatagactgctcacgcggttgaaggagaaagcgttcgttatccggccaactacttcgaaaaacctagtaacaccgtggaagttgcagagtgtttcgctcagcactaccccagtgtagatcaggtcgatgagtcaccgcattccccacgggcgaccgtggcggtggctgcgttggcggcctgcccatggggaaacccatgggacgctctaatacagacatggtgcgaagagtctattgagctagttggtagtcctccggcccctgaatgcggctaatcctaactgcggagcacacaccctcaagccagagggcagtgtgtcgtaacgggcaactctgcagcggaaccgactactttgggtgtccgtgtttcattttattcctatactggctgcttatggtgacaattgagagatcgttaccatatagctattggattggccatccggtgactaatagagctattatatatccctttgttgggtttataccacttagcttgaaagaggttaaaacattacaattcattgttaagttgaatacagcaaaatggaagatgccaagaacatcaagaagggccctgctccattctaccctctggaagatggaacagccggcgagcagctgcacaaggccatgaagagatatgccctggtgcctggcacaatcgccttcacagatgcccacatcgaggtggacatcacctacgccgagtacttcgagatgtctgtgcggctggccgaagctatgaagcgctacggcctgaacaccaaccaccggatcgtcgtgtgcagcgagaacagcctgcagttcttcatgcctgtgctgggcgccctgttcatcggagttgctgtggcccctgccaacgacatctacaacgagcgcgagctgctgaacagcatgggcatctctcagcccaccgtggtgttcgtgtccaagaagggactgcagaaaatcctgaacgtgcagaagaagctgcccatcatccagaaaatcatcatcatggacagcaagaccgactaccagggcttccagagcatgtacaccttcgtgaccagccatctgccacctggcttcaacgagtacgacttcgtgcccgagagcttcgaccgggacaagacaatcgccctgatcatgaacagcagcggctctaccggactgcccaaaggtgttgccctgcctcatagaactgcctgcgtgcggtttagccacgccagagatcccatcttcggcaaccagatcatccccgacacagccatcctgagcgtggtgccttttcaccacggcttcggcatgttcaccacactgggctacctgatctgcggcttcagagtggtgctgatgtaccgcttcgaggaagaactgttcctgcggagcctgcaggactacaagatccagtctgctctgctggtgcctactctgttcagcttctttgccaagagcaccctgatcgataagtacgacctgagcaacctgcacgagatcgcctctggcggagcccctctgtctaaagaagtgggagaagccgtcgccaagcggttccatctgcctggcatcagacaaggctatggcctgaccgagacaaccagcgccattctgattacccctgagggcgacgataagcctggcgctgtgggaaaagtggtgccattcttcgaggccaaggtggtggatctggacaccggcaaaacactgggcgttaaccagaggggcgagctgtgtgttagaggccctatgatcatgagcggctacgtgaacaaccccgaggccacaaacgctctgatcgacaaggatggatggctgcacagcggcgacattgcctactgggacgaagatgagcacttcttcatcgtggaccggctgaagtccctgatcaagtacaagggctaccaggtggccccagccgagctggaatctattctgctgcaacaccccaacatcttcgatgccggcgttgcaggactgcccgatgatgatgctggcgaactgccagctgctgtggtggtgctggaacacggcaagaccatgaccgagaaagaaatcgtggactacgtggccagccaagtgaccaccgccaagaaactgagaggcggcgtggtgtttgtggacgaggtgccaaaaggcctgacaggcaagctggacgcccggaagatcagagagatcctgattaaggccaagaaaggcggcaagatcgccgtgtaatagctaactagacaaaacaccaaacaaacaaccgctgcgagccgacggacttaaataattgagccttaaagaagaaattctttaagtggatgctctcaaactcagggaaacctaaatctagttatagacaaggcaatcctgagccaagccgaagtagtaattagtaagttaacaatagatgacttacaactaatcggaaggtgcagagactcgacgggagctaccctaacgtaaaaacaaccaaaaaaaatctagatatcggatcccggg

SEQ ID NO: 3534 - DNA, 5061 bp, synthetic construct
  source 1..5061: mol_type = other DNA; note = Ana188 15ntIH
aggctaggtggaggctcagtgtgataagtctgcgatggtggatgcatgtgtcatggtcatagctgtttcctgtgtgaaattgttatccgctcagagggcacaatcctattccgcgctatccgacaatctccaagacattaggtggagttcagttcggcgtatggcatatgtcgctggaaagaacatgtgagcaaaaggccagcaaaaggccaggaaccgtaaaaaggccgcgttgctggcgtttttccataggctccgcccccctgacgagcatcacaaaaatcgacgctcaagtcagaggtggcgaaacccgacaggactataaagataccaggcgtttccccctggaagctccctcgtgcgctctcctgttccgaccctgccgcttaccggatacctgtccgcctttctcccttcgggaagcgtggcgctttctcatagctcacgctgtaggtatctcagttcggtgtaggtcgttcgctccaagctgggctgtgtgcacgaaccccccgttcagcccgaccgctgcgccttatccggtaactatcgtcttgagtccaacccggtaagacacgacttatcgccactggcagcagccactggtaacaggattagcagagcgaggtatgtaggcggtgctacagagttcttgaagtggtggcctaactacggctacactagaagaacagtatttggtatctgcgctctgctgaagccagttaccttcggaaaaagagttggtagctcttgatccggcaaacaaaccaccgctggtagcggtggtttttttgtttgcaagcagcagattacgcgcagaaaaaaaggatctcaagaagatcctttgatcttttctacggggtctgacgctctattcaacaaagccgccgtcccgtcaagtcagcgtaaatgggtagggggcttcaaatcgtcctcgtgataccaattcggagcctgcttttttgtacaaacttgttgataatggcaattcaaggatcttcacctagatccttttaaattaaaaatgaagttttaaatcaatctaaagtatatatgagtaaacttggtctgacagttaccaatgcttaatcagtgaggcacctatctcagcgatctgtctatttcgttcatccatagttgcctgactccccgtcgtgtagataactacgatacgggagggcttaccatctggccccagtgctgcaatgataccgcgagagccacgctcaccggctccagatttatcagcaataaaccagccagccggaagggccgagcgcagaagtggtcctgcaactttatccgcctccatccagtctattaattgttgccgggaagctagagtaagtagttcgccagttaatagtttgcgcaacgttgttgccattgctacaggcatcgtggtgtcacgctcgtcgtttggtatggcttcattcagctccggttcccaacgatcaaggcgagttacatgatcccccatgttgtgcaaaaaagcggttagctccttcggtcctccgatcgttgtcagaagtaagttggccgcagtgttatcactcatggttatggcagcactgcataattctcttactgtcatgccatccgtaagatgcttttctgtgactggtgagtactcaaccaagtcattctgagaatagtgtatgcggcgaccgagttgctcttgcccggcgtcaatacgggataataccgcgccacatagcagaactttaaaagtgctcatcattggaaaacgttcttcggggcgaaaactctcaaggatcttaccgctgttgagatccagttcgatgtaacccactcgtgcacccaactgatcttcagcatcttttactttcaccagcgtttctgggtgagcaaaaacaggaaggcaaaatgccgcaaaaaagggaataagggcgacacggaaatgttgaatactcatactcttcctttttcaatattattgaagcatttatcagggttattgtctcatgagcggatacatatttgaatgtatttagaaaaataaacaaataggggttccgcgcacatttccccgaaaagtgccagatacctgaaacaaaacccatcgtacggccaaggaagtctccaataactgtgatccaccacaagcgccagggttttcccagtcacgacgttgtaaaacgacggccagtcatgcataatccgcacgcatctggaataaggaagtgccattccgcctgaccttaatacgactcactatagggagaccctcgaaaaaaaacacaaacacccaagacgagggtaaagagagagtccaattctcaaagccaataggcagtagcgaaagctgcaagagaatgaaaatccgtgagcacgccggcgccaaacaccaaacaaaacaaacacaaaccaacaaaaattaaaacagcctgtgggttgatcccacccacaggcccattgggcgctagcactctggtatcacggtacctttgtgcgcctgttttataccccctcccccaactgtaacttagaagtaacacacaccgatcaacagtcagcgtggcacaccagccacgttttgatcaagcacttctgttaccccggactgagtatcaatagactgctcacgcggttgaaggagaaagcgttcgttatccggccaactacttcgaaaaacctagtaacaccgtggaagttgcagagtgtttcgctcagcactaccccagtgtagatcaggtcgatgagtcaccgcattccccacgggcgaccgtggcggtggctgcgttggcggcctgcccatggggaaacccatgggacgctctaatacagacatggtgcgaagagtctattgagctagttggtagtcctccggcccctgaatgcggctaatcctaactgcggagcacacaccctcaagccagagggcagtgtgtcgtaacgggcaactctgcagcggaaccgactactttgggtgtccgtgtttcattttattcctatactggctgcttatggtgacaattgagagatcgttaccatatagctattggattggccatccggtgactaatagagctattatatatccctttgttgggtttataccacttagcttgaaagaggttaaaacattacaattcattgttaagttgaatacagcaaaatggaagatgccaagaacatcaagaagggccctgctccattctaccctctggaagatggaacagccggcgagcagctgcacaaggccatgaagagatatgccctggtgcctggcacaatcgccttcacagatgcccacatcgaggtggacatcacctacgccgagtacttcgagatgtctgtgcggctggccgaagctatgaagcgctacggcctgaacaccaaccaccggatcgtcgtgtgcagcgagaacagcctgcagttcttcatgcctgtgctgggcgccctgttcatcggagttgctgtggcccctgccaacgacatctacaacgagcgcgagctgctgaacagcatgggcatctctcagcccaccgtggtgttcgtgtccaagaagggactgcagaaaatcctgaacgtgcagaagaagctgcccatcatccagaaaatcatcatcatggacagcaagaccgactaccagggcttccagagcatgtacaccttcgtgaccagccatctgccacctggcttcaacgagtacgacttcgtgcccgagagcttcgaccgggacaagacaatcgccctgatcatgaacagcagcggctctaccggactgcccaaaggtgttgccctgcctcatagaactgcctgcgtgcggtttagccacgccagagatcccatcttcggcaaccagatcatccccgacacagccatcctgagcgtggtgccttttcaccacggcttcggcatgttcaccacactgggctacctgatctgcggcttcagagtggtgctgatgtaccgcttcgaggaagaactgttcctgcggagcctgcaggactacaagatccagtctgctctgctggtgcctactctgttcagcttctttgccaagagcaccctgatcgataagtacgacctgagcaacctgcacgagatcgcctctggcggagcccctctgtctaaagaagtgggagaagccgtcgccaagcggttccatctgcctggcatcagacaaggctatggcctgaccgagacaaccagcgccattctgattacccctgagggcgacgataagcctggcgctgtgggaaaagtggtgccattcttcgaggccaaggtggtggatctggacaccggcaaaacactgggcgttaaccagaggggcgagctgtgtgttagaggccctatgatcatgagcggctacgtgaacaaccccgaggccacaaacgctctgatcgacaaggatggatggctgcacagcggcgacattgcctactgggacgaagatgagcacttcttcatcgtggaccggctgaagtccctgatcaagtacaagggctaccaggtggccccagccgagctggaatctattctgctgcaacaccccaacatcttcgatgccggcgttgcaggactgcccgatgatgatgctggcgaactgccagctgctgtggtggtgctggaacacggcaagaccatgaccgagaaagaaatcgtggactacgtggccagccaagtgaccaccgccaagaaactgagaggcggcgtggtgtttgtggacgaggtgccaaaaggcctgacaggcaagctggacgcccggaagatcagagagatcctgattaaggccaagaaaggcggcaagatcgccgtgtaatagctaactagacaaaacaccaaacaaacaaggcgccggcgtgctcacggacttaaataattgagccttaaagaagaaattctttaagtggatgctctcaaactcagggaaacctaaatctagttatagacaaggcaatcctgagccaagccgaagtagtaattagtaagttaacaatagatgacttacaactaatcggaaggtgcagagactcgacgggagctaccctaacgtaaaaacaaccaaaaaaaatctagatatcggatcccggg

SEQ ID NO: 3535 - DNA, 5131 bp, synthetic construct
  source 1..5131: mol_type = other DNA; note = Ana188 EH T60L40
aggctaggtggaggctcagtgtgataagtctgcgatggtggatgcatgtgtcatggtcatagctgtttcctgtgtgaaattgttatccgctcagagggcacaatcctattccgcgctatccgacaatctccaagacattaggtggagttcagttcggcgtatggcatatgtcgctggaaagaacatgtgagcaaaaggccagcaaaaggccaggaaccgtaaaaaggccgcgttgctggcgtttttccataggctccgcccccctgacgagcatcacaaaaatcgacgctcaagtcagaggtggcgaaacccgacaggactataaagataccaggcgtttccccctggaagctccctcgtgcgctctcctgttccgaccctgccgcttaccggatacctgtccgcctttctcccttcgggaagcgtggcgctttctcatagctcacgctgtaggtatctcagttcggtgtaggtcgttcgctccaagctgggctgtgtgcacgaaccccccgttcagcccgaccgctgcgccttatccggtaactatcgtcttgagtccaacccggtaagacacgacttatcgccactggcagcagccactggtaacaggattagcagagcgaggtatgtaggcggtgctacagagttcttgaagtggtggcctaactacggctacactagaagaacagtatttggtatctgcgctctgctgaagccagttaccttcggaaaaagagttggtagctcttgatccggcaaacaaaccaccgctggtagcggtggtttttttgtttgcaagcagcagattacgcgcagaaaaaaaggatctcaagaagatcctttgatcttttctacggggtctgacgctctattcaacaaagccgccgtcccgtcaagtcagcgtaaatgggtagggggcttcaaatcgtcctcgtgataccaattcggagcctgcttttttgtacaaacttgttgataatggcaattcaaggatcttcacctagatccttttaaattaaaaatgaagttttaaatcaatctaaagtatatatgagtaaacttggtctgacagttaccaatgcttaatcagtgaggcacctatctcagcgatctgtctatttcgttcatccatagttgcctgactccccgtcgtgtagataactacgatacgggagggcttaccatctggccccagtgctgcaatgataccgcgagagccacgctcaccggctccagatttatcagcaataaaccagccagccggaagggccgagcgcagaagtggtcctgcaactttatccgcctccatccagtctattaattgttgccgggaagctagagtaagtagttcgccagttaatagtttgcgcaacgttgttgccattgctacaggcatcgtggtgtcacgctcgtcgtttggtatggcttcattcagctccggttcccaacgatcaaggcgagttacatgatcccccatgttgtgcaaaaaagcggttagctccttcggtcctccgatcgttgtcagaagtaagttggccgcagtgttatcactcatggttatggcagcactgcataattctcttactgtcatgccatccgtaagatgcttttctgtgactggtgagtactcaaccaagtcattctgagaatagtgtatgcggcgaccgagttgctcttgcccggcgtcaatacgggataataccgcgccacatagcagaactttaaaagtgctcatcattggaaaacgttcttcggggcgaaaactctcaaggatcttaccgctgttgagatccagttcgatgtaacccactcgtgcacccaactgatcttcagcatcttttactttcaccagcgtttctgggtgagcaaaaacaggaaggcaaaatgccgcaaaaaagggaataagggcgacacggaaatgttgaatactcatactcttcctttttcaatattattgaagcatttatcagggttattgtctcatgagcggatacatatttgaatgtatttagaaaaataaacaaataggggttccgcgcacatttccccgaaaagtgccagatacctgaaacaaaacccatcgtacggccaaggaagtctccaataactgtgatccaccacaagcgccagggttttcccagtcacgacgttgtaaaacgacggccagtcatgcataatccgcacgcatctggaataaggaagtgccattccgcctgaccttaatacgactcactatagggagaccctcgaaaaaaaagcttcgaatgcgaccatctgctcaggctcaatctcgctcccacaaacacccaagacgagggtaaagagagagtccaattctcaaagccaataggcagtagcgaaagctgcaagagaatgaaaatccgtggctcgcagcaaacaccaaacaaaacaaacacaaaccaacaaaaattaaaacagcctgtgggttgatcccacccacaggcccattgggcgctagcactctggtatcacggtacctttgtgcgcctgttttataccccctcccccaactgtaacttagaagtaacacacaccgatcaacagtcagcgtggcacaccagccacgttttgatcaagcacttctgttaccccggactgagtatcaatagactgctcacgcggttgaaggagaaagcgttcgttatccggccaactacttcgaaaaacctagtaacaccgtggaagttgcagagtgtttcgctcagcactaccccagtgtagatcaggtcgatgagtcaccgcattccccacgggcgaccgtggcggtggctgcgttggcggcctgcccatggggaaacccatgggacgctctaatacagacatggtgcgaagagtctattgagctagttggtagtcctccggcccctgaatgcggctaatcctaactgcggagcacacaccctcaagccagagggcagtgtgtcgtaacgggcaactctgcagcggaaccgactactttgggtgtccgtgtttcattttattcctatactggctgcttatggtgacaattgagagatcgttaccatatagctattggattggccatccggtgactaatagagctattatatatccctttgttgggtttataccacttagcttgaaagaggttaaaacattacaattcattgttaagttgaatacagcaaaatggaagatgccaagaacatcaagaagggccctgctccattctaccctctggaagatggaacagccggcgagcagctgcacaaggccatgaagagatatgccctggtgcctggcacaatcgccttcacagatgcccacatcgaggtggacatcacctacgccgagtacttcgagatgtctgtgcggctggccgaagctatgaagcgctacggcctgaacaccaaccaccggatcgtcgtgtgcagcgagaacagcctgcagttcttcatgcctgtgctgggcgccctgttcatcggagttgctgtggcccctgccaacgacatctacaacgagcgcgagctgctgaacagcatgggcatctctcagcccaccgtggtgttcgtgtccaagaagggactgcagaaaatcctgaacgtgcagaagaagctgcccatcatccagaaaatcatcatcatggacagcaagaccgactaccagggcttccagagcatgtacaccttcgtgaccagccatctgccacctggcttcaacgagtacgacttcgtgcccgagagcttcgaccgggacaagacaatcgccctgatcatgaacagcagcggctctaccggactgcccaaaggtgttgccctgcctcatagaactgcctgcgtgcggtttagccacgccagagatcccatcttcggcaaccagatcatccccgacacagccatcctgagcgtggtgccttttcaccacggcttcggcatgttcaccacactgggctacctgatctgcggcttcagagtggtgctgatgtaccgcttcgaggaagaactgttcctgcggagcctgcaggactacaagatccagtctgctctgctggtgcctactctgttcagcttctttgccaagagcaccctgatcgataagtacgacctgagcaacctgcacgagatcgcctctggcggagcccctctgtctaaagaagtgggagaagccgtcgccaagcggttccatctgcctggcatcagacaaggctatggcctgaccgagacaaccagcgccattctgattacccctgagggcgacgataagcctggcgctgtgggaaaagtggtgccattcttcgaggccaaggtggtggatctggacaccggcaaaacactgggcgttaaccagaggggcgagctgtgtgttagaggccctatgatcatgagcggctacgtgaacaaccccgaggccacaaacgctctgatcgacaaggatggatggctgcacagcggcgacattgcctactgggacgaagatgagcacttcttcatcgtggaccggctgaagtccctgatcaagtacaagggctaccaggtggccccagccgagctggaatctattctgctgcaacaccccaacatcttcgatgccggcgttgcaggactgcccgatgatgatgctggcgaactgccagctgctgtggtggtgctggaacacggcaagaccatgaccgagaaagaaatcgtggactacgtggccagccaagtgaccaccgccaagaaactgagaggcggcgtggtgtttgtggacgaggtgccaaaaggcctgacaggcaagctggacgcccggaagatcagagagatcctgattaaggccaagaaaggcggcaagatcgccgtgtaatagctaactagacaaaacaccaaacaaacaagctgcgagccacggacttaaataattgagccttaaagaagaaattctttaagtggatgctctcaaactcagggaaacctaaatctagttatagacaaggcaatcctgagccaagccgaagtagtaattagtaagttaacaatagatgacttacaactaatcggaaggtgcagagactcgacgggagctaccctaacgtaaaaacaaccggagcgagattgagcctgagcagatggtcgcattcgaagcaaaaaaaatctagatatcggatcccggg

SEQ ID NO: 3536 - DNA, 5111 bp, synthetic construct
  source 1..5111: mol_type = other DNA; note = Ana188 EH T75L30
aggctaggtggaggctcagtgtgataagtctgcgatggtggatgcatgtgtcatggtcatagctgtttcctgtgtgaaattgttatccgctcagagggcacaatcctattccgcgctatccgacaatctccaagacattaggtggagttcagttcggcgtatggcatatgtcgctggaaagaacatgtgagcaaaaggccagcaaaaggccaggaaccgtaaaaaggccgcgttgctggcgtttttccataggctccgcccccctgacgagcatcacaaaaatcgacgctcaagtcagaggtggcgaaacccgacaggactataaagataccaggcgtttccccctggaagctccctcgtgcgctctcctgttccgaccctgccgcttaccggatacctgtccgcctttctcccttcgggaagcgtggcgctttctcatagctcacgctgtaggtatctcagttcggtgtaggtcgttcgctccaagctgggctgtgtgcacgaaccccccgttcagcccgaccgctgcgccttatccggtaactatcgtcttgagtccaacccggtaagacacgacttatcgccactggcagcagccactggtaacaggattagcagagcgaggtatgtaggcggtgctacagagttcttgaagtggtggcctaactacggctacactagaagaacagtatttggtatctgcgctctgctgaagccagttaccttcggaaaaagagttggtagctcttgatccggcaaacaaaccaccgctggtagcggtggtttttttgtttgcaagcagcagattacgcgcagaaaaaaaggatctcaagaagatcctttgatcttttctacggggtctgacgctctattcaacaaagccgccgtcccgtcaagtcagcgtaaatgggtagggggcttcaaatcgtcctcgtgataccaattcggagcctgcttttttgtacaaacttgttgataatggcaattcaaggatcttcacctagatccttttaaattaaaaatgaagttttaaatcaatctaaagtatatatgagtaaacttggtctgacagttaccaatgcttaatcagtgaggcacctatctcagcgatctgtctatttcgttcatccatagttgcctgactccccgtcgtgtagataactacgatacgggagggcttaccatctggccccagtgctgcaatgataccgcgagagccacgctcaccggctccagatttatcagcaataaaccagccagccggaagggccgagcgcagaagtggtcctgcaactttatccgcctccatccagtctattaattgttgccgggaagctagagtaagtagttcgccagttaatagtttgcgcaacgttgttgccattgctacaggcatcgtggtgtcacgctcgtcgtttggtatggcttcattcagctccggttcccaacgatcaaggcgagttacatgatcccccatgttgtgcaaaaaagcggttagctccttcggtcctccgatcgttgtcagaagtaagttggccgcagtgttatcactcatggttatggcagcactgcataattctcttactgtcatgccatccgtaagatgcttttctgtgactggtgagtactcaaccaagtcattctgagaatagtgtatgcggcgaccgagttgctcttgcccggcgtcaatacgggataataccgcgccacatagcagaactttaaaagtgctcatcattggaaaacgttcttcggggcgaaaactctcaaggatcttaccgctgttgagatccagttcgatgtaacccactcgtgcacccaactgatcttcagcatcttttactttcaccagcgtttctgggtgagcaaaaacaggaaggcaaaatgccgcaaaaaagggaataagggcgacacggaaatgttgaatactcatactcttcctttttcaatattattgaagcatttatcagggttattgtctcatgagcggatacatatttgaatgtatttagaaaaataaacaaataggggttccgcgcacatttccccgaaaagtgccagatacctgaaacaaaacccatcgtacggccaaggaagtctccaataactgtgatccaccacaagcgccagggttttcccagtcacgacgttgtaaaacgacggccagtcatgcataatccgcacgcatctggaataaggaagtgccattccgcctgaccttaatacgactcactatagggagaccctcgaaaaaaaagctcgcactggccggaagctcgtcggagcgcacaaacacccaagacgagggtaaagagagagtccaattctcaaagccaataggcagtagcgaaagctgcaagagaatgaaaatccgtggctcgcagcaaacaccaaacaaaacaaacacaaaccaacaaaaattaaaacagcctgtgggttgatcccacccacaggcccattgggcgctagcactctggtatcacggtacctttgtgcgcctgttttataccccctcccccaactgtaacttagaagtaacacacaccgatcaacagtcagcgtggcacaccagccacgttttgatcaagcacttctgttaccccggactgagtatcaatagactgctcacgcggttgaaggagaaagcgttcgttatccggccaactacttcgaaaaacctagtaacaccgtggaagttgcagagtgtttcgctcagcactaccccagtgtagatcaggtcgatgagtcaccgcattccccacgggcgaccgtggcggtggctgcgttggcggcctgcccatggggaaacccatgggacgctctaatacagacatggtgcgaagagtctattgagctagttggtagtcctccggcccctgaatgcggctaatcctaactgcggagcacacaccctcaagccagagggcagtgtgtcgtaacgggcaactctgcagcggaaccgactactttgggtgtccgtgtttcattttattcctatactggctgcttatggtgacaattgagagatcgttaccatatagctattggattggccatccggtgactaatagagctattatatatccctttgttgggtttataccacttagcttgaaagaggttaaaacattacaattcattgttaagttgaatacagcaaaatggaagatgccaagaacatcaagaagggccctgctccattctaccctctggaagatggaacagccggcgagcagctgcacaaggccatgaagagatatgccctggtgcctggcacaatcgccttcacagatgcccacatcgaggtggacatcacctacgccgagtacttcgagatgtctgtgcggctggccgaagctatgaagcgctacggcctgaacaccaaccaccggatcgtcgtgtgcagcgagaacagcctgcagttcttcatgcctgtgctgggcgccctgttcatcggagttgctgtggcccctgccaacgacatctacaacgagcgcgagctgctgaacagcatgggcatctctcagcccaccgtggtgttcgtgtccaagaagggactgcagaaaatcctgaacgtgcagaagaagctgcccatcatccagaaaatcatcatcatggacagcaagaccgactaccagggcttccagagcatgtacaccttcgtgaccagccatctgccacctggcttcaacgagtacgacttcgtgcccgagagcttcgaccgggacaagacaatcgccctgatcatgaacagcagcggctctaccggactgcccaaaggtgttgccctgcctcatagaactgcctgcgtgcggtttagccacgccagagatcccatcttcggcaaccagatcatccccgacacagccatcctgagcgtggtgccttttcaccacggcttcggcatgttcaccacactgggctacctgatctgcggcttcagagtggtgctgatgtaccgcttcgaggaagaactgttcctgcggagcctgcaggactacaagatccagtctgctctgctggtgcctactctgttcagcttctttgccaagagcaccctgatcgataagtacgacctgagcaacctgcacgagatcgcctctggcggagcccctctgtctaaagaagtgggagaagccgtcgccaagcggttccatctgcctggcatcagacaaggctatggcctgaccgagacaaccagcgccattctgattacccctgagggcgacgataagcctggcgctgtgggaaaagtggtgccattcttcgaggccaaggtggtggatctggacaccggcaaaacactgggcgttaaccagaggggcgagctgtgtgttagaggccctatgatcatgagcggctacgtgaacaaccccgaggccacaaacgctctgatcgacaaggatggatggctgcacagcggcgacattgcctactgggacgaagatgagcacttcttcatcgtggaccggctgaagtccctgatcaagtacaagggctaccaggtggccccagccgagctggaatctattctgctgcaacaccccaacatcttcgatgccggcgttgcaggactgcccgatgatgatgctggcgaactgccagctgctgtggtggtgctggaacacggcaagaccatgaccgagaaagaaatcgtggactacgtggccagccaagtgaccaccgccaagaaactgagaggcggcgtggtgtttgtggacgaggtgccaaaaggcctgacaggcaagctggacgcccggaagatcagagagatcctgattaaggccaagaaaggcggcaagatcgccgtgtaatagctaactagacaaaacaccaaacaaacaagctgcgagccacggacttaaataattgagccttaaagaagaaattctttaagtggatgctctcaaactcagggaaacctaaatctagttatagacaaggcaatcctgagccaagccgaagtagtaattagtaagttaacaatagatgacttacaactaatcggaaggtgcagagactcgacgggagctaccctaacgtaaaaacaacccgctccgacgagcttccggccagtgcgagcaaaaaaaatctagatatcggatcccggg

SEQ ID NO: 3537 - DNA, 5076 bp, synthetic construct
  source 1..5076: mol_type = other DNA; note = Ana188 40nt IS
aggctaggtggaggctcagtgtgataagtctgcgatggtggatgcatgtgtcatggtcatagctgtttcctgtgtgaaattgttatccgctcagagggcacaatcctattccgcgctatccgacaatctccaagacattaggtggagttcagttcggcgtatggcatatgtcgctggaaagaacatgtgagcaaaaggccagcaaaaggccaggaaccgtaaaaaggccgcgttgctggcgtttttccataggctccgcccccctgacgagcatcacaaaaatcgacgctcaagtcagaggtggcgaaacccgacaggactataaagataccaggcgtttccccctggaagctccctcgtgcgctctcctgttccgaccctgccgcttaccggatacctgtccgcctttctcccttcgggaagcgtggcgctttctcatagctcacgctgtaggtatctcagttcggtgtaggtcgttcgctccaagctgggctgtgtgcacgaaccccccgttcagcccgaccgctgcgccttatccggtaactatcgtcttgagtccaacccggtaagacacgacttatcgccactggcagcagccactggtaacaggattagcagagcgaggtatgtaggcggtgctacagagttcttgaagtggtggcctaactacggctacactagaagaacagtatttggtatctgcgctctgctgaagccagttaccttcggaaaaagagttggtagctcttgatccggcaaacaaaccaccgctggtagcggtggtttttttgtttgcaagcagcagattacgcgcagaaaaaaaggatctcaagaagatcctttgatcttttctacggggtctgacgctctattcaacaaagccgccgtcccgtcaagtcagcgtaaatgggtagggggcttcaaatcgtcctcgtgataccaattcggagcctgcttttttgtacaaacttgttgataatggcaattcaaggatcttcacctagatccttttaaattaaaaatgaagttttaaatcaatctaaagtatatatgagtaaacttggtctgacagttaccaatgcttaatcagtgaggcacctatctcagcgatctgtctatttcgttcatccatagttgcctgactccccgtcgtgtagataactacgatacgggagggcttaccatctggccccagtgctgcaatgataccgcgagagccacgctcaccggctccagatttatcagcaataaaccagccagccggaagggccgagcgcagaagtggtcctgcaactttatccgcctccatccagtctattaattgttgccgggaagctagagtaagtagttcgccagttaatagtttgcgcaacgttgttgccattgctacaggcatcgtggtgtcacgctcgtcgtttggtatggcttcattcagctccggttcccaacgatcaaggcgagttacatgatcccccatgttgtgcaaaaaagcggttagctccttcggtcctccgatcgttgtcagaagtaagttggccgcagtgttatcactcatggttatggcagcactgcataattctcttactgtcatgccatccgtaagatgcttttctgtgactggtgagtactcaaccaagtcattctgagaatagtgtatgcggcgaccgagttgctcttgcccggcgtcaatacgggataataccgcgccacatagcagaactttaaaagtgctcatcattggaaaacgttcttcggggcgaaaactctcaaggatcttaccgctgttgagatccagttcgatgtaacccactcgtgcacccaactgatcttcagcatcttttactttcaccagcgtttctgggtgagcaaaaacaggaaggcaaaatgccgcaaaaaagggaataagggcgacacggaaatgttgaatactcatactcttcctttttcaatattattgaagcatttatcagggttattgtctcatgagcggatacatatttgaatgtatttagaaaaataaacaaataggggttccgcgcacatttccccgaaaagtgccagatacctgaaacaaaacccatcgtacggccaaggaagtctccaataactgtgatccaccacaagcgccagggttttcccagtcacgacgttgtaaaacgacggccagtcatgcataatccgcacgcatctggaataaggaagtgccattccgcctgaccttaatacgactcactatagggagaccctcgaaaaaaaacacaaacacccaagacgagggtaaagagagagtccaattctcaaagccaataggcagtagcgaaagctgcaagagaatgaaaatccgtggctcgcagcaataatgccacactaagagaacaaacaaagagctaagcaattaaaacagcctgtgggttgatcccacccacaggcccattgggcgctagcactctggtatcacggtacctttgtgcgcctgttttataccccctcccccaactgtaacttagaagtaacacacaccgatcaacagtcagcgtggcacaccagccacgttttgatcaagcacttctgttaccccggactgagtatcaatagactgctcacgcggttgaaggagaaagcgttcgttatccggccaactacttcgaaaaacctagtaacaccgtggaagttgcagagtgtttcgctcagcactaccccagtgtagatcaggtcgatgagtcaccgcattccccacgggcgaccgtggcggtggctgcgttggcggcctgcccatggggaaacccatgggacgctctaatacagacatggtgcgaagagtctattgagctagttggtagtcctccggcccctgaatgcggctaatcctaactgcggagcacacaccctcaagccagagggcagtgtgtcgtaacgggcaactctgcagcggaaccgactactttgggtgtccgtgtttcattttattcctatactggctgcttatggtgacaattgagagatcgttaccatatagctattggattggccatccggtgactaatagagctattatatatccctttgttgggtttataccacttagcttgaaagaggttaaaacattacaattcattgttaagttgaatacagcaaaatggaagatgccaagaacatcaagaagggccctgctccattctaccctctggaagatggaacagccggcgagcagctgcacaaggccatgaagagatatgccctggtgcctggcacaatcgccttcacagatgcccacatcgaggtggacatcacctacgccgagtacttcgagatgtctgtgcggctggccgaagctatgaagcgctacggcctgaacaccaaccaccggatcgtcgtgtgcagcgagaacagcctgcagttcttcatgcctgtgctgggcgccctgttcatcggagttgctgtggcccctgccaacgacatctacaacgagcgcgagctgctgaacagcatgggcatctctcagcccaccgtggtgttcgtgtccaagaagggactgcagaaaatcctgaacgtgcagaagaagctgcccatcatccagaaaatcatcatcatggacagcaagaccgactaccagggcttccagagcatgtacaccttcgtgaccagccatctgccacctggcttcaacgagtacgacttcgtgcccgagagcttcgaccgggacaagacaatcgccctgatcatgaacagcagcggctctaccggactgcccaaaggtgttgccctgcctcatagaactgcctgcgtgcggtttagccacgccagagatcccatcttcggcaaccagatcatccccgacacagccatcctgagcgtggtgccttttcaccacggcttcggcatgttcaccacactgggctacctgatctgcggcttcagagtggtgctgatgtaccgcttcgaggaagaactgttcctgcggagcctgcaggactacaagatccagtctgctctgctggtgcctactctgttcagcttctttgccaagagcaccctgatcgataagtacgacctgagcaacctgcacgagatcgcctctggcggagcccctctgtctaaagaagtgggagaagccgtcgccaagcggttccatctgcctggcatcagacaaggctatggcctgaccgagacaaccagcgccattctgattacccctgagggcgacgataagcctggcgctgtgggaaaagtggtgccattcttcgaggccaaggtggtggatctggacaccggcaaaacactgggcgttaaccagaggggcgagctgtgtgttagaggccctatgatcatgagcggctacgtgaacaaccccgaggccacaaacgctctgatcgacaaggatggatggctgcacagcggcgacattgcctactgggacgaagatgagcacttcttcatcgtggaccggctgaagtccctgatcaagtacaagggctaccaggtggccccagccgagctggaatctattctgctgcaacaccccaacatcttcgatgccggcgttgcaggactgcccgatgatgatgctggcgaactgccagctgctgtggtggtgctggaacacggcaagaccatgaccgagaaagaaatcgtggactacgtggccagccaagtgaccaccgccaagaaactgagaggcggcgtggtgtttgtggacgaggtgccaaaaggcctgacaggcaagctggacgcccggaagatcagagagatcctgattaaggccaagaaaggcggcaagatcgccgtgtaatagctaactagaataatgacacacgacaagaacaatcataccactaagcaagctgcgagccacggacttaaataattgagccttaaagaagaaattctttaagtggatgctctcaaactcagggaaacctaaatctagttatagacaaggcaatcctgagccaagccgaagtagtaattagtaagttaacaatagatgacttacaactaatcggaaggtgcagagactcgacgggagctaccctaacgtaaaaacaaccaaaaaaaatctagatatcggatcccggg

SEQ ID NO: 3538 - DNA, 5036 bp, synthetic construct
  source 1..5036: mol_type = other DNA; note = Ana188 20nt IS
aggctaggtggaggctcagtgtgataagtctgcgatggtggatgcatgtgtcatggtcatagctgtttcctgtgtgaaattgttatccgctcagagggcacaatcctattccgcgctatccgacaatctccaagacattaggtggagttcagttcggcgtatggcatatgtcgctggaaagaacatgtgagcaaaaggccagcaaaaggccaggaaccgtaaaaaggccgcgttgctggcgtttttccataggctccgcccccctgacgagcatcacaaaaatcgacgctcaagtcagaggtggcgaaacccgacaggactataaagataccaggcgtttccccctggaagctccctcgtgcgctctcctgttccgaccctgccgcttaccggatacctgtccgcctttctcccttcgggaagcgtggcgctttctcatagctcacgctgtaggtatctcagttcggtgtaggtcgttcgctccaagctgggctgtgtgcacgaaccccccgttcagcccgaccgctgcgccttatccggtaactatcgtcttgagtccaacccggtaagacacgacttatcgccactggcagcagccactggtaacaggattagcagagcgaggtatgtaggcggtgctacagagttcttgaagtggtggcctaactacggctacactagaagaacagtatttggtatctgcgctctgctgaagccagttaccttcggaaaaagagttggtagctcttgatccggcaaacaaaccaccgctggtagcggtggtttttttgtttgcaagcagcagattacgcgcagaaaaaaaggatctcaagaagatcctttgatcttttctacggggtctgacgctctattcaacaaagccgccgtcccgtcaagtcagcgtaaatgggtagggggcttcaaatcgtcctcgtgataccaattcggagcctgcttttttgtacaaacttgttgataatggcaattcaaggatcttcacctagatccttttaaattaaaaatgaagttttaaatcaatctaaagtatatatgagtaaacttggtctgacagttaccaatgcttaatcagtgaggcacctatctcagcgatctgtctatttcgttcatccatagttgcctgactccccgtcgtgtagataactacgatacgggagggcttaccatctggccccagtgctgcaatgataccgcgagagccacgctcaccggctccagatttatcagcaataaaccagccagccggaagggccgagcgcagaagtggtcctgcaactttatccgcctccatccagtctattaattgttgccgggaagctagagtaagtagttcgccagttaatagtttgcgcaacgttgttgccattgctacaggcatcgtggtgtcacgctcgtcgtttggtatggcttcattcagctccggttcccaacgatcaaggcgagttacatgatcccccatgttgtgcaaaaaagcggttagctccttcggtcctccgatcgttgtcagaagtaagttggccgcagtgttatcactcatggttatggcagcactgcataattctcttactgtcatgccatccgtaagatgcttttctgtgactggtgagtactcaaccaagtcattctgagaatagtgtatgcggcgaccgagttgctcttgcccggcgtcaatacgggataataccgcgccacatagcagaactttaaaagtgctcatcattggaaaacgttcttcggggcgaaaactctcaaggatcttaccgctgttgagatccagttcgatgtaacccactcgtgcacccaactgatcttcagcatcttttactttcaccagcgtttctgggtgagcaaaaacaggaaggcaaaatgccgcaaaaaagggaataagggcgacacggaaatgttgaatactcatactcttcctttttcaatattattgaagcatttatcagggttattgtctcatgagcggatacatatttgaatgtatttagaaaaataaacaaataggggttccgcgcacatttccccgaaaagtgccagatacctgaaacaaaacccatcgtacggccaaggaagtctccaataactgtgatccaccacaagcgccagggttttcccagtcacgacgttgtaaaacgacggccagtcatgcataatccgcacgcatctggaataaggaagtgccattccgcctgaccttaatacgactcactatagggagaccctcgaaaaaaaacacaaacacccaagacgagggtaaagagagagtccaattctcaaagccaataggcagtagcgaaagctgcaagagaatgaaaatccgtggctcgcagcagatccactacaagtaagatttaaaacagcctgtgggttgatcccacccacaggcccattgggcgctagcactctggtatcacggtacctttgtgcgcctgttttataccccctcccccaactgtaacttagaagtaacacacaccgatcaacagtcagcgtggcacaccagccacgttttgatcaagcacttctgttaccccggactgagtatcaatagactgctcacgcggttgaaggagaaagcgttcgttatccggccaactacttcgaaaaacctagtaacaccgtggaagttgcagagtgtttcgctcagcactaccccagtgtagatcaggtcgatgagtcaccgcattccccacgggcgaccgtggcggtggctgcgttggcggcctgcccatggggaaacccatgggacgctctaatacagacatggtgcgaagagtctattgagctagttggtagtcctccggcccctgaatgcggctaatcctaactgcggagcacacaccctcaagccagagggcagtgtgtcgtaacgggcaactctgcagcggaaccgactactttgggtgtccgtgtttcattttattcctatactggctgcttatggtgacaattgagagatcgttaccatatagctattggattggccatccggtgactaatagagctattatatatccctttgttgggtttataccacttagcttgaaagaggttaaaacattacaattcattgttaagttgaatacagcaaaatggaagatgccaagaacatcaagaagggccctgctccattctaccctctggaagatggaacagccggcgagcagctgcacaaggccatgaagagatatgccctggtgcctggcacaatcgccttcacagatgcccacatcgaggtggacatcacctacgccgagtacttcgagatgtctgtgcggctggccgaagctatgaagcgctacggcctgaacaccaaccaccggatcgtcgtgtgcagcgagaacagcctgcagttcttcatgcctgtgctgggcgccctgttcatcggagttgctgtggcccctgccaacgacatctacaacgagcgcgagctgctgaacagcatgggcatctctcagcccaccgtggtgttcgtgtccaagaagggactgcagaaaatcctgaacgtgcagaagaagctgcccatcatccagaaaatcatcatcatggacagcaagaccgactaccagggcttccagagcatgtacaccttcgtgaccagccatctgccacctggcttcaacgagtacgacttcgtgcccgagagcttcgaccgggacaagacaatcgccctgatcatgaacagcagcggctctaccggactgcccaaaggtgttgccctgcctcatagaactgcctgcgtgcggtttagccacgccagagatcccatcttcggcaaccagatcatccccgacacagccatcctgagcgtggtgccttttcaccacggcttcggcatgttcaccacactgggctacctgatctgcggcttcagagtggtgctgatgtaccgcttcgaggaagaactgttcctgcggagcctgcaggactacaagatccagtctgctctgctggtgcctactctgttcagcttctttgccaagagcaccctgatcgataagtacgacctgagcaacctgcacgagatcgcctctggcggagcccctctgtctaaagaagtgggagaagccgtcgccaagcggttccatctgcctggcatcagacaaggctatggcctgaccgagacaaccagcgccattctgattacccctgagggcgacgataagcctggcgctgtgggaaaagtggtgccattcttcgaggccaaggtggtggatctggacaccggcaaaacactgggcgttaaccagaggggcgagctgtgtgttagaggccctatgatcatgagcggctacgtgaacaaccccgaggccacaaacgctctgatcgacaaggatggatggctgcacagcggcgacattgcctactgggacgaagatgagcacttcttcatcgtggaccggctgaagtccctgatcaagtacaagggctaccaggtggccccagccgagctggaatctattctgctgcaacaccccaacatcttcgatgccggcgttgcaggactgcccgatgatgatgctggcgaactgccagctgctgtggtggtgctggaacacggcaagaccatgaccgagaaagaaatcgtggactacgtggccagccaagtgaccaccgccaagaaactgagaggcggcgtggtgtttgtggacgaggtgccaaaaggcctgacaggcaagctggacgcccggaagatcagagagatcctgattaaggccaagaaaggcggcaagatcgccgtgtaatagctaactagagatagaatccaactaacctgctgcgagccacggacttaaataattgagccttaaagaagaaattctttaagtggatgctctcaaactcagggaaacctaaatctagttatagacaaggcaatcctgagccaagccgaagtagtaattagtaagttaacaatagatgacttacaactaatcggaaggtgcagagactcgacgggagctaccctaacgtaaaaacaaccaaaaaaaatctagatatcggatcccggg

SEQ ID NO: 3539 - DNA, 5109 bp, synthetic construct
  source 1..5109: mol_type = other DNA; note = Ana188 40nt ES
aggctaggtggaggctcagtgtgataagtctgcgatggtggatgcatgtgtcatggtcatagctgtttcctgtgtgaaattgttatccgctcagagggcacaatcctattccgcgctatccgacaatctccaagacattaggtggagttcagttcggcgtatggcatatgtcgctggaaagaacatgtgagcaaaaggccagcaaaaggccaggaaccgtaaaaaggccgcgttgctggcgtttttccataggctccgcccccctgacgagcatcacaaaaatcgacgctcaagtcagaggtggcgaaacccgacaggactataaagataccaggcgtttccccctggaagctccctcgtgcgctctcctgttccgaccctgccgcttaccggatacctgtccgcctttctcccttcgggaagcgtggcgctttctcatagctcacgctgtaggtatctcagttcggtgtaggtcgttcgctccaagctgggctgtgtgcacgaaccccccgttcagcccgaccgctgcgccttatccggtaactatcgtcttgagtccaacccggtaagacacgacttatcgccactggcagcagccactggtaacaggattagcagagcgaggtatgtaggcggtgctacagagttcttgaagtggtggcctaactacggctacactagaagaacagtatttggtatctgcgctctgctgaagccagttaccttcggaaaaagagttggtagctcttgatccggcaaacaaaccaccgctggtagcggtggtttttttgtttgcaagcagcagattacgcgcagaaaaaaaggatctcaagaagatcctttgatcttttctacggggtctgacgctctattcaacaaagccgccgtcccgtcaagtcagcgtaaatgggtagggggcttcaaatcgtcctcgtgataccaattcggagcctgcttttttgtacaaacttgttgataatggcaattcaaggatcttcacctagatccttttaaattaaaaatgaagttttaaatcaatctaaagtatatatgagtaaacttggtctgacagttaccaatgcttaatcagtgaggcacctatctcagcgatctgtctatttcgttcatccatagttgcctgactccccgtcgtgtagataactacgatacgggagggcttaccatctggccccagtgctgcaatgataccgcgagagccacgctcaccggctccagatttatcagcaataaaccagccagccggaagggccgagcgcagaagtggtcctgcaactttatccgcctccatccagtctattaattgttgccgggaagctagagtaagtagttcgccagttaatagtttgcgcaacgttgttgccattgctacaggcatcgtggtgtcacgctcgtcgtttggtatggcttcattcagctccggttcccaacgatcaaggcgagttacatgatcccccatgttgtgcaaaaaagcggttagctccttcggtcctccgatcgttgtcagaagtaagttggccgcagtgttatcactcatggttatggcagcactgcataattctcttactgtcatgccatccgtaagatgcttttctgtgactggtgagtactcaaccaagtcattctgagaatagtgtatgcggcgaccgagttgctcttgcccggcgtcaatacgggataataccgcgccacatagcagaactttaaaagtgctcatcattggaaaacgttcttcggggcgaaaactctcaaggatcttaccgctgttgagatccagttcgatgtaacccactcgtgcacccaactgatcttcagcatcttttactttcaccagcgtttctgggtgagcaaaaacaggaaggcaaaatgccgcaaaaaagggaataagggcgacacggaaatgttgaatactcatactcttcctttttcaatattattgaagcatttatcagggttattgtctcatgagcggatacatatttgaatgtatttagaaaaataaacaaataggggttccgcgcacatttccccgaaaagtgccagatacctgaaacaaaacccatcgtacggccaaggaagtctccaataactgtgatccaccacaagcgccagggttttcccagtcacgacgttgtaaaacgacggccagtcatgcataatccgcacgcatctggaataaggaagtgccattccgcctgaccttaatacgactcactatagggagaccctcgaaaaaaaaataatgacacactacgagaacaaccatagaactaagcaacaagacgagggtaaagagagagtccaattctcaaagccaataggcagtagcgaaagctgcaagagaatgaaaatccgtggctcgcagcaaacaccaaacaaaacaaacacaaaccaacaaaaattaaaacagcctgtgggttgatcccacccacaggcccattgggcgctagcactctggtatcacggtacctttgtgcgcctgttttataccccctcccccaactgtaacttagaagtaacacacaccgatcaacagtcagcgtggcacaccagccacgttttgatcaagcacttctgttaccccggactgagtatcaatagactgctcacgcggttgaaggagaaagcgttcgttatccggccaactacttcgaaaaacctagtaacaccgtggaagttgcagagtgtttcgctcagcactaccccagtgtagatcaggtcgatgagtcaccgcattccccacgggcgaccgtggcggtggctgcgttggcggcctgcccatggggaaacccatgggacgctctaatacagacatggtgcgaagagtctattgagctagttggtagtcctccggcccctgaatgcggctaatcctaactgcggagcacacaccctcaagccagagggcagtgtgtcgtaacgggcaactctgcagcggaaccgactactttgggtgtccgtgtttcattttattcctatactggctgcttatggtgacaattgagagatcgttaccatatagctattggattggccatccggtgactaatagagctattatatatccctttgttgggtttataccacttagcttgaaagaggttaaaacattacaattcattgttaagttgaatacagcaaaatggaagatgccaagaacatcaagaagggccctgctccattctaccctctggaagatggaacagccggcgagcagctgcacaaggccatgaagagatatgccctggtgcctggcacaatcgccttcacagatgcccacatcgaggtggacatcacctacgccgagtacttcgagatgtctgtgcggctggccgaagctatgaagcgctacggcctgaacaccaaccaccggatcgtcgtgtgcagcgagaacagcctgcagttcttcatgcctgtgctgggcgccctgttcatcggagttgctgtggcccctgccaacgacatctacaacgagcgcgagctgctgaacagcatgggcatctctcagcccaccgtggtgttcgtgtccaagaagggactgcagaaaatcctgaacgtgcagaagaagctgcccatcatccagaaaatcatcatcatggacagcaagaccgactaccagggcttccagagcatgtacaccttcgtgaccagccatctgccacctggcttcaacgagtacgacttcgtgcccgagagcttcgaccgggacaagacaatcgccctgatcatgaacagcagcggctctaccggactgcccaaaggtgttgccctgcctcatagaactgcctgcgtgcggtttagccacgccagagatcccatcttcggcaaccagatcatccccgacacagccatcctgagcgtggtgccttttcaccacggcttcggcatgttcaccacactgggctacctgatctgcggcttcagagtggtgctgatgtaccgcttcgaggaagaactgttcctgcggagcctgcaggactacaagatccagtctgctctgctggtgcctactctgttcagcttctttgccaagagcaccctgatcgataagtacgacctgagcaacctgcacgagatcgcctctggcggagcccctctgtctaaagaagtgggagaagccgtcgccaagcggttccatctgcctggcatcagacaaggctatggcctgaccgagacaaccagcgccattctgattacccctgagggcgacgataagcctggcgctgtgggaaaagtggtgccattcttcgaggccaaggtggtggatctggacaccggcaaaacactgggcgttaaccagaggggcgagctgtgtgttagaggccctatgatcatgagcggctacgtgaacaaccccgaggccacaaacgctctgatcgacaaggatggatggctgcacagcggcgacattgcctactgggacgaagatgagcacttcttcatcgtggaccggctgaagtccctgatcaagtacaagggctaccaggtggccccagccgagctggaatctattctgctgcaacaccccaacatcttcgatgccggcgttgcaggactgcccgatgatgatgctggcgaactgccagctgctgtggtggtgctggaacacggcaagaccatgaccgagaaagaaatcgtggactacgtggccagccaagtgaccaccgccaagaaactgagaggcggcgtggtgtttgtggacgaggtgccaaaaggcctgacaggcaagctggacgcccggaagatcagagagatcctgattaaggccaagaaaggcggcaagatcgccgtgtaatagctaactagacaaaacaccaaacaaacaagctgcgagccacggacttaaataattgagccttaaagaagaaattctttaagtggatgctctcaaactcagggaaacctaaatctagttatagacaaggcaatcctgagccaagccgaagtagtaattagtaagttaacaatagatgacttacaactaatcggaaggtgcagagactcgacgggagctaccctaacgtaataatgaaagactacgagatcaaccatagagctaaccaaaaaaaaatctagatatcggatcccggg

SEQ ID NO: 3540 - DNA, 5071 bp, synthetic construct
  source 1..5071: mol_type = other DNA; note = Ana188 20nt ES
aggctaggtggaggctcagtgtgataagtctgcgatggtggatgcatgtgtcatggtcatagctgtttcctgtgtgaaattgttatccgctcagagggcacaatcctattccgcgctatccgacaatctccaagacattaggtggagttcagttcggcgtatggcatatgtcgctggaaagaacatgtgagcaaaaggccagcaaaaggccaggaaccgtaaaaaggccgcgttgctggcgtttttccataggctccgcccccctgacgagcatcacaaaaatcgacgctcaagtcagaggtggcgaaacccgacaggactataaagataccaggcgtttccccctggaagctccctcgtgcgctctcctgttccgaccctgccgcttaccggatacctgtccgcctttctcccttcgggaagcgtggcgctttctcatagctcacgctgtaggtatctcagttcggtgtaggtcgttcgctccaagctgggctgtgtgcacgaaccccccgttcagcccgaccgctgcgccttatccggtaactatcgtcttgagtccaacccggtaagacacgacttatcgccactggcagcagccactggtaacaggattagcagagcgaggtatgtaggcggtgctacagagttcttgaagtggtggcctaactacggctacactagaagaacagtatttggtatctgcgctctgctgaagccagttaccttcggaaaaagagttggtagctcttgatccggcaaacaaaccaccgctggtagcggtggtttttttgtttgcaagcagcagattacgcgcagaaaaaaaggatctcaagaagatcctttgatcttttctacggggtctgacgctctattcaacaaagccgccgtcccgtcaagtcagcgtaaatgggtagggggcttcaaatcgtcctcgtgataccaattcggagcctgcttttttgtacaaacttgttgataatggcaattcaaggatcttcacctagatccttttaaattaaaaatgaagttttaaatcaatctaaagtatatatgagtaaacttggtctgacagttaccaatgcttaatcagtgaggcacctatctcagcgatctgtctatttcgttcatccatagttgcctgactccccgtcgtgtagataactacgatacgggagggcttaccatctggccccagtgctgcaatgataccgcgagagccacgctcaccggctccagatttatcagcaataaaccagccagccggaagggccgagcgcagaagtggtcctgcaactttatccgcctccatccagtctattaattgttgccgggaagctagagtaagtagttcgccagttaatagtttgcgcaacgttgttgccattgctacaggcatcgtggtgtcacgctcgtcgtttggtatggcttcattcagctccggttcccaacgatcaaggcgagttacatgatcccccatgttgtgcaaaaaagcggttagctccttcggtcctccgatcgttgtcagaagtaagttggccgcagtgttatcactcatggttatggcagcactgcataattctcttactgtcatgccatccgtaagatgcttttctgtgactggtgagtactcaaccaagtcattctgagaatagtgtatgcggcgaccgagttgctcttgcccggcgtcaatacgggataataccgcgccacatagcagaactttaaaagtgctcatcattggaaaacgttcttcggggcgaaaactctcaaggatcttaccgctgttgagatccagttcgatgtaacccactcgtgcacccaactgatcttcagcatcttttactttcaccagcgtttctgggtgagcaaaaacaggaaggcaaaatgccgcaaaaaagggaataagggcgacacggaaatgttgaatactcatactcttcctttttcaatattattgaagcatttatcagggttattgtctcatgagcggatacatatttgaatgtatttagaaaaataaacaaataggggttccgcgcacatttccccgaaaagtgccagatacctgaaacaaaacccatcgtacggccaaggaagtctccaataactgtgatccaccacaagcgccagggttttcccagtcacgacgttgtaaaacgacggccagtcatgcataatccgcacgcatctggaataaggaagtgccattccgcctgaccttaatacgactcactatagggagaccctcgaaaaaaaaagatacacttcaactaagctcaagacgagggtaaagagagagtccaattctcaaagccaataggcagtagcgaaagctgcaagagaatgaaaatccgtggctcgcagcaaacaccaaacaaaacaaacacaaaccaacaaaaattaaaacagcctgtgggttgatcccacccacaggcccattgggcgctagcactctggtatcacggtacctttgtgcgcctgttttataccccctcccccaactgtaacttagaagtaacacacaccgatcaacagtcagcgtggcacaccagccacgttttgatcaagcacttctgttaccccggactgagtatcaatagactgctcacgcggttgaaggagaaagcgttcgttatccggccaactacttcgaaaaacctagtaacaccgtggaagttgcagagtgtttcgctcagcactaccccagtgtagatcaggtcgatgagtcaccgcattccccacgggcgaccgtggcggtggctgcgttggcggcctgcccatggggaaacccatgggacgctctaatacagacatggtgcgaagagtctattgagctagttggtagtcctccggcccctgaatgcggctaatcctaactgcggagcacacaccctcaagccagagggcagtgtgtcgtaacgggcaactctgcagcggaaccgactactttgggtgtccgtgtttcattttattcctatactggctgcttatggtgacaattgagagatcgttaccatatagctattggattggccatccggtgactaatagagctattatatatccctttgttgggtttataccacttagcttgaaagaggttaaaacattacaattcattgttaagttgaatacagcaaaatggaagatgccaagaacatcaagaagggccctgctccattctaccctctggaagatggaacagccggcgagcagctgcacaaggccatgaagagatatgccctggtgcctggcacaatcgccttcacagatgcccacatcgaggtggacatcacctacgccgagtacttcgagatgtctgtgcggctggccgaagctatgaagcgctacggcctgaacaccaaccaccggatcgtcgtgtgcagcgagaacagcctgcagttcttcatgcctgtgctgggcgccctgttcatcggagttgctgtggcccctgccaacgacatctacaacgagcgcgagctgctgaacagcatgggcatctctcagcccaccgtggtgttcgtgtccaagaagggactgcagaaaatcctgaacgtgcagaagaagctgcccatcatccagaaaatcatcatcatggacagcaagaccgactaccagggcttccagagcatgtacaccttcgtgaccagccatctgccacctggcttcaacgagtacgacttcgtgcccgagagcttcgaccgggacaagacaatcgccctgatcatgaacagcagcggctctaccggactgcccaaaggtgttgccctgcctcatagaactgcctgcgtgcggtttagccacgccagagatcccatcttcggcaaccagatcatccccgacacagccatcctgagcgtggtgccttttcaccacggcttcggcatgttcaccacactgggctacctgatctgcggcttcagagtggtgctgatgtaccgcttcgaggaagaactgttcctgcggagcctgcaggactacaagatccagtctgctctgctggtgcctactctgttcagcttctttgccaagagcaccctgatcgataagtacgacctgagcaacctgcacgagatcgcctctggcggagcccctctgtctaaagaagtgggagaagccgtcgccaagcggttccatctgcctggcatcagacaaggctatggcctgaccgagacaaccagcgccattctgattacccctgagggcgacgataagcctggcgctgtgggaaaagtggtgccattcttcgaggccaaggtggtggatctggacaccggcaaaacactgggcgttaaccagaggggcgagctgtgtgttagaggccctatgatcatgagcggctacgtgaacaaccccgaggccacaaacgctctgatcgacaaggatggatggctgcacagcggcgacattgcctactgggacgaagatgagcacttcttcatcgtggaccggctgaagtccctgatcaagtacaagggctaccaggtggccccagccgagctggaatctattctgctgcaacaccccaacatcttcgatgccggcgttgcaggactgcccgatgatgatgctggcgaactgccagctgctgtggtggtgctggaacacggcaagaccatgaccgagaaagaaatcgtggactacgtggccagccaagtgaccaccgccaagaaactgagaggcggcgtggtgtttgtggacgaggtgccaaaaggcctgacaggcaagctggacgcccggaagatcagagagatcctgattaaggccaagaaaggcggcaagatcgccgtgtaatagctaactagacaaaacaccaaacaaacaagctgcgagccacggacttaaataattgagccttaaagaagaaattctttaagtggatgctctcaaactcagggaaacctaaatctagttatagacaaggcaatcctgagccaagccgaagtagtaattagtaagttaacaatagatgacttacaactaatcggaaggtgcagagactcgacgggagctaccctaacgtacatacacatgaacttagctaaaaaaaatctagatatcggatcccggg

SEQ ID NO: 3541 - DNA, 5231 bp, synthetic construct
  source 1..5231: mol_type = other DNA; note = Ana188 rational design
aggctaggtggaggctcagtgtgataagtctgcgatggtggatgcatgtgtcatggtcatagctgtttcctgtgtgaaattgttatccgctcagagggcacaatcctattccgcgctatccgacaatctccaagacattaggtggagttcagttcggcgtatggcatatgtcgctggaaagaacatgtgagcaaaaggccagcaaaaggccaggaaccgtaaaaaggccgcgttgctggcgtttttccataggctccgcccccctgacgagcatcacaaaaatcgacgctcaagtcagaggtggcgaaacccgacaggactataaagataccaggcgtttccccctggaagctccctcgtgcgctctcctgttccgaccctgccgcttaccggatacctgtccgcctttctcccttcgggaagcgtggcgctttctcatagctcacgctgtaggtatctcagttcggtgtaggtcgttcgctccaagctgggctgtgtgcacgaaccccccgttcagcccgaccgctgcgccttatccggtaactatcgtcttgagtccaacccggtaagacacgacttatcgccactggcagcagccactggtaacaggattagcagagcgaggtatgtaggcggtgctacagagttcttgaagtggtggcctaactacggctacactagaagaacagtatttggtatctgcgctctgctgaagccagttaccttcggaaaaagagttggtagctcttgatccggcaaacaaaccaccgctggtagcggtggtttttttgtttgcaagcagcagattacgcgcagaaaaaaaggatctcaagaagatcctttgatcttttctacggggtctgacgctctattcaacaaagccgccgtcccgtcaagtcagcgtaaatgggtagggggcttcaaatcgtcctcgtgataccaattcggagcctgcttttttgtacaaacttgttgataatggcaattcaaggatcttcacctagatccttttaaattaaaaatgaagttttaaatcaatctaaagtatatatgagtaaacttggtctgacagttaccaatgcttaatcagtgaggcacctatctcagcgatctgtctatttcgttcatccatagttgcctgactccccgtcgtgtagataactacgatacgggagggcttaccatctggccccagtgctgcaatgataccgcgagagccacgctcaccggctccagatttatcagcaataaaccagccagccggaagggccgagcgcagaagtggtcctgcaactttatccgcctccatccagtctattaattgttgccgggaagctagagtaagtagttcgccagttaatagtttgcgcaacgttgttgccattgctacaggcatcgtggtgtcacgctcgtcgtttggtatggcttcattcagctccggttcccaacgatcaaggcgagttacatgatcccccatgttgtgcaaaaaagcggttagctccttcggtcctccgatcgttgtcagaagtaagttggccgcagtgttatcactcatggttatggcagcactgcataattctcttactgtcatgccatccgtaagatgcttttctgtgactggtgagtactcaaccaagtcattctgagaatagtgtatgcggcgaccgagttgctcttgcccggcgtcaatacgggataataccgcgccacatagcagaactttaaaagtgctcatcattggaaaacgttcttcggggcgaaaactctcaaggatcttaccgctgttgagatccagttcgatgtaacccactcgtgcacccaactgatcttcagcatcttttactttcaccagcgtttctgggtgagcaaaaacaggaaggcaaaatgccgcaaaaaagggaataagggcgacacggaaatgttgaatactcatactcttcctttttcaatattattgaagcatttatcagggttattgtctcatgagcggatacatatttgaatgtatttagaaaaataaacaaataggggttccgcgcacatttccccgaaaagtgccagatacctgaaacaaaacccatcgtacggccaaggaagtctccaataactgtgatccaccacaagcgccagggttttcccagtcacgacgttgtaaaacgacggccagtcatgcataatccgcacgcatctggaataaggaagtgccattccgcctgaccttaatacgactcactatagggagaccctcgaaaaaaaagcttcgaatgcgaccatctgctcaggctcaatctcgctccaataatgacacactacgagaacaaccatagaactaagcaacaagacgagggtaaagagagagtccaattctcaaagccaataggcagtagcgaaagctgcaagagaatgaaaatccgttgaccttaaacggtcgtgtggggagcacgccggcgccaataatgccacactaagagaacaaacaaagagctaagcaattaaaacagcctgtgggttgatcccacccacaggcccattgggcgctagcactctggtatcacggtacctttgtgcgcctgttttataccccctcccccaactgtaacttagaagtaacacacaccgatcaacagtcagcgtggcacaccagccacgttttgatcaagcacttctgttaccccggactgagtatcaatagactgctcacgcggttgaaggagaaagcgttcgttatccggccaactacttcgaaaaacctagtaacaccgtggaagttgcagagtgtttcgctcagcactaccccagtgtagatcaggtcgatgagtcaccgcattccccacgggcgaccgtggcggtggctgcgttggcggcctgcccatggggaaacccatgggacgctctaatacagacatggtgcgaagagtctattgagctagttggtagtcctccggcccctgaatgcggctaatcctaactgcggagcacacaccctcaagccagagggcagtgtgtcgtaacgggcaactctgcagcggaaccgactactttgggtgtccgtgtttcattttattcctatactggctgcttatggtgacaattgagagatcgttaccatatagctattggattggccatccggtgactaatagagctattatatatccctttgttgggtttataccacttagcttgaaagaggttaaaacattacaattcattgttaagttgaatacagcaaaatggaagatgccaagaacatcaagaagggccctgctccattctaccctctggaagatggaacagccggcgagcagctgcacaaggccatgaagagatatgccctggtgcctggcacaatcgccttcacagatgcccacatcgaggtggacatcacctacgccgagtacttcgagatgtctgtgcggctggccgaagctatgaagcgctacggcctgaacaccaaccaccggatcgtcgtgtgcagcgagaacagcctgcagttcttcatgcctgtgctgggcgccctgttcatcggagttgctgtggcccctgccaacgacatctacaacgagcgcgagctgctgaacagcatgggcatctctcagcccaccgtggtgttcgtgtccaagaagggactgcagaaaatcctgaacgtgcagaagaagctgcccatcatccagaaaatcatcatcatggacagcaagaccgactaccagggcttccagagcatgtacaccttcgtgaccagccatctgccacctggcttcaacgagtacgacttcgtgcccgagagcttcgaccgggacaagacaatcgccctgatcatgaacagcagcggctctaccggactgcccaaaggtgttgccctgcctcatagaactgcctgcgtgcggtttagccacgccagagatcccatcttcggcaaccagatcatccccgacacagccatcctgagcgtggtgccttttcaccacggcttcggcatgttcaccacactgggctacctgatctgcggcttcagagtggtgctgatgtaccgcttcgaggaagaactgttcctgcggagcctgcaggactacaagatccagtctgctctgctggtgcctactctgttcagcttctttgccaagagcaccctgatcgataagtacgacctgagcaacctgcacgagatcgcctctggcggagcccctctgtctaaagaagtgggagaagccgtcgccaagcggttccatctgcctggcatcagacaaggctatggcctgaccgagacaaccagcgccattctgattacccctgagggcgacgataagcctggcgctgtgggaaaagtggtgccattcttcgaggccaaggtggtggatctggacaccggcaaaacactgggcgttaaccagaggggcgagctgtgtgttagaggccctatgatcatgagcggctacgtgaacaaccccgaggccacaaacgctctgatcgacaaggatggatggctgcacagcggcgacattgcctactgggacgaagatgagcacttcttcatcgtggaccggctgaagtccctgatcaagtacaagggctaccaggtggccccagccgagctggaatctattctgctgcaacaccccaacatcttcgatgccggcgttgcaggactgcccgatgatgatgctggcgaactgccagctgctgtggtggtgctggaacacggcaagaccatgaccgagaaagaaatcgtggactacgtggccagccaagtgaccaccgccaagaaactgagaggcggcgtggtgtttgtggacgaggtgccaaaaggcctgacaggcaagctggacgcccggaagatcagagagatcctgattaaggccaagaaaggcggcaagatcgccgtgtaatagctaactagagatagaatccaactaacctggcgccggcgtgctcgctacggacttaaataattgagccttaaagaagaaattctttaagtggatgctctcaaactcagggaaacctaaatctagttatagacaaggcaatcctgagccaagccgaagtagtaattagtaagttaacaatagatgacttacaactaatcggaaggtgcagagactcgacgggagctaccctaacgtaataatgaaagactacgagatcaaccatagagctaaccaaggagcgagattgagcctgagcagatggtcgcattcgaagcaaaaaaaatctagatatcggatcccggg

SEQ ID NO: 3542 - DNA, 5076 bp, synthetic construct
  source 1..5076: mol_type = other DNA; note = Ana 225 Exonextention
aggctaggtggaggctcagtgtgataagtctgcgatggtggatgcatgtgtcatggtcatagctgtttcctgtgtgaaattgttatccgctcagagggcacaatcctattccgcgctatccgacaatctccaagacattaggtggagttcagttcggcgtatggcatatgtcgctggaaagaacatgtgagcaaaaggccagcaaaaggccaggaaccgtaaaaaggccgcgttgctggcgtttttccataggctccgcccccctgacgagcatcacaaaaatcgacgctcaagtcagaggtggcgaaacccgacaggactataaagataccaggcgtttccccctggaagctccctcgtgcgctctcctgttccgaccctgccgcttaccggatacctgtccgcctttctcccttcgggaagcgtggcgctttctcatagctcacgctgtaggtatctcagttcggtgtaggtcgttcgctccaagctgggctgtgtgcacgaaccccccgttcagcccgaccgctgcgccttatccggtaactatcgtcttgagtccaacccggtaagacacgacttatcgccactggcagcagccactggtaacaggattagcagagcgaggtatgtaggcggtgctacagagttcttgaagtggtggcctaactacggctacactagaagaacagtatttggtatctgcgctctgctgaagccagttaccttcggaaaaagagttggtagctcttgatccggcaaacaaaccaccgctggtagcggtggtttttttgtttgcaagcagcagattacgcgcagaaaaaaaggatctcaagaagatcctttgatcttttctacggggtctgacgctctattcaacaaagccgccgtcccgtcaagtcagcgtaaatgggtagggggcttcaaatcgtcctcgtgataccaattcggagcctgcttttttgtacaaacttgttgataatggcaattcaaggatcttcacctagatccttttaaattaaaaatgaagttttaaatcaatctaaagtatatatgagtaaacttggtctgacagttaccaatgcttaatcagtgaggcacctatctcagcgatctgtctatttcgttcatccatagttgcctgactccccgtcgtgtagataactacgatacgggagggcttaccatctggccccagtgctgcaatgataccgcgagagccacgctcaccggctccagatttatcagcaataaaccagccagccggaagggccgagcgcagaagtggtcctgcaactttatccgcctccatccagtctattaattgttgccgggaagctagagtaagtagttcgccagttaatagtttgcgcaacgttgttgccattgctacaggcatcgtggtgtcacgctcgtcgtttggtatggcttcattcagctccggttcccaacgatcaaggcgagttacatgatcccccatgttgtgcaaaaaagcggttagctccttcggtcctccgatcgttgtcagaagtaagttggccgcagtgttatcactcatggttatggcagcactgcataattctcttactgtcatgccatccgtaagatgcttttctgtgactggtgagtactcaaccaagtcattctgagaatagtgtatgcggcgaccgagttgctcttgcccggcgtcaatacgggataataccgcgccacatagcagaactttaaaagtgctcatcattggaaaacgttcttcggggcgaaaactctcaaggatcttaccgctgttgagatccagttcgatgtaacccactcgtgcacccaactgatcttcagcatcttttactttcaccagcgtttctgggtgagcaaaaacaggaaggcaaaatgccgcaaaaaagggaataagggcgacacggaaatgttgaatactcatactcttcctttttcaatattattgaagcatttatcagggttattgtctcatgagcggatacatatttgaatgtatttagaaaaataaacaaataggggttccgcgcacatttccccgaaaagtgccagatacctgaaacaaaacccatcgtacggccaaggaagtctccaataactgtgatccaccacaagcgccagggttttcccagtcacgacgttgtaaaacgacggccagtcatgcataatccgcacgcatctggaataaggaagtgccattccgcctgaccttaatacgactcactatagggagaccctcgaaaaaaaacacaaacacccaataggcagtagcgaaagctgcaagagaatgaaaatccgttgaccttaaacggtcgtgtgggggctcgcagcaaacaccaaacaaaacaaacacaaaccaacaaaaattaaaacagcctgtgggttgatcccacccacaggcccattgggcgctagcactctggtatcacggtacctttgtgcgcctgttttataccccctcccccaactgtaacttagaagtaacacacaccgatcaacagtcagcgtggcacaccagccacgttttgatcaagcacttctgttaccccggactgagtatcaatagactgctcacgcggttgaaggagaaagcgttcgttatccggccaactacttcgaaaaacctagtaacaccgtggaagttgcagagtgtttcgctcagcactaccccagtgtagatcaggtcgatgagtcaccgcattccccacgggcgaccgtggcggtggctgcgttggcggcctgcccatggggaaacccatgggacgctctaatacagacatggtgcgaagagtctattgagctagttggtagtcctccggcccctgaatgcggctaatcctaactgcggagcacacaccctcaagccagagggcagtgtgtcgtaacgggcaactctgcagcggaaccgactactttgggtgtccgtgtttcattttattcctatactggctgcttatggtgacaattgagagatcgttaccatatagctattggattggccatccggtgactaatagagctattatatatccctttgttgggtttataccacttagcttgaaagaggttaaaacattacaattcattgttaagttgaatacagcaaaatggaagatgccaagaacatcaagaagggccctgctccattctaccctctggaagatggaacagccggcgagcagctgcacaaggccatgaagagatatgccctggtgcctggcacaatcgccttcacagatgcccacatcgaggtggacatcacctacgccgagtacttcgagatgtctgtgcggctggccgaagctatgaagcgctacggcctgaacaccaaccaccggatcgtcgtgtgcagcgagaacagcctgcagttcttcatgcctgtgctgggcgccctgttcatcggagttgctgtggcccctgccaacgacatctacaacgagcgcgagctgctgaacagcatgggcatctctcagcccaccgtggtgttcgtgtccaagaagggactgcagaaaatcctgaacgtgcagaagaagctgcccatcatccagaaaatcatcatcatggacagcaagaccgactaccagggcttccagagcatgtacaccttcgtgaccagccatctgccacctggcttcaacgagtacgacttcgtgcccgagagcttcgaccgggacaagacaatcgccctgatcatgaacagcagcggctctaccggactgcccaaaggtgttgccctgcctcatagaactgcctgcgtgcggtttagccacgccagagatcccatcttcggcaaccagatcatccccgacacagccatcctgagcgtggtgccttttcaccacggcttcggcatgttcaccacactgggctacctgatctgcggcttcagagtggtgctgatgtaccgcttcgaggaagaactgttcctgcggagcctgcaggactacaagatccagtctgctctgctggtgcctactctgttcagcttctttgccaagagcaccctgatcgataagtacgacctgagcaacctgcacgagatcgcctctggcggagcccctctgtctaaagaagtgggagaagccgtcgccaagcggttccatctgcctggcatcagacaaggctatggcctgaccgagacaaccagcgccattctgattacccctgagggcgacgataagcctggcgctgtgggaaaagtggtgccattcttcgaggccaaggtggtggatctggacaccggcaaaacactgggcgttaaccagaggggcgagctgtgtgttagaggccctatgatcatgagcggctacgtgaacaaccccgaggccacaaacgctctgatcgacaaggatggatggctgcacagcggcgacattgcctactgggacgaagatgagcacttcttcatcgtggaccggctgaagtccctgatcaagtacaagggctaccaggtggccccagccgagctggaatctattctgctgcaacaccccaacatcttcgatgccggcgttgcaggactgcccgatgatgatgctggcgaactgccagctgctgtggtggtgctggaacacggcaagaccatgaccgagaaagaaatcgtggactacgtggccagccaagtgaccaccgccaagaaactgagaggcggcgtggtgtttgtggacgaggtgccaaaaggcctgacaggcaagctggacgcccggaagatcagagagatcctgattaaggccaagaaaggcggcaagatcgccgtgtaatagctaactagacaaaacaccaaacaaacaagctgcgagccgctacggacttaaataattgagccttaaagaagaaattctttaagtggatgctctcaaactcagggaaacctaaatctagttatagacaaggcaatcctgagccaagccgaagtagtaattagtaagttaacaatagatgacttacaactaatcggaaggtgcagagactcgacgggagctaccctaacgtcaagacgagggtaaagagagagtccaattctcaaagcaaaaacaaccaaaaaaaatctagatatcggatcccggg

SEQ ID NO: 3543 - DNA, 5057 bp, synthetic construct
  source 1..5057: mol_type = other DNA; note = Ana225 13ntIH
aggctaggtggaggctcagtgtgataagtctgcgatggtggatgcatgtgtcatggtcatagctgtttcctgtgtgaaattgttatccgctcagagggcacaatcctattccgcgctatccgacaatctccaagacattaggtggagttcagttcggcgtatggcatatgtcgctggaaagaacatgtgagcaaaaggccagcaaaaggccaggaaccgtaaaaaggccgcgttgctggcgtttttccataggctccgcccccctgacgagcatcacaaaaatcgacgctcaagtcagaggtggcgaaacccgacaggactataaagataccaggcgtttccccctggaagctccctcgtgcgctctcctgttccgaccctgccgcttaccggatacctgtccgcctttctcccttcgggaagcgtggcgctttctcatagctcacgctgtaggtatctcagttcggtgtaggtcgttcgctccaagctgggctgtgtgcacgaaccccccgttcagcccgaccgctgcgccttatccggtaactatcgtcttgagtccaacccggtaagacacgacttatcgccactggcagcagccactggtaacaggattagcagagcgaggtatgtaggcggtgctacagagttcttgaagtggtggcctaactacggctacactagaagaacagtatttggtatctgcgctctgctgaagccagttaccttcggaaaaagagttggtagctcttgatccggcaaacaaaccaccgctggtagcggtggtttttttgtttgcaagcagcagattacgcgcagaaaaaaaggatctcaagaagatcctttgatcttttctacggggtctgacgctctattcaacaaagccgccgtcccgtcaagtcagcgtaaatgggtagggggcttcaaatcgtcctcgtgataccaattcggagcctgcttttttgtacaaacttgttgataatggcaattcaaggatcttcacctagatccttttaaattaaaaatgaagttttaaatcaatctaaagtatatatgagtaaacttggtctgacagttaccaatgcttaatcagtgaggcacctatctcagcgatctgtctatttcgttcatccatagttgcctgactccccgtcgtgtagataactacgatacgggagggcttaccatctggccccagtgctgcaatgataccgcgagagccacgctcaccggctccagatttatcagcaataaaccagccagccggaagggccgagcgcagaagtggtcctgcaactttatccgcctccatccagtctattaattgttgccgggaagctagagtaagtagttcgccagttaatagtttgcgcaacgttgttgccattgctacaggcatcgtggtgtcacgctcgtcgtttggtatggcttcattcagctccggttcccaacgatcaaggcgagttacatgatcccccatgttgtgcaaaaaagcggttagctccttcggtcctccgatcgttgtcagaagtaagttggccgcagtgttatcactcatggttatggcagcactgcataattctcttactgtcatgccatccgtaagatgcttttctgtgactggtgagtactcaaccaagtcattctgagaatagtgtatgcggcgaccgagttgctcttgcccggcgtcaatacgggataataccgcgccacatagcagaactttaaaagtgctcatcattggaaaacgttcttcggggcgaaaactctcaaggatcttaccgctgttgagatccagttcgatgtaacccactcgtgcacccaactgatcttcagcatcttttactttcaccagcgtttctgggtgagcaaaaacaggaaggcaaaatgccgcaaaaaagggaataagggcgacacggaaatgttgaatactcatactcttcctttttcaatattattgaagcatttatcagggttattgtctcatgagcggatacatatttgaatgtatttagaaaaataaacaaataggggttccgcgcacatttccccgaaaagtgccagatacctgaaacaaaacccatcgtacggccaaggaagtctccaataactgtgatccaccacaagcgccagggttttcccagtcacgacgttgtaaaacgacggccagtcatgcataatccgcacgcatctggaataaggaagtgccattccgcctgaccttaatacgactcactatagggagaccctcgaaaaaaaacacaaacacccaataggcagtagcgaaagctgcaagagaatgaaaatccgtcggctcgcagcggaaacaccaaacaaaacaaacacaaaccaacaaaaattaaaacagcctgtgggttgatcccacccacaggcccattgggcgctagcactctggtatcacggtacctttgtgcgcctgttttataccccctcccccaactgtaacttagaagtaacacacaccgatcaacagtcagcgtggcacaccagccacgttttgatcaagcacttctgttaccccggactgagtatcaatagactgctcacgcggttgaaggagaaagcgttcgttatccggccaactacttcgaaaaacctagtaacaccgtggaagttgcagagtgtttcgctcagcactaccccagtgtagatcaggtcgatgagtcaccgcattccccacgggcgaccgtggcggtggctgcgttggcggcctgcccatggggaaacccatgggacgctctaatacagacatggtgcgaagagtctattgagctagttggtagtcctccggcccctgaatgcggctaatcctaactgcggagcacacaccctcaagccagagggcagtgtgtcgtaacgggcaactctgcagcggaaccgactactttgggtgtccgtgtttcattttattcctatactggctgcttatggtgacaattgagagatcgttaccatatagctattggattggccatccggtgactaatagagctattatatatccctttgttgggtttataccacttagcttgaaagaggttaaaacattacaattcattgttaagttgaatacagcaaaatggaagatgccaagaacatcaagaagggccctgctccattctaccctctggaagatggaacagccggcgagcagctgcacaaggccatgaagagatatgccctggtgcctggcacaatcgccttcacagatgcccacatcgaggtggacatcacctacgccgagtacttcgagatgtctgtgcggctggccgaagctatgaagcgctacggcctgaacaccaaccaccggatcgtcgtgtgcagcgagaacagcctgcagttcttcatgcctgtgctgggcgccctgttcatcggagttgctgtggcccctgccaacgacatctacaacgagcgcgagctgctgaacagcatgggcatctctcagcccaccgtggtgttcgtgtccaagaagggactgcagaaaatcctgaacgtgcagaagaagctgcccatcatccagaaaatcatcatcatggacagcaagaccgactaccagggcttccagagcatgtacaccttcgtgaccagccatctgccacctggcttcaacgagtacgacttcgtgcccgagagcttcgaccgggacaagacaatcgccctgatcatgaacagcagcggctctaccggactgcccaaaggtgttgccctgcctcatagaactgcctgcgtgcggtttagccacgccagagatcccatcttcggcaaccagatcatccccgacacagccatcctgagcgtggtgccttttcaccacggcttcggcatgttcaccacactgggctacctgatctgcggcttcagagtggtgctgatgtaccgcttcgaggaagaactgttcctgcggagcctgcaggactacaagatccagtctgctctgctggtgcctactctgttcagcttctttgccaagagcaccctgatcgataagtacgacctgagcaacctgcacgagatcgcctctggcggagcccctctgtctaaagaagtgggagaagccgtcgccaagcggttccatctgcctggcatcagacaaggctatggcctgaccgagacaaccagcgccattctgattacccctgagggcgacgataagcctggcgctgtgggaaaagtggtgccattcttcgaggccaaggtggtggatctggacaccggcaaaacactgggcgttaaccagaggggcgagctgtgtgttagaggccctatgatcatgagcggctacgtgaacaaccccgaggccacaaacgctctgatcgacaaggatggatggctgcacagcggcgacattgcctactgggacgaagatgagcacttcttcatcgtggaccggctgaagtccctgatcaagtacaagggctaccaggtggccccagccgagctggaatctattctgctgcaacaccccaacatcttcgatgccggcgttgcaggactgcccgatgatgatgctggcgaactgccagctgctgtggtggtgctggaacacggcaagaccatgaccgagaaagaaatcgtggactacgtggccagccaagtgaccaccgccaagaaactgagaggcggcgtggtgtttgtggacgaggtgccaaaaggcctgacaggcaagctggacgcccggaagatcagagagatcctgattaaggccaagaaaggcggcaagatcgccgtgtaatagctaactagacaaaacaccaaacaaacaaccgctgcgagccgacggacttaaataattgagccttaaagaagaaattctttaagtggatgctctcaaactcagggaaacctaaatctagttatagacaaggcaatcctgagccaagccgaagtagtaattagtaagttaacaatagatgacttacaactaatcggaaggtgcagagactcgacgggagctaccctaacgtcaagacgagggtaaagagagagtccaattctcaaagcaaaaacaaccaaaaaaaatctagatatcggatcccggg

SEQ ID NO: 3544 - DNA, 5061 bp, synthetic construct
  source 1..5061: mol_type = other DNA; note = Ana225 15ntIH
aggctaggtggaggctcagtgtgataagtctgcgatggtggatgcatgtgtcatggtcatagctgtttcctgtgtgaaattgttatccgctcagagggcacaatcctattccgcgctatccgacaatctccaagacattaggtggagttcagttcggcgtatggcatatgtcgctggaaagaacatgtgagcaaaaggccagcaaaaggccaggaaccgtaaaaaggccgcgttgctggcgtttttccataggctccgcccccctgacgagcatcacaaaaatcgacgctcaagtcagaggtggcgaaacccgacaggactataaagataccaggcgtttccccctggaagctccctcgtgcgctctcctgttccgaccctgccgcttaccggatacctgtccgcctttctcccttcgggaagcgtggcgctttctcatagctcacgctgtaggtatctcagttcggtgtaggtcgttcgctccaagctgggctgtgtgcacgaaccccccgttcagcccgaccgctgcgccttatccggtaactatcgtcttgagtccaacccggtaagacacgacttatcgccactggcagcagccactggtaacaggattagcagagcgaggtatgtaggcggtgctacagagttcttgaagtggtggcctaactacggctacactagaagaacagtatttggtatctgcgctctgctgaagccagttaccttcggaaaaagagttggtagctcttgatccggcaaacaaaccaccgctggtagcggtggtttttttgtttgcaagcagcagattacgcgcagaaaaaaaggatctcaagaagatcctttgatcttttctacggggtctgacgctctattcaacaaagccgccgtcccgtcaagtcagcgtaaatgggtagggggcttcaaatcgtcctcgtgataccaattcggagcctgcttttttgtacaaacttgttgataatggcaattcaaggatcttcacctagatccttttaaattaaaaatgaagttttaaatcaatctaaagtatatatgagtaaacttggtctgacagttaccaatgcttaatcagtgaggcacctatctcagcgatctgtctatttcgttcatccatagttgcctgactccccgtcgtgtagataactacgatacgggagggcttaccatctggccccagtgctgcaatgataccgcgagagccacgctcaccggctccagatttatcagcaataaaccagccagccggaagggccgagcgcagaagtggtcctgcaactttatccgcctccatccagtctattaattgttgccgggaagctagagtaagtagttcgccagttaatagtttgcgcaacgttgttgccattgctacaggcatcgtggtgtcacgctcgtcgtttggtatggcttcattcagctccggttcccaacgatcaaggcgagttacatgatcccccatgttgtgcaaaaaagcggttagctccttcggtcctccgatcgttgtcagaagtaagttggccgcagtgttatcactcatggttatggcagcactgcataattctcttactgtcatgccatccgtaagatgcttttctgtgactggtgagtactcaaccaagtcattctgagaatagtgtatgcggcgaccgagttgctcttgcccggcgtcaatacgggataataccgcgccacatagcagaactttaaaagtgctcatcattggaaaacgttcttcggggcgaaaactctcaaggatcttaccgctgttgagatccagttcgatgtaacccactcgtgcacccaactgatcttcagcatcttttactttcaccagcgtttctgggtgagcaaaaacaggaaggcaaaatgccgcaaaaaagggaataagggcgacacggaaatgttgaatactcatactcttcctttttcaatattattgaagcatttatcagggttattgtctcatgagcggatacatatttgaatgtatttagaaaaataaacaaataggggttccgcgcacatttccccgaaaagtgccagatacctgaaacaaaacccatcgtacggccaaggaagtctccaataactgtgatccaccacaagcgccagggttttcccagtcacgacgttgtaaaacgacggccagtcatgcataatccgcacgcatctggaataaggaagtgccattccgcctgaccttaatacgactcactatagggagaccctcgaaaaaaaacacaaacacccaataggcagtagcgaaagctgcaagagaatgaaaatccgtgagcacgccggcgccaaacaccaaacaaaacaaacacaaaccaacaaaaattaaaacagcctgtgggttgatcccacccacaggcccattgggcgctagcactctggtatcacggtacctttgtgcgcctgttttataccccctcccccaactgtaacttagaagtaacacacaccgatcaacagtcagcgtggcacaccagccacgttttgatcaagcacttctgttaccccggactgagtatcaatagactgctcacgcggttgaaggagaaagcgttcgttatccggccaactacttcgaaaaacctagtaacaccgtggaagttgcagagtgtttcgctcagcactaccccagtgtagatcaggtcgatgagtcaccgcattccccacgggcgaccgtggcggtggctgcgttggcggcctgcccatggggaaacccatgggacgctctaatacagacatggtgcgaagagtctattgagctagttggtagtcctccggcccctgaatgcggctaatcctaactgcggagcacacaccctcaagccagagggcagtgtgtcgtaacgggcaactctgcagcggaaccgactactttgggtgtccgtgtttcattttattcctatactggctgcttatggtgacaattgagagatcgttaccatatagctattggattggccatccggtgactaatagagctattatatatccctttgttgggtttataccacttagcttgaaagaggttaaaacattacaattcattgttaagttgaatacagcaaaatggaagatgccaagaacatcaagaagggccctgctccattctaccctctggaagatggaacagccggcgagcagctgcacaaggccatgaagagatatgccctggtgcctggcacaatcgccttcacagatgcccacatcgaggtggacatcacctacgccgagtacttcgagatgtctgtgcggctggccgaagctatgaagcgctacggcctgaacaccaaccaccggatcgtcgtgtgcagcgagaacagcctgcagttcttcatgcctgtgctgggcgccctgttcatcggagttgctgtggcccctgccaacgacatctacaacgagcgcgagctgctgaacagcatgggcatctctcagcccaccgtggtgttcgtgtccaagaagggactgcagaaaatcctgaacgtgcagaagaagctgcccatcatccagaaaatcatcatcatggacagcaagaccgactaccagggcttccagagcatgtacaccttcgtgaccagccatctgccacctggcttcaacgagtacgacttcgtgcccgagagcttcgaccgggacaagacaatcgccctgatcatgaacagcagcggctctaccggactgcccaaaggtgttgccctgcctcatagaactgcctgcgtgcggtttagccacgccagagatcccatcttcggcaaccagatcatccccgacacagccatcctgagcgtggtgccttttcaccacggcttcggcatgttcaccacactgggctacctgatctgcggcttcagagtggtgctgatgtaccgcttcgaggaagaactgttcctgcggagcctgcaggactacaagatccagtctgctctgctggtgcctactctgttcagcttctttgccaagagcaccctgatcgataagtacgacctgagcaacctgcacgagatcgcctctggcggagcccctctgtctaaagaagtgggagaagccgtcgccaagcggttccatctgcctggcatcagacaaggctatggcctgaccgagacaaccagcgccattctgattacccctgagggcgacgataagcctggcgctgtgggaaaagtggtgccattcttcgaggccaaggtggtggatctggacaccggcaaaacactgggcgttaaccagaggggcgagctgtgtgttagaggccctatgatcatgagcggctacgtgaacaaccccgaggccacaaacgctctgatcgacaaggatggatggctgcacagcggcgacattgcctactgggacgaagatgagcacttcttcatcgtggaccggctgaagtccctgatcaagtacaagggctaccaggtggccccagccgagctggaatctattctgctgcaacaccccaacatcttcgatgccggcgttgcaggactgcccgatgatgatgctggcgaactgccagctgctgtggtggtgctggaacacggcaagaccatgaccgagaaagaaatcgtggactacgtggccagccaagtgaccaccgccaagaaactgagaggcggcgtggtgtttgtggacgaggtgccaaaaggcctgacaggcaagctggacgcccggaagatcagagagatcctgattaaggccaagaaaggcggcaagatcgccgtgtaatagctaactagacaaaacaccaaacaaacaaggcgccggcgtgctcacggacttaaataattgagccttaaagaagaaattctttaagtggatgctctcaaactcagggaaacctaaatctagttatagacaaggcaatcctgagccaagccgaagtagtaattagtaagttaacaatagatgacttacaactaatcggaaggtgcagagactcgacgggagctaccctaacgtcaagacgagggtaaagagagagtccaattctcaaagcaaaaacaaccaaaaaaaatctagatatcggatcccggg

SEQ ID NO: 3545 - DNA, 5131 bp, synthetic construct
  source 1..5131: mol_type = other DNA; note = Ana225 EH T60L40
aggctaggtggaggctcagtgtgataagtctgcgatggtggatgcatgtgtcatggtcatagctgtttcctgtgtgaaattgttatccgctcagagggcacaatcctattccgcgctatccgacaatctccaagacattaggtggagttcagttcggcgtatggcatatgtcgctggaaagaacatgtgagcaaaaggccagcaaaaggccaggaaccgtaaaaaggccgcgttgctggcgtttttccataggctccgcccccctgacgagcatcacaaaaatcgacgctcaagtcagaggtggcgaaacccgacaggactataaagataccaggcgtttccccctggaagctccctcgtgcgctctcctgttccgaccctgccgcttaccggatacctgtccgcctttctcccttcgggaagcgtggcgctttctcatagctcacgctgtaggtatctcagttcggtgtaggtcgttcgctccaagctgggctgtgtgcacgaaccccccgttcagcccgaccgctgcgccttatccggtaactatcgtcttgagtccaacccggtaagacacgacttatcgccactggcagcagccactggtaacaggattagcagagcgaggtatgtaggcggtgctacagagttcttgaagtggtggcctaactacggctacactagaagaacagtatttggtatctgcgctctgctgaagccagttaccttcggaaaaagagttggtagctcttgatccggcaaacaaaccaccgctggtagcggtggtttttttgtttgcaagcagcagattacgcgcagaaaaaaaggatctcaagaagatcctttgatcttttctacggggtctgacgctctattcaacaaagccgccgtcccgtcaagtcagcgtaaatgggtagggggcttcaaatcgtcctcgtgataccaattcggagcctgcttttttgtacaaacttgttgataatggcaattcaaggatcttcacctagatccttttaaattaaaaatgaagttttaaatcaatctaaagtatatatgagtaaacttggtctgacagttaccaatgcttaatcagtgaggcacctatctcagcgatctgtctatttcgttcatccatagttgcctgactccccgtcgtgtagataactacgatacgggagggcttaccatctggccccagtgctgcaatgataccgcgagagccacgctcaccggctccagatttatcagcaataaaccagccagccggaagggccgagcgcagaagtggtcctgcaactttatccgcctccatccagtctattaattgttgccgggaagctagagtaagtagttcgccagttaatagtttgcgcaacgttgttgccattgctacaggcatcgtggtgtcacgctcgtcgtttggtatggcttcattcagctccggttcccaacgatcaaggcgagttacatgatcccccatgttgtgcaaaaaagcggttagctccttcggtcctccgatcgttgtcagaagtaagttggccgcagtgttatcactcatggttatggcagcactgcataattctcttactgtcatgccatccgtaagatgcttttctgtgactggtgagtactcaaccaagtcattctgagaatagtgtatgcggcgaccgagttgctcttgcccggcgtcaatacgggataataccgcgccacatagcagaactttaaaagtgctcatcattggaaaacgttcttcggggcgaaaactctcaaggatcttaccgctgttgagatccagttcgatgtaacccactcgtgcacccaactgatcttcagcatcttttactttcaccagcgtttctgggtgagcaaaaacaggaaggcaaaatgccgcaaaaaagggaataagggcgacacggaaatgttgaatactcatactcttcctttttcaatattattgaagcatttatcagggttattgtctcatgagcggatacatatttgaatgtatttagaaaaataaacaaataggggttccgcgcacatttccccgaaaagtgccagatacctgaaacaaaacccatcgtacggccaaggaagtctccaataactgtgatccaccacaagcgccagggttttcccagtcacgacgttgtaaaacgacggccagtcatgcataatccgcacgcatctggaataaggaagtgccattccgcctgaccttaatacgactcactatagggagaccctcgaaaaaaaagcttcgaatgcgaccatctgctcaggctcaatctcgctcccacaaacacccaataggcagtagcgaaagctgcaagagaatgaaaatccgtggctcgcagcaaacaccaaacaaaacaaacacaaaccaacaaaaattaaaacagcctgtgggttgatcccacccacaggcccattgggcgctagcactctggtatcacggtacctttgtgcgcctgttttataccccctcccccaactgtaacttagaagtaacacacaccgatcaacagtcagcgtggcacaccagccacgttttgatcaagcacttctgttaccccggactgagtatcaatagactgctcacgcggttgaaggagaaagcgttcgttatccggccaactacttcgaaaaacctagtaacaccgtggaagttgcagagtgtttcgctcagcactaccccagtgtagatcaggtcgatgagtcaccgcattccccacgggcgaccgtggcggtggctgcgttggcggcctgcccatggggaaacccatgggacgctctaatacagacatggtgcgaagagtctattgagctagttggtagtcctccggcccctgaatgcggctaatcctaactgcggagcacacaccctcaagccagagggcagtgtgtcgtaacgggcaactctgcagcggaaccgactactttgggtgtccgtgtttcattttattcctatactggctgcttatggtgacaattgagagatcgttaccatatagctattggattggccatccggtgactaatagagctattatatatccctttgttgggtttataccacttagcttgaaagaggttaaaacattacaattcattgttaagttgaatacagcaaaatggaagatgccaagaacatcaagaagggccctgctccattctaccctctggaagatggaacagccggcgagcagctgcacaaggccatgaagagatatgccctggtgcctggcacaatcgccttcacagatgcccacatcgaggtggacatcacctacgccgagtacttcgagatgtctgtgcggctggccgaagctatgaagcgctacggcctgaacaccaaccaccggatcgtcgtgtgcagcgagaacagcctgcagttcttcatgcctgtgctgggcgccctgttcatcggagttgctgtggcccctgccaacgacatctacaacgagcgcgagctgctgaacagcatgggcatctctcagcccaccgtggtgttcgtgtccaagaagggactgcagaaaatcctgaacgtgcagaagaagctgcccatcatccagaaaatcatcatcatggacagcaagaccgactaccagggcttccagagcatgtacaccttcgtgaccagccatctgccacctggcttcaacgagtacgacttcgtgcccgagagcttcgaccgggacaagacaatcgccctgatcatgaacagcagcggctctaccggactgcccaaaggtgttgccctgcctcatagaactgcctgcgtgcggtttagccacgccagagatcccatcttcggcaaccagatcatccccgacacagccatcctgagcgtggtgccttttcaccacggcttcggcatgttcaccacactgggctacctgatctgcggcttcagagtggtgctgatgtaccgcttcgaggaagaactgttcctgcggagcctgcaggactacaagatccagtctgctctgctggtgcctactctgttcagcttctttgccaagagcaccctgatcgataagtacgacctgagcaacctgcacgagatcgcctctggcggagcccctctgtctaaagaagtgggagaagccgtcgccaagcggttccatctgcctggcatcagacaaggctatggcctgaccgagacaaccagcgccattctgattacccctgagggcgacgataagcctggcgctgtgggaaaagtggtgccattcttcgaggccaaggtggtggatctggacaccggcaaaacactgggcgttaaccagaggggcgagctgtgtgttagaggccctatgatcatgagcggctacgtgaacaaccccgaggccacaaacgctctgatcgacaaggatggatggctgcacagcggcgacattgcctactgggacgaagatgagcacttcttcatcgtggaccggctgaagtccctgatcaagtacaagggctaccaggtggccccagccgagctggaatctattctgctgcaacaccccaacatcttcgatgccggcgttgcaggactgcccgatgatgatgctggcgaactgccagctgctgtggtggtgctggaacacggcaagaccatgaccgagaaagaaatcgtggactacgtggccagccaagtgaccaccgccaagaaactgagaggcggcgtggtgtttgtggacgaggtgccaaaaggcctgacaggcaagctggacgcccggaagatcagagagatcctgattaaggccaagaaaggcggcaagatcgccgtgtaatagctaactagacaaaacaccaaacaaacaagctgcgagccacggacttaaataattgagccttaaagaagaaattctttaagtggatgctctcaaactcagggaaacctaaatctagttatagacaaggcaatcctgagccaagccgaagtagtaattagtaagttaacaatagatgacttacaactaatcggaaggtgcagagactcgacgggagctaccctaacgtcaagacgagggtaaagagagagtccaattctcaaagcaaaaacaaccggagcgagattgagcctgagcagatggtcgcattcgaagcaaaaaaaatctagatatcggatcccggg

SEQ ID NO: 3546 - DNA, 5111 bp, synthetic construct
  source 1..5111: mol_type = other DNA; note = Ana225 EH T75L30
aggctaggtggaggctcagtgtgataagtctgcgatggtggatgcatgtgtcatggtcatagctgtttcctgtgtgaaattgttatccgctcagagggcacaatcctattccgcgctatccgacaatctccaagacattaggtggagttcagttcggcgtatggcatatgtcgctggaaagaacatgtgagcaaaaggccagcaaaaggccaggaaccgtaaaaaggccgcgttgctggcgtttttccataggctccgcccccctgacgagcatcacaaaaatcgacgctcaagtcagaggtggcgaaacccgacaggactataaagataccaggcgtttccccctggaagctccctcgtgcgctctcctgttccgaccctgccgcttaccggatacctgtccgcctttctcccttcgggaagcgtggcgctttctcatagctcacgctgtaggtatctcagttcggtgtaggtcgttcgctccaagctgggctgtgtgcacgaaccccccgttcagcccgaccgctgcgccttatccggtaactatcgtcttgagtccaacccggtaagacacgacttatcgccactggcagcagccactggtaacaggattagcagagcgaggtatgtaggcggtgctacagagttcttgaagtggtggcctaactacggctacactagaagaacagtatttggtatctgcgctctgctgaagccagttaccttcggaaaaagagttggtagctcttgatccggcaaacaaaccaccgctggtagcggtggtttttttgtttgcaagcagcagattacgcgcagaaaaaaaggatctcaagaagatcctttgatcttttctacggggtctgacgctctattcaacaaagccgccgtcccgtcaagtcagcgtaaatgggtagggggcttcaaatcgtcctcgtgataccaattcggagcctgcttttttgtacaaacttgttgataatggcaattcaaggatcttcacctagatccttttaaattaaaaatgaagttttaaatcaatctaaagtatatatgagtaaacttggtctgacagttaccaatgcttaatcagtgaggcacctatctcagcgatctgtctatttcgttcatccatagttgcctgactccccgtcgtgtagataactacgatacgggagggcttaccatctggccccagtgctgcaatgataccgcgagagccacgctcaccggctccagatttatcagcaataaaccagccagccggaagggccgagcgcagaagtggtcctgcaactttatccgcctccatccagtctattaattgttgccgggaagctagagtaagtagttcgccagttaatagtttgcgcaacgttgttgccattgctacaggcatcgtggtgtcacgctcgtcgtttggtatggcttcattcagctccggttcccaacgatcaaggcgagttacatgatcccccatgttgtgcaaaaaagcggttagctccttcggtcctccgatcgttgtcagaagtaagttggccgcagtgttatcactcatggttatggcagcactgcataattctcttactgtcatgccatccgtaagatgcttttctgtgactggtgagtactcaaccaagtcattctgagaatagtgtatgcggcgaccgagttgctcttgcccggcgtcaatacgggataataccgcgccacatagcagaactttaaaagtgctcatcattggaaaacgttcttcggggcgaaaactctcaaggatcttaccgctgttgagatccagttcgatgtaacccactcgtgcacccaactgatcttcagcatcttttactttcaccagcgtttctgggtgagcaaaaacaggaaggcaaaatgccgcaaaaaagggaataagggcgacacggaaatgttgaatactcatactcttcctttttcaatattattgaagcatttatcagggttattgtctcatgagcggatacatatttgaatgtatttagaaaaataaacaaataggggttccgcgcacatttccccgaaaagtgccagatacctgaaacaaaacccatcgtacggccaaggaagtctccaataactgtgatccaccacaagcgccagggttttcccagtcacgacgttgtaaaacgacggccagtcatgcataatccgcacgcatctggaataaggaagtgccattccgcctgaccttaatacgactcactatagggagaccctcgaaaaaaaagctcgcactggccggaagctcgtcggagcgcacaaacacccaataggcagtagcgaaagctgcaagagaatgaaaatccgtggctcgcagcaaacaccaaacaaaacaaacacaaaccaacaaaaattaaaacagcctgtgggttgatcccacccacaggcccattgggcgctagcactctggtatcacggtacctttgtgcgcctgttttataccccctcccccaactgtaacttagaagtaacacacaccgatcaacagtcagcgtggcacaccagccacgttttgatcaagcacttctgttaccccggactgagtatcaatagactgctcacgcggttgaaggagaaagcgttcgttatccggccaactacttcgaaaaacctagtaacaccgtggaagttgcagagtgtttcgctcagcactaccccagtgtagatcaggtcgatgagtcaccgcattccccacgggcgaccgtggcggtggctgcgttggcggcctgcccatggggaaacccatgggacgctctaatacagacatggtgcgaagagtctattgagctagttggtagtcctccggcccctgaatgcggctaatcctaactgcggagcacacaccctcaagccagagggcagtgtgtcgtaacgggcaactctgcagcggaaccgactactttgggtgtccgtgtttcattttattcctatactggctgcttatggtgacaattgagagatcgttaccatatagctattggattggccatccggtgactaatagagctattatatatccctttgttgggtttataccacttagcttgaaagaggttaaaacattacaattcattgttaagttgaatacagcaaaatggaagatgccaagaacatcaagaagggccctgctccattctaccctctggaagatggaacagccggcgagcagctgcacaaggccatgaagagatatgccctggtgcctggcacaatcgccttcacagatgcccacatcgaggtggacatcacctacgccgagtacttcgagatgtctgtgcggctggccgaagctatgaagcgctacggcctgaacaccaaccaccggatcgtcgtgtgcagcgagaacagcctgcagttcttcatgcctgtgctgggcgccctgttcatcggagttgctgtggcccctgccaacgacatctacaacgagcgcgagctgctgaacagcatgggcatctctcagcccaccgtggtgttcgtgtccaagaagggactgcagaaaatcctgaacgtgcagaagaagctgcccatcatccagaaaatcatcatcatggacagcaagaccgactaccagggcttccagagcatgtacaccttcgtgaccagccatctgccacctggcttcaacgagtacgacttcgtgcccgagagcttcgaccgggacaagacaatcgccctgatcatgaacagcagcggctctaccggactgcccaaaggtgttgccctgcctcatagaactgcctgcgtgcggtttagccacgccagagatcccatcttcggcaaccagatcatccccgacacagccatcctgagcgtggtgccttttcaccacggcttcggcatgttcaccacactgggctacctgatctgcggcttcagagtggtgctgatgtaccgcttcgaggaagaactgttcctgcggagcctgcaggactacaagatccagtctgctctgctggtgcctactctgttcagcttctttgccaagagcaccctgatcgataagtacgacctgagcaacctgcacgagatcgcctctggcggagcccctctgtctaaagaagtgggagaagccgtcgccaagcggttccatctgcctggcatcagacaaggctatggcctgaccgagacaaccagcgccattctgattacccctgagggcgacgataagcctggcgctgtgggaaaagtggtgccattcttcgaggccaaggtggtggatctggacaccggcaaaacactgggcgttaaccagaggggcgagctgtgtgttagaggccctatgatcatgagcggctacgtgaacaaccccgaggccacaaacgctctgatcgacaaggatggatggctgcacagcggcgacattgcctactgggacgaagatgagcacttcttcatcgtggaccggctgaagtccctgatcaagtacaagggctaccaggtggccccagccgagctggaatctattctgctgcaacaccccaacatcttcgatgccggcgttgcaggactgcccgatgatgatgctggcgaactgccagctgctgtggtggtgctggaacacggcaagaccatgaccgagaaagaaatcgtggactacgtggccagccaagtgaccaccgccaagaaactgagaggcggcgtggtgtttgtggacgaggtgccaaaaggcctgacaggcaagctggacgcccggaagatcagagagatcctgattaaggccaagaaaggcggcaagatcgccgtgtaatagctaactagacaaaacaccaaacaaacaagctgcgagccacggacttaaataattgagccttaaagaagaaattctttaagtggatgctctcaaactcagggaaacctaaatctagttatagacaaggcaatcctgagccaagccgaagtagtaattagtaagttaacaatagatgacttacaactaatcggaaggtgcagagactcgacgggagctaccctaacgtcaagacgagggtaaagagagagtccaattctcaaagcaaaaacaacccgctccgacgagcttccggccagtgcgagcaaaaaaaatctagatatcggatcccggg

SEQ ID NO: 3547 - DNA, 5076 bp, synthetic construct
  source 1..5076: mol_type = other DNA; note = Ana225 40nt IS
aggctaggtggaggctcagtgtgataagtctgcgatggtggatgcatgtgtcatggtcatagctgtttcctgtgtgaaattgttatccgctcagagggcacaatcctattccgcgctatccgacaatctccaagacattaggtggagttcagttcggcgtatggcatatgtcgctggaaagaacatgtgagcaaaaggccagcaaaaggccaggaaccgtaaaaaggccgcgttgctggcgtttttccataggctccgcccccctgacgagcatcacaaaaatcgacgctcaagtcagaggtggcgaaacccgacaggactataaagataccaggcgtttccccctggaagctccctcgtgcgctctcctgttccgaccctgccgcttaccggatacctgtccgcctttctcccttcgggaagcgtggcgctttctcatagctcacgctgtaggtatctcagttcggtgtaggtcgttcgctccaagctgggctgtgtgcacgaaccccccgttcagcccgaccgctgcgccttatccggtaactatcgtcttgagtccaacccggtaagacacgacttatcgccactggcagcagccactggtaacaggattagcagagcgaggtatgtaggcggtgctacagagttcttgaagtggtggcctaactacggctacactagaagaacagtatttggtatctgcgctctgctgaagccagttaccttcggaaaaagagttggtagctcttgatccggcaaacaaaccaccgctggtagcggtggtttttttgtttgcaagcagcagattacgcgcagaaaaaaaggatctcaagaagatcctttgatcttttctacggggtctgacgctctattcaacaaagccgccgtcccgtcaagtcagcgtaaatgggtagggggcttcaaatcgtcctcgtgataccaattcggagcctgcttttttgtacaaacttgttgataatggcaattcaaggatcttcacctagatccttttaaattaaaaatgaagttttaaatcaatctaaagtatatatgagtaaacttggtctgacagttaccaatgcttaatcagtgaggcacctatctcagcgatctgtctatttcgttcatccatagttgcctgactccccgtcgtgtagataactacgatacgggagggcttaccatctggccccagtgctgcaatgataccgcgagagccacgctcaccggctccagatttatcagcaataaaccagccagccggaagggccgagcgcagaagtggtcctgcaactttatccgcctccatccagtctattaattgttgccgggaagctagagtaagtagttcgccagttaatagtttgcgcaacgttgttgccattgctacaggcatcgtggtgtcacgctcgtcgtttggtatggcttcattcagctccggttcccaacgatcaaggcgagttacatgatcccccatgttgtgcaaaaaagcggttagctccttcggtcctccgatcgttgtcagaagtaagttggccgcagtgttatcactcatggttatggcagcactgcataattctcttactgtcatgccatccgtaagatgcttttctgtgactggtgagtactcaaccaagtcattctgagaatagtgtatgcggcgaccgagttgctcttgcccggcgtcaatacgggataataccgcgccacatagcagaactttaaaagtgctcatcattggaaaacgttcttcggggcgaaaactctcaaggatcttaccgctgttgagatccagttcgatgtaacccactcgtgcacccaactgatcttcagcatcttttactttcaccagcgtttctgggtgagcaaaaacaggaaggcaaaatgccgcaaaaaagggaataagggcgacacggaaatgttgaatactcatactcttcctttttcaatattattgaagcatttatcagggttattgtctcatgagcggatacatatttgaatgtatttagaaaaataaacaaataggggttccgcgcacatttccccgaaaagtgccagatacctgaaacaaaacccatcgtacggccaaggaagtctccaataactgtgatccaccacaagcgccagggttttcccagtcacgacgttgtaaaacgacggccagtcatgcataatccgcacgcatctggaataaggaagtgccattccgcctgaccttaatacgactcactatagggagaccctcgaaaaaaaacacaaacacccaataggcagtagcgaaagctgcaagagaatgaaaatccgtggctcgcagcaataatgccacactaagagaacaaacaaagagctaagcaattaaaacagcctgtgggttgatcccacccacaggcccattgggcgctagcactctggtatcacggtacctttgtgcgcctgttttataccccctcccccaactgtaacttagaagtaacacacaccgatcaacagtcagcgtggcacaccagccacgttttgatcaagcacttctgttaccccggactgagtatcaatagactgctcacgcggttgaaggagaaagcgttcgttatccggccaactacttcgaaaaacctagtaacaccgtggaagttgcagagtgtttcgctcagcactaccccagtgtagatcaggtcgatgagtcaccgcattccccacgggcgaccgtggcggtggctgcgttggcggcctgcccatggggaaacccatgggacgctctaatacagacatggtgcgaagagtctattgagctagttggtagtcctccggcccctgaatgcggctaatcctaactgcggagcacacaccctcaagccagagggcagtgtgtcgtaacgggcaactctgcagcggaaccgactactttgggtgtccgtgtttcattttattcctatactggctgcttatggtgacaattgagagatcgttaccatatagctattggattggccatccggtgactaatagagctattatatatccctttgttgggtttataccacttagcttgaaagaggttaaaacattacaattcattgttaagttgaatacagcaaaatggaagatgccaagaacatcaagaagggccctgctccattctaccctctggaagatggaacagccggcgagcagctgcacaaggccatgaagagatatgccctggtgcctggcacaatcgccttcacagatgcccacatcgaggtggacatcacctacgccgagtacttcgagatgtctgtgcggctggccgaagctatgaagcgctacggcctgaacaccaaccaccggatcgtcgtgtgcagcgagaacagcctgcagttcttcatgcctgtgctgggcgccctgttcatcggagttgctgtggcccctgccaacgacatctacaacgagcgcgagctgctgaacagcatgggcatctctcagcccaccgtggtgttcgtgtccaagaagggactgcagaaaatcctgaacgtgcagaagaagctgcccatcatccagaaaatcatcatcatggacagcaagaccgactaccagggcttccagagcatgtacaccttcgtgaccagccatctgccacctggcttcaacgagtacgacttcgtgcccgagagcttcgaccgggacaagacaatcgccctgatcatgaacagcagcggctctaccggactgcccaaaggtgttgccctgcctcatagaactgcctgcgtgcggtttagccacgccagagatcccatcttcggcaaccagatcatccccgacacagccatcctgagcgtggtgccttttcaccacggcttcggcatgttcaccacactgggctacctgatctgcggcttcagagtggtgctgatgtaccgcttcgaggaagaactgttcctgcggagcctgcaggactacaagatccagtctgctctgctggtgcctactctgttcagcttctttgccaagagcaccctgatcgataagtacgacctgagcaacctgcacgagatcgcctctggcggagcccctctgtctaaagaagtgggagaagccgtcgccaagcggttccatctgcctggcatcagacaaggctatggcctgaccgagacaaccagcgccattctgattacccctgagggcgacgataagcctggcgctgtgggaaaagtggtgccattcttcgaggccaaggtggtggatctggacaccggcaaaacactgggcgttaaccagaggggcgagctgtgtgttagaggccctatgatcatgagcggctacgtgaacaaccccgaggccacaaacgctctgatcgacaaggatggatggctgcacagcggcgacattgcctactgggacgaagatgagcacttcttcatcgtggaccggctgaagtccctgatcaagtacaagggctaccaggtggccccagccgagctggaatctattctgctgcaacaccccaacatcttcgatgccggcgttgcaggactgcccgatgatgatgctggcgaactgccagctgctgtggtggtgctggaacacggcaagaccatgaccgagaaagaaatcgtggactacgtggccagccaagtgaccaccgccaagaaactgagaggcggcgtggtgtttgtggacgaggtgccaaaaggcctgacaggcaagctggacgcccggaagatcagagagatcctgattaaggccaagaaaggcggcaagatcgccgtgtaatagctaactagaataatgacacacgacaagaacaatcataccactaagcaagctgcgagccacggacttaaataattgagccttaaagaagaaattctttaagtggatgctctcaaactcagggaaacctaaatctagttatagacaaggcaatcctgagccaagccgaagtagtaattagtaagttaacaatagatgacttacaactaatcggaaggtgcagagactcgacgggagctaccctaacgtcaagacgagggtaaagagagagtccaattctcaaagcaaaaacaaccaaaaaaaatctagatatcggatcccggg

SEQ ID NO: 3548 - DNA, 5036 bp, synthetic construct
  source 1..5036: mol_type = other DNA; note = Ana225 20nt IS
aggctaggtggaggctcagtgtgataagtctgcgatggtggatgcatgtgtcatggtcatagctgtttcctgtgtgaaattgttatccgctcagagggcacaatcctattccgcgctatccgacaatctccaagacattaggtggagttcagttcggcgtatggcatatgtcgctggaaagaacatgtgagcaaaaggccagcaaaaggccaggaaccgtaaaaaggccgcgttgctggcgtttttccataggctccgcccccctgacgagcatcacaaaaatcgacgctcaagtcagaggtggcgaaacccgacaggactataaagataccaggcgtttccccctggaagctccctcgtgcgctctcctgttccgaccctgccgcttaccggatacctgtccgcctttctcccttcgggaagcgtggcgctttctcatagctcacgctgtaggtatctcagttcggtgtaggtcgttcgctccaagctgggctgtgtgcacgaaccccccgttcagcccgaccgctgcgccttatccggtaactatcgtcttgagtccaacccggtaagacacgacttatcgccactggcagcagccactggtaacaggattagcagagcgaggtatgtaggcggtgctacagagttcttgaagtggtggcctaactacggctacactagaagaacagtatttggtatctgcgctctgctgaagccagttaccttcggaaaaagagttggtagctcttgatccggcaaacaaaccaccgctggtagcggtggtttttttgtttgcaagcagcagattacgcgcagaaaaaaaggatctcaagaagatcctttgatcttttctacggggtctgacgctctattcaacaaagccgccgtcccgtcaagtcagcgtaaatgggtagggggcttcaaatcgtcctcgtgataccaattcggagcctgcttttttgtacaaacttgttgataatggcaattcaaggatcttcacctagatccttttaaattaaaaatgaagttttaaatcaatctaaagtatatatgagtaaacttggtctgacagttaccaatgcttaatcagtgaggcacctatctcagcgatctgtctatttcgttcatccatagttgcctgactccccgtcgtgtagataactacgatacgggagggcttaccatctggccccagtgctgcaatgataccgcgagagccacgctcaccggctccagatttatcagcaataaaccagccagccggaagggccgagcgcagaagtggtcctgcaactttatccgcctccatccagtctattaattgttgccgggaagctagagtaagtagttcgccagttaatagtttgcgcaacgttgttgccattgctacaggcatcgtggtgtcacgctcgtcgtttggtatggcttcattcagctccggttcccaacgatcaaggcgagttacatgatcccccatgttgtgcaaaaaagcggttagctccttcggtcctccgatcgttgtcagaagtaagttggccgcagtgttatcactcatggttatggcagcactgcataattctcttactgtcatgccatccgtaagatgcttttctgtgactggtgagtactcaaccaagtcattctgagaatagtgtatgcggcgaccgagttgctcttgcccggcgtcaatacgggataataccgcgccacatagcagaactttaaaagtgctcatcattggaaaacgttcttcggggcgaaaactctcaaggatcttaccgctgttgagatccagttcgatgtaacccactcgtgcacccaactgatcttcagcatcttttactttcaccagcgtttctgggtgagcaaaaacaggaaggcaaaatgccgcaaaaaagggaataagggcgacacggaaatgttgaatactcatactcttcctttttcaatattattgaagcatttatcagggttattgtctcatgagcggatacatatttgaatgtatttagaaaaataaacaaataggggttccgcgcacatttccccgaaaagtgccagatacctgaaacaaaacccatcgtacggccaaggaagtctccaataactgtgatccaccacaagcgccagggttttcccagtcacgacgttgtaaaacgacggccagtcatgcataatccgcacgcatctggaataaggaagtgccattccgcctgaccttaatacgactcactatagggagaccctcgaaaaaaaacacaaacacccaataggcagtagcgaaagctgcaagagaatgaaaatccgtggctcgcagcagatccactacaagtaagatttaaaacagcctgtgggttgatcccacccacaggcccattgggcgctagcactctggtatcacggtacctttgtgcgcctgttttataccccctcccccaactgtaacttagaagtaacacacaccgatcaacagtcagcgtggcacaccagccacgttttgatcaagcacttctgttaccccggactgagtatcaatagactgctcacgcggttgaaggagaaagcgttcgttatccggccaactacttcgaaaaacctagtaacaccgtggaagttgcagagtgtttcgctcagcactaccccagtgtagatcaggtcgatgagtcaccgcattccccacgggcgaccgtggcggtggctgcgttggcggcctgcccatggggaaacccatgggacgctctaatacagacatggtgcgaagagtctattgagctagttggtagtcctccggcccctgaatgcggctaatcctaactgcggagcacacaccctcaagccagagggcagtgtgtcgtaacgggcaactctgcagcggaaccgactactttgggtgtccgtgtttcattttattcctatactggctgcttatggtgacaattgagagatcgttaccatatagctattggattggccatccggtgactaatagagctattatatatccctttgttgggtttataccacttagcttgaaagaggttaaaacattacaattcattgttaagttgaatacagcaaaatggaagatgccaagaacatcaagaagggccctgctccattctaccctctggaagatggaacagccggcgagcagctgcacaaggccatgaagagatatgccctggtgcctggcacaatcgccttcacagatgcccacatcgaggtggacatcacctacgccgagtacttcgagatgtctgtgcggctggccgaagctatgaagcgctacggcctgaacaccaaccaccggatcgtcgtgtgcagcgagaacagcctgcagttcttcatgcctgtgctgggcgccctgttcatcggagttgctgtggcccctgccaacgacatctacaacgagcgcgagctgctgaacagcatgggcatctctcagcccaccgtggtgttcgtgtccaagaagggactgcagaaaatcctgaacgtgcagaagaagctgcccatcatccagaaaatcatcatcatggacagcaagaccgactaccagggcttccagagcatgtacaccttcgtgaccagccatctgccacctggcttcaacgagtacgacttcgtgcccgagagcttcgaccgggacaagacaatcgccctgatcatgaacagcagcggctctaccggactgcccaaaggtgttgccctgcctcatagaactgcctgcgtgcggtttagccacgccagagatcccatcttcggcaaccagatcatccccgacacagccatcctgagcgtggtgccttttcaccacggcttcggcatgttcaccacactgggctacctgatctgcggcttcagagtggtgctgatgtaccgcttcgaggaagaactgttcctgcggagcctgcaggactacaagatccagtctgctctgctggtgcctactctgttcagcttctttgccaagagcaccctgatcgataagtacgacctgagcaacctgcacgagatcgcctctggcggagcccctctgtctaaagaagtgggagaagccgtcgccaagcggttccatctgcctggcatcagacaaggctatggcctgaccgagacaaccagcgccattctgattacccctgagggcgacgataagcctggcgctgtgggaaaagtggtgccattcttcgaggccaaggtggtggatctggacaccggcaaaacactgggcgttaaccagaggggcgagctgtgtgttagaggccctatgatcatgagcggctacgtgaacaaccccgaggccacaaacgctctgatcgacaaggatggatggctgcacagcggcgacattgcctactgggacgaagatgagcacttcttcatcgtggaccggctgaagtccctgatcaagtacaagggctaccaggtggccccagccgagctggaatctattctgctgcaacaccccaacatcttcgatgccggcgttgcaggactgcccgatgatgatgctggcgaactgccagctgctgtggtggtgctggaacacggcaagaccatgaccgagaaagaaatcgtggactacgtggccagccaagtgaccaccgccaagaaactgagaggcggcgtggtgtttgtggacgaggtgccaaaaggcctgacaggcaagctggacgcccggaagatcagagagatcctgattaaggccaagaaaggcggcaagatcgccgtgtaatagctaactagagatagaatccaactaacctgctgcgagccacggacttaaataattgagccttaaagaagaaattctttaagtggatgctctcaaactcagggaaacctaaatctagttatagacaaggcaatcctgagccaagccgaagtagtaattagtaagttaacaatagatgacttacaactaatcggaaggtgcagagactcgacgggagctaccctaacgtcaagacgagggtaaagagagagtccaattctcaaagcaaaaacaaccaaaaaaaatctagatatcggatcccggg

SEQ ID NO: 3549 - DNA, 5109 bp, synthetic construct
  source 1..5109: mol_type = other DNA; note = Ana225 40nt ES
aggctaggtggaggctcagtgtgataagtctgcgatggtggatgcatgtgtcatggtcatagctgtttcctgtgtgaaattgttatccgctcagagggcacaatcctattccgcgctatccgacaatctccaagacattaggtggagttcagttcggcgtatggcatatgtcgctggaaagaacatgtgagcaaaaggccagcaaaaggccaggaaccgtaaaaaggccgcgttgctggcgtttttccataggctccgcccccctgacgagcatcacaaaaatcgacgctcaagtcagaggtggcgaaacccgacaggactataaagataccaggcgtttccccctggaagctccctcgtgcgctctcctgttccgaccctgccgcttaccggatacctgtccgcctttctcccttcgggaagcgtggcgctttctcatagctcacgctgtaggtatctcagttcggtgtaggtcgttcgctccaagctgggctgtgtgcacgaaccccccgttcagcccgaccgctgcgccttatccggtaactatcgtcttgagtccaacccggtaagacacgacttatcgccactggcagcagccactggtaacaggattagcagagcgaggtatgtaggcggtgctacagagttcttgaagtggtggcctaactacggctacactagaagaacagtatttggtatctgcgctctgctgaagccagttaccttcggaaaaagagttggtagctcttgatccggcaaacaaaccaccgctggtagcggtggtttttttgtttgcaagcagcagattacgcgcagaaaaaaaggatctcaagaagatcctttgatcttttctacggggtctgacgctctattcaacaaagccgccgtcccgtcaagtcagcgtaaatgggtagggggcttcaaatcgtcctcgtgataccaattcggagcctgcttttttgtacaaacttgttgataatggcaattcaaggatcttcacctagatccttttaaattaaaaatgaagttttaaatcaatctaaagtatatatgagtaaacttggtctgacagttaccaatgcttaatcagtgaggcacctatctcagcgatctgtctatttcgttcatccatagttgcctgactccccgtcgtgtagataactacgatacgggagggcttaccatctggccccagtgctgcaatgataccgcgagagccacgctcaccggctccagatttatcagcaataaaccagccagccggaagggccgagcgcagaagtggtcctgcaactttatccgcctccatccagtctattaattgttgccgggaagctagagtaagtagttcgccagttaatagtttgcgcaacgttgttgccattgctacaggcatcgtggtgtcacgctcgtcgtttggtatggcttcattcagctccggttcccaacgatcaaggcgagttacatgatcccccatgttgtgcaaaaaagcggttagctccttcggtcctccgatcgttgtcagaagtaagttggccgcagtgttatcactcatggttatggcagcactgcataattctcttactgtcatgccatccgtaagatgcttttctgtgactggtgagtactcaaccaagtcattctgagaatagtgtatgcggcgaccgagttgctcttgcccggcgtcaatacgggataataccgcgccacatagcagaactttaaaagtgctcatcattggaaaacgttcttcggggcgaaaactctcaaggatcttaccgctgttgagatccagttcgatgtaacccactcgtgcacccaactgatcttcagcatcttttactttcaccagcgtttctgggtgagcaaaaacaggaaggcaaaatgccgcaaaaaagggaataagggcgacacggaaatgttgaatactcatactcttcctttttcaatattattgaagcatttatcagggttattgtctcatgagcggatacatatttgaatgtatttagaaaaataaacaaataggggttccgcgcacatttccccgaaaagtgccagatacctgaaacaaaacccatcgtacggccaaggaagtctccaataactgtgatccaccacaagcgccagggttttcccagtcacgacgttgtaaaacgacggccagtcatgcataatccgcacgcatctggaataaggaagtgccattccgcctgaccttaatacgactcactatagggagaccctcgaaaaaaaaataatgacacactacgagaacaaccatagaactaagcaacaataggcagtagcgaaagctgcaagagaatgaaaatccgtggctcgcagcaaacaccaaacaaaacaaacacaaaccaacaaaaattaaaacagcctgtgggttgatcccacccacaggcccattgggcgctagcactctggtatcacggtacctttgtgcgcctgttttataccccctcccccaactgtaacttagaagtaacacacaccgatcaacagtcagcgtggcacaccagccacgttttgatcaagcacttctgttaccccggactgagtatcaatagactgctcacgcggttgaaggagaaagcgttcgttatccggccaactacttcgaaaaacctagtaacaccgtggaagttgcagagtgtttcgctcagcactaccccagtgtagatcaggtcgatgagtcaccgcattccccacgggcgaccgtggcggtggctgcgttggcggcctgcccatggggaaacccatgggacgctctaatacagacatggtgcgaagagtctattgagctagttggtagtcctccggcccctgaatgcggctaatcctaactgcggagcacacaccctcaagccagagggcagtgtgtcgtaacgggcaactctgcagcggaaccgactactttgggtgtccgtgtttcattttattcctatactggctgcttatggtgacaattgagagatcgttaccatatagctattggattggccatccggtgactaatagagctattatatatccctttgttgggtttataccacttagcttgaaagaggttaaaacattacaattcattgttaagttgaatacagcaaaatggaagatgccaagaacatcaagaagggccctgctccattctaccctctggaagatggaacagccggcgagcagctgcacaaggccatgaagagatatgccctggtgcctggcacaatcgccttcacagatgcccacatcgaggtggacatcacctacgccgagtacttcgagatgtctgtgcggctggccgaagctatgaagcgctacggcctgaacaccaaccaccggatcgtcgtgtgcagcgagaacagcctgcagttcttcatgcctgtgctgggcgccctgttcatcggagttgctgtggcccctgccaacgacatctacaacgagcgcgagctgctgaacagcatgggcatctctcagcccaccgtggtgttcgtgtccaagaagggactgcagaaaatcctgaacgtgcagaagaagctgcccatcatccagaaaatcatcatcatggacagcaagaccgactaccagggcttccagagcatgtacaccttcgtgaccagccatctgccacctggcttcaacgagtacgacttcgtgcccgagagcttcgaccgggacaagacaatcgccctgatcatgaacagcagcggctctaccggactgcccaaaggtgttgccctgcctcatagaactgcctgcgtgcggtttagccacgccagagatcccatcttcggcaaccagatcatccccgacacagccatcctgagcgtggtgccttttcaccacggcttcggcatgttcaccacactgggctacctgatctgcggcttcagagtggtgctgatgtaccgcttcgaggaagaactgttcctgcggagcctgcaggactacaagatccagtctgctctgctggtgcctactctgttcagcttctttgccaagagcaccctgatcgataagtacgacctgagcaacctgcacgagatcgcctctggcggagcccctctgtctaaagaagtgggagaagccgtcgccaagcggttccatctgcctggcatcagacaaggctatggcctgaccgagacaaccagcgccattctgattacccctgagggcgacgataagcctggcgctgtgggaaaagtggtgccattcttcgaggccaaggtggtggatctggacaccggcaaaacactgggcgttaaccagaggggcgagctgtgtgttagaggccctatgatcatgagcggctacgtgaacaaccccgaggccacaaacgctctgatcgacaaggatggatggctgcacagcggcgacattgcctactgggacgaagatgagcacttcttcatcgtggaccggctgaagtccctgatcaagtacaagggctaccaggtggccccagccgagctggaatctattctgctgcaacaccccaacatcttcgatgccggcgttgcaggactgcccgatgatgatgctggcgaactgccagctgctgtggtggtgctggaacacggcaagaccatgaccgagaaagaaatcgtggactacgtggccagccaagtgaccaccgccaagaaactgagaggcggcgtggtgtttgtggacgaggtgccaaaaggcctgacaggcaagctggacgcccggaagatcagagagatcctgattaaggccaagaaaggcggcaagatcgccgtgtaatagctaactagacaaaacaccaaacaaacaagctgcgagccacggacttaaataattgagccttaaagaagaaattctttaagtggatgctctcaaactcagggaaacctaaatctagttatagacaaggcaatcctgagccaagccgaagtagtaattagtaagttaacaatagatgacttacaactaatcggaaggtgcagagactcgacgggagctaccctaacgtcaagacgagggtaaagagagagtccaattctcaaagcaataatgaaagactacgagatcaaccatagagctaaccaaaaaaaaatctagatatcggatcccggg

SEQ ID NO: 3550 - DNA, 5071 bp, synthetic construct
  source 1..5071: mol_type = other DNA; note = Ana225 20nt ES
aggctaggtggaggctcagtgtgataagtctgcgatggtggatgcatgtgtcatggtcatagctgtttcctgtgtgaaattgttatccgctcagagggcacaatcctattccgcgctatccgacaatctccaagacattaggtggagttcagttcggcgtatggcatatgtcgctggaaagaacatgtgagcaaaaggccagcaaaaggccaggaaccgtaaaaaggccgcgttgctggcgtttttccataggctccgcccccctgacgagcatcacaaaaatcgacgctcaagtcagaggtggcgaaacccgacaggactataaagataccaggcgtttccccctggaagctccctcgtgcgctctcctgttccgaccctgccgcttaccggatacctgtccgcctttctcccttcgggaagcgtggcgctttctcatagctcacgctgtaggtatctcagttcggtgtaggtcgttcgctccaagctgggctgtgtgcacgaaccccccgttcagcccgaccgctgcgccttatccggtaactatcgtcttgagtccaacccggtaagacacgacttatcgccactggcagcagccactggtaacaggattagcagagcgaggtatgtaggcggtgctacagagttcttgaagtggtggcctaactacggctacactagaagaacagtatttggtatctgcgctctgctgaagccagttaccttcggaaaaagagttggtagctcttgatccggcaaacaaaccaccgctggtagcggtggtttttttgtttgcaagcagcagattacgcgcagaaaaaaaggatctcaagaagatcctttgatcttttctacggggtctgacgctctattcaacaaagccgccgtcccgtcaagtcagcgtaaatgggtagggggcttcaaatcgtcctcgtgataccaattcggagcctgcttttttgtacaaacttgttgataatggcaattcaaggatcttcacctagatccttttaaattaaaaatgaagttttaaatcaatctaaagtatatatgagtaaacttggtctgacagttaccaatgcttaatcagtgaggcacctatctcagcgatctgtctatttcgttcatccatagttgcctgactccccgtcgtgtagataactacgatacgggagggcttaccatctggccccagtgctgcaatgataccgcgagagccacgctcaccggctccagatttatcagcaataaaccagccagccggaagggccgagcgcagaagtggtcctgcaactttatccgcctccatccagtctattaattgttgccgggaagctagagtaagtagttcgccagttaatagtttgcgcaacgttgttgccattgctacaggcatcgtggtgtcacgctcgtcgtttggtatggcttcattcagctccggttcccaacgatcaaggcgagttacatgatcccccatgttgtgcaaaaaagcggttagctccttcggtcctccgatcgttgtcagaagtaagttggccgcagtgttatcactcatggttatggcagcactgcataattctcttactgtcatgccatccgtaagatgcttttctgtgactggtgagtactcaaccaagtcattctgagaatagtgtatgcggcgaccgagttgctcttgcccggcgtcaatacgggataataccgcgccacatagcagaactttaaaagtgctcatcattggaaaacgttcttcggggcgaaaactctcaaggatcttaccgctgttgagatccagttcgatgtaacccactcgtgcacccaactgatcttcagcatcttttactttcaccagcgtttctgggtgagcaaaaacaggaaggcaaaatgccgcaaaaaagggaataagggcgacacggaaatgttgaatactcatactcttcctttttcaatattattgaagcatttatcagggttattgtctcatgagcggatacatatttgaatgtatttagaaaaataaacaaataggggttccgcgcacatttccccgaaaagtgccagatacctgaaacaaaacccatcgtacggccaaggaagtctccaataactgtgatccaccacaagcgccagggttttcccagtcacgacgttgtaaaacgacggccagtcatgcataatccgcacgcatctggaataaggaagtgccattccgcctgaccttaatacgactcactatagggagaccctcgaaaaaaaaagatacacttcaactaagctcaataggcagtagcgaaagctgcaagagaatgaaaatccgtggctcgcagcaaacaccaaacaaaacaaacacaaaccaacaaaaattaaaacagcctgtgggttgatcccacccacaggcccattgggcgctagcactctggtatcacggtacctttgtgcgcctgttttataccccctcccccaactgtaacttagaagtaacacacaccgatcaacagtcagcgtggcacaccagccacgttttgatcaagcacttctgttaccccggactgagtatcaatagactgctcacgcggttgaaggagaaagcgttcgttatccggccaactacttcgaaaaacctagtaacaccgtggaagttgcagagtgtttcgctcagcactaccccagtgtagatcaggtcgatgagtcaccgcattccccacgggcgaccgtggcggtggctgcgttggcggcctgcccatggggaaacccatgggacgctctaatacagacatggtgcgaagagtctattgagctagttggtagtcctccggcccctgaatgcggctaatcctaactgcggagcacacaccctcaagccagagggcagtgtgtcgtaacgggcaactctgcagcggaaccgactactttgggtgtccgtgtttcattttattcctatactggctgcttatggtgacaattgagagatcgttaccatatagctattggattggccatccggtgactaatagagctattatatatccctttgttgggtttataccacttagcttgaaagaggttaaaacattacaattcattgttaagttgaatacagcaaaatggaagatgccaagaacatcaagaagggccctgctccattctaccctctggaagatggaacagccggcgagcagctgcacaaggccatgaagagatatgccctggtgcctggcacaatcgccttcacagatgcccacatcgaggtggacatcacctacgccgagtacttcgagatgtctgtgcggctggccgaagctatgaagcgctacggcctgaacaccaaccaccggatcgtcgtgtgcagcgagaacagcctgcagttcttcatgcctgtgctgggcgccctgttcatcggagttgctgtggcccctgccaacgacatctacaacgagcgcgagctgctgaacagcatgggcatctctcagcccaccgtggtgttcgtgtccaagaagggactgcagaaaatcctgaacgtgcagaagaagctgcccatcatccagaaaatcatcatcatggacagcaagaccgactaccagggcttccagagcatgtacaccttcgtgaccagccatctgccacctggcttcaacgagtacgacttcgtgcccgagagcttcgaccgggacaagacaatcgccctgatcatgaacagcagcggctctaccggactgcccaaaggtgttgccctgcctcatagaactgcctgcgtgcggtttagccacgccagagatcccatcttcggcaaccagatcatccccgacacagccatcctgagcgtggtgccttttcaccacggcttcggcatgttcaccacactgggctacctgatctgcggcttcagagtggtgctgatgtaccgcttcgaggaagaactgttcctgcggagcctgcaggactacaagatccagtctgctctgctggtgcctactctgttcagcttctttgccaagagcaccctgatcgataagtacgacctgagcaacctgcacgagatcgcctctggcggagcccctctgtctaaagaagtgggagaagccgtcgccaagcggttccatctgcctggcatcagacaaggctatggcctgaccgagacaaccagcgccattctgattacccctgagggcgacgataagcctggcgctgtgggaaaagtggtgccattcttcgaggccaaggtggtggatctggacaccggcaaaacactgggcgttaaccagaggggcgagctgtgtgttagaggccctatgatcatgagcggctacgtgaacaaccccgaggccacaaacgctctgatcgacaaggatggatggctgcacagcggcgacattgcctactgggacgaagatgagcacttcttcatcgtggaccggctgaagtccctgatcaagtacaagggctaccaggtggccccagccgagctggaatctattctgctgcaacaccccaacatcttcgatgccggcgttgcaggactgcccgatgatgatgctggcgaactgccagctgctgtggtggtgctggaacacggcaagaccatgaccgagaaagaaatcgtggactacgtggccagccaagtgaccaccgccaagaaactgagaggcggcgtggtgtttgtggacgaggtgccaaaaggcctgacaggcaagctggacgcccggaagatcagagagatcctgattaaggccaagaaaggcggcaagatcgccgtgtaatagctaactagacaaaacaccaaacaaacaagctgcgagccacggacttaaataattgagccttaaagaagaaattctttaagtggatgctctcaaactcagggaaacctaaatctagttatagacaaggcaatcctgagccaagccgaagtagtaattagtaagttaacaatagatgacttacaactaatcggaaggtgcagagactcgacgggagctaccctaacgtcaagacgagggtaaagagagagtccaattctcaaagcacatacacatgaacttagctaaaaaaaatctagatatcggatcccggg

SEQ ID NO: 3551 - DNA, 5251 bp, synthetic construct
  source 1..5251: mol_type = other DNA; note = Ana225 rational design 1
aggctaggtggaggctcagtgtgataagtctgcgatggtggatgcatgtgtcatggtcatagctgtttcctgtgtgaaattgttatccgctcagagggcacaatcctattccgcgctatccgacaatctccaagacattaggtggagttcagttcggcgtatggcatatgtcgctggaaagaacatgtgagcaaaaggccagcaaaaggccaggaaccgtaaaaaggccgcgttgctggcgtttttccataggctccgcccccctgacgagcatcacaaaaatcgacgctcaagtcagaggtggcgaaacccgacaggactataaagataccaggcgtttccccctggaagctccctcgtgcgctctcctgttccgaccctgccgcttaccggatacctgtccgcctttctcccttcgggaagcgtggcgctttctcatagctcacgctgtaggtatctcagttcggtgtaggtcgttcgctccaagctgggctgtgtgcacgaaccccccgttcagcccgaccgctgcgccttatccggtaactatcgtcttgagtccaacccggtaagacacgacttatcgccactggcagcagccactggtaacaggattagcagagcgaggtatgtaggcggtgctacagagttcttgaagtggtggcctaactacggctacactagaagaacagtatttggtatctgcgctctgctgaagccagttaccttcggaaaaagagttggtagctcttgatccggcaaacaaaccaccgctggtagcggtggtttttttgtttgcaagcagcagattacgcgcagaaaaaaaggatctcaagaagatcctttgatcttttctacggggtctgacgctctattcaacaaagccgccgtcccgtcaagtcagcgtaaatgggtagggggcttcaaatcgtcctcgtgataccaattcggagcctgcttttttgtacaaacttgttgataatggcaattcaaggatcttcacctagatccttttaaattaaaaatgaagttttaaatcaatctaaagtatatatgagtaaacttggtctgacagttaccaatgcttaatcagtgaggcacctatctcagcgatctgtctatttcgttcatccatagttgcctgactccccgtcgtgtagataactacgatacgggagggcttaccatctggccccagtgctgcaatgataccgcgagagccacgctcaccggctccagatttatcagcaataaaccagccagccggaagggccgagcgcagaagtggtcctgcaactttatccgcctccatccagtctattaattgttgccgggaagctagagtaagtagttcgccagttaatagtttgcgcaacgttgttgccattgctacaggcatcgtggtgtcacgctcgtcgtttggtatggcttcattcagctccggttcccaacgatcaaggcgagttacatgatcccccatgttgtgcaaaaaagcggttagctccttcggtcctccgatcgttgtcagaagtaagttggccgcagtgttatcactcatggttatggcagcactgcataattctcttactgtcatgccatccgtaagatgcttttctgtgactggtgagtactcaaccaagtcattctgagaatagtgtatgcggcgaccgagttgctcttgcccggcgtcaatacgggataataccgcgccacatagcagaactttaaaagtgctcatcattggaaaacgttcttcggggcgaaaactctcaaggatcttaccgctgttgagatccagttcgatgtaacccactcgtgcacccaactgatcttcagcatcttttactttcaccagcgtttctgggtgagcaaaaacaggaaggcaaaatgccgcaaaaaagggaataagggcgacacggaaatgttgaatactcatactcttcctttttcaatattattgaagcatttatcagggttattgtctcatgagcggatacatatttgaatgtatttagaaaaataaacaaataggggttccgcgcacatttccccgaaaagtgccagatacctgaaacaaaacccatcgtacggccaaggaagtctccaataactgtgatccaccacaagcgccagggttttcccagtcacgacgttgtaaaacgacggccagtcatgcataatccgcacgcatctggaataaggaagtgccattccgcctgaccttaatacgactcactatagggagaccctcgaaaaaaaagcttcgaatgcgaccatctgctcaggctcaatctcgctccaataatgacacactacgagaacaaccatagaactaagcaacaataggcagtagcgaaagctgcaagagaatgaaaatccgttgaccttaaacggtcgtgtggggagcacgccggcgccaataatgccacactaagagaacaaacaaagagctaagcaattaaaacagcctgtgggttgatcccacccacaggcccattgggcgctagcactctggtatcacggtacctttgtgcgcctgttttataccccctcccccaactgtaacttagaagtaacacacaccgatcaacagtcagcgtggcacaccagccacgttttgatcaagcacttctgttaccccggactgagtatcaatagactgctcacgcggttgaaggagaaagcgttcgttatccggccaactacttcgaaaaacctagtaacaccgtggaagttgcagagtgtttcgctcagcactaccccagtgtagatcaggtcgatgagtcaccgcattccccacgggcgaccgtggcggtggctgcgttggcggcctgcccatggggaaacccatgggacgctctaatacagacatggtgcgaagagtctattgagctagttggtagtcctccggcccctgaatgcggctaatcctaactgcggagcacacaccctcaagccagagggcagtgtgtcgtaacgggcaactctgcagcggaaccgactactttgggtgtccgtgtttcattttattcctatactggctgcttatggtgacaattgagagatcgttaccatatagctattggattggccatccggtgactaatagagctattatatatccctttgttgggtttataccacttagcttgaaagaggttaaaacattacaattcattgttaagttgaatacagcaaaatggaagatgccaagaacatcaagaagggccctgctccattctaccctctggaagatggaacagccggcgagcagctgcacaaggccatgaagagatatgccctggtgcctggcacaatcgccttcacagatgcccacatcgaggtggacatcacctacgccgagtacttcgagatgtctgtgcggctggccgaagctatgaagcgctacggcctgaacaccaaccaccggatcgtcgtgtgcagcgagaacagcctgcagttcttcatgcctgtgctgggcgccctgttcatcggagttgctgtggcccctgccaacgacatctacaacgagcgcgagctgctgaacagcatgggcatctctcagcccaccgtggtgttcgtgtccaagaagggactgcagaaaatcctgaacgtgcagaagaagctgcccatcatccagaaaatcatcatcatggacagcaagaccgactaccagggcttccagagcatgtacaccttcgtgaccagccatctgccacctggcttcaacgagtacgacttcgtgcccgagagcttcgaccgggacaagacaatcgccctgatcatgaacagcagcggctctaccggactgcccaaaggtgttgccctgcctcatagaactgcctgcgtgcggtttagccacgccagagatcccatcttcggcaaccagatcatccccgacacagccatcctgagcgtggtgccttttcaccacggcttcggcatgttcaccacactgggctacctgatctgcggcttcagagtggtgctgatgtaccgcttcgaggaagaactgttcctgcggagcctgcaggactacaagatccagtctgctctgctggtgcctactctgttcagcttctttgccaagagcaccctgatcgataagtacgacctgagcaacctgcacgagatcgcctctggcggagcccctctgtctaaagaagtgggagaagccgtcgccaagcggttccatctgcctggcatcagacaaggctatggcctgaccgagacaaccagcgccattctgattacccctgagggcgacgataagcctggcgctgtgggaaaagtggtgccattcttcgaggccaaggtggtggatctggacaccggcaaaacactgggcgttaaccagaggggcgagctgtgtgttagaggccctatgatcatgagcggctacgtgaacaaccccgaggccacaaacgctctgatcgacaaggatggatggctgcacagcggcgacattgcctactgggacgaagatgagcacttcttcatcgtggaccggctgaagtccctgatcaagtacaagggctaccaggtggccccagccgagctggaatctattctgctgcaacaccccaacatcttcgatgccggcgttgcaggactgcccgatgatgatgctggcgaactgccagctgctgtggtggtgctggaacacggcaagaccatgaccgagaaagaaatcgtggactacgtggccagccaagtgaccaccgccaagaaactgagaggcggcgtggtgtttgtggacgaggtgccaaaaggcctgacaggcaagctggacgcccggaagatcagagagatcctgattaaggccaagaaaggcggcaagatcgccgtgtaatagctaactagaataatgacacacgacaagaacaatcataccactaagcaaggcgccggcgtgctcgctacggacttaaataattgagccttaaagaagaaattctttaagtggatgctctcaaactcagggaaacctaaatctagttatagacaaggcaatcctgagccaagccgaagtagtaattagtaagttaacaatagatgacttacaactaatcggaaggtgcagagactcgacgggagctaccctaacgtcaagacgagggtaaagagagagtccaattctcaaagcaataatgaaagactacgagatcaaccatagagctaaccaaggagcgagattgagcctgagcagatggtcgcattcgaagcaaaaaaaatctagatatcggatcccggg

SEQ ID NO: 3552 - DNA, 5130 bp, synthetic construct
  source 1..5130: mol_type = other DNA; note = Ana225 rational design 2
aggctaggtggaggctcagtgtgataagtctgcgatggtggatgcatgtgtcatggtcatagctgtttcctgtgtgaaattgttatccgctcagagggcacaatcctattccgcgctatccgacaatctccaagacattaggtggagttcagttcggcgtatggcatatgtcgctggaaagaacatgtgagcaaaaggccagcaaaaggccaggaaccgtaaaaaggccgcgttgctggcgtttttccataggctccgcccccctgacgagcatcacaaaaatcgacgctcaagtcagaggtggcgaaacccgacaggactataaagataccaggcgtttccccctggaagctccctcgtgcgctctcctgttccgaccctgccgcttaccggatacctgtccgcctttctcccttcgggaagcgtggcgctttctcatagctcacgctgtaggtatctcagttcggtgtaggtcgttcgctccaagctgggctgtgtgcacgaaccccccgttcagcccgaccgctgcgccttatccggtaactatcgtcttgagtccaacccggtaagacacgacttatcgccactggcagcagccactggtaacaggattagcagagcgaggtatgtaggcggtgctacagagttcttgaagtggtggcctaactacggctacactagaagaacagtatttggtatctgcgctctgctgaagccagttaccttcggaaaaagagttggtagctcttgatccggcaaacaaaccaccgctggtagcggtggtttttttgtttgcaagcagcagattacgcgcagaaaaaaaggatctcaagaagatcctttgatcttttctacggggtctgacgctctattcaacaaagccgccgtcccgtcaagtcagcgtaaatgggtagggggcttcaaatcgtcctcgtgataccaattcggagcctgcttttttgtacaaacttgttgataatggcaattcaaggatcttcacctagatccttttaaattaaaaatgaagttttaaatcaatctaaagtatatatgagtaaacttggtctgacagttaccaatgcttaatcagtgaggcacctatctcagcgatctgtctatttcgttcatccatagttgcctgactccccgtcgtgtagataactacgatacgggagggcttaccatctggccccagtgctgcaatgataccgcgagagccacgctcaccggctccagatttatcagcaataaaccagccagccggaagggccgagcgcagaagtggtcctgcaactttatccgcctccatccagtctattaattgttgccgggaagctagagtaagtagttcgccagttaatagtttgcgcaacgttgttgccattgctacaggcatcgtggtgtcacgctcgtcgtttggtatggcttcattcagctccggttcccaacgatcaaggcgagttacatgatcccccatgttgtgcaaaaaagcggttagctccttcggtcctccgatcgttgtcagaagtaagttggccgcagtgttatcactcatggttatggcagcactgcataattctcttactgtcatgccatccgtaagatgcttttctgtgactggtgagtactcaaccaagtcattctgagaatagtgtatgcggcgaccgagttgctcttgcccggcgtcaatacgggataataccgcgccacatagcagaactttaaaagtgctcatcattggaaaacgttcttcggggcgaaaactctcaaggatcttaccgctgttgagatccagttcgatgtaacccactcgtgcacccaactgatcttcagcatcttttactttcaccagcgtttctgggtgagcaaaaacaggaaggcaaaatgccgcaaaaaagggaataagggcgacacggaaatgttgaatactcatactcttcctttttcaatattattgaagcatttatcagggttattgtctcatgagcggatacatatttgaatgtatttagaaaaataaacaaataggggttccgcgcacatttccccgaaaagtgccagatacctgaaacaaaacccatcgtacggccaaggaagtctccaataactgtgatccaccacaagcgccagggttttcccagtcacgacgttgtaaaacgacggccagtcatgcataatccgcacgcatctggaataaggaagtgccattccgcctgaccttaatacgactcactatagggagaccctcgaaaaaaaaataatgacacactacgagaacaaccatagaactaagcaacaataggcagtagcgaaagctgcaagagaatgaaaatccgttgaccttaaacggtcgtgtggggagcacgccggcgccaataatgccacactaagagaacaaacaaagagctaagcaattaaaacagcctgtgggttgatcccacccacaggcccattgggcgctagcactctggtatcacggtacctttgtgcgcctgttttataccccctcccccaactgtaacttagaagtaacacacaccgatcaacagtcagcgtggcacaccagccacgttttgatcaagcacttctgttaccccggactgagtatcaatagactgctcacgcggttgaaggagaaagcgttcgttatccggccaactacttcgaaaaacctagtaacaccgtggaagttgcagagtgtttcgctcagcactaccccagtgtagatcaggtcgatgagtcaccgcattccccacgggcgaccgtggcggtggctgcgttggcggcctgcccatggggaaacccatgggacgctctaatacagacatggtgcgaagagtctattgagctagttggtagtcctccggcccctgaatgcggctaatcctaactgcggagcacacaccctcaagccagagggcagtgtgtcgtaacgggcaactctgcagcggaaccgactactttgggtgtccgtgtttcattttattcctatactggctgcttatggtgacaattgagagatcgttaccatatagctattggattggccatccggtgactaatagagctattatatatccctttgttgggtttataccacttagcttgaaagaggttaaaacattacaattcattgttaagttgaatacagcaaaatggaagatgccaagaacatcaagaagggccctgctccattctaccctctggaagatggaacagccggcgagcagctgcacaaggccatgaagagatatgccctggtgcctggcacaatcgccttcacagatgcccacatcgaggtggacatcacctacgccgagtacttcgagatgtctgtgcggctggccgaagctatgaagcgctacggcctgaacaccaaccaccggatcgtcgtgtgcagcgagaacagcctgcagttcttcatgcctgtgctgggcgccctgttcatcggagttgctgtggcccctgccaacgacatctacaacgagcgcgagctgctgaacagcatgggcatctctcagcccaccgtggtgttcgtgtccaagaagggactgcagaaaatcctgaacgtgcagaagaagctgcccatcatccagaaaatcatcatcatggacagcaagaccgactaccagggcttccagagcatgtacaccttcgtgaccagccatctgccacctggcttcaacgagtacgacttcgtgcccgagagcttcgaccgggacaagacaatcgccctgatcatgaacagcagcggctctaccggactgcccaaaggtgttgccctgcctcatagaactgcctgcgtgcggtttagccacgccagagatcccatcttcggcaaccagatcatccccgacacagccatcctgagcgtggtgccttttcaccacggcttcggcatgttcaccacactgggctacctgatctgcggcttcagagtggtgctgatgtaccgcttcgaggaagaactgttcctgcggagcctgcaggactacaagatccagtctgctctgctggtgcctactctgttcagcttctttgccaagagcaccctgatcgataagtacgacctgagcaacctgcacgagatcgcctctggcggagcccctctgtctaaagaagtgggagaagccgtcgccaagcggttccatctgcctggcatcagacaaggctatggcctgaccgagacaaccagcgccattctgattacccctgagggcgacgataagcctggcgctgtgggaaaagtggtgccattcttcgaggccaaggtggtggatctggacaccggcaaaacactgggcgttaaccagaggggcgagctgtgtgttagaggccctatgatcatgagcggctacgtgaacaaccccgaggccacaaacgctctgatcgacaaggatggatggctgcacagcggcgacattgcctactgggacgaagatgagcacttcttcatcgtggaccggctgaagtccctgatcaagtacaagggctaccaggtggccccagccgagctggaatctattctgctgcaacaccccaacatcttcgatgccggcgttgcaggactgcccgatgatgatgctggcgaactgccagctgctgtggtggtgctggaacacggcaagaccatgaccgagaaagaaatcgtggactacgtggccagccaagtgaccaccgccaagaaactgagaggcggcgtggtgtttgtggacgaggtgccaaaaggcctgacaggcaagctggacgcccggaagatcagagagatcctgattaaggccaagaaaggcggcaagatcgccgtgtaatagctaactagagatagaatccaactaacctggcgccggcgtgctcgctacggacttaaataattgagccttaaagaagaaattctttaagtggatgctctcaaactcagggaaacctaaatctagttatagacaaggcaatcctgagccaagccgaagtagtaattagtaagttaacaatagatgacttacaactaatcggaaggtgcagagactcgacgggagctaccctaacgtcaagacgagggtaaagagagagtccaattctcaaagcacatacacatgaacttagctaaaaaaaatctagatatcggatcccggg

SEQ ID NO: 3553 - DNA, 5076 bp, synthetic construct
  source 1..5076: mol_type = other DNA; note = Ana 229 Exonextention
aggctaggtggaggctcagtgtgataagtctgcgatggtggatgcatgtgtcatggtcatagctgtttcctgtgtgaaattgttatccgctcagagggcacaatcctattccgcgctatccgacaatctccaagacattaggtggagttcagttcggcgtatggcatatgtcgctggaaagaacatgtgagcaaaaggccagcaaaaggccaggaaccgtaaaaaggccgcgttgctggcgtttttccataggctccgcccccctgacgagcatcacaaaaatcgacgctcaagtcagaggtggcgaaacccgacaggactataaagataccaggcgtttccccctggaagctccctcgtgcgctctcctgttccgaccctgccgcttaccggatacctgtccgcctttctcccttcgggaagcgtggcgctttctcatagctcacgctgtaggtatctcagttcggtgtaggtcgttcgctccaagctgggctgtgtgcacgaaccccccgttcagcccgaccgctgcgccttatccggtaactatcgtcttgagtccaacccggtaagacacgacttatcgccactggcagcagccactggtaacaggattagcagagcgaggtatgtaggcggtgctacagagttcttgaagtggtggcctaactacggctacactagaagaacagtatttggtatctgcgctctgctgaagccagttaccttcggaaaaagagttggtagctcttgatccggcaaacaaaccaccgctggtagcggtggtttttttgtttgcaagcagcagattacgcgcagaaaaaaaggatctcaagaagatcctttgatcttttctacggggtctgacgctctattcaacaaagccgccgtcccgtcaagtcagcgtaaatgggtagggggcttcaaatcgtcctcgtgataccaattcggagcctgcttttttgtacaaacttgttgataatggcaattcaaggatcttcacctagatccttttaaattaaaaatgaagttttaaatcaatctaaagtatatatgagtaaacttggtctgacagttaccaatgcttaatcagtgaggcacctatctcagcgatctgtctatttcgttcatccatagttgcctgactccccgtcgtgtagataactacgatacgggagggcttaccatctggccccagtgctgcaatgataccgcgagagccacgctcaccggctccagatttatcagcaataaaccagccagccggaagggccgagcgcagaagtggtcctgcaactttatccgcctccatccagtctattaattgttgccgggaagctagagtaagtagttcgccagttaatagtttgcgcaacgttgttgccattgctacaggcatcgtggtgtcacgctcgtcgtttggtatggcttcattcagctccggttcccaacgatcaaggcgagttacatgatcccccatgttgtgcaaaaaagcggttagctccttcggtcctccgatcgttgtcagaagtaagttggccgcagtgttatcactcatggttatggcagcactgcataattctcttactgtcatgccatccgtaagatgcttttctgtgactggtgagtactcaaccaagtcattctgagaatagtgtatgcggcgaccgagttgctcttgcccggcgtcaatacgggataataccgcgccacatagcagaactttaaaagtgctcatcattggaaaacgttcttcggggcgaaaactctcaaggatcttaccgctgttgagatccagttcgatgtaacccactcgtgcacccaactgatcttcagcatcttttactttcaccagcgtttctgggtgagcaaaaacaggaaggcaaaatgccgcaaaaaagggaataagggcgacacggaaatgttgaatactcatactcttcctttttcaatattattgaagcatttatcagggttattgtctcatgagcggatacatatttgaatgtatttagaaaaataaacaaataggggttccgcgcacatttccccgaaaagtgccagatacctgaaacaaaacccatcgtacggccaaggaagtctccaataactgtgatccaccacaagcgccagggttttcccagtcacgacgttgtaaaacgacggccagtcatgcataatccgcacgcatctggaataaggaagtgccattccgcctgaccttaatacgactcactatagggagaccctcgaaaaaaaacacaaacaccaggcagtagcgaaagctgcaagagaatgaaaatccgttgaccttaaacggtcgtgtgggggctcgcagcaaacaccaaacaaaacaaacacaaaccaacaaaaattaaaacagcctgtgggttgatcccacccacaggcccattgggcgctagcactctggtatcacggtacctttgtgcgcctgttttataccccctcccccaactgtaacttagaagtaacacacaccgatcaacagtcagcgtggcacaccagccacgttttgatcaagcacttctgttaccccggactgagtatcaatagactgctcacgcggttgaaggagaaagcgttcgttatccggccaactacttcgaaaaacctagtaacaccgtggaagttgcagagtgtttcgctcagcactaccccagtgtagatcaggtcgatgagtcaccgcattccccacgggcgaccgtggcggtggctgcgttggcggcctgcccatggggaaacccatgggacgctctaatacagacatggtgcgaagagtctattgagctagttggtagtcctccggcccctgaatgcggctaatcctaactgcggagcacacaccctcaagccagagggcagtgtgtcgtaacgggcaactctgcagcggaaccgactactttgggtgtccgtgtttcattttattcctatactggctgcttatggtgacaattgagagatcgttaccatatagctattggattggccatccggtgactaatagagctattatatatccctttgttgggtttataccacttagcttgaaagaggttaaaacattacaattcattgttaagttgaatacagcaaaatggaagatgccaagaacatcaagaagggccctgctccattctaccctctggaagatggaacagccggcgagcagctgcacaaggccatgaagagatatgccctggtgcctggcacaatcgccttcacagatgcccacatcgaggtggacatcacctacgccgagtacttcgagatgtctgtgcggctggccgaagctatgaagcgctacggcctgaacaccaaccaccggatcgtcgtgtgcagcgagaacagcctgcagttcttcatgcctgtgctgggcgccctgttcatcggagttgctgtggcccctgccaacgacatctacaacgagcgcgagctgctgaacagcatgggcatctctcagcccaccgtggtgttcgtgtccaagaagggactgcagaaaatcctgaacgtgcagaagaagctgcccatcatccagaaaatcatcatcatggacagcaagaccgactaccagggcttccagagcatgtacaccttcgtgaccagccatctgccacctggcttcaacgagtacgacttcgtgcccgagagcttcgaccgggacaagacaatcgccctgatcatgaacagcagcggctctaccggactgcccaaaggtgttgccctgcctcatagaactgcctgcgtgcggtttagccacgccagagatcccatcttcggcaaccagatcatccccgacacagccatcctgagcgtggtgccttttcaccacggcttcggcatgttcaccacactgggctacctgatctgcggcttcagagtggtgctgatgtaccgcttcgaggaagaactgttcctgcggagcctgcaggactacaagatccagtctgctctgctggtgcctactctgttcagcttctttgccaagagcaccctgatcgataagtacgacctgagcaacctgcacgagatcgcctctggcggagcccctctgtctaaagaagtgggagaagccgtcgccaagcggttccatctgcctggcatcagacaaggctatggcctgaccgagacaaccagcgccattctgattacccctgagggcgacgataagcctggcgctgtgggaaaagtggtgccattcttcgaggccaaggtggtggatctggacaccggcaaaacactgggcgttaaccagaggggcgagctgtgtgttagaggccctatgatcatgagcggctacgtgaacaaccccgaggccacaaacgctctgatcgacaaggatggatggctgcacagcggcgacattgcctactgggacgaagatgagcacttcttcatcgtggaccggctgaagtccctgatcaagtacaagggctaccaggtggccccagccgagctggaatctattctgctgcaacaccccaacatcttcgatgccggcgttgcaggactgcccgatgatgatgctggcgaactgccagctgctgtggtggtgctggaacacggcaagaccatgaccgagaaagaaatcgtggactacgtggccagccaagtgaccaccgccaagaaactgagaggcggcgtggtgtttgtggacgaggtgccaaaaggcctgacaggcaagctggacgcccggaagatcagagagatcctgattaaggccaagaaaggcggcaagatcgccgtgtaatagctaactagacaaaacaccaaacaaacaagctgcgagccgctacggacttaaataattgagccttaaagaagaaattctttaagtggatgctctcaaactcagggaaacctaaatctagttatagacaaggcaatcctgagccaagccgaagtagtaattagtaagttaacaatagatgacttacaactaatcggaaggtgcagagactcgacgggagctaccctaacgtcaagacgagggtaaagagagagtccaattctcaaagccaataaaaacaaccaaaaaaaatctagatatcggatcccggg

SEQ ID NO: 3554 - DNA, 5057 bp, synthetic construct
  source 1..5057: mol_type = other DNA; note = Ana229 13ntIH
aggctaggtggaggctcagtgtgataagtctgcgatggtggatgcatgtgtcatggtcatagctgtttcctgtgtgaaattgttatccgctcagagggcacaatcctattccgcgctatccgacaatctccaagacattaggtggagttcagttcggcgtatggcatatgtcgctggaaagaacatgtgagcaaaaggccagcaaaaggccaggaaccgtaaaaaggccgcgttgctggcgtttttccataggctccgcccccctgacgagcatcacaaaaatcgacgctcaagtcagaggtggcgaaacccgacaggactataaagataccaggcgtttccccctggaagctccctcgtgcgctctcctgttccgaccctgccgcttaccggatacctgtccgcctttctcccttcgggaagcgtggcgctttctcatagctcacgctgtaggtatctcagttcggtgtaggtcgttcgctccaagctgggctgtgtgcacgaaccccccgttcagcccgaccgctgcgccttatccggtaactatcgtcttgagtccaacccggtaagacacgacttatcgccactggcagcagccactggtaacaggattagcagagcgaggtatgtaggcggtgctacagagttcttgaagtggtggcctaactacggctacactagaagaacagtatttggtatctgcgctctgctgaagccagttaccttcggaaaaagagttggtagctcttgatccggcaaacaaaccaccgctggtagcggtggtttttttgtttgcaagcagcagattacgcgcagaaaaaaaggatctcaagaagatcctttgatcttttctacggggtctgacgctctattcaacaaagccgccgtcccgtcaagtcagcgtaaatgggtagggggcttcaaatcgtcctcgtgataccaattcggagcctgcttttttgtacaaacttgttgataatggcaattcaaggatcttcacctagatccttttaaattaaaaatgaagttttaaatcaatctaaagtatatatgagtaaacttggtctgacagttaccaatgcttaatcagtgaggcacctatctcagcgatctgtctatttcgttcatccatagttgcctgactccccgtcgtgtagataactacgatacgggagggcttaccatctggccccagtgctgcaatgataccgcgagagccacgctcaccggctccagatttatcagcaataaaccagccagccggaagggccgagcgcagaagtggtcctgcaactttatccgcctccatccagtctattaattgttgccgggaagctagagtaagtagttcgccagttaatagtttgcgcaacgttgttgccattgctacaggcatcgtggtgtcacgctcgtcgtttggtatggcttcattcagctccggttcccaacgatcaaggcgagttacatgatcccccatgttgtgcaaaaaagcggttagctccttcggtcctccgatcgttgtcagaagtaagttggccgcagtgttatcactcatggttatggcagcactgcataattctcttactgtcatgccatccgtaagatgcttttctgtgactggtgagtactcaaccaagtcattctgagaatagtgtatgcggcgaccgagttgctcttgcccggcgtcaatacgggataataccgcgccacatagcagaactttaaaagtgctcatcattggaaaacgttcttcggggcgaaaactctcaaggatcttaccgctgttgagatccagttcgatgtaacccactcgtgcacccaactgatcttcagcatcttttactttcaccagcgtttctgggtgagcaaaaacaggaaggcaaaatgccgcaaaaaagggaataagggcgacacggaaatgttgaatactcatactcttcctttttcaatattattgaagcatttatcagggttattgtctcatgagcggatacatatttgaatgtatttagaaaaataaacaaataggggttccgcgcacatttccccgaaaagtgccagatacctgaaacaaaacccatcgtacggccaaggaagtctccaataactgtgatccaccacaagcgccagggttttcccagtcacgacgttgtaaaacgacggccagtcatgcataatccgcacgcatctggaataaggaagtgccattccgcctgaccttaatacgactcactatagggagaccctcgaaaaaaaacacaaacaccaggcagtagcgaaagctgcaagagaatgaaaatccgtcggctcgcagcggaaacaccaaacaaaacaaacacaaaccaacaaaaattaaaacagcctgtgggttgatcccacccacaggcccattgggcgctagcactctggtatcacggtacctttgtgcgcctgttttataccccctcccccaactgtaacttagaagtaacacacaccgatcaacagtcagcgtggcacaccagccacgttttgatcaagcacttctgttaccccggactgagtatcaatagactgctcacgcggttgaaggagaaagcgttcgttatccggccaactacttcgaaaaacctagtaacaccgtggaagttgcagagtgtttcgctcagcactaccccagtgtagatcaggtcgatgagtcaccgcattccccacgggcgaccgtggcggtggctgcgttggcggcctgcccatggggaaacccatgggacgctctaatacagacatggtgcgaagagtctattgagctagttggtagtcctccggcccctgaatgcggctaatcctaactgcggagcacacaccctcaagccagagggcagtgtgtcgtaacgggcaactctgcagcggaaccgactactttgggtgtccgtgtttcattttattcctatactggctgcttatggtgacaattgagagatcgttaccatatagctattggattggccatccggtgactaatagagctattatatatccctttgttgggtttataccacttagcttgaaagaggttaaaacattacaattcattgttaagttgaatacagcaaaatggaagatgccaagaacatcaagaagggccctgctccattctaccctctggaagatggaacagccggcgagcagctgcacaaggccatgaagagatatgccctggtgcctggcacaatcgccttcacagatgcccacatcgaggtggacatcacctacgccgagtacttcgagatgtctgtgcggctggccgaagctatgaagcgctacggcctgaacaccaaccaccggatcgtcgtgtgcagcgagaacagcctgcagttcttcatgcctgtgctgggcgccctgttcatcggagttgctgtggcccctgccaacgacatctacaacgagcgcgagctgctgaacagcatgggcatctctcagcccaccgtggtgttcgtgtccaagaagggactgcagaaaatcctgaacgtgcagaagaagctgcccatcatccagaaaatcatcatcatggacagcaagaccgactaccagggcttccagagcatgtacaccttcgtgaccagccatctgccacctggcttcaacgagtacgacttcgtgcccgagagcttcgaccgggacaagacaatcgccctgatcatgaacagcagcggctctaccggactgcccaaaggtgttgccctgcctcatagaactgcctgcgtgcggtttagccacgccagagatcccatcttcggcaaccagatcatccccgacacagccatcctgagcgtggtgccttttcaccacggcttcggcatgttcaccacactgggctacctgatctgcggcttcagagtggtgctgatgtaccgcttcgaggaagaactgttcctgcggagcctgcaggactacaagatccagtctgctctgctggtgcctactctgttcagcttctttgccaagagcaccctgatcgataagtacgacctgagcaacctgcacgagatcgcctctggcggagcccctctgtctaaagaagtgggagaagccgtcgccaagcggttccatctgcctggcatcagacaaggctatggcctgaccgagacaaccagcgccattctgattacccctgagggcgacgataagcctggcgctgtgggaaaagtggtgccattcttcgaggccaaggtggtggatctggacaccggcaaaacactgggcgttaaccagaggggcgagctgtgtgttagaggccctatgatcatgagcggctacgtgaacaaccccgaggccacaaacgctctgatcgacaaggatggatggctgcacagcggcgacattgcctactgggacgaagatgagcacttcttcatcgtggaccggctgaagtccctgatcaagtacaagggctaccaggtggccccagccgagctggaatctattctgctgcaacaccccaacatcttcgatgccggcgttgcaggactgcccgatgatgatgctggcgaactgccagctgctgtggtggtgctggaacacggcaagaccatgaccgagaaagaaatcgtggactacgtggccagccaagtgaccaccgccaagaaactgagaggcggcgtggtgtttgtggacgaggtgccaaaaggcctgacaggcaagctggacgcccggaagatcagagagatcctgattaaggccaagaaaggcggcaagatcgccgtgtaatagctaactagacaaaacaccaaacaaacaaccgctgcgagccgacggacttaaataattgagccttaaagaagaaattctttaagtggatgctctcaaactcagggaaacctaaatctagttatagacaaggcaatcctgagccaagccgaagtagtaattagtaagttaacaatagatgacttacaactaatcggaaggtgcagagactcgacgggagctaccctaacgtcaagacgagggtaaagagagagtccaattctcaaagccaataaaaacaaccaaaaaaaatctagatatcggatcccggg

SEQ ID NO: 3555 - DNA, 5061 bp, synthetic construct
  source 1..5061: mol_type = other DNA; note = Ana229 15ntIH
aggctaggtggaggctcagtgtgataagtctgcgatggtggatgcatgtgtcatggtcatagctgtttcctgtgtgaaattgttatccgctcagagggcacaatcctattccgcgctatccgacaatctccaagacattaggtggagttcagttcggcgtatggcatatgtcgctggaaagaacatgtgagcaaaaggccagcaaaaggccaggaaccgtaaaaaggccgcgttgctggcgtttttccataggctccgcccccctgacgagcatcacaaaaatcgacgctcaagtcagaggtggcgaaacccgacaggactataaagataccaggcgtttccccctggaagctccctcgtgcgctctcctgttccgaccctgccgcttaccggatacctgtccgcctttctcccttcgggaagcgtggcgctttctcatagctcacgctgtaggtatctcagttcggtgtaggtcgttcgctccaagctgggctgtgtgcacgaaccccccgttcagcccgaccgctgcgccttatccggtaactatcgtcttgagtccaacccggtaagacacgacttatcgccactggcagcagccactggtaacaggattagcagagcgaggtatgtaggcggtgctacagagttcttgaagtggtggcctaactacggctacactagaagaacagtatttggtatctgcgctctgctgaagccagttaccttcggaaaaagagttggtagctcttgatccggcaaacaaaccaccgctggtagcggtggtttttttgtttgcaagcagcagattacgcgcagaaaaaaaggatctcaagaagatcctttgatcttttctacggggtctgacgctctattcaacaaagccgccgtcccgtcaagtcagcgtaaatgggtagggggcttcaaatcgtcctcgtgataccaattcggagcctgcttttttgtacaaacttgttgataatggcaattcaaggatcttcacctagatccttttaaattaaaaatgaagttttaaatcaatctaaagtatatatgagtaaacttggtctgacagttaccaatgcttaatcagtgaggcacctatctcagcgatctgtctatttcgttcatccatagttgcctgactccccgtcgtgtagataactacgatacgggagggcttaccatctggccccagtgctgcaatgataccgcgagagccacgctcaccggctccagatttatcagcaataaaccagccagccggaagggccgagcgcagaagtggtcctgcaactttatccgcctccatccagtctattaattgttgccgggaagctagagtaagtagttcgccagttaatagtttgcgcaacgttgttgccattgctacaggcatcgtggtgtcacgctcgtcgtttggtatggcttcattcagctccggttcccaacgatcaaggcgagttacatgatcccccatgttgtgcaaaaaagcggttagctccttcggtcctccgatcgttgtcagaagtaagttggccgcagtgttatcactcatggttatggcagcactgcataattctcttactgtcatgccatccgtaagatgcttttctgtgactggtgagtactcaaccaagtcattctgagaatagtgtatgcggcgaccgagttgctcttgcccggcgtcaatacgggataataccgcgccacatagcagaactttaaaagtgctcatcattggaaaacgttcttcggggcgaaaactctcaaggatcttaccgctgttgagatccagttcgatgtaacccactcgtgcacccaactgatcttcagcatcttttactttcaccagcgtttctgggtgagcaaaaacaggaaggcaaaatgccgcaaaaaagggaataagggcgacacggaaatgttgaatactcatactcttcctttttcaatattattgaagcatttatcagggttattgtctcatgagcggatacatatttgaatgtatttagaaaaataaacaaataggggttccgcgcacatttccccgaaaagtgccagatacctgaaacaaaacccatcgtacggccaaggaagtctccaataactgtgatccaccacaagcgccagggttttcccagtcacgacgttgtaaaacgacggccagtcatgcataatccgcacgcatctggaataaggaagtgccattccgcctgaccttaatacgactcactatagggagaccctcgaaaaaaaacacaaacaccaggcagtagcgaaagctgcaagagaatgaaaatccgtgagcacgccggcgccaaacaccaaacaaaacaaacacaaaccaacaaaaattaaaacagcctgtgggttgatcccacccacaggcccattgggcgctagcactctggtatcacggtacctttgtgcgcctgttttataccccctcccccaactgtaacttagaagtaacacacaccgatcaacagtcagcgtggcacaccagccacgttttgatcaagcacttctgttaccccggactgagtatcaatagactgctcacgcggttgaaggagaaagcgttcgttatccggccaactacttcgaaaaacctagtaacaccgtggaagttgcagagtgtttcgctcagcactaccccagtgtagatcaggtcgatgagtcaccgcattccccacgggcgaccgtggcggtggctgcgttggcggcctgcccatggggaaacccatgggacgctctaatacagacatggtgcgaagagtctattgagctagttggtagtcctccggcccctgaatgcggctaatcctaactgcggagcacacaccctcaagccagagggcagtgtgtcgtaacgggcaactctgcagcggaaccgactactttgggtgtccgtgtttcattttattcctatactggctgcttatggtgacaattgagagatcgttaccatatagctattggattggccatccggtgactaatagagctattatatatccctttgttgggtttataccacttagcttgaaagaggttaaaacattacaattcattgttaagttgaatacagcaaaatggaagatgccaagaacatcaagaagggccctgctccattctaccctctggaagatggaacagccggcgagcagctgcacaaggccatgaagagatatgccctggtgcctggcacaatcgccttcacagatgcccacatcgaggtggacatcacctacgccgagtacttcgagatgtctgtgcggctggccgaagctatgaagcgctacggcctgaacaccaaccaccggatcgtcgtgtgcagcgagaacagcctgcagttcttcatgcctgtgctgggcgccctgttcatcggagttgctgtggcccctgccaacgacatctacaacgagcgcgagctgctgaacagcatgggcatctctcagcccaccgtggtgttcgtgtccaagaagggactgcagaaaatcctgaacgtgcagaagaagctgcccatcatccagaaaatcatcatcatggacagcaagaccgactaccagggcttccagagcatgtacaccttcgtgaccagccatctgccacctggcttcaacgagtacgacttcgtgcccgagagcttcgaccgggacaagacaatcgccctgatcatgaacagcagcggctctaccggactgcccaaaggtgttgccctgcctcatagaactgcctgcgtgcggtttagccacgccagagatcccatcttcggcaaccagatcatccccgacacagccatcctgagcgtggtgccttttcaccacggcttcggcatgttcaccacactgggctacctgatctgcggcttcagagtggtgctgatgtaccgcttcgaggaagaactgttcctgcggagcctgcaggactacaagatccagtctgctctgctggtgcctactctgttcagcttctttgccaagagcaccctgatcgataagtacgacctgagcaacctgcacgagatcgcctctggcggagcccctctgtctaaagaagtgggagaagccgtcgccaagcggttccatctgcctggcatcagacaaggctatggcctgaccgagacaaccagcgccattctgattacccctgagggcgacgataagcctggcgctgtgggaaaagtggtgccattcttcgaggccaaggtggtggatctggacaccggcaaaacactgggcgttaaccagaggggcgagctgtgtgttagaggccctatgatcatgagcggctacgtgaacaaccccgaggccacaaacgctctgatcgacaaggatggatggctgcacagcggcgacattgcctactgggacgaagatgagcacttcttcatcgtggaccggctgaagtccctgatcaagtacaagggctaccaggtggccccagccgagctggaatctattctgctgcaacaccccaacatcttcgatgccggcgttgcaggactgcccgatgatgatgctggcgaactgccagctgctgtggtggtgctggaacacggcaagaccatgaccgagaaagaaatcgtggactacgtggccagccaagtgaccaccgccaagaaactgagaggcggcgtggtgtttgtggacgaggtgccaaaaggcctgacaggcaagctggacgcccggaagatcagagagatcctgattaaggccaagaaaggcggcaagatcgccgtgtaatagctaactagacaaaacaccaaacaaacaaggcgccggcgtgctcacggacttaaataattgagccttaaagaagaaattctttaagtggatgctctcaaactcagggaaacctaaatctagttatagacaaggcaatcctgagccaagccgaagtagtaattagtaagttaacaatagatgacttacaactaatcggaaggtgcagagactcgacgggagctaccctaacgtcaagacgagggtaaagagagagtccaattctcaaagccaataaaaacaaccaaaaaaaatctagatatcggatcccggg

SEQ ID NO: 3556 - DNA, 5111 bp, synthetic construct
  source 1..5111: mol_type = other DNA; note = Ana229 EH T75L30
aggctaggtggaggctcagtgtgataagtctgcgatggtggatgcatgtgtcatggtcatagctgtttcctgtgtgaaattgttatccgctcagagggcacaatcctattccgcgctatccgacaatctccaagacattaggtggagttcagttcggcgtatggcatatgtcgctggaaagaacatgtgagcaaaaggccagcaaaaggccaggaaccgtaaaaaggccgcgttgctggcgtttttccataggctccgcccccctgacgagcatcacaaaaatcgacgctcaagtcagaggtggcgaaacccgacaggactataaagataccaggcgtttccccctggaagctccctcgtgcgctctcctgttccgaccctgccgcttaccggatacctgtccgcctttctcccttcgggaagcgtggcgctttctcatagctcacgctgtaggtatctcagttcggtgtaggtcgttcgctccaagctgggctgtgtgcacgaaccccccgttcagcccgaccgctgcgccttatccggtaactatcgtcttgagtccaacccggtaagacacgacttatcgccactggcagcagccactggtaacaggattagcagagcgaggtatgtaggcggtgctacagagttcttgaagtggtggcctaactacggctacactagaagaacagtatttggtatctgcgctctgctgaagccagttaccttcggaaaaagagttggtagctcttgatccggcaaacaaaccaccgctggtagcggtggtttttttgtttgcaagcagcagattacgcgcagaaaaaaaggatctcaagaagatcctttgatcttttctacggggtctgacgctctattcaacaaagccgccgtcccgtcaagtcagcgtaaatgggtagggggcttcaaatcgtcctcgtgataccaattcggagcctgcttttttgtacaaacttgttgataatggcaattcaaggatcttcacctagatccttttaaattaaaaatgaagttttaaatcaatctaaagtatatatgagtaaacttggtctgacagttaccaatgcttaatcagtgaggcacctatctcagcgatctgtctatttcgttcatccatagttgcctgactccccgtcgtgtagataactacgatacgggagggcttaccatctggccccagtgctgcaatgataccgcgagagccacgctcaccggctccagatttatcagcaataaaccagccagccggaagggccgagcgcagaagtggtcctgcaactttatccgcctccatccagtctattaattgttgccgggaagctagagtaagtagttcgccagttaatagtttgcgcaacgttgttgccattgctacaggcatcgtggtgtcacgctcgtcgtttggtatggcttcattcagctccggttcccaacgatcaaggcgagttacatgatcccccatgttgtgcaaaaaagcggttagctccttcggtcctccgatcgttgtcagaagtaagttggccgcagtgttatcactcatggttatggcagcactgcataattctcttactgtcatgccatccgtaagatgcttttctgtgactggtgagtactcaaccaagtcattctgagaatagtgtatgcggcgaccgagttgctcttgcccggcgtcaatacgggataataccgcgccacatagcagaactttaaaagtgctcatcattggaaaacgttcttcggggcgaaaactctcaaggatcttaccgctgttgagatccagttcgatgtaacccactcgtgcacccaactgatcttcagcatcttttactttcaccagcgtttctgggtgagcaaaaacaggaaggcaaaatgccgcaaaaaagggaataagggcgacacggaaatgttgaatactcatactcttcctttttcaatattattgaagcatttatcagggttattgtctcatgagcggatacatatttgaatgtatttagaaaaataaacaaataggggttccgcgcacatttccccgaaaagtgccagatacctgaaacaaaacccatcgtacggccaaggaagtctccaataactgtgatccaccacaagcgccagggttttcccagtcacgacgttgtaaaacgacggccagtcatgcataatccgcacgcatctggaataaggaagtgccattccgcctgaccttaatacgactcactatagggagaccctcgaaaaaaaagctcgcactggccggaagctcgtcggagcgcacaaacaccaggcagtagcgaaagctgcaagagaatgaaaatccgtggctcgcagcaaacaccaaacaaaacaaacacaaaccaacaaaaattaaaacagcctgtgggttgatcccacccacaggcccattgggcgctagcactctggtatcacggtacctttgtgcgcctgttttataccccctcccccaactgtaacttagaagtaacacacaccgatcaacagtcagcgtggcacaccagccacgttttgatcaagcacttctgttaccccggactgagtatcaatagactgctcacgcggttgaaggagaaagcgttcgttatccggccaactacttcgaaaaacctagtaacaccgtggaagttgcagagtgtttcgctcagcactaccccagtgtagatcaggtcgatgagtcaccgcattccccacgggcgaccgtggcggtggctgcgttggcggcctgcccatggggaaacccatgggacgctctaatacagacatggtgcgaagagtctattgagctagttggtagtcctccggcccctgaatgcggctaatcctaactgcggagcacacaccctcaagccagagggcagtgtgtcgtaacgggcaactctgcagcggaaccgactactttgggtgtccgtgtttcattttattcctatactggctgcttatggtgacaattgagagatcgttaccatatagctattggattggccatccggtgactaatagagctattatatatccctttgttgggtttataccacttagcttgaaagaggttaaaacattacaattcattgttaagttgaatacagcaaaatggaagatgccaagaacatcaagaagggccctgctccattctaccctctggaagatggaacagccggcgagcagctgcacaaggccatgaagagatatgccctggtgcctggcacaatcgccttcacagatgcccacatcgaggtggacatcacctacgccgagtacttcgagatgtctgtgcggctggccgaagctatgaagcgctacggcctgaacaccaaccaccggatcgtcgtgtgcagcgagaacagcctgcagttcttcatgcctgtgctgggcgccctgttcatcggagttgctgtggcccctgccaacgacatctacaacgagcgcgagctgctgaacagcatgggcatctctcagcccaccgtggtgttcgtgtccaagaagggactgcagaaaatcctgaacgtgcagaagaagctgcccatcatccagaaaatcatcatcatggacagcaagaccgactaccagggcttccagagcatgtacaccttcgtgaccagccatctgccacctggcttcaacgagtacgacttcgtgcccgagagcttcgaccgggacaagacaatcgccctgatcatgaacagcagcggctctaccggactgcccaaaggtgttgccctgcctcatagaactgcctgcgtgcggtttagccacgccagagatcccatcttcggcaaccagatcatccccgacacagccatcctgagcgtggtgccttttcaccacggcttcggcatgttcaccacactgggctacctgatctgcggcttcagagtggtgctgatgtaccgcttcgaggaagaactgttcctgcggagcctgcaggactacaagatccagtctgctctgctggtgcctactctgttcagcttctttgccaagagcaccctgatcgataagtacgacctgagcaacctgcacgagatcgcctctggcggagcccctctgtctaaagaagtgggagaagccgtcgccaagcggttccatctgcctggcatcagacaaggctatggcctgaccgagacaaccagcgccattctgattacccctgagggcgacgataagcctggcgctgtgggaaaagtggtgccattcttcgaggccaaggtggtggatctggacaccggcaaaacactgggcgttaaccagaggggcgagctgtgtgttagaggccctatgatcatgagcggctacgtgaacaaccccgaggccacaaacgctctgatcgacaaggatggatggctgcacagcggcgacattgcctactgggacgaagatgagcacttcttcatcgtggaccggctgaagtccctgatcaagtacaagggctaccaggtggccccagccgagctggaatctattctgctgcaacaccccaacatcttcgatgccggcgttgcaggactgcccgatgatgatgctggcgaactgccagctgctgtggtggtgctggaacacggcaagaccatgaccgagaaagaaatcgtggactacgtggccagccaagtgaccaccgccaagaaactgagaggcggcgtggtgtttgtggacgaggtgccaaaaggcctgacaggcaagctggacgcccggaagatcagagagatcctgattaaggccaagaaaggcggcaagatcgccgtgtaatagctaactagacaaaacaccaaacaaacaagctgcgagccacggacttaaataattgagccttaaagaagaaattctttaagtggatgctctcaaactcagggaaacctaaatctagttatagacaaggcaatcctgagccaagccgaagtagtaattagtaagttaacaatagatgacttacaactaatcggaaggtgcagagactcgacgggagctaccctaacgtcaagacgagggtaaagagagagtccaattctcaaagccaataaaaacaacccgctccgacgagcttccggccagtgcgagcaaaaaaaatctagatatcggatcccggg

SEQ ID NO: 3557 - DNA, 5076 bp, synthetic construct
  source 1..5076: mol_type = other DNA; note = Ana229 40nt IS
aggctaggtggaggctcagtgtgataagtctgcgatggtggatgcatgtgtcatggtcatagctgtttcctgtgtgaaattgttatccgctcagagggcacaatcctattccgcgctatccgacaatctccaagacattaggtggagttcagttcggcgtatggcatatgtcgctggaaagaacatgtgagcaaaaggccagcaaaaggccaggaaccgtaaaaaggccgcgttgctggcgtttttccataggctccgcccccctgacgagcatcacaaaaatcgacgctcaagtcagaggtggcgaaacccgacaggactataaagataccaggcgtttccccctggaagctccctcgtgcgctctcctgttccgaccctgccgcttaccggatacctgtccgcctttctcccttcgggaagcgtggcgctttctcatagctcacgctgtaggtatctcagttcggtgtaggtcgttcgctccaagctgggctgtgtgcacgaaccccccgttcagcccgaccgctgcgccttatccggtaactatcgtcttgagtccaacccggtaagacacgacttatcgccactggcagcagccactggtaacaggattagcagagcgaggtatgtaggcggtgctacagagttcttgaagtggtggcctaactacggctacactagaagaacagtatttggtatctgcgctctgctgaagccagttaccttcggaaaaagagttggtagctcttgatccggcaaacaaaccaccgctggtagcggtggtttttttgtttgcaagcagcagattacgcgcagaaaaaaaggatctcaagaagatcctttgatcttttctacggggtctgacgctctattcaacaaagccgccgtcccgtcaagtcagcgtaaatgggtagggggcttcaaatcgtcctcgtgataccaattcggagcctgcttttttgtacaaacttgttgataatggcaattcaaggatcttcacctagatccttttaaattaaaaatgaagttttaaatcaatctaaagtatatatgagtaaacttggtctgacagttaccaatgcttaatcagtgaggcacctatctcagcgatctgtctatttcgttcatccatagttgcctgactccccgtcgtgtagataactacgatacgggagggcttaccatctggccccagtgctgcaatgataccgcgagagccacgctcaccggctccagatttatcagcaataaaccagccagccggaagggccgagcgcagaagtggtcctgcaactttatccgcctccatccagtctattaattgttgccgggaagctagagtaagtagttcgccagttaatagtttgcgcaacgttgttgccattgctacaggcatcgtggtgtcacgctcgtcgtttggtatggcttcattcagctccggttcccaacgatcaaggcgagttacatgatcccccatgttgtgcaaaaaagcggttagctccttcggtcctccgatcgttgtcagaagtaagttggccgcagtgttatcactcatggttatggcagcactgcataattctcttactgtcatgccatccgtaagatgcttttctgtgactggtgagtactcaaccaagtcattctgagaatagtgtatgcggcgaccgagttgctcttgcccggcgtcaatacgggataataccgcgccacatagcagaactttaaaagtgctcatcattggaaaacgttcttcggggcgaaaactctcaaggatcttaccgctgttgagatccagttcgatgtaacccactcgtgcacccaactgatcttcagcatcttttactttcaccagcgtttctgggtgagcaaaaacaggaaggcaaaatgccgcaaaaaagggaataagggcgacacggaaatgttgaatactcatactcttcctttttcaatattattgaagcatttatcagggttattgtctcatgagcggatacatatttgaatgtatttagaaaaataaacaaataggggttccgcgcacatttccccgaaaagtgccagatacctgaaacaaaacccatcgtacggccaaggaagtctccaataactgtgatccaccacaagcgccagggttttcccagtcacgacgttgtaaaacgacggccagtcatgcataatccgcacgcatctggaataaggaagtgccattccgcctgaccttaatacgactcactatagggagaccctcgaaaaaaaacacaaacaccaggcagtagcgaaagctgcaagagaatgaaaatccgtggctcgcagcaataatgccacactaagagaacaaacaaagagctaagcaattaaaacagcctgtgggttgatcccacccacaggcccattgggcgctagcactctggtatcacggtacctttgtgcgcctgttttataccccctcccccaactgtaacttagaagtaacacacaccgatcaacagtcagcgtggcacaccagccacgttttgatcaagcacttctgttaccccggactgagtatcaatagactgctcacgcggttgaaggagaaagcgttcgttatccggccaactacttcgaaaaacctagtaacaccgtggaagttgcagagtgtttcgctcagcactaccccagtgtagatcaggtcgatgagtcaccgcattccccacgggcgaccgtggcggtggctgcgttggcggcctgcccatggggaaacccatgggacgctctaatacagacatggtgcgaagagtctattgagctagttggtagtcctccggcccctgaatgcggctaatcctaactgcggagcacacaccctcaagccagagggcagtgtgtcgtaacgggcaactctgcagcggaaccgactactttgggtgtccgtgtttcattttattcctatactggctgcttatggtgacaattgagagatcgttaccatatagctattggattggccatccggtgactaatagagctattatatatccctttgttgggtttataccacttagcttgaaagaggttaaaacattacaattcattgttaagttgaatacagcaaaatggaagatgccaagaacatcaagaagggccctgctccattctaccctctggaagatggaacagccggcgagcagctgcacaaggccatgaagagatatgccctggtgcctggcacaatcgccttcacagatgcccacatcgaggtggacatcacctacgccgagtacttcgagatgtctgtgcggctggccgaagctatgaagcgctacggcctgaacaccaaccaccggatcgtcgtgtgcagcgagaacagcctgcagttcttcatgcctgtgctgggcgccctgttcatcggagttgctgtggcccctgccaacgacatctacaacgagcgcgagctgctgaacagcatgggcatctctcagcccaccgtggtgttcgtgtccaagaagggactgcagaaaatcctgaacgtgcagaagaagctgcccatcatccagaaaatcatcatcatggacagcaagaccgactaccagggcttccagagcatgtacaccttcgtgaccagccatctgccacctggcttcaacgagtacgacttcgtgcccgagagcttcgaccgggacaagacaatcgccctgatcatgaacagcagcggctctaccggactgcccaaaggtgttgccctgcctcatagaactgcctgcgtgcggtttagccacgccagagatcccatcttcggcaaccagatcatccccgacacagccatcctgagcgtggtgccttttcaccacggcttcggcatgttcaccacactgggctacctgatctgcggcttcagagtggtgctgatgtaccgcttcgaggaagaactgttcctgcggagcctgcaggactacaagatccagtctgctctgctggtgcctactctgttcagcttctttgccaagagcaccctgatcgataagtacgacctgagcaacctgcacgagatcgcctctggcggagcccctctgtctaaagaagtgggagaagccgtcgccaagcggttccatctgcctggcatcagacaaggctatggcctgaccgagacaaccagcgccattctgattacccctgagggcgacgataagcctggcgctgtgggaaaagtggtgccattcttcgaggccaaggtggtggatctggacaccggcaaaacactgggcgttaaccagaggggcgagctgtgtgttagaggccctatgatcatgagcggctacgtgaacaaccccgaggccacaaacgctctgatcgacaaggatggatggctgcacagcggcgacattgcctactgggacgaagatgagcacttcttcatcgtggaccggctgaagtccctgatcaagtacaagggctaccaggtggccccagccgagctggaatctattctgctgcaacaccccaacatcttcgatgccggcgttgcaggactgcccgatgatgatgctggcgaactgccagctgctgtggtggtgctggaacacggcaagaccatgaccgagaaagaaatcgtggactacgtggccagccaagtgaccaccgccaagaaactgagaggcggcgtggtgtttgtggacgaggtgccaaaaggcctgacaggcaagctggacgcccggaagatcagagagatcctgattaaggccaagaaaggcggcaagatcgccgtgtaatagctaactagaataatgacacacgacaagaacaatcataccactaagcaagctgcgagccacggacttaaataattgagccttaaagaagaaattctttaagtggatgctctcaaactcagggaaacctaaatctagttatagacaaggcaatcctgagccaagccgaagtagtaattagtaagttaacaatagatgacttacaactaatcggaaggtgcagagactcgacgggagctaccctaacgtcaagacgagggtaaagagagagtccaattctcaaagccaataaaaacaaccaaaaaaaatctagatatcggatcccggg

SEQ ID NO: 3558 - DNA, 5036 bp, synthetic construct
  source 1..5036: mol_type = other DNA; note = Ana229 20nt IS
aggctaggtggaggctcagtgtgataagtctgcgatggtggatgcatgtgtcatggtcatagctgtttcctgtgtgaaattgttatccgctcagagggcacaatcctattccgcgctatccgacaatctccaagacattaggtggagttcagttcggcgtatggcatatgtcgctggaaagaacatgtgagcaaaaggccagcaaaaggccaggaaccgtaaaaaggccgcgttgctggcgtttttccataggctccgcccccctgacgagcatcacaaaaatcgacgctcaagtcagaggtggcgaaacccgacaggactataaagataccaggcgtttccccctggaagctccctcgtgcgctctcctgttccgaccctgccgcttaccggatacctgtccgcctttctcccttcgggaagcgtggcgctttctcatagctcacgctgtaggtatctcagttcggtgtaggtcgttcgctccaagctgggctgtgtgcacgaaccccccgttcagcccgaccgctgcgccttatccggtaactatcgtcttgagtccaacccggtaagacacgacttatcgccactggcagcagccactggtaacaggattagcagagcgaggtatgtaggcggtgctacagagttcttgaagtggtggcctaactacggctacactagaagaacagtatttggtatctgcgctctgctgaagccagttaccttcggaaaaagagttggtagctcttgatccggcaaacaaaccaccgctggtagcggtggtttttttgtttgcaagcagcagattacgcgcagaaaaaaaggatctcaagaagatcctttgatcttttctacggggtctgacgctctattcaacaaagccgccgtcccgtcaagtcagcgtaaatgggtagggggcttcaaatcgtcctcgtgataccaattcggagcctgcttttttgtacaaacttgttgataatggcaattcaaggatcttcacctagatccttttaaattaaaaatgaagttttaaatcaatctaaagtatatatgagtaaacttggtctgacagttaccaatgcttaatcagtgaggcacctatctcagcgatctgtctatttcgttcatccatagttgcctgactccccgtcgtgtagataactacgatacgggagggcttaccatctggccccagtgctgcaatgataccgcgagagccacgctcaccggctccagatttatcagcaataaaccagccagccggaagggccgagcgcagaagtggtcctgcaactttatccgcctccatccagtctattaattgttgccgggaagctagagtaagtagttcgccagttaatagtttgcgcaacgttgttgccattgctacaggcatcgtggtgtcacgctcgtcgtttggtatggcttcattcagctccggttcccaacgatcaaggcgagttacatgatcccccatgttgtgcaaaaaagcggttagctccttcggtcctccgatcgttgtcagaagtaagttggccgcagtgttatcactcatggttatggcagcactgcataattctcttactgtcatgccatccgtaagatgcttttctgtgactggtgagtactcaaccaagtcattctgagaatagtgtatgcggcgaccgagttgctcttgcccggcgtcaatacgggataataccgcgccacatagcagaactttaaaagtgctcatcattggaaaacgttcttcggggcgaaaactctcaaggatcttaccgctgttgagatccagttcgatgtaacccactcgtgcacccaactgatcttcagcatcttttactttcaccagcgtttctgggtgagcaaaaacaggaaggcaaaatgccgcaaaaaagggaataagggcgacacggaaatgttgaatactcatactcttcctttttcaatattattgaagcatttatcagggttattgtctcatgagcggatacatatttgaatgtatttagaaaaataaacaaataggggttccgcgcacatttccccgaaaagtgccagatacctgaaacaaaacccatcgtacggccaaggaagtctccaataactgtgatccaccacaagcgccagggttttcccagtcacgacgttgtaaaacgacggccagtcatgcataatccgcacgcatctggaataaggaagtgccattccgcctgaccttaatacgactcactatagggagaccctcgaaaaaaaacacaaacaccaggcagtagcgaaagctgcaagagaatgaaaatccgtggctcgcagcagatccactacaagtaagatttaaaacagcctgtgggttgatcccacccacaggcccattgggcgctagcactctggtatcacggtacctttgtgcgcctgttttataccccctcccccaactgtaacttagaagtaacacacaccgatcaacagtcagcgtggcacaccagccacgttttgatcaagcacttctgttaccccggactgagtatcaatagactgctcacgcggttgaaggagaaagcgttcgttatccggccaactacttcgaaaaacctagtaacaccgtggaagttgcagagtgtttcgctcagcactaccccagtgtagatcaggtcgatgagtcaccgcattccccacgggcgaccgtggcggtggctgcgttggcggcctgcccatggggaaacccatgggacgctctaatacagacatggtgcgaagagtctattgagctagttggtagtcctccggcccctgaatgcggctaatcctaactgcggagcacacaccctcaagccagagggcagtgtgtcgtaacgggcaactctgcagcggaaccgactactttgggtgtccgtgtttcattttattcctatactggctgcttatggtgacaattgagagatcgttaccatatagctattggattggccatccggtgactaatagagctattatatatccctttgttgggtttataccacttagcttgaaagaggttaaaacattacaattcattgttaagttgaatacagcaaaatggaagatgccaagaacatcaagaagggccctgctccattctaccctctggaagatggaacagccggcgagcagctgcacaaggccatgaagagatatgccctggtgcctggcacaatcgccttcacagatgcccacatcgaggtggacatcacctacgccgagtacttcgagatgtctgtgcggctggccgaagctatgaagcgctacggcctgaacaccaaccaccggatcgtcgtgtgcagcgagaacagcctgcagttcttcatgcctgtgctgggcgccctgttcatcggagttgctgtggcccctgccaacgacatctacaacgagcgcgagctgctgaacagcatgggcatctctcagcccaccgtggtgttcgtgtccaagaagggactgcagaaaatcctgaacgtgcagaagaagctgcccatcatccagaaaatcatcatcatggacagcaagaccgactaccagggcttccagagcatgtacaccttcgtgaccagccatctgccacctggcttcaacgagtacgacttcgtgcccgagagcttcgaccgggacaagacaatcgccctgatcatgaacagcagcggctctaccggactgcccaaaggtgttgccctgcctcatagaactgcctgcgtgcggtttagccacgccagagatcccatcttcggcaaccagatcatccccgacacagccatcctgagcgtggtgccttttcaccacggcttcggcatgttcaccacactgggctacctgatctgcggcttcagagtggtgctgatgtaccgcttcgaggaagaactgttcctgcggagcctgcaggactacaagatccagtctgctctgctggtgcctactctgttcagcttctttgccaagagcaccctgatcgataagtacgacctgagcaacctgcacgagatcgcctctggcggagcccctctgtctaaagaagtgggagaagccgtcgccaagcggttccatctgcctggcatcagacaaggctatggcctgaccgagacaaccagcgccattctgattacccctgagggcgacgataagcctggcgctgtgggaaaagtggtgccattcttcgaggccaaggtggtggatctggacaccggcaaaacactgggcgttaaccagaggggcgagctgtgtgttagaggccctatgatcatgagcggctacgtgaacaaccccgaggccacaaacgctctgatcgacaaggatggatggctgcacagcggcgacattgcctactgggacgaagatgagcacttcttcatcgtggaccggctgaagtccctgatcaagtacaagggctaccaggtggccccagccgagctggaatctattctgctgcaacaccccaacatcttcgatgccggcgttgcaggactgcccgatgatgatgctggcgaactgccagctgctgtggtggtgctggaacacggcaagaccatgaccgagaaagaaatcgtggactacgtggccagccaagtgaccaccgccaagaaactgagaggcggcgtggtgtttgtggacgaggtgccaaaaggcctgacaggcaagctggacgcccggaagatcagagagatcctgattaaggccaagaaaggcggcaagatcgccgtgtaatagctaactagagatagaatccaactaacctgctgcgagccacggacttaaataattgagccttaaagaagaaattctttaagtggatgctctcaaactcagggaaacctaaatctagttatagacaaggcaatcctgagccaagccgaagtagtaattagtaagttaacaatagatgacttacaactaatcggaaggtgcagagactcgacgggagctaccctaacgtcaagacgagggtaaagagagagtccaattctcaaagccaataaaaacaaccaaaaaaaatctagatatcggatcccggg

SEQ ID NO: 3559 - DNA, 5109 bp, synthetic construct
  source 1..5109: mol_type = other DNA; note = Ana229 40nt ES
aggctaggtggaggctcagtgtgataagtctgcgatggtggatgcatgtgtcatggtcatagctgtttcctgtgtgaaattgttatccgctcagagggcacaatcctattccgcgctatccgacaatctccaagacattaggtggagttcagttcggcgtatggcatatgtcgctggaaagaacatgtgagcaaaaggccagcaaaaggccaggaaccgtaaaaaggccgcgttgctggcgtttttccataggctccgcccccctgacgagcatcacaaaaatcgacgctcaagtcagaggtggcgaaacccgacaggactataaagataccaggcgtttccccctggaagctccctcgtgcgctctcctgttccgaccctgccgcttaccggatacctgtccgcctttctcccttcgggaagcgtggcgctttctcatagctcacgctgtaggtatctcagttcggtgtaggtcgttcgctccaagctgggctgtgtgcacgaaccccccgttcagcccgaccgctgcgccttatccggtaactatcgtcttgagtccaacccggtaagacacgacttatcgccactggcagcagccactggtaacaggattagcagagcgaggtatgtaggcggtgctacagagttcttgaagtggtggcctaactacggctacactagaagaacagtatttggtatctgcgctctgctgaagccagttaccttcggaaaaagagttggtagctcttgatccggcaaacaaaccaccgctggtagcggtggtttttttgtttgcaagcagcagattacgcgcagaaaaaaaggatctcaagaagatcctttgatcttttctacggggtctgacgctctattcaacaaagccgccgtcccgtcaagtcagcgtaaatgggtagggggcttcaaatcgtcctcgtgataccaattcggagcctgcttttttgtacaaacttgttgataatggcaattcaaggatcttcacctagatccttttaaattaaaaatgaagttttaaatcaatctaaagtatatatgagtaaacttggtctgacagttaccaatgcttaatcagtgaggcacctatctcagcgatctgtctatttcgttcatccatagttgcctgactccccgtcgtgtagataactacgatacgggagggcttaccatctggccccagtgctgcaatgataccgcgagagccacgctcaccggctccagatttatcagcaataaaccagccagccggaagggccgagcgcagaagtggtcctgcaactttatccgcctccatccagtctattaattgttgccgggaagctagagtaagtagttcgccagttaatagtttgcgcaacgttgttgccattgctacaggcatcgtggtgtcacgctcgtcgtttggtatggcttcattcagctccggttcccaacgatcaaggcgagttacatgatcccccatgttgtgcaaaaaagcggttagctccttcggtcctccgatcgttgtcagaagtaagttggccgcagtgttatcactcatggttatggcagcactgcataattctcttactgtcatgccatccgtaagatgcttttctgtgactggtgagtactcaaccaagtcattctgagaatagtgtatgcggcgaccgagttgctcttgcccggcgtcaatacgggataataccgcgccacatagcagaactttaaaagtgctcatcattggaaaacgttcttcggggcgaaaactctcaaggatcttaccgctgttgagatccagttcgatgtaacccactcgtgcacccaactgatcttcagcatcttttactttcaccagcgtttctgggtgagcaaaaacaggaaggcaaaatgccgcaaaaaagggaataagggcgacacggaaatgttgaatactcatactcttcctttttcaatattattgaagcatttatcagggttattgtctcatgagcggatacatatttgaatgtatttagaaaaataaacaaataggggttccgcgcacatttccccgaaaagtgccagatacctgaaacaaaacccatcgtacggccaaggaagtctccaataactgtgatccaccacaagcgccagggttttcccagtcacgacgttgtaaaacgacggccagtcatgcataatccgcacgcatctggaataaggaagtgccattccgcctgaccttaatacgactcactatagggagaccctcgaaaaaaaaataatgacacactacgagaacaaccatagaactaagcaaaggcagtagcgaaagctgcaagagaatgaaaatccgtggctcgcagcaaacaccaaacaaaacaaacacaaaccaacaaaaattaaaacagcctgtgggttgatcccacccacaggcccattgggcgctagcactctggtatcacggtacctttgtgcgcctgttttataccccctcccccaactgtaacttagaagtaacacacaccgatcaacagtcagcgtggcacaccagccacgttttgatcaagcacttctgttaccccggactgagtatcaatagactgctcacgcggttgaaggagaaagcgttcgttatccggccaactacttcgaaaaacctagtaacaccgtggaagttgcagagtgtttcgctcagcactaccccagtgtagatcaggtcgatgagtcaccgcattccccacgggcgaccgtggcggtggctgcgttggcggcctgcccatggggaaacccatgggacgctctaatacagacatggtgcgaagagtctattgagctagttggtagtcctccggcccctgaatgcggctaatcctaactgcggagcacacaccctcaagccagagggcagtgtgtcgtaacgggcaactctgcagcggaaccgactactttgggtgtccgtgtttcattttattcctatactggctgcttatggtgacaattgagagatcgttaccatatagctattggattggccatccggtgactaatagagctattatatatccctttgttgggtttataccacttagcttgaaagaggttaaaacattacaattcattgttaagttgaatacagcaaaatggaagatgccaagaacatcaagaagggccctgctccattctaccctctggaagatggaacagccggcgagcagctgcacaaggccatgaagagatatgccctggtgcctggcacaatcgccttcacagatgcccacatcgaggtggacatcacctacgccgagtacttcgagatgtctgtgcggctggccgaagctatgaagcgctacggcctgaacaccaaccaccggatcgtcgtgtgcagcgagaacagcctgcagttcttcatgcctgtgctgggcgccctgttcatcggagttgctgtggcccctgccaacgacatctacaacgagcgcgagctgctgaacagcatgggcatctctcagcccaccgtggtgttcgtgtccaagaagggactgcagaaaatcctgaacgtgcagaagaagctgcccatcatccagaaaatcatcatcatggacagcaagaccgactaccagggcttccagagcatgtacaccttcgtgaccagccatctgccacctggcttcaacgagtacgacttcgtgcccgagagcttcgaccgggacaagacaatcgccctgatcatgaacagcagcggctctaccggactgcccaaaggtgttgccctgcctcatagaactgcctgcgtgcggtttagccacgccagagatcccatcttcggcaaccagatcatccccgacacagccatcctgagcgtggtgccttttcaccacggcttcggcatgttcaccacactgggctacctgatctgcggcttcagagtggtgctgatgtaccgcttcgaggaagaactgttcctgcggagcctgcaggactacaagatccagtctgctctgctggtgcctactctgttcagcttctttgccaagagcaccctgatcgataagtacgacctgagcaacctgcacgagatcgcctctggcggagcccctctgtctaaagaagtgggagaagccgtcgccaagcggttccatctgcctggcatcagacaaggctatggcctgaccgagacaaccagcgccattctgattacccctgagggcgacgataagcctggcgctgtgggaaaagtggtgccattcttcgaggccaaggtggtggatctggacaccggcaaaacactgggcgttaaccagaggggcgagctgtgtgttagaggccctatgatcatgagcggctacgtgaacaaccccgaggccacaaacgctctgatcgacaaggatggatggctgcacagcggcgacattgcctactgggacgaagatgagcacttcttcatcgtggaccggctgaagtccctgatcaagtacaagggctaccaggtggccccagccgagctggaatctattctgctgcaacaccccaacatcttcgatgccggcgttgcaggactgcccgatgatgatgctggcgaactgccagctgctgtggtggtgctggaacacggcaagaccatgaccgagaaagaaatcgtggactacgtggccagccaagtgaccaccgccaagaaactgagaggcggcgtggtgtttgtggacgaggtgccaaaaggcctgacaggcaagctggacgcccggaagatcagagagatcctgattaaggccaagaaaggcggcaagatcgccgtgtaatagctaactagacaaaacaccaaacaaacaagctgcgagccacggacttaaataattgagccttaaagaagaaattctttaagtggatgctctcaaactcagggaaacctaaatctagttatagacaaggcaatcctgagccaagccgaagtagtaattagtaagttaacaatagatgacttacaactaatcggaaggtgcagagactcgacgggagctaccctaacgtcaagacgagggtaaagagagagtccaattctcaaagccaataataatgaaagactacgagatcaaccatagagctaaccaaaaaaaaatctagatatcggatcccggg

SEQ ID NO: 3560 - DNA, 5071 bp, synthetic construct
  source 1..5071: mol_type = other DNA; note = Ana229 20nt ES
aggctaggtggaggctcagtgtgataagtctgcgatggtggatgcatgtgtcatggtcatagctgtttcctgtgtgaaattgttatccgctcagagggcacaatcctattccgcgctatccgacaatctccaagacattaggtggagttcagttcggcgtatggcatatgtcgctggaaagaacatgtgagcaaaaggccagcaaaaggccaggaaccgtaaaaaggccgcgttgctggcgtttttccataggctccgcccccctgacgagcatcacaaaaatcgacgctcaagtcagaggtggcgaaacccgacaggactataaagataccaggcgtttccccctggaagctccctcgtgcgctctcctgttccgaccctgccgcttaccggatacctgtccgcctttctcccttcgggaagcgtggcgctttctcatagctcacgctgtaggtatctcagttcggtgtaggtcgttcgctccaagctgggctgtgtgcacgaaccccccgttcagcccgaccgctgcgccttatccggtaactatcgtcttgagtccaacccggtaagacacgacttatcgccactggcagcagccactggtaacaggattagcagagcgaggtatgtaggcggtgctacagagttcttgaagtggtggcctaactacggctacactagaagaacagtatttggtatctgcgctctgctgaagccagttaccttcggaaaaagagttggtagctcttgatccggcaaacaaaccaccgctggtagcggtggtttttttgtttgcaagcagcagattacgcgcagaaaaaaaggatctcaagaagatcctttgatcttttctacggggtctgacgctctattcaacaaagccgccgtcccgtcaagtcagcgtaaatgggtagggggcttcaaatcgtcctcgtgataccaattcggagcctgcttttttgtacaaacttgttgataatggcaattcaaggatcttcacctagatccttttaaattaaaaatgaagttttaaatcaatctaaagtatatatgagtaaacttggtctgacagttaccaatgcttaatcagtgaggcacctatctcagcgatctgtctatttcgttcatccatagttgcctgactccccgtcgtgtagataactacgatacgggagggcttaccatctggccccagtgctgcaatgataccgcgagagccacgctcaccggctccagatttatcagcaataaaccagccagccggaagggccgagcgcagaagtggtcctgcaactttatccgcctccatccagtctattaattgttgccgggaagctagagtaagtagttcgccagttaatagtttgcgcaacgttgttgccattgctacaggcatcgtggtgtcacgctcgtcgtttggtatggcttcattcagctccggttcccaacgatcaaggcgagttacatgatcccccatgttgtgcaaaaaagcggttagctccttcggtcctccgatcgttgtcagaagtaagttggccgcagtgttatcactcatggttatggcagcactgcataattctcttactgtcatgccatccgtaagatgcttttctgtgactggtgagtactcaaccaagtcattctgagaatagtgtatgcggcgaccgagttgctcttgcccggcgtcaatacgggataataccgcgccacatagcagaactttaaaagtgctcatcattggaaaacgttcttcggggcgaaaactctcaaggatcttaccgctgttgagatccagttcgatgtaacccactcgtgcacccaactgatcttcagcatcttttactttcaccagcgtttctgggtgagcaaaaacaggaaggcaaaatgccgcaaaaaagggaataagggcgacacggaaatgttgaatactcatactcttcctttttcaatattattgaagcatttatcagggttattgtctcatgagcggatacatatttgaatgtatttagaaaaataaacaaataggggttccgcgcacatttccccgaaaagtgccagatacctgaaacaaaacccatcgtacggccaaggaagtctccaataactgtgatccaccacaagcgccagggttttcccagtcacgacgttgtaaaacgacggccagtcatgcataatccgcacgcatctggaataaggaagtgccattccgcctgaccttaatacgactcactatagggagaccctcgaaaaaaaaagatacacttcaactaagctaggcagtagcgaaagctgcaagagaatgaaaatccgtggctcgcagcaaacaccaaacaaaacaaacacaaaccaacaaaaattaaaacagcctgtgggttgatcccacccacaggcccattgggcgctagcactctggtatcacggtacctttgtgcgcctgttttataccccctcccccaactgtaacttagaagtaacacacaccgatcaacagtcagcgtggcacaccagccacgttttgatcaagcacttctgttaccccggactgagtatcaatagactgctcacgcggttgaaggagaaagcgttcgttatccggccaactacttcgaaaaacctagtaacaccgtggaagttgcagagtgtttcgctcagcactaccccagtgtagatcaggtcgatgagtcaccgcattccccacgggcgaccgtggcggtggctgcgttggcggcctgcccatggggaaacccatgggacgctctaatacagacatggtgcgaagagtctattgagctagttggtagtcctccggcccctgaatgcggctaatcctaactgcggagcacacaccctcaagccagagggcagtgtgtcgtaacgggcaactctgcagcggaaccgactactttgggtgtccgtgtttcattttattcctatactggctgcttatggtgacaattgagagatcgttaccatatagctattggattggccatccggtgactaatagagctattatatatccctttgttgggtttataccacttagcttgaaagaggttaaaacattacaattcattgttaagttgaatacagcaaaatggaagatgccaagaacatcaagaagggccctgctccattctaccctctggaagatggaacagccggcgagcagctgcacaaggccatgaagagatatgccctggtgcctggcacaatcgccttcacagatgcccacatcgaggtggacatcacctacgccgagtacttcgagatgtctgtgcggctggccgaagctatgaagcgctacggcctgaacaccaaccaccggatcgtcgtgtgcagcgagaacagcctgcagttcttcatgcctgtgctgggcgccctgttcatcggagttgctgtggcccctgccaacgacatctacaacgagcgcgagctgctgaacagcatgggcatctctcagcccaccgtggtgttcgtgtccaagaagggactgcagaaaatcctgaacgtgcagaagaagctgcccatcatccagaaaatcatcatcatggacagcaagaccgactaccagggcttccagagcatgtacaccttcgtgaccagccatctgccacctggcttcaacgagtacgacttcgtgcccgagagcttcgaccgggacaagacaatcgccctgatcatgaacagcagcggctctaccggactgcccaaaggtgttgccctgcctcatagaactgcctgcgtgcggtttagccacgccagagatcccatcttcggcaaccagatcatccccgacacagccatcctgagcgtggtgccttttcaccacggcttcggcatgttcaccacactgggctacctgatctgcggcttcagagtggtgctgatgtaccgcttcgaggaagaactgttcctgcggagcctgcaggactacaagatccagtctgctctgctggtgcctactctgttcagcttctttgccaagagcaccctgatcgataagtacgacctgagcaacctgcacgagatcgcctctggcggagcccctctgtctaaagaagtgggagaagccgtcgccaagcggttccatctgcctggcatcagacaaggctatggcctgaccgagacaaccagcgccattctgattacccctgagggcgacgataagcctggcgctgtgggaaaagtggtgccattcttcgaggccaaggtggtggatctggacaccggcaaaacactgggcgttaaccagaggggcgagctgtgtgttagaggccctatgatcatgagcggctacgtgaacaaccccgaggccacaaacgctctgatcgacaaggatggatggctgcacagcggcgacattgcctactgggacgaagatgagcacttcttcatcgtggaccggctgaagtccctgatcaagtacaagggctaccaggtggccccagccgagctggaatctattctgctgcaacaccccaacatcttcgatgccggcgttgcaggactgcccgatgatgatgctggcgaactgccagctgctgtggtggtgctggaacacggcaagaccatgaccgagaaagaaatcgtggactacgtggccagccaagtgaccaccgccaagaaactgagaggcggcgtggtgtttgtggacgaggtgccaaaaggcctgacaggcaagctggacgcccggaagatcagagagatcctgattaaggccaagaaaggcggcaagatcgccgtgtaatagctaactagacaaaacaccaaacaaacaagctgcgagccacggacttaaataattgagccttaaagaagaaattctttaagtggatgctctcaaactcagggaaacctaaatctagttatagacaaggcaatcctgagccaagccgaagtagtaattagtaagttaacaatagatgacttacaactaatcggaaggtgcagagactcgacgggagctaccctaacgtcaagacgagggtaaagagagagtccaattctcaaagccaatacatacacatgaacttagctaaaaaaaatctagatatcggatcccggg

SEQ ID NO: 3561 - DNA, 5251 bp, synthetic construct
  source 1..5251: mol_type = other DNA; note = Ana229 rational design 1
aggctaggtggaggctcagtgtgataagtctgcgatggtggatgcatgtgtcatggtcatagctgtttcctgtgtgaaattgttatccgctcagagggcacaatcctattccgcgctatccgacaatctccaagacattaggtggagttcagttcggcgtatggcatatgtcgctggaaagaacatgtgagcaaaaggccagcaaaaggccaggaaccgtaaaaaggccgcgttgctggcgtttttccataggctccgcccccctgacgagcatcacaaaaatcgacgctcaagtcagaggtggcgaaacccgacaggactataaagataccaggcgtttccccctggaagctccctcgtgcgctctcctgttccgaccctgccgcttaccggatacctgtccgcctttctcccttcgggaagcgtggcgctttctcatagctcacgctgtaggtatctcagttcggtgtaggtcgttcgctccaagctgggctgtgtgcacgaaccccccgttcagcccgaccgctgcgccttatccggtaactatcgtcttgagtccaacccggtaagacacgacttatcgccactggcagcagccactggtaacaggattagcagagcgaggtatgtaggcggtgctacagagttcttgaagtggtggcctaactacggctacactagaagaacagtatttggtatctgcgctctgctgaagccagttaccttcggaaaaagagttggtagctcttgatccggcaaacaaaccaccgctggtagcggtggtttttttgtttgcaagcagcagattacgcgcagaaaaaaaggatctcaagaagatcctttgatcttttctacggggtctgacgctctattcaacaaagccgccgtcccgtcaagtcagcgtaaatgggtagggggcttcaaatcgtcctcgtgataccaattcggagcctgcttttttgtacaaacttgttgataatggcaattcaaggatcttcacctagatccttttaaattaaaaatgaagttttaaatcaatctaaagtatatatgagtaaacttggtctgacagttaccaatgcttaatcagtgaggcacctatctcagcgatctgtctatttcgttcatccatagttgcctgactccccgtcgtgtagataactacgatacgggagggcttaccatctggccccagtgctgcaatgataccgcgagagccacgctcaccggctccagatttatcagcaataaaccagccagccggaagggccgagcgcagaagtggtcctgcaactttatccgcctccatccagtctattaattgttgccgggaagctagagtaagtagttcgccagttaatagtttgcgcaacgttgttgccattgctacaggcatcgtggtgtcacgctcgtcgtttggtatggcttcattcagctccggttcccaacgatcaaggcgagttacatgatcccccatgttgtgcaaaaaagcggttagctccttcggtcctccgatcgttgtcagaagtaagttggccgcagtgttatcactcatggttatggcagcactgcataattctcttactgtcatgccatccgtaagatgcttttctgtgactggtgagtactcaaccaagtcattctgagaatagtgtatgcggcgaccgagttgctcttgcccggcgtcaatacgggataataccgcgccacatagcagaactttaaaagtgctcatcattggaaaacgttcttcggggcgaaaactctcaaggatcttaccgctgttgagatccagttcgatgtaacccactcgtgcacccaactgatcttcagcatcttttactttcaccagcgtttctgggtgagcaaaaacaggaaggcaaaatgccgcaaaaaagggaataagggcgacacggaaatgttgaatactcatactcttcctttttcaatattattgaagcatttatcagggttattgtctcatgagcggatacatatttgaatgtatttagaaaaataaacaaataggggttccgcgcacatttccccgaaaagtgccagatacctgaaacaaaacccatcgtacggccaaggaagtctccaataactgtgatccaccacaagcgccagggttttcccagtcacgacgttgtaaaacgacggccagtcatgcataatccgcacgcatctggaataaggaagtgccattccgcctgaccttaatacgactcactatagggagaccctcgaaaaaaaagcttcgaatgcgaccatctgctcaggctcaatctcgctccaataatgacacactacgagaacaaccatagaactaagcaaaggcagtagcgaaagctgcaagagaatgaaaatccgttgaccttaaacggtcgtgtggggagcacgccggcgccaataatgccacactaagagaacaaacaaagagctaagcaattaaaacagcctgtgggttgatcccacccacaggcccattgggcgctagcactctggtatcacggtacctttgtgcgcctgttttataccccctcccccaactgtaacttagaagtaacacacaccgatcaacagtcagcgtggcacaccagccacgttttgatcaagcacttctgttaccccggactgagtatcaatagactgctcacgcggttgaaggagaaagcgttcgttatccggccaactacttcgaaaaacctagtaacaccgtggaagttgcagagtgtttcgctcagcactaccccagtgtagatcaggtcgatgagtcaccgcattccccacgggcgaccgtggcggtggctgcgttggcggcctgcccatggggaaacccatgggacgctctaatacagacatggtgcgaagagtctattgagctagttggtagtcctccggcccctgaatgcggctaatcctaactgcggagcacacaccctcaagccagagggcagtgtgtcgtaacgggcaactctgcagcggaaccgactactttgggtgtccgtgtttcattttattcctatactggctgcttatggtgacaattgagagatcgttaccatatagctattggattggccatccggtgactaatagagctattatatatccctttgttgggtttataccacttagcttgaaagaggttaaaacattacaattcattgttaagttgaatacagcaaaatggaagatgccaagaacatcaagaagggccctgctccattctaccctctggaagatggaacagccggcgagcagctgcacaaggccatgaagagatatgccctggtgcctggcacaatcgccttcacagatgcccacatcgaggtggacatcacctacgccgagtacttcgagatgtctgtgcggctggccgaagctatgaagcgctacggcctgaacaccaaccaccggatcgtcgtgtgcagcgagaacagcctgcagttcttcatgcctgtgctgggcgccctgttcatcggagttgctgtggcccctgccaacgacatctacaacgagcgcgagctgctgaacagcatgggcatctctcagcccaccgtggtgttcgtgtccaagaagggactgcagaaaatcctgaacgtgcagaagaagctgcccatcatccagaaaatcatcatcatggacagcaagaccgactaccagggcttccagagcatgtacaccttcgtgaccagccatctgccacctggcttcaacgagtacgacttcgtgcccgagagcttcgaccgggacaagacaatcgccctgatcatgaacagcagcggctctaccggactgcccaaaggtgttgccctgcctcatagaactgcctgcgtgcggtttagccacgccagagatcccatcttcggcaaccagatcatccccgacacagccatcctgagcgtggtgccttttcaccacggcttcggcatgttcaccacactgggctacctgatctgcggcttcagagtggtgctgatgtaccgcttcgaggaagaactgttcctgcggagcctgcaggactacaagatccagtctgctctgctggtgcctactctgttcagcttctttgccaagagcaccctgatcgataagtacgacctgagcaacctgcacgagatcgcctctggcggagcccctctgtctaaagaagtgggagaagccgtcgccaagcggttccatctgcctggcatcagacaaggctatggcctgaccgagacaaccagcgccattctgattacccctgagggcgacgataagcctggcgctgtgggaaaagtggtgccattcttcgaggccaaggtggtggatctggacaccggcaaaacactgggcgttaaccagaggggcgagctgtgtgttagaggccctatgatcatgagcggctacgtgaacaaccccgaggccacaaacgctctgatcgacaaggatggatggctgcacagcggcgacattgcctactgggacgaagatgagcacttcttcatcgtggaccggctgaagtccctgatcaagtacaagggctaccaggtggccccagccgagctggaatctattctgctgcaacaccccaacatcttcgatgccggcgttgcaggactgcccgatgatgatgctggcgaactgccagctgctgtggtggtgctggaacacggcaagaccatgaccgagaaagaaatcgtggactacgtggccagccaagtgaccaccgccaagaaactgagaggcggcgtggtgtttgtggacgaggtgccaaaaggcctgacaggcaagctggacgcccggaagatcagagagatcctgattaaggccaagaaaggcggcaagatcgccgtgtaatagctaactagaataatgacacacgacaagaacaatcataccactaagcaaggcgccggcgtgctcgctacggacttaaataattgagccttaaagaagaaattctttaagtggatgctctcaaactcagggaaacctaaatctagttatagacaaggcaatcctgagccaagccgaagtagtaattagtaagttaacaatagatgacttacaactaatcggaaggtgcagagactcgacgggagctaccctaacgtcaagacgagggtaaagagagagtccaattctcaaagccaataataatgaaagactacgagatcaaccatagagctaaccaaggagcgagattgagcctgagcagatggtcgcattcgaagcaaaaaaaatctagatatcggatcccggg

SEQ ID NO: 3562 - DNA, 5130 bp, synthetic construct
  source 1..5130: mol_type = other DNA; note = Ana229 rational design 2
aggctaggtggaggctcagtgtgataagtctgcgatggtggatgcatgtgtcatggtcatagctgtttcctgtgtgaaattgttatccgctcagagggcacaatcctattccgcgctatccgacaatctccaagacattaggtggagttcagttcggcgtatggcatatgtcgctggaaagaacatgtgagcaaaaggccagcaaaaggccaggaaccgtaaaaaggccgcgttgctggcgtttttccataggctccgcccccctgacgagcatcacaaaaatcgacgctcaagtcagaggtggcgaaacccgacaggactataaagataccaggcgtttccccctggaagctccctcgtgcgctctcctgttccgaccctgccgcttaccggatacctgtccgcctttctcccttcgggaagcgtggcgctttctcatagctcacgctgtaggtatctcagttcggtgtaggtcgttcgctccaagctgggctgtgtgcacgaaccccccgttcagcccgaccgctgcgccttatccggtaactatcgtcttgagtccaacccggtaagacacgacttatcgccactggcagcagccactggtaacaggattagcagagcgaggtatgtaggcggtgctacagagttcttgaagtggtggcctaactacggctacactagaagaacagtatttggtatctgcgctctgctgaagccagttaccttcggaaaaagagttggtagctcttgatccggcaaacaaaccaccgctggtagcggtggtttttttgtttgcaagcagcagattacgcgcagaaaaaaaggatctcaagaagatcctttgatcttttctacggggtctgacgctctattcaacaaagccgccgtcccgtcaagtcagcgtaaatgggtagggggcttcaaatcgtcctcgtgataccaattcggagcctgcttttttgtacaaacttgttgataatggcaattcaaggatcttcacctagatccttttaaattaaaaatgaagttttaaatcaatctaaagtatatatgagtaaacttggtctgacagttaccaatgcttaatcagtgaggcacctatctcagcgatctgtctatttcgttcatccatagttgcctgactccccgtcgtgtagataactacgatacgggagggcttaccatctggccccagtgctgcaatgataccgcgagagccacgctcaccggctccagatttatcagcaataaaccagccagccggaagggccgagcgcagaagtggtcctgcaactttatccgcctccatccagtctattaattgttgccgggaagctagagtaagtagttcgccagttaatagtttgcgcaacgttgttgccattgctacaggcatcgtggtgtcacgctcgtcgtttggtatggcttcattcagctccggttcccaacgatcaaggcgagttacatgatcccccatgttgtgcaaaaaagcggttagctccttcggtcctccgatcgttgtcagaagtaagttggccgcagtgttatcactcatggttatggcagcactgcataattctcttactgtcatgccatccgtaagatgcttttctgtgactggtgagtactcaaccaagtcattctgagaatagtgtatgcggcgaccgagttgctcttgcccggcgtcaatacgggataataccgcgccacatagcagaactttaaaagtgctcatcattggaaaacgttcttcggggcgaaaactctcaaggatcttaccgctgttgagatccagttcgatgtaacccactcgtgcacccaactgatcttcagcatcttttactttcaccagcgtttctgggtgagcaaaaacaggaaggcaaaatgccgcaaaaaagggaataagggcgacacggaaatgttgaatactcatactcttcctttttcaatattattgaagcatttatcagggttattgtctcatgagcggatacatatttgaatgtatttagaaaaataaacaaataggggttccgcgcacatttccccgaaaagtgccagatacctgaaacaaaacccatcgtacggccaaggaagtctccaataactgtgatccaccacaagcgccagggttttcccagtcacgacgttgtaaaacgacggccagtcatgcataatccgcacgcatctggaataaggaagtgccattccgcctgaccttaatacgactcactatagggagaccctcgaaaaaaaaataatgacacactacgagaacaaccatagaactaagcaaaggcagtagcgaaagctgcaagagaatgaaaatccgttgaccttaaacggtcgtgtggggagcacgccggcgccaataatgccacactaagagaacaaacaaagagctaagcaattaaaacagcctgtgggttgatcccacccacaggcccattgggcgctagcactctggtatcacggtacctttgtgcgcctgttttataccccctcccccaactgtaacttagaagtaacacacaccgatcaacagtcagcgtggcacaccagccacgttttgatcaagcacttctgttaccccggactgagtatcaatagactgctcacgcggttgaaggagaaagcgttcgttatccggccaactacttcgaaaaacctagtaacaccgtggaagttgcagagtgtttcgctcagcactaccccagtgtagatcaggtcgatgagtcaccgcattccccacgggcgaccgtggcggtggctgcgttggcggcctgcccatggggaaacccatgggacgctctaatacagacatggtgcgaagagtctattgagctagttggtagtcctccggcccctgaatgcggctaatcctaactgcggagcacacaccctcaagccagagggcagtgtgtcgtaacgggcaactctgcagcggaaccgactactttgggtgtccgtgtttcattttattcctatactggctgcttatggtgacaattgagagatcgttaccatatagctattggattggccatccggtgactaatagagctattatatatccctttgttgggtttataccacttagcttgaaagaggttaaaacattacaattcattgttaagttgaatacagcaaaatggaagatgccaagaacatcaagaagggccctgctccattctaccctctggaagatggaacagccggcgagcagctgcacaaggccatgaagagatatgccctggtgcctggcacaatcgccttcacagatgcccacatcgaggtggacatcacctacgccgagtacttcgagatgtctgtgcggctggccgaagctatgaagcgctacggcctgaacaccaaccaccggatcgtcgtgtgcagcgagaacagcctgcagttcttcatgcctgtgctgggcgccctgttcatcggagttgctgtggcccctgccaacgacatctacaacgagcgcgagctgctgaacagcatgggcatctctcagcccaccgtggtgttcgtgtccaagaagggactgcagaaaatcctgaacgtgcagaagaagctgcccatcatccagaaaatcatcatcatggacagcaagaccgactaccagggcttccagagcatgtacaccttcgtgaccagccatctgccacctggcttcaacgagtacgacttcgtgcccgagagcttcgaccgggacaagacaatcgccctgatcatgaacagcagcggctctaccggactgcccaaaggtgttgccctgcctcatagaactgcctgcgtgcggtttagccacgccagagatcccatcttcggcaaccagatcatccccgacacagccatcctgagcgtggtgccttttcaccacggcttcggcatgttcaccacactgggctacctgatctgcggcttcagagtggtgctgatgtaccgcttcgaggaagaactgttcctgcggagcctgcaggactacaagatccagtctgctctgctggtgcctactctgttcagcttctttgccaagagcaccctgatcgataagtacgacctgagcaacctgcacgagatcgcctctggcggagcccctctgtctaaagaagtgggagaagccgtcgccaagcggttccatctgcctggcatcagacaaggctatggcctgaccgagacaaccagcgccattctgattacccctgagggcgacgataagcctggcgctgtgggaaaagtggtgccattcttcgaggccaaggtggtggatctggacaccggcaaaacactgggcgttaaccagaggggcgagctgtgtgttagaggccctatgatcatgagcggctacgtgaacaaccccgaggccacaaacgctctgatcgacaaggatggatggctgcacagcggcgacattgcctactgggacgaagatgagcacttcttcatcgtggaccggctgaagtccctgatcaagtacaagggctaccaggtggccccagccgagctggaatctattctgctgcaacaccccaacatcttcgatgccggcgttgcaggactgcccgatgatgatgctggcgaactgccagctgctgtggtggtgctggaacacggcaagaccatgaccgagaaagaaatcgtggactacgtggccagccaagtgaccaccgccaagaaactgagaggcggcgtggtgtttgtggacgaggtgccaaaaggcctgacaggcaagctggacgcccggaagatcagagagatcctgattaaggccaagaaaggcggcaagatcgccgtgtaatagctaactagagatagaatccaactaacctggcgccggcgtgctcgctacggacttaaataattgagccttaaagaagaaattctttaagtggatgctctcaaactcagggaaacctaaatctagttatagacaaggcaatcctgagccaagccgaagtagtaattagtaagttaacaatagatgacttacaactaatcggaaggtgcagagactcgacgggagctaccctaacgtcaagacgagggtaaagagagagtccaattctcaaagccaatacatacacatgaacttagctaaaaaaaatctagatatcggatcccggg

SEQ ID NO: 3563 - DNA, 5076 bp, synthetic construct
  source 1..5076: mol_type = other DNA; note = Ana 232 Exonextention
aggctaggtggaggctcagtgtgataagtctgcgatggtggatgcatgtgtcatggtcatagctgtttcctgtgtgaaattgttatccgctcagagggcacaatcctattccgcgctatccgacaatctccaagacattaggtggagttcagttcggcgtatggcatatgtcgctggaaagaacatgtgagcaaaaggccagcaaaaggccaggaaccgtaaaaaggccgcgttgctggcgtttttccataggctccgcccccctgacgagcatcacaaaaatcgacgctcaagtcagaggtggcgaaacccgacaggactataaagataccaggcgtttccccctggaagctccctcgtgcgctctcctgttccgaccctgccgcttaccggatacctgtccgcctttctcccttcgggaagcgtggcgctttctcatagctcacgctgtaggtatctcagttcggtgtaggtcgttcgctccaagctgggctgtgtgcacgaaccccccgttcagcccgaccgctgcgccttatccggtaactatcgtcttgagtccaacccggtaagacacgacttatcgccactggcagcagccactggtaacaggattagcagagcgaggtatgtaggcggtgctacagagttcttgaagtggtggcctaactacggctacactagaagaacagtatttggtatctgcgctctgctgaagccagttaccttcggaaaaagagttggtagctcttgatccggcaaacaaaccaccgctggtagcggtggtttttttgtttgcaagcagcagattacgcgcagaaaaaaaggatctcaagaagatcctttgatcttttctacggggtctgacgctctattcaacaaagccgccgtcccgtcaagtcagcgtaaatgggtagggggcttcaaatcgtcctcgtgataccaattcggagcctgcttttttgtacaaacttgttgataatggcaattcaaggatcttcacctagatccttttaaattaaaaatgaagttttaaatcaatctaaagtatatatgagtaaacttggtctgacagttaccaatgcttaatcagtgaggcacctatctcagcgatctgtctatttcgttcatccatagttgcctgactccccgtcgtgtagataactacgatacgggagggcttaccatctggccccagtgctgcaatgataccgcgagagccacgctcaccggctccagatttatcagcaataaaccagccagccggaagggccgagcgcagaagtggtcctgcaactttatccgcctccatccagtctattaattgttgccgggaagctagagtaagtagttcgccagttaatagtttgcgcaacgttgttgccattgctacaggcatcgtggtgtcacgctcgtcgtttggtatggcttcattcagctccggttcccaacgatcaaggcgagttacatgatcccccatgttgtgcaaaaaagcggttagctccttcggtcctccgatcgttgtcagaagtaagttggccgcagtgttatcactcatggttatggcagcactgcataattctcttactgtcatgccatccgtaagatgcttttctgtgactggtgagtactcaaccaagtcattctgagaatagtgtatgcggcgaccgagttgctcttgcccggcgtcaatacgggataataccgcgccacatagcagaactttaaaagtgctcatcattggaaaacgttcttcggggcgaaaactctcaaggatcttaccgctgttgagatccagttcgatgtaacccactcgtgcacccaactgatcttcagcatcttttactttcaccagcgtttctgggtgagcaaaaacaggaaggcaaaatgccgcaaaaaagggaataagggcgacacggaaatgttgaatactcatactcttcctttttcaatattattgaagcatttatcagggttattgtctcatgagcggatacatatttgaatgtatttagaaaaataaacaaataggggttccgcgcacatttccccgaaaagtgccagatacctgaaacaaaacccatcgtacggccaaggaagtctccaataactgtgatccaccacaagcgccagggttttcccagtcacgacgttgtaaaacgacggccagtcatgcataatccgcacgcatctggaataaggaagtgccattccgcctgaccttaatacgactcactatagggagaccctcgaaaaaaaacacaaacacccagtagcgaaagctgcaagagaatgaaaatccgttgaccttaaacggtcgtgtgggggctcgcagcaaacaccaaacaaaacaaacacaaaccaacaaaaattaaaacagcctgtgggttgatcccacccacaggcccattgggcgctagcactctggtatcacggtacctttgtgcgcctgttttataccccctcccccaactgtaacttagaagtaacacacaccgatcaacagtcagcgtggcacaccagccacgttttgatcaagcacttctgttaccccggactgagtatcaatagactgctcacgcggttgaaggagaaagcgttcgttatccggccaactacttcgaaaaacctagtaacaccgtggaagttgcagagtgtttcgctcagcactaccccagtgtagatcaggtcgatgagtcaccgcattccccacgggcgaccgtggcggtggctgcgttggcggcctgcccatggggaaacccatgggacgctctaatacagacatggtgcgaagagtctattgagctagttggtagtcctccggcccctgaatgcggctaatcctaactgcggagcacacaccctcaagccagagggcagtgtgtcgtaacgggcaactctgcagcggaaccgactactttgggtgtccgtgtttcattttattcctatactggctgcttatggtgacaattgagagatcgttaccatatagctattggattggccatccggtgactaatagagctattatatatccctttgttgggtttataccacttagcttgaaagaggttaaaacattacaattcattgttaagttgaatacagcaaaatggaagatgccaagaacatcaagaagggccctgctccattctaccctctggaagatggaacagccggcgagcagctgcacaaggccatgaagagatatgccctggtgcctggcacaatcgccttcacagatgcccacatcgaggtggacatcacctacgccgagtacttcgagatgtctgtgcggctggccgaagctatgaagcgctacggcctgaacaccaaccaccggatcgtcgtgtgcagcgagaacagcctgcagttcttcatgcctgtgctgggcgccctgttcatcggagttgctgtggcccctgccaacgacatctacaacgagcgcgagctgctgaacagcatgggcatctctcagcccaccgtggtgttcgtgtccaagaagggactgcagaaaatcctgaacgtgcagaagaagctgcccatcatccagaaaatcatcatcatggacagcaagaccgactaccagggcttccagagcatgtacaccttcgtgaccagccatctgccacctggcttcaacgagtacgacttcgtgcccgagagcttcgaccgggacaagacaatcgccctgatcatgaacagcagcggctctaccggactgcccaaaggtgttgccctgcctcatagaactgcctgcgtgcggtttagccacgccagagatcccatcttcggcaaccagatcatccccgacacagccatcctgagcgtggtgccttttcaccacggcttcggcatgttcaccacactgggctacctgatctgcggcttcagagtggtgctgatgtaccgcttcgaggaagaactgttcctgcggagcctgcaggactacaagatccagtctgctctgctggtgcctactctgttcagcttctttgccaagagcaccctgatcgataagtacgacctgagcaacctgcacgagatcgcctctggcggagcccctctgtctaaagaagtgggagaagccgtcgccaagcggttccatctgcctggcatcagacaaggctatggcctgaccgagacaaccagcgccattctgattacccctgagggcgacgataagcctggcgctgtgggaaaagtggtgccattcttcgaggccaaggtggtggatctggacaccggcaaaacactgggcgttaaccagaggggcgagctgtgtgttagaggccctatgatcatgagcggctacgtgaacaaccccgaggccacaaacgctctgatcgacaaggatggatggctgcacagcggcgacattgcctactgggacgaagatgagcacttcttcatcgtggaccggctgaagtccctgatcaagtacaagggctaccaggtggccccagccgagctggaatctattctgctgcaacaccccaacatcttcgatgccggcgttgcaggactgcccgatgatgatgctggcgaactgccagctgctgtggtggtgctggaacacggcaagaccatgaccgagaaagaaatcgtggactacgtggccagccaagtgaccaccgccaagaaactgagaggcggcgtggtgtttgtggacgaggtgccaaaaggcctgacaggcaagctggacgcccggaagatcagagagatcctgattaaggccaagaaaggcggcaagatcgccgtgtaatagctaactagacaaaacaccaaacaaacaagctgcgagccgctacggacttaaataattgagccttaaagaagaaattctttaagtggatgctctcaaactcagggaaacctaaatctagttatagacaaggcaatcctgagccaagccgaagtagtaattagtaagttaacaatagatgacttacaactaatcggaaggtgcagagactcgacgggagctaccctaacgtcaagacgagggtaaagagagagtccaattctcaaagccaataggaaaaacaaccaaaaaaaatctagatatcggatcccggg

SEQ ID NO: 3564 - DNA, 5061 bp, synthetic construct
  source 1..5061: mol_type = other DNA; note = Ana232 15ntIH
aggctaggtggaggctcagtgtgataagtctgcgatggtggatgcatgtgtcatggtcatagctgtttcctgtgtgaaattgttatccgctcagagggcacaatcctattccgcgctatccgacaatctccaagacattaggtggagttcagttcggcgtatggcatatgtcgctggaaagaacatgtgagcaaaaggccagcaaaaggccaggaaccgtaaaaaggccgcgttgctggcgtttttccataggctccgcccccctgacgagcatcacaaaaatcgacgctcaagtcagaggtggcgaaacccgacaggactataaagataccaggcgtttccccctggaagctccctcgtgcgctctcctgttccgaccctgccgcttaccggatacctgtccgcctttctcccttcgggaagcgtggcgctttctcatagctcacgctgtaggtatctcagttcggtgtaggtcgttcgctccaagctgggctgtgtgcacgaaccccccgttcagcccgaccgctgcgccttatccggtaactatcgtcttgagtccaacccggtaagacacgacttatcgccactggcagcagccactggtaacaggattagcagagcgaggtatgtaggcggtgctacagagttcttgaagtggtggcctaactacggctacactagaagaacagtatttggtatctgcgctctgctgaagccagttaccttcggaaaaagagttggtagctcttgatccggcaaacaaaccaccgctggtagcggtggtttttttgtttgcaagcagcagattacgcgcagaaaaaaaggatctcaagaagatcctttgatcttttctacggggtctgacgctctattcaacaaagccgccgtcccgtcaagtcagcgtaaatgggtagggggcttcaaatcgtcctcgtgataccaattcggagcctgcttttttgtacaaacttgttgataatggcaattcaaggatcttcacctagatccttttaaattaaaaatgaagttttaaatcaatctaaagtatatatgagtaaacttggtctgacagttaccaatgcttaatcagtgaggcacctatctcagcgatctgtctatttcgttcatccatagttgcctgactccccgtcgtgtagataactacgatacgggagggcttaccatctggccccagtgctgcaatgataccgcgagagccacgctcaccggctccagatttatcagcaataaaccagccagccggaagggccgagcgcagaagtggtcctgcaactttatccgcctccatccagtctattaattgttgccgggaagctagagtaagtagttcgccagttaatagtttgcgcaacgttgttgccattgctacaggcatcgtggtgtcacgctcgtcgtttggtatggcttcattcagctccggttcccaacgatcaaggcgagttacatgatcccccatgttgtgcaaaaaagcggttagctccttcggtcctccgatcgttgtcagaagtaagttggccgcagtgttatcactcatggttatggcagcactgcataattctcttactgtcatgccatccgtaagatgcttttctgtgactggtgagtactcaaccaagtcattctgagaatagtgtatgcggcgaccgagttgctcttgcccggcgtcaatacgggataataccgcgccacatagcagaactttaaaagtgctcatcattggaaaacgttcttcggggcgaaaactctcaaggatcttaccgctgttgagatccagttcgatgtaacccactcgtgcacccaactgatcttcagcatcttttactttcaccagcgtttctgggtgagcaaaaacaggaaggcaaaatgccgcaaaaaagggaataagggcgacacggaaatgttgaatactcatactcttcctttttcaatattattgaagcatttatcagggttattgtctcatgagcggatacatatttgaatgtatttagaaaaataaacaaataggggttccgcgcacatttccccgaaaagtgccagatacctgaaacaaaacccatcgtacggccaaggaagtctccaataactgtgatccaccacaagcgccagggttttcccagtcacgacgttgtaaaacgacggccagtcatgcataatccgcacgcatctggaataaggaagtgccattccgcctgaccttaatacgactcactatagggagaccctcgaaaaaaaacacaaacacccagtagcgaaagctgcaagagaatgaaaatccgtgagcacgccggcgccaaacaccaaacaaaacaaacacaaaccaacaaaaattaaaacagcctgtgggttgatcccacccacaggcccattgggcgctagcactctggtatcacggtacctttgtgcgcctgttttataccccctcccccaactgtaacttagaagtaacacacaccgatcaacagtcagcgtggcacaccagccacgttttgatcaagcacttctgttaccccggactgagtatcaatagactgctcacgcggttgaaggagaaagcgttcgttatccggccaactacttcgaaaaacctagtaacaccgtggaagttgcagagtgtttcgctcagcactaccccagtgtagatcaggtcgatgagtcaccgcattccccacgggcgaccgtggcggtggctgcgttggcggcctgcccatggggaaacccatgggacgctctaatacagacatggtgcgaagagtctattgagctagttggtagtcctccggcccctgaatgcggctaatcctaactgcggagcacacaccctcaagccagagggcagtgtgtcgtaacgggcaactctgcagcggaaccgactactttgggtgtccgtgtttcattttattcctatactggctgcttatggtgacaattgagagatcgttaccatatagctattggattggccatccggtgactaatagagctattatatatccctttgttgggtttataccacttagcttgaaagaggttaaaacattacaattcattgttaagttgaatacagcaaaatggaagatgccaagaacatcaagaagggccctgctccattctaccctctggaagatggaacagccggcgagcagctgcacaaggccatgaagagatatgccctggtgcctggcacaatcgccttcacagatgcccacatcgaggtggacatcacctacgccgagtacttcgagatgtctgtgcggctggccgaagctatgaagcgctacggcctgaacaccaaccaccggatcgtcgtgtgcagcgagaacagcctgcagttcttcatgcctgtgctgggcgccctgttcatcggagttgctgtggcccctgccaacgacatctacaacgagcgcgagctgctgaacagcatgggcatctctcagcccaccgtggtgttcgtgtccaagaagggactgcagaaaatcctgaacgtgcagaagaagctgcccatcatccagaaaatcatcatcatggacagcaagaccgactaccagggcttccagagcatgtacaccttcgtgaccagccatctgccacctggcttcaacgagtacgacttcgtgcccgagagcttcgaccgggacaagacaatcgccctgatcatgaacagcagcggctctaccggactgcccaaaggtgttgccctgcctcatagaactgcctgcgtgcggtttagccacgccagagatcccatcttcggcaaccagatcatccccgacacagccatcctgagcgtggtgccttttcaccacggcttcggcatgttcaccacactgggctacctgatctgcggcttcagagtggtgctgatgtaccgcttcgaggaagaactgttcctgcggagcctgcaggactacaagatccagtctgctctgctggtgcctactctgttcagcttctttgccaagagcaccctgatcgataagtacgacctgagcaacctgcacgagatcgcctctggcggagcccctctgtctaaagaagtgggagaagccgtcgccaagcggttccatctgcctggcatcagacaaggctatggcctgaccgagacaaccagcgccattctgattacccctgagggcgacgataagcctggcgctgtgggaaaagtggtgccattcttcgaggccaaggtggtggatctggacaccggcaaaacactgggcgttaaccagaggggcgagctgtgtgttagaggccctatgatcatgagcggctacgtgaacaaccccgaggccacaaacgctctgatcgacaaggatggatggctgcacagcggcgacattgcctactgggacgaagatgagcacttcttcatcgtggaccggctgaagtccctgatcaagtacaagggctaccaggtggccccagccgagctggaatctattctgctgcaacaccccaacatcttcgatgccggcgttgcaggactgcccgatgatgatgctggcgaactgccagctgctgtggtggtgctggaacacggcaagaccatgaccgagaaagaaatcgtggactacgtggccagccaagtgaccaccgccaagaaactgagaggcggcgtggtgtttgtggacgaggtgccaaaaggcctgacaggcaagctggacgcccggaagatcagagagatcctgattaaggccaagaaaggcggcaagatcgccgtgtaatagctaactagacaaaacaccaaacaaacaaggcgccggcgtgctcacggacttaaataattgagccttaaagaagaaattctttaagtggatgctctcaaactcagggaaacctaaatctagttatagacaaggcaatcctgagccaagccgaagtagtaattagtaagttaacaatagatgacttacaactaatcggaaggtgcagagactcgacgggagctaccctaacgtcaagacgagggtaaagagagagtccaattctcaaagccaataggaaaaacaaccaaaaaaaatctagatatcggatcccggg

SEQ ID NO: 3565 - DNA, 5131 bp, synthetic construct
  source 1..5131: mol_type = other DNA; note = Ana232 EH T60L40
aggctaggtggaggctcagtgtgataagtctgcgatggtggatgcatgtgtcatggtcatagctgtttcctgtgtgaaattgttatccgctcagagggcacaatcctattccgcgctatccgacaatctccaagacattaggtggagttcagttcggcgtatggcatatgtcgctggaaagaacatgtgagcaaaaggccagcaaaaggccaggaaccgtaaaaaggccgcgttgctggcgtttttccataggctccgcccccctgacgagcatcacaaaaatcgacgctcaagtcagaggtggcgaaacccgacaggactataaagataccaggcgtttccccctggaagctccctcgtgcgctctcctgttccgaccctgccgcttaccggatacctgtccgcctttctcccttcgggaagcgtggcgctttctcatagctcacgctgtaggtatctcagttcggtgtaggtcgttcgctccaagctgggctgtgtgcacgaaccccccgttcagcccgaccgctgcgccttatccggtaactatcgtcttgagtccaacccggtaagacacgacttatcgccactggcagcagccactggtaacaggattagcagagcgaggtatgtaggcggtgctacagagttcttgaagtggtggcctaactacggctacactagaagaacagtatttggtatctgcgctctgctgaagccagttaccttcggaaaaagagttggtagctcttgatccggcaaacaaaccaccgctggtagcggtggtttttttgtttgcaagcagcagattacgcgcagaaaaaaaggatctcaagaagatcctttgatcttttctacggggtctgacgctctattcaacaaagccgccgtcccgtcaagtcagcgtaaatgggtagggggcttcaaatcgtcctcgtgataccaattcggagcctgcttttttgtacaaacttgttgataatggcaattcaaggatcttcacctagatccttttaaattaaaaatgaagttttaaatcaatctaaagtatatatgagtaaacttggtctgacagttaccaatgcttaatcagtgaggcacctatctcagcgatctgtctatttcgttcatccatagttgcctgactccccgtcgtgtagataactacgatacgggagggcttaccatctggccccagtgctgcaatgataccgcgagagccacgctcaccggctccagatttatcagcaataaaccagccagccggaagggccgagcgcagaagtggtcctgcaactttatccgcctccatccagtctattaattgttgccgggaagctagagtaagtagttcgccagttaatagtttgcgcaacgttgttgccattgctacaggcatcgtggtgtcacgctcgtcgtttggtatggcttcattcagctccggttcccaacgatcaaggcgagttacatgatcccccatgttgtgcaaaaaagcggttagctccttcggtcctccgatcgttgtcagaagtaagttggccgcagtgttatcactcatggttatggcagcactgcataattctcttactgtcatgccatccgtaagatgcttttctgtgactggtgagtactcaaccaagtcattctgagaatagtgtatgcggcgaccgagttgctcttgcccggcgtcaatacgggataataccgcgccacatagcagaactttaaaagtgctcatcattggaaaacgttcttcggggcgaaaactctcaaggatcttaccgctgttgagatccagttcgatgtaacccactcgtgcacccaactgatcttcagcatcttttactttcaccagcgtttctgggtgagcaaaaacaggaaggcaaaatgccgcaaaaaagggaataagggcgacacggaaatgttgaatactcatactcttcctttttcaatattattgaagcatttatcagggttattgtctcatgagcggatacatatttgaatgtatttagaaaaataaacaaataggggttccgcgcacatttccccgaaaagtgccagatacctgaaacaaaacccatcgtacggccaaggaagtctccaataactgtgatccaccacaagcgccagggttttcccagtcacgacgttgtaaaacgacggccagtcatgcataatccgcacgcatctggaataaggaagtgccattccgcctgaccttaatacgactcactatagggagaccctcgaaaaaaaagcttcgaatgcgaccatctgctcaggctcaatctcgctcccacaaacacccagtagcgaaagctgcaagagaatgaaaatccgtggctcgcagcaaacaccaaacaaaacaaacacaaaccaacaaaaattaaaacagcctgtgggttgatcccacccacaggcccattgggcgctagcactctggtatcacggtacctttgtgcgcctgttttataccccctcccccaactgtaacttagaagtaacacacaccgatcaacagtcagcgtggcacaccagccacgttttgatcaagcacttctgttaccccggactgagtatcaatagactgctcacgcggttgaaggagaaagcgttcgttatccggccaactacttcgaaaaacctagtaacaccgtggaagttgcagagtgtttcgctcagcactaccccagtgtagatcaggtcgatgagtcaccgcattccccacgggcgaccgtggcggtggctgcgttggcggcctgcccatggggaaacccatgggacgctctaatacagacatggtgcgaagagtctattgagctagttggtagtcctccggcccctgaatgcggctaatcctaactgcggagcacacaccctcaagccagagggcagtgtgtcgtaacgggcaactctgcagcggaaccgactactttgggtgtccgtgtttcattttattcctatactggctgcttatggtgacaattgagagatcgttaccatatagctattggattggccatccggtgactaatagagctattatatatccctttgttgggtttataccacttagcttgaaagaggttaaaacattacaattcattgttaagttgaatacagcaaaatggaagatgccaagaacatcaagaagggccctgctccattctaccctctggaagatggaacagccggcgagcagctgcacaaggccatgaagagatatgccctggtgcctggcacaatcgccttcacagatgcccacatcgaggtggacatcacctacgccgagtacttcgagatgtctgtgcggctggccgaagctatgaagcgctacggcctgaacaccaaccaccggatcgtcgtgtgcagcgagaacagcctgcagttcttcatgcctgtgctgggcgccctgttcatcggagttgctgtggcccctgccaacgacatctacaacgagcgcgagctgctgaacagcatgggcatctctcagcccaccgtggtgttcgtgtccaagaagggactgcagaaaatcctgaacgtgcagaagaagctgcccatcatccagaaaatcatcatcatggacagcaagaccgactaccagggcttccagagcatgtacaccttcgtgaccagccatctgccacctggcttcaacgagtacgacttcgtgcccgagagcttcgaccgggacaagacaatcgccctgatcatgaacagcagcggctctaccggactgcccaaaggtgttgccctgcctcatagaactgcctgcgtgcggtttagccacgccagagatcccatcttcggcaaccagatcatccccgacacagccatcctgagcgtggtgccttttcaccacggcttcggcatgttcaccacactgggctacctgatctgcggcttcagagtggtgctgatgtaccgcttcgaggaagaactgttcctgcggagcctgcaggactacaagatccagtctgctctgctggtgcctactctgttcagcttctttgccaagagcaccctgatcgataagtacgacctgagcaacctgcacgagatcgcctctggcggagcccctctgtctaaagaagtgggagaagccgtcgccaagcggttccatctgcctggcatcagacaaggctatggcctgaccgagacaaccagcgccattctgattacccctgagggcgacgataagcctggcgctgtgggaaaagtggtgccattcttcgaggccaaggtggtggatctggacaccggcaaaacactgggcgttaaccagaggggcgagctgtgtgttagaggccctatgatcatgagcggctacgtgaacaaccccgaggccacaaacgctctgatcgacaaggatggatggctgcacagcggcgacattgcctactgggacgaagatgagcacttcttcatcgtggaccggctgaagtccctgatcaagtacaagggctaccaggtggccccagccgagctggaatctattctgctgcaacaccccaacatcttcgatgccggcgttgcaggactgcccgatgatgatgctggcgaactgccagctgctgtggtggtgctggaacacggcaagaccatgaccgagaaagaaatcgtggactacgtggccagccaagtgaccaccgccaagaaactgagaggcggcgtggtgtttgtggacgaggtgccaaaaggcctgacaggcaagctggacgcccggaagatcagagagatcctgattaaggccaagaaaggcggcaagatcgccgtgtaatagctaactagacaaaacaccaaacaaacaagctgcgagccacggacttaaataattgagccttaaagaagaaattctttaagtggatgctctcaaactcagggaaacctaaatctagttatagacaaggcaatcctgagccaagccgaagtagtaattagtaagttaacaatagatgacttacaactaatcggaaggtgcagagactcgacgggagctaccctaacgtcaagacgagggtaaagagagagtccaattctcaaagccaataggaaaaacaaccggagcgagattgagcctgagcagatggtcgcattcgaagcaaaaaaaatctagatatcggatcccggg

SEQ ID NO: 3566 - DNA, 5111 bp, synthetic construct
  source 1..5111: mol_type = other DNA; note = Ana232 EH T75L30
aggctaggtggaggctcagtgtgataagtctgcgatggtggatgcatgtgtcatggtcatagctgtttcctgtgtgaaattgttatccgctcagagggcacaatcctattccgcgctatccgacaatctccaagacattaggtggagttcagttcggcgtatggcatatgtcgctggaaagaacatgtgagcaaaaggccagcaaaaggccaggaaccgtaaaaaggccgcgttgctggcgtttttccataggctccgcccccctgacgagcatcacaaaaatcgacgctcaagtcagaggtggcgaaacccgacaggactataaagataccaggcgtttccccctggaagctccctcgtgcgctctcctgttccgaccctgccgcttaccggatacctgtccgcctttctcccttcgggaagcgtggcgctttctcatagctcacgctgtaggtatctcagttcggtgtaggtcgttcgctccaagctgggctgtgtgcacgaaccccccgttcagcccgaccgctgcgccttatccggtaactatcgtcttgagtccaacccggtaagacacgacttatcgccactggcagcagccactggtaacaggattagcagagcgaggtatgtaggcggtgctacagagttcttgaagtggtggcctaactacggctacactagaagaacagtatttggtatctgcgctctgctgaagccagttaccttcggaaaaagagttggtagctcttgatccggcaaacaaaccaccgctggtagcggtggtttttttgtttgcaagcagcagattacgcgcagaaaaaaaggatctcaagaagatcctttgatcttttctacggggtctgacgctctattcaacaaagccgccgtcccgtcaagtcagcgtaaatgggtagggggcttcaaatcgtcctcgtgataccaattcggagcctgcttttttgtacaaacttgttgataatggcaattcaaggatcttcacctagatccttttaaattaaaaatgaagttttaaatcaatctaaagtatatatgagtaaacttggtctgacagttaccaatgcttaatcagtgaggcacctatctcagcgatctgtctatttcgttcatccatagttgcctgactccccgtcgtgtagataactacgatacgggagggcttaccatctggccccagtgctgcaatgataccgcgagagccacgctcaccggctccagatttatcagcaataaaccagccagccggaagggccgagcgcagaagtggtcctgcaactttatccgcctccatccagtctattaattgttgccgggaagctagagtaagtagttcgccagttaatagtttgcgcaacgttgttgccattgctacaggcatcgtggtgtcacgctcgtcgtttggtatggcttcattcagctccggttcccaacgatcaaggcgagttacatgatcccccatgttgtgcaaaaaagcggttagctccttcggtcctccgatcgttgtcagaagtaagttggccgcagtgttatcactcatggttatggcagcactgcataattctcttactgtcatgccatccgtaagatgcttttctgtgactggtgagtactcaaccaagtcattctgagaatagtgtatgcggcgaccgagttgctcttgcccggcgtcaatacgggataataccgcgccacatagcagaactttaaaagtgctcatcattggaaaacgttcttcggggcgaaaactctcaaggatcttaccgctgttgagatccagttcgatgtaacccactcgtgcacccaactgatcttcagcatcttttactttcaccagcgtttctgggtgagcaaaaacaggaaggcaaaatgccgcaaaaaagggaataagggcgacacggaaatgttgaatactcatactcttcctttttcaatattattgaagcatttatcagggttattgtctcatgagcggatacatatttgaatgtatttagaaaaataaacaaataggggttccgcgcacatttccccgaaaagtgccagatacctgaaacaaaacccatcgtacggccaaggaagtctccaataactgtgatccaccacaagcgccagggttttcccagtcacgacgttgtaaaacgacggccagtcatgcataatccgcacgcatctggaataaggaagtgccattccgcctgaccttaatacgactcactatagggagaccctcgaaaaaaaagctcgcactggccggaagctcgtcggagcgcacaaacacccagtagcgaaagctgcaagagaatgaaaatccgtggctcgcagcaaacaccaaacaaaacaaacacaaaccaacaaaaattaaaacagcctgtgggttgatcccacccacaggcccattgggcgctagcactctggtatcacggtacctttgtgcgcctgttttataccccctcccccaactgtaacttagaagtaacacacaccgatcaacagtcagcgtggcacaccagccacgttttgatcaagcacttctgttaccccggactgagtatcaatagactgctcacgcggttgaaggagaaagcgttcgttatccggccaactacttcgaaaaacctagtaacaccgtggaagttgcagagtgtttcgctcagcactaccccagtgtagatcaggtcgatgagtcaccgcattccccacgggcgaccgtggcggtggctgcgttggcggcctgcccatggggaaacccatgggacgctctaatacagacatggtgcgaagagtctattgagctagttggtagtcctccggcccctgaatgcggctaatcctaactgcggagcacacaccctcaagccagagggcagtgtgtcgtaacgggcaactctgcagcggaaccgactactttgggtgtccgtgtttcattttattcctatactggctgcttatggtgacaattgagagatcgttaccatatagctattggattggccatccggtgactaatagagctattatatatccctttgttgggtttataccacttagcttgaaagaggttaaaacattacaattcattgttaagttgaatacagcaaaatggaagatgccaagaacatcaagaagggccctgctccattctaccctctggaagatggaacagccggcgagcagctgcacaaggccatgaagagatatgccctggtgcctggcacaatcgccttcacagatgcccacatcgaggtggacatcacctacgccgagtacttcgagatgtctgtgcggctggccgaagctatgaagcgctacggcctgaacaccaaccaccggatcgtcgtgtgcagcgagaacagcctgcagttcttcatgcctgtgctgggcgccctgttcatcggagttgctgtggcccctgccaacgacatctacaacgagcgcgagctgctgaacagcatgggcatctctcagcccaccgtggtgttcgtgtccaagaagggactgcagaaaatcctgaacgtgcagaagaagctgcccatcatccagaaaatcatcatcatggacagcaagaccgactaccagggcttccagagcatgtacaccttcgtgaccagccatctgccacctggcttcaacgagtacgacttcgtgcccgagagcttcgaccgggacaagacaatcgccctgatcatgaacagcagcggctctaccggactgcccaaaggtgttgccctgcctcatagaactgcctgcgtgcggtttagccacgccagagatcccatcttcggcaaccagatcatccccgacacagccatcctgagcgtggtgccttttcaccacggcttcggcatgttcaccacactgggctacctgatctgcggcttcagagtggtgctgatgtaccgcttcgaggaagaactgttcctgcggagcctgcaggactacaagatccagtctgctctgctggtgcctactctgttcagcttctttgccaagagcaccctgatcgataagtacgacctgagcaacctgcacgagatcgcctctggcggagcccctctgtctaaagaagtgggagaagccgtcgccaagcggttccatctgcctggcatcagacaaggctatggcctgaccgagacaaccagcgccattctgattacccctgagggcgacgataagcctggcgctgtgggaaaagtggtgccattcttcgaggccaaggtggtggatctggacaccggcaaaacactgggcgttaaccagaggggcgagctgtgtgttagaggccctatgatcatgagcggctacgtgaacaaccccgaggccacaaacgctctgatcgacaaggatggatggctgcacagcggcgacattgcctactgggacgaagatgagcacttcttcatcgtggaccggctgaagtccctgatcaagtacaagggctaccaggtggccccagccgagctggaatctattctgctgcaacaccccaacatcttcgatgccggcgttgcaggactgcccgatgatgatgctggcgaactgccagctgctgtggtggtgctggaacacggcaagaccatgaccgagaaagaaatcgtggactacgtggccagccaagtgaccaccgccaagaaactgagaggcggcgtggtgtttgtggacgaggtgccaaaaggcctgacaggcaagctggacgcccggaagatcagagagatcctgattaaggccaagaaaggcggcaagatcgccgtgtaatagctaactagacaaaacaccaaacaaacaagctgcgagccacggacttaaataattgagccttaaagaagaaattctttaagtggatgctctcaaactcagggaaacctaaatctagttatagacaaggcaatcctgagccaagccgaagtagtaattagtaagttaacaatagatgacttacaactaatcggaaggtgcagagactcgacgggagctaccctaacgtcaagacgagggtaaagagagagtccaattctcaaagccaataggaaaaacaacccgctccgacgagcttccggccagtgcgagcaaaaaaaatctagatatcggatcccggg

SEQ ID NO: 3567 - DNA, 5076 bp, synthetic construct
  source 1..5076: mol_type = other DNA; note = Ana232 40nt IS
aggctaggtggaggctcagtgtgataagtctgcgatggtggatgcatgtgtcatggtcatagctgtttcctgtgtgaaattgttatccgctcagagggcacaatcctattccgcgctatccgacaatctccaagacattaggtggagttcagttcggcgtatggcatatgtcgctggaaagaacatgtgagcaaaaggccagcaaaaggccaggaaccgtaaaaaggccgcgttgctggcgtttttccataggctccgcccccctgacgagcatcacaaaaatcgacgctcaagtcagaggtggcgaaacccgacaggactataaagataccaggcgtttccccctggaagctccctcgtgcgctctcctgttccgaccctgccgcttaccggatacctgtccgcctttctcccttcgggaagcgtggcgctttctcatagctcacgctgtaggtatctcagttcggtgtaggtcgttcgctccaagctgggctgtgtgcacgaaccccccgttcagcccgaccgctgcgccttatccggtaactatcgtcttgagtccaacccggtaagacacgacttatcgccactggcagcagccactggtaacaggattagcagagcgaggtatgtaggcggtgctacagagttcttgaagtggtggcctaactacggctacactagaagaacagtatttggtatctgcgctctgctgaagccagttaccttcggaaaaagagttggtagctcttgatccggcaaacaaaccaccgctggtagcggtggtttttttgtttgcaagcagcagattacgcgcagaaaaaaaggatctcaagaagatcctttgatcttttctacggggtctgacgctctattcaacaaagccgccgtcccgtcaagtcagcgtaaatgggtagggggcttcaaatcgtcctcgtgataccaattcggagcctgcttttttgtacaaacttgttgataatggcaattcaaggatcttcacctagatccttttaaattaaaaatgaagttttaaatcaatctaaagtatatatgagtaaacttggtctgacagttaccaatgcttaatcagtgaggcacctatctcagcgatctgtctatttcgttcatccatagttgcctgactccccgtcgtgtagataactacgatacgggagggcttaccatctggccccagtgctgcaatgataccgcgagagccacgctcaccggctccagatttatcagcaataaaccagccagccggaagggccgagcgcagaagtggtcctgcaactttatccgcctccatccagtctattaattgttgccgggaagctagagtaagtagttcgccagttaatagtttgcgcaacgttgttgccattgctacaggcatcgtggtgtcacgctcgtcgtttggtatggcttcattcagctccggttcccaacgatcaaggcgagttacatgatcccccatgttgtgcaaaaaagcggttagctccttcggtcctccgatcgttgtcagaagtaagttggccgcagtgttatcactcatggttatggcagcactgcataattctcttactgtcatgccatccgtaagatgcttttctgtgactggtgagtactcaaccaagtcattctgagaatagtgtatgcggcgaccgagttgctcttgcccggcgtcaatacgggataataccgcgccacatagcagaactttaaaagtgctcatcattggaaaacgttcttcggggcgaaaactctcaaggatcttaccgctgttgagatccagttcgatgtaacccactcgtgcacccaactgatcttcagcatcttttactttcaccagcgtttctgggtgagcaaaaacaggaaggcaaaatgccgcaaaaaagggaataagggcgacacggaaatgttgaatactcatactcttcctttttcaatattattgaagcatttatcagggttattgtctcatgagcggatacatatttgaatgtatttagaaaaataaacaaataggggttccgcgcacatttccccgaaaagtgccagatacctgaaacaaaacccatcgtacggccaaggaagtctccaataactgtgatccaccacaagcgccagggttttcccagtcacgacgttgtaaaacgacggccagtcatgcataatccgcacgcatctggaataaggaagtgccattccgcctgaccttaatacgactcactatagggagaccctcgaaaaaaaacacaaacacccagtagcgaaagctgcaagagaatgaaaatccgtggctcgcagcaataatgccacactaagagaacaaacaaagagctaagcaattaaaacagcctgtgggttgatcccacccacaggcccattgggcgctagcactctggtatcacggtacctttgtgcgcctgttttataccccctcccccaactgtaacttagaagtaacacacaccgatcaacagtcagcgtggcacaccagccacgttttgatcaagcacttctgttaccccggactgagtatcaatagactgctcacgcggttgaaggagaaagcgttcgttatccggccaactacttcgaaaaacctagtaacaccgtggaagttgcagagtgtttcgctcagcactaccccagtgtagatcaggtcgatgagtcaccgcattccccacgggcgaccgtggcggtggctgcgttggcggcctgcccatggggaaacccatgggacgctctaatacagacatggtgcgaagagtctattgagctagttggtagtcctccggcccctgaatgcggctaatcctaactgcggagcacacaccctcaagccagagggcagtgtgtcgtaacgggcaactctgcagcggaaccgactactttgggtgtccgtgtttcattttattcctatactggctgcttatggtgacaattgagagatcgttaccatatagctattggattggccatccggtgactaatagagctattatatatccctttgttgggtttataccacttagcttgaaagaggttaaaacattacaattcattgttaagttgaatacagcaaaatggaagatgccaagaacatcaagaagggccctgctccattctaccctctggaagatggaacagccggcgagcagctgcacaaggccatgaagagatatgccctggtgcctggcacaatcgccttcacagatgcccacatcgaggtggacatcacctacgccgagtacttcgagatgtctgtgcggctggccgaagctatgaagcgctacggcctgaacaccaaccaccggatcgtcgtgtgcagcgagaacagcctgcagttcttcatgcctgtgctgggcgccctgttcatcggagttgctgtggcccctgccaacgacatctacaacgagcgcgagctgctgaacagcatgggcatctctcagcccaccgtggtgttcgtgtccaagaagggactgcagaaaatcctgaacgtgcagaagaagctgcccatcatccagaaaatcatcatcatggacagcaagaccgactaccagggcttccagagcatgtacaccttcgtgaccagccatctgccacctggcttcaacgagtacgacttcgtgcccgagagcttcgaccgggacaagacaatcgccctgatcatgaacagcagcggctctaccggactgcccaaaggtgttgccctgcctcatagaactgcctgcgtgcggtttagccacgccagagatcccatcttcggcaaccagatcatccccgacacagccatcctgagcgtggtgccttttcaccacggcttcggcatgttcaccacactgggctacctgatctgcggcttcagagtggtgctgatgtaccgcttcgaggaagaactgttcctgcggagcctgcaggactacaagatccagtctgctctgctggtgcctactctgttcagcttctttgccaagagcaccctgatcgataagtacgacctgagcaacctgcacgagatcgcctctggcggagcccctctgtctaaagaagtgggagaagccgtcgccaagcggttccatctgcctggcatcagacaaggctatggcctgaccgagacaaccagcgccattctgattacccctgagggcgacgataagcctggcgctgtgggaaaagtggtgccattcttcgaggccaaggtggtggatctggacaccggcaaaacactgggcgttaaccagaggggcgagctgtgtgttagaggccctatgatcatgagcggctacgtgaacaaccccgaggccacaaacgctctgatcgacaaggatggatggctgcacagcggcgacattgcctactgggacgaagatgagcacttcttcatcgtggaccggctgaagtccctgatcaagtacaagggctaccaggtggccccagccgagctggaatctattctgctgcaacaccccaacatcttcgatgccggcgttgcaggactgcccgatgatgatgctggcgaactgccagctgctgtggtggtgctggaacacggcaagaccatgaccgagaaagaaatcgtggactacgtggccagccaagtgaccaccgccaagaaactgagaggcggcgtggtgtttgtggacgaggtgccaaaaggcctgacaggcaagctggacgcccggaagatcagagagatcctgattaaggccaagaaaggcggcaagatcgccgtgtaatagctaactagaataatgacacacgacaagaacaatcataccactaagcaagctgcgagccacggacttaaataattgagccttaaagaagaaattctttaagtggatgctctcaaactcagggaaacctaaatctagttatagacaaggcaatcctgagccaagccgaagtagtaattagtaagttaacaatagatgacttacaactaatcggaaggtgcagagactcgacgggagctaccctaacgtcaagacgagggtaaagagagagtccaattctcaaagccaataggaaaaacaaccaaaaaaaatctagatatcggatcccggg

SEQ ID NO: 3568 - DNA, 5036 bp, synthetic construct
  source 1..5036: mol_type = other DNA; note = Ana232 20nt IS
aggctaggtggaggctcagtgtgataagtctgcgatggtggatgcatgtgtcatggtcatagctgtttcctgtgtgaaattgttatccgctcagagggcacaatcctattccgcgctatccgacaatctccaagacattaggtggagttcagttcggcgtatggcatatgtcgctggaaagaacatgtgagcaaaaggccagcaaaaggccaggaaccgtaaaaaggccgcgttgctggcgtttttccataggctccgcccccctgacgagcatcacaaaaatcgacgctcaagtcagaggtggcgaaacccgacaggactataaagataccaggcgtttccccctggaagctccctcgtgcgctctcctgttccgaccctgccgcttaccggatacctgtccgcctttctcccttcgggaagcgtggcgctttctcatagctcacgctgtaggtatctcagttcggtgtaggtcgttcgctccaagctgggctgtgtgcacgaaccccccgttcagcccgaccgctgcgccttatccggtaactatcgtcttgagtccaacccggtaagacacgacttatcgccactggcagcagccactggtaacaggattagcagagcgaggtatgtaggcggtgctacagagttcttgaagtggtggcctaactacggctacactagaagaacagtatttggtatctgcgctctgctgaagccagttaccttcggaaaaagagttggtagctcttgatccggcaaacaaaccaccgctggtagcggtggtttttttgtttgcaagcagcagattacgcgcagaaaaaaaggatctcaagaagatcctttgatcttttctacggggtctgacgctctattcaacaaagccgccgtcccgtcaagtcagcgtaaatgggtagggggcttcaaatcgtcctcgtgataccaattcggagcctgcttttttgtacaaacttgttgataatggcaattcaaggatcttcacctagatccttttaaattaaaaatgaagttttaaatcaatctaaagtatatatgagtaaacttggtctgacagttaccaatgcttaatcagtgaggcacctatctcagcgatctgtctatttcgttcatccatagttgcctgactccccgtcgtgtagataactacgatacgggagggcttaccatctggccccagtgctgcaatgataccgcgagagccacgctcaccggctccagatttatcagcaataaaccagccagccggaagggccgagcgcagaagtggtcctgcaactttatccgcctccatccagtctattaattgttgccgggaagctagagtaagtagttcgccagttaatagtttgcgcaacgttgttgccattgctacaggcatcgtggtgtcacgctcgtcgtttggtatggcttcattcagctccggttcccaacgatcaaggcgagttacatgatcccccatgttgtgcaaaaaagcggttagctccttcggtcctccgatcgttgtcagaagtaagttggccgcagtgttatcactcatggttatggcagcactgcataattctcttactgtcatgccatccgtaagatgcttttctgtgactggtgagtactcaaccaagtcattctgagaatagtgtatgcggcgaccgagttgctcttgcccggcgtcaatacgggataataccgcgccacatagcagaactttaaaagtgctcatcattggaaaacgttcttcggggcgaaaactctcaaggatcttaccgctgttgagatccagttcgatgtaacccactcgtgcacccaactgatcttcagcatcttttactttcaccagcgtttctgggtgagcaaaaacaggaaggcaaaatgccgcaaaaaagggaataagggcgacacggaaatgttgaatactcatactcttcctttttcaatattattgaagcatttatcagggttattgtctcatgagcggatacatatttgaatgtatttagaaaaataaacaaataggggttccgcgcacatttccccgaaaagtgccagatacctgaaacaaaacccatcgtacggccaaggaagtctccaataactgtgatccaccacaagcgccagggttttcccagtcacgacgttgtaaaacgacggccagtcatgcataatccgcacgcatctggaataaggaagtgccattccgcctgaccttaatacgactcactatagggagaccctcgaaaaaaaacacaaacacccagtagcgaaagctgcaagagaatgaaaatccgtggctcgcagcagatccactacaagtaagatttaaaacagcctgtgggttgatcccacccacaggcccattgggcgctagcactctggtatcacggtacctttgtgcgcctgttttataccccctcccccaactgtaacttagaagtaacacacaccgatcaacagtcagcgtggcacaccagccacgttttgatcaagcacttctgttaccccggactgagtatcaatagactgctcacgcggttgaaggagaaagcgttcgttatccggccaactacttcgaaaaacctagtaacaccgtggaagttgcagagtgtttcgctcagcactaccccagtgtagatcaggtcgatgagtcaccgcattccccacgggcgaccgtggcggtggctgcgttggcggcctgcccatggggaaacccatgggacgctctaatacagacatggtgcgaagagtctattgagctagttggtagtcctccggcccctgaatgcggctaatcctaactgcggagcacacaccctcaagccagagggcagtgtgtcgtaacgggcaactctgcagcggaaccgactactttgggtgtccgtgtttcattttattcctatactggctgcttatggtgacaattgagagatcgttaccatatagctattggattggccatccggtgactaatagagctattatatatccctttgttgggtttataccacttagcttgaaagaggttaaaacattacaattcattgttaagttgaatacagcaaaatggaagatgccaagaacatcaagaagggccctgctccattctaccctctggaagatggaacagccggcgagcagctgcacaaggccatgaagagatatgccctggtgcctggcacaatcgccttcacagatgcccacatcgaggtggacatcacctacgccgagtacttcgagatgtctgtgcggctggccgaagctatgaagcgctacggcctgaacaccaaccaccggatcgtcgtgtgcagcgagaacagcctgcagttcttcatgcctgtgctgggcgccctgttcatcggagttgctgtggcccctgccaacgacatctacaacgagcgcgagctgctgaacagcatgggcatctctcagcccaccgtggtgttcgtgtccaagaagggactgcagaaaatcctgaacgtgcagaagaagctgcccatcatccagaaaatcatcatcatggacagcaagaccgactaccagggcttccagagcatgtacaccttcgtgaccagccatctgccacctggcttcaacgagtacgacttcgtgcccgagagcttcgaccgggacaagacaatcgccctgatcatgaacagcagcggctctaccggactgcccaaaggtgttgccctgcctcatagaactgcctgcgtgcggtttagccacgccagagatcccatcttcggcaaccagatcatccccgacacagccatcctgagcgtggtgccttttcaccacggcttcggcatgttcaccacactgggctacctgatctgcggcttcagagtggtgctgatgtaccgcttcgaggaagaactgttcctgcggagcctgcaggactacaagatccagtctgctctgctggtgcctactctgttcagcttctttgccaagagcaccctgatcgataagtacgacctgagcaacctgcacgagatcgcctctggcggagcccctctgtctaaagaagtgggagaagccgtcgccaagcggttccatctgcctggcatcagacaaggctatggcctgaccgagacaaccagcgccattctgattacccctgagggcgacgataagcctggcgctgtgggaaaagtggtgccattcttcgaggccaaggtggtggatctggacaccggcaaaacactgggcgttaaccagaggggcgagctgtgtgttagaggccctatgatcatgagcggctacgtgaacaaccccgaggccacaaacgctctgatcgacaaggatggatggctgcacagcggcgacattgcctactgggacgaagatgagcacttcttcatcgtggaccggctgaagtccctgatcaagtacaagggctaccaggtggccccagccgagctggaatctattctgctgcaacaccccaacatcttcgatgccggcgttgcaggactgcccgatgatgatgctggcgaactgccagctgctgtggtggtgctggaacacggcaagaccatgaccgagaaagaaatcgtggactacgtggccagccaagtgaccaccgccaagaaactgagaggcggcgtggtgtttgtggacgaggtgccaaaaggcctgacaggcaagctggacgcccggaagatcagagagatcctgattaaggccaagaaaggcggcaagatcgccgtgtaatagctaactagagatagaatccaactaacctgctgcgagccacggacttaaataattgagccttaaagaagaaattctttaagtggatgctctcaaactcagggaaacctaaatctagttatagacaaggcaatcctgagccaagccgaagtagtaattagtaagttaacaatagatgacttacaactaatcggaaggtgcagagactcgacgggagctaccctaacgtcaagacgagggtaaagagagagtccaattctcaaagccaataggaaaaacaaccaaaaaaaatctagatatcggatcccggg

SEQ ID NO: 3569 - DNA, 5109 bp, synthetic construct
  source 1..5109: mol_type = other DNA; note = Ana232 40nt ES
aggctaggtggaggctcagtgtgataagtctgcgatggtggatgcatgtgtcatggtcatagctgtttcctgtgtgaaattgttatccgctcagagggcacaatcctattccgcgctatccgacaatctccaagacattaggtggagttcagttcggcgtatggcatatgtcgctggaaagaacatgtgagcaaaaggccagcaaaaggccaggaaccgtaaaaaggccgcgttgctggcgtttttccataggctccgcccccctgacgagcatcacaaaaatcgacgctcaagtcagaggtggcgaaacccgacaggactataaagataccaggcgtttccccctggaagctccctcgtgcgctctcctgttccgaccctgccgcttaccggatacctgtccgcctttctcccttcgggaagcgtggcgctttctcatagctcacgctgtaggtatctcagttcggtgtaggtcgttcgctccaagctgggctgtgtgcacgaaccccccgttcagcccgaccgctgcgccttatccggtaactatcgtcttgagtccaacccggtaagacacgacttatcgccactggcagcagccactggtaacaggattagcagagcgaggtatgtaggcggtgctacagagttcttgaagtggtggcctaactacggctacactagaagaacagtatttggtatctgcgctctgctgaagccagttaccttcggaaaaagagttggtagctcttgatccggcaaacaaaccaccgctggtagcggtggtttttttgtttgcaagcagcagattacgcgcagaaaaaaaggatctcaagaagatcctttgatcttttctacggggtctgacgctctattcaacaaagccgccgtcccgtcaagtcagcgtaaatgggtagggggcttcaaatcgtcctcgtgataccaattcggagcctgcttttttgtacaaacttgttgataatggcaattcaaggatcttcacctagatccttttaaattaaaaatgaagttttaaatcaatctaaagtatatatgagtaaacttggtctgacagttaccaatgcttaatcagtgaggcacctatctcagcgatctgtctatttcgttcatccatagttgcctgactccccgtcgtgtagataactacgatacgggagggcttaccatctggccccagtgctgcaatgataccgcgagagccacgctcaccggctccagatttatcagcaataaaccagccagccggaagggccgagcgcagaagtggtcctgcaactttatccgcctccatccagtctattaattgttgccgggaagctagagtaagtagttcgccagttaatagtttgcgcaacgttgttgccattgctacaggcatcgtggtgtcacgctcgtcgtttggtatggcttcattcagctccggttcccaacgatcaaggcgagttacatgatcccccatgttgtgcaaaaaagcggttagctccttcggtcctccgatcgttgtcagaagtaagttggccgcagtgttatcactcatggttatggcagcactgcataattctcttactgtcatgccatccgtaagatgcttttctgtgactggtgagtactcaaccaagtcattctgagaatagtgtatgcggcgaccgagttgctcttgcccggcgtcaatacgggataataccgcgccacatagcagaactttaaaagtgctcatcattggaaaacgttcttcggggcgaaaactctcaaggatcttaccgctgttgagatccagttcgatgtaacccactcgtgcacccaactgatcttcagcatcttttactttcaccagcgtttctgggtgagcaaaaacaggaaggcaaaatgccgcaaaaaagggaataagggcgacacggaaatgttgaatactcatactcttcctttttcaatattattgaagcatttatcagggttattgtctcatgagcggatacatatttgaatgtatttagaaaaataaacaaataggggttccgcgcacatttccccgaaaagtgccagatacctgaaacaaaacccatcgtacggccaaggaagtctccaataactgtgatccaccacaagcgccagggttttcccagtcacgacgttgtaaaacgacggccagtcatgcataatccgcacgcatctggaataaggaagtgccattccgcctgaccttaatacgactcactatagggagaccctcgaaaaaaaaataatgacacactacgagaacaaccatagaactaagcaacagtagcgaaagctgcaagagaatgaaaatccgtggctcgcagcaaacaccaaacaaaacaaacacaaaccaacaaaaattaaaacagcctgtgggttgatcccacccacaggcccattgggcgctagcactctggtatcacggtacctttgtgcgcctgttttataccccctcccccaactgtaacttagaagtaacacacaccgatcaacagtcagcgtggcacaccagccacgttttgatcaagcacttctgttaccccggactgagtatcaatagactgctcacgcggttgaaggagaaagcgttcgttatccggccaactacttcgaaaaacctagtaacaccgtggaagttgcagagtgtttcgctcagcactaccccagtgtagatcaggtcgatgagtcaccgcattccccacgggcgaccgtggcggtggctgcgttggcggcctgcccatggggaaacccatgggacgctctaatacagacatggtgcgaagagtctattgagctagttggtagtcctccggcccctgaatgcggctaatcctaactgcggagcacacaccctcaagccagagggcagtgtgtcgtaacgggcaactctgcagcggaaccgactactttgggtgtccgtgtttcattttattcctatactggctgcttatggtgacaattgagagatcgttaccatatagctattggattggccatccggtgactaatagagctattatatatccctttgttgggtttataccacttagcttgaaagaggttaaaacattacaattcattgttaagttgaatacagcaaaatggaagatgccaagaacatcaagaagggccctgctccattctaccctctggaagatggaacagccggcgagcagctgcacaaggccatgaagagatatgccctggtgcctggcacaatcgccttcacagatgcccacatcgaggtggacatcacctacgccgagtacttcgagatgtctgtgcggctggccgaagctatgaagcgctacggcctgaacaccaaccaccggatcgtcgtgtgcagcgagaacagcctgcagttcttcatgcctgtgctgggcgccctgttcatcggagttgctgtggcccctgccaacgacatctacaacgagcgcgagctgctgaacagcatgggcatctctcagcccaccgtggtgttcgtgtccaagaagggactgcagaaaatcctgaacgtgcagaagaagctgcccatcatccagaaaatcatcatcatggacagcaagaccgactaccagggcttccagagcatgtacaccttcgtgaccagccatctgccacctggcttcaacgagtacgacttcgtgcccgagagcttcgaccgggacaagacaatcgccctgatcatgaacagcagcggctctaccggactgcccaaaggtgttgccctgcctcatagaactgcctgcgtgcggtttagccacgccagagatcccatcttcggcaaccagatcatccccgacacagccatcctgagcgtggtgccttttcaccacggcttcggcatgttcaccacactgggctacctgatctgcggcttcagagtggtgctgatgtaccgcttcgaggaagaactgttcctgcggagcctgcaggactacaagatccagtctgctctgctggtgcctactctgttcagcttctttgccaagagcaccctgatcgataagtacgacctgagcaacctgcacgagatcgcctctggcggagcccctctgtctaaagaagtgggagaagccgtcgccaagcggttccatctgcctggcatcagacaaggctatggcctgaccgagacaaccagcgccattctgattacccctgagggcgacgataagcctggcgctgtgggaaaagtggtgccattcttcgaggccaaggtggtggatctggacaccggcaaaacactgggcgttaaccagaggggcgagctgtgtgttagaggccctatgatcatgagcggctacgtgaacaaccccgaggccacaaacgctctgatcgacaaggatggatggctgcacagcggcgacattgcctactgggacgaagatgagcacttcttcatcgtggaccggctgaagtccctgatcaagtacaagggctaccaggtggccccagccgagctggaatctattctgctgcaacaccccaacatcttcgatgccggcgttgcaggactgcccgatgatgatgctggcgaactgccagctgctgtggtggtgctggaacacggcaagaccatgaccgagaaagaaatcgtggactacgtggccagccaagtgaccaccgccaagaaactgagaggcggcgtggtgtttgtggacgaggtgccaaaaggcctgacaggcaagctggacgcccggaagatcagagagatcctgattaaggccaagaaaggcggcaagatcgccgtgtaatagctaactagacaaaacaccaaacaaacaagctgcgagccacggacttaaataattgagccttaaagaagaaattctttaagtggatgctctcaaactcagggaaacctaaatctagttatagacaaggcaatcctgagccaagccgaagtagtaattagtaagttaacaatagatgacttacaactaatcggaaggtgcagagactcgacgggagctaccctaacgtcaagacgagggtaaagagagagtccaattctcaaagccaataggaataatgaaagactacgagatcaaccatagagctaaccaaaaaaaaatctagatatcggatcccggg

SEQ ID NO: 3570 - DNA, 5071 bp, synthetic construct
  source 1..5071: mol_type = other DNA; note = Ana232 20nt ES
aggctaggtggaggctcagtgtgataagtctgcgatggtggatgcatgtgtcatggtcatagctgtttcctgtgtgaaattgttatccgctcagagggcacaatcctattccgcgctatccgacaatctccaagacattaggtggagttcagttcggcgtatggcatatgtcgctggaaagaacatgtgagcaaaaggccagcaaaaggccaggaaccgtaaaaaggccgcgttgctggcgtttttccataggctccgcccccctgacgagcatcacaaaaatcgacgctcaagtcagaggtggcgaaacccgacaggactataaagataccaggcgtttccccctggaagctccctcgtgcgctctcctgttccgaccctgccgcttaccggatacctgtccgcctttctcccttcgggaagcgtggcgctttctcatagctcacgctgtaggtatctcagttcggtgtaggtcgttcgctccaagctgggctgtgtgcacgaaccccccgttcagcccgaccgctgcgccttatccggtaactatcgtcttgagtccaacccggtaagacacgacttatcgccactggcagcagccactggtaacaggattagcagagcgaggtatgtaggcggtgctacagagttcttgaagtggtggcctaactacggctacactagaagaacagtatttggtatctgcgctctgctgaagccagttaccttcggaaaaagagttggtagctcttgatccggcaaacaaaccaccgctggtagcggtggtttttttgtttgcaagcagcagattacgcgcagaaaaaaaggatctcaagaagatcctttgatcttttctacggggtctgacgctctattcaacaaagccgccgtcccgtcaagtcagcgtaaatgggtagggggcttcaaatcgtcctcgtgataccaattcggagcctgcttttttgtacaaacttgttgataatggcaattcaaggatcttcacctagatccttttaaattaaaaatgaagttttaaatcaatctaaagtatatatgagtaaacttggtctgacagttaccaatgcttaatcagtgaggcacctatctcagcgatctgtctatttcgttcatccatagttgcctgactccccgtcgtgtagataactacgatacgggagggcttaccatctggccccagtgctgcaatgataccgcgagagccacgctcaccggctccagatttatcagcaataaaccagccagccggaagggccgagcgcagaagtggtcctgcaactttatccgcctccatccagtctattaattgttgccgggaagctagagtaagtagttcgccagttaatagtttgcgcaacgttgttgccattgctacaggcatcgtggtgtcacgctcgtcgtttggtatggcttcattcagctccggttcccaacgatcaaggcgagttacatgatcccccatgttgtgcaaaaaagcggttagctccttcggtcctccgatcgttgtcagaagtaagttggccgcagtgttatcactcatggttatggcagcactgcataattctcttactgtcatgccatccgtaagatgcttttctgtgactggtgagtactcaaccaagtcattctgagaatagtgtatgcggcgaccgagttgctcttgcccggcgtcaatacgggataataccgcgccacatagcagaactttaaaagtgctcatcattggaaaacgttcttcggggcgaaaactctcaaggatcttaccgctgttgagatccagttcgatgtaacccactcgtgcacccaactgatcttcagcatcttttactttcaccagcgtttctgggtgagcaaaaacaggaaggcaaaatgccgcaaaaaagggaataagggcgacacggaaatgttgaatactcatactcttcctttttcaatattattgaagcatttatcagggttattgtctcatgagcggatacatatttgaatgtatttagaaaaataaacaaataggggttccgcgcacatttccccgaaaagtgccagatacctgaaacaaaacccatcgtacggccaaggaagtctccaataactgtgatccaccacaagcgccagggttttcccagtcacgacgttgtaaaacgacggccagtcatgcataatccgcacgcatctggaataaggaagtgccattccgcctgaccttaatacgactcactatagggagaccctcgaaaaaaaaagatacacttcaactaagctcagtagcgaaagctgcaagagaatgaaaatccgtggctcgcagcaaacaccaaacaaaacaaacacaaaccaacaaaaattaaaacagcctgtgggttgatcccacccacaggcccattgggcgctagcactctggtatcacggtacctttgtgcgcctgttttataccccctcccccaactgtaacttagaagtaacacacaccgatcaacagtcagcgtggcacaccagccacgttttgatcaagcacttctgttaccccggactgagtatcaatagactgctcacgcggttgaaggagaaagcgttcgttatccggccaactacttcgaaaaacctagtaacaccgtggaagttgcagagtgtttcgctcagcactaccccagtgtagatcaggtcgatgagtcaccgcattccccacgggcgaccgtggcggtggctgcgttggcggcctgcccatggggaaacccatgggacgctctaatacagacatggtgcgaagagtctattgagctagttggtagtcctccggcccctgaatgcggctaatcctaactgcggagcacacaccctcaagccagagggcagtgtgtcgtaacgggcaactctgcagcggaaccgactactttgggtgtccgtgtttcattttattcctatactggctgcttatggtgacaattgagagatcgttaccatatagctattggattggccatccggtgactaatagagctattatatatccctttgttgggtttataccacttagcttgaaagaggttaaaacattacaattcattgttaagttgaatacagcaaaatggaagatgccaagaacatcaagaagggccctgctccattctaccctctggaagatggaacagccggcgagcagctgcacaaggccatgaagagatatgccctggtgcctggcacaatcgccttcacagatgcccacatcgaggtggacatcacctacgccgagtacttcgagatgtctgtgcggctggccgaagctatgaagcgctacggcctgaacaccaaccaccggatcgtcgtgtgcagcgagaacagcctgcagttcttcatgcctgtgctgggcgccctgttcatcggagttgctgtggcccctgccaacgacatctacaacgagcgcgagctgctgaacagcatgggcatctctcagcccaccgtggtgttcgtgtccaagaagggactgcagaaaatcctgaacgtgcagaagaagctgcccatcatccagaaaatcatcatcatggacagcaagaccgactaccagggcttccagagcatgtacaccttcgtgaccagccatctgccacctggcttcaacgagtacgacttcgtgcccgagagcttcgaccgggacaagacaatcgccctgatcatgaacagcagcggctctaccggactgcccaaaggtgttgccctgcctcatagaactgcctgcgtgcggtttagccacgccagagatcccatcttcggcaaccagatcatccccgacacagccatcctgagcgtggtgccttttcaccacggcttcggcatgttcaccacactgggctacctgatctgcggcttcagagtggtgctgatgtaccgcttcgaggaagaactgttcctgcggagcctgcaggactacaagatccagtctgctctgctggtgcctactctgttcagcttctttgccaagagcaccctgatcgataagtacgacctgagcaacctgcacgagatcgcctctggcggagcccctctgtctaaagaagtgggagaagccgtcgccaagcggttccatctgcctggcatcagacaaggctatggcctgaccgagacaaccagcgccattctgattacccctgagggcgacgataagcctggcgctgtgggaaaagtggtgccattcttcgaggccaaggtggtggatctggacaccggcaaaacactgggcgttaaccagaggggcgagctgtgtgttagaggccctatgatcatgagcggctacgtgaacaaccccgaggccacaaacgctctgatcgacaaggatggatggctgcacagcggcgacattgcctactgggacgaagatgagcacttcttcatcgtggaccggctgaagtccctgatcaagtacaagggctaccaggtggccccagccgagctggaatctattctgctgcaacaccccaacatcttcgatgccggcgttgcaggactgcccgatgatgatgctggcgaactgccagctgctgtggtggtgctggaacacggcaagaccatgaccgagaaagaaatcgtggactacgtggccagccaagtgaccaccgccaagaaactgagaggcggcgtggtgtttgtggacgaggtgccaaaaggcctgacaggcaagctggacgcccggaagatcagagagatcctgattaaggccaagaaaggcggcaagatcgccgtgtaatagctaactagacaaaacaccaaacaaacaagctgcgagccacggacttaaataattgagccttaaagaagaaattctttaagtggatgctctcaaactcagggaaacctaaatctagttatagacaaggcaatcctgagccaagccgaagtagtaattagtaagttaacaatagatgacttacaactaatcggaaggtgcagagactcgacgggagctaccctaacgtcaagacgagggtaaagagagagtccaattctcaaagccaataggacatacacatgaacttagctaaaaaaaatctagatatcggatcccggg

SEQ ID NO: 3571 - DNA, 5251 bp, synthetic construct
  source 1..5251: mol_type = other DNA; note = Ana232 rational design
aggctaggtggaggctcagtgtgataagtctgcgatggtggatgcatgtgtcatggtcatagctgtttcctgtgtgaaattgttatccgctcagagggcacaatcctattccgcgctatccgacaatctccaagacattaggtggagttcagttcggcgtatggcatatgtcgctggaaagaacatgtgagcaaaaggccagcaaaaggccaggaaccgtaaaaaggccgcgttgctggcgtttttccataggctccgcccccctgacgagcatcacaaaaatcgacgctcaagtcagaggtggcgaaacccgacaggactataaagataccaggcgtttccccctggaagctccctcgtgcgctctcctgttccgaccctgccgcttaccggatacctgtccgcctttctcccttcgggaagcgtggcgctttctcatagctcacgctgtaggtatctcagttcggtgtaggtcgttcgctccaagctgggctgtgtgcacgaaccccccgttcagcccgaccgctgcgccttatccggtaactatcgtcttgagtccaacccggtaagacacgacttatcgccactggcagcagccactggtaacaggattagcagagcgaggtatgtaggcggtgctacagagttcttgaagtggtggcctaactacggctacactagaagaacagtatttggtatctgcgctctgctgaagccagttaccttcggaaaaagagttggtagctcttgatccggcaaacaaaccaccgctggtagcggtggtttttttgtttgcaagcagcagattacgcgcagaaaaaaaggatctcaagaagatcctttgatcttttctacggggtctgacgctctattcaacaaagccgccgtcccgtcaagtcagcgtaaatgggtagggggcttcaaatcgtcctcgtgataccaattcggagcctgcttttttgtacaaacttgttgataatggcaattcaaggatcttcacctagatccttttaaattaaaaatgaagttttaaatcaatctaaagtatatatgagtaaacttggtctgacagttaccaatgcttaatcagtgaggcacctatctcagcgatctgtctatttcgttcatccatagttgcctgactccccgtcgtgtagataactacgatacgggagggcttaccatctggccccagtgctgcaatgataccgcgagagccacgctcaccggctccagatttatcagcaataaaccagccagccggaagggccgagcgcagaagtggtcctgcaactttatccgcctccatccagtctattaattgttgccgggaagctagagtaagtagttcgccagttaatagtttgcgcaacgttgttgccattgctacaggcatcgtggtgtcacgctcgtcgtttggtatggcttcattcagctccggttcccaacgatcaaggcgagttacatgatcccccatgttgtgcaaaaaagcggttagctccttcggtcctccgatcgttgtcagaagtaagttggccgcagtgttatcactcatggttatggcagcactgcataattctcttactgtcatgccatccgtaagatgcttttctgtgactggtgagtactcaaccaagtcattctgagaatagtgtatgcggcgaccgagttgctcttgcccggcgtcaatacgggataataccgcgccacatagcagaactttaaaagtgctcatcattggaaaacgttcttcggggcgaaaactctcaaggatcttaccgctgttgagatccagttcgatgtaacccactcgtgcacccaactgatcttcagcatcttttactttcaccagcgtttctgggtgagcaaaaacaggaaggcaaaatgccgcaaaaaagggaataagggcgacacggaaatgttgaatactcatactcttcctttttcaatattattgaagcatttatcagggttattgtctcatgagcggatacatatttgaatgtatttagaaaaataaacaaataggggttccgcgcacatttccccgaaaagtgccagatacctgaaacaaaacccatcgtacggccaaggaagtctccaataactgtgatccaccacaagcgccagggttttcccagtcacgacgttgtaaaacgacggccagtcatgcataatccgcacgcatctggaataaggaagtgccattccgcctgaccttaatacgactcactatagggagaccctcgaaaaaaaagcttcgaatgcgaccatctgctcaggctcaatctcgctccaataatgacacactacgagaacaaccatagaactaagcaacagtagcgaaagctgcaagagaatgaaaatccgttgaccttaaacggtcgtgtggggagcacgccggcgccaataatgccacactaagagaacaaacaaagagctaagcaattaaaacagcctgtgggttgatcccacccacaggcccattgggcgctagcactctggtatcacggtacctttgtgcgcctgttttataccccctcccccaactgtaacttagaagtaacacacaccgatcaacagtcagcgtggcacaccagccacgttttgatcaagcacttctgttaccccggactgagtatcaatagactgctcacgcggttgaaggagaaagcgttcgttatccggccaactacttcgaaaaacctagtaacaccgtggaagttgcagagtgtttcgctcagcactaccccagtgtagatcaggtcgatgagtcaccgcattccccacgggcgaccgtggcggtggctgcgttggcggcctgcccatggggaaacccatgggacgctctaatacagacatggtgcgaagagtctattgagctagttggtagtcctccggcccctgaatgcggctaatcctaactgcggagcacacaccctcaagccagagggcagtgtgtcgtaacgggcaactctgcagcggaaccgactactttgggtgtccgtgtttcattttattcctatactggctgcttatggtgacaattgagagatcgttaccatatagctattggattggccatccggtgactaatagagctattatatatccctttgttgggtttataccacttagcttgaaagaggttaaaacattacaattcattgttaagttgaatacagcaaaatggaagatgccaagaacatcaagaagggccctgctccattctaccctctggaagatggaacagccggcgagcagctgcacaaggccatgaagagatatgccctggtgcctggcacaatcgccttcacagatgcccacatcgaggtggacatcacctacgccgagtacttcgagatgtctgtgcggctggccgaagctatgaagcgctacggcctgaacaccaaccaccggatcgtcgtgtgcagcgagaacagcctgcagttcttcatgcctgtgctgggcgccctgttcatcggagttgctgtggcccctgccaacgacatctacaacgagcgcgagctgctgaacagcatgggcatctctcagcccaccgtggtgttcgtgtccaagaagggactgcagaaaatcctgaacgtgcagaagaagctgcccatcatccagaaaatcatcatcatggacagcaagaccgactaccagggcttccagagcatgtacaccttcgtgaccagccatctgccacctggcttcaacgagtacgacttcgtgcccgagagcttcgaccgggacaagacaatcgccctgatcatgaacagcagcggctctaccggactgcccaaaggtgttgccctgcctcatagaactgcctgcgtgcggtttagccacgccagagatcccatcttcggcaaccagatcatccccgacacagccatcctgagcgtggtgccttttcaccacggcttcggcatgttcaccacactgggctacctgatctgcggcttcagagtggtgctgatgtaccgcttcgaggaagaactgttcctgcggagcctgcaggactacaagatccagtctgctctgctggtgcctactctgttcagcttctttgccaagagcaccctgatcgataagtacgacctgagcaacctgcacgagatcgcctctggcggagcccctctgtctaaagaagtgggagaagccgtcgccaagcggttccatctgcctggcatcagacaaggctatggcctgaccgagacaaccagcgccattctgattacccctgagggcgacgataagcctggcgctgtgggaaaagtggtgccattcttcgaggccaaggtggtggatctggacaccggcaaaacactgggcgttaaccagaggggcgagctgtgtgttagaggccctatgatcatgagcggctacgtgaacaaccccgaggccacaaacgctctgatcgacaaggatggatggctgcacagcggcgacattgcctactgggacgaagatgagcacttcttcatcgtggaccggctgaagtccctgatcaagtacaagggctaccaggtggccccagccgagctggaatctattctgctgcaacaccccaacatcttcgatgccggcgttgcaggactgcccgatgatgatgctggcgaactgccagctgctgtggtggtgctggaacacggcaagaccatgaccgagaaagaaatcgtggactacgtggccagccaagtgaccaccgccaagaaactgagaggcggcgtggtgtttgtggacgaggtgccaaaaggcctgacaggcaagctggacgcccggaagatcagagagatcctgattaaggccaagaaaggcggcaagatcgccgtgtaatagctaactagaataatgacacacgacaagaacaatcataccactaagcaaggcgccggcgtgctcgctacggacttaaataattgagccttaaagaagaaattctttaagtggatgctctcaaactcagggaaacctaaatctagttatagacaaggcaatcctgagccaagccgaagtagtaattagtaagttaacaatagatgacttacaactaatcggaaggtgcagagactcgacgggagctaccctaacgtcaagacgagggtaaagagagagtccaattctcaaagccaataggaataatgaaagactacgagatcaaccatagagctaaccaaggagcgagattgagcctgagcagatggtcgcattcgaagcaaaaaaaatctagatatcggatcccggg

SEQ ID NO: 3572 - DNA, 3751 bp, synthetic construct
  source 1..3751: mol_type = other DNA; note = Anabaena L9a5
atgggagtgaaggtgctgttcgccctgatctgtattgccgtggccgaggccaagcctaccgagaacaacgaggacttcaacatcgtggccgtggcctccaatttcgccaccacagatctggacgccgacagaggaaagctgcccggcaagaagctgcctctggaagtgctgaaagagatggaagccaacgccagaaaggccggctgtaccagaggctgtctgatctgcctgagccacatcaagtgcacccctaagatgaagaagttcatccccggcagatgccacacctacgagggcgacaaagaatctgcccaaggcggaatcggagaggccatcgtggatatccctgagatccccggcttcaaggacctggaacctatggaacagtttatcgcccaggtggacctgtgcgtggactgtacaacaggctgcctgaaaggcctggccaacgtgcagtgtagcgacctgctgaagaagtggctgcctcagagatgcgccaccttcgcctctaagatccagggccaagtggacaagatcaaaggcgctggcggcgactaatagctaactagacaaaacaccaaacaaacaagctgcgagccacggacttaaataattgagccttaaagaagaaattctttaagtggatgctctcaaactcagggaaacctaaatctagttatagacaaggcaatcctgagccaagccgaagtagtaattagtaagttaacaatagatgacttacaactaatcggaaggtgcagagactcgacgggagctaccctaacgtcaagacgagggtaaagagagagtccaattctcaaagccaatatcaacagtaagtctagatatcggatcccgggaggctaggtggaggctcagtgtgataagtctgcgatggtggatgcatgtgtcatggtcatagctgtttcctgtgtgaaattgttatccgctcagagggcacaatcctattccgcgctatccgacaatctccaagacattaggtggagttcagttcggcgtatggcatatgtcgctggaaagaacatgtgagcaaaaggccagcaaaaggccaggaaccgtaaaaaggccgcgttgctggcgtttttccataggctccgcccccctgacgagcatcacaaaaatcgacgctcaagtcagaggtggcgaaacccgacaggactataaagataccaggcgtttccccctggaagctccctcgtgcgctctcctgttccgaccctgccgcttaccggatacctgtccgcctttctcccttcgggaagcgtggcgctttctcatagctcacgctgtaggtatctcagttcggtgtaggtcgttcgctccaagctgggctgtgtgcacgaaccccccgttcagcccgaccgctgcgccttatccggtaactatcgtcttgagtccaacccggtaagacacgacttatcgccactggcagcagccactggtaacaggattagcagagcgaggtatgtaggcggtgctacagagttcttgaagtggtggcctaactacggctacactagaagaacagtatttggtatctgcgctctgctgaagccagttaccttcggaaaaagagttggtagctcttgatccggcaaacaaaccaccgctggtagcggtggtttttttgtttgcaagcagcagattacgcgcagaaaaaaaggatctcaagaagatcctttgatcttttctacggggtctgacgctctattcaacaaagccgccgtcccgtcaagtcagcgtaaatgggtagggggcttcaaatcgtcctcgtgataccaattcggagcctgcttttttgtacaaacttgttgataatggcaattcaaggatcttcacctagatccttttaaattaaaaatgaagttttaaatcaatctaaagtatatatgagtaaacttggtctgacagttaccaatgcttaatcagtgaggcacctatctcagcgatctgtctatttcgttcatccatagttgcctgactccccgtcgtgtagataactacgatacgggagggcttaccatctggccccagtgctgcaatgataccgcgagagccacgctcaccggctccagatttatcagcaataaaccagccagccggaagggccgagcgcagaagtggtcctgcaactttatccgcctccatccagtctattaattgttgccgggaagctagagtaagtagttcgccagttaatagtttgcgcaacgttgttgccattgctacaggcatcgtggtgtcacgctcgtcgtttggtatggcttcattcagctccggttcccaacgatcaaggcgagttacatgatcccccatgttgtgcaaaaaagcggttagctccttcggtcctccgatcgttgtcagaagtaagttggccgcagtgttatcactcatggttatggcagcactgcataattctcttactgtcatgccatccgtaagatgcttttctgtgactggtgagtactcaaccaagtcattctgagaatagtgtatgcggcgaccgagttgctcttgcccggcgtcaatacgggataataccgcgccacatagcagaactttaaaagtgctcatcattggaaaacgttcttcggggcgaaaactctcaaggatcttaccgctgttgagatccagttcgatgtaacccactcgtgcacccaactgatcttcagcatcttttactttcaccagcgtttctgggtgagcaaaaacaggaaggcaaaatgccgcaaaaaagggaataagggcgacacggaaatgttgaatactcatactcttcctttttcaatattattgaagcatttatcagggttattgtctcatgagcggatacatatttgaatgtatttagaaaaataaacaaataggggttccgcgcacatttccccgaaaagtgccagatacctgaaacaaaacccatcgtacggccaaggaagtctccaataactgtgatccaccacaagcgccagggttttcccagtcacgacgttgtaaaacgacggccagtcatgcataatccgcacgcatctggaataaggaagtgccattccgcctgaccttaatacgactcactatagggagaccctcgaaaacaaaccacggcagtagcgaaagctgcaagagaatgaaaatccgtggctcgcagcaaacaccaaacaaaacaaacacaaaccaacaaaaagtggccacgcccgggccaccgatacttcccttcactccttcgggactgttggggaggaacacaacagggctcccctgttttcccattccttcccccttttcccaaccccaaccgccgtatctggtggcggcaagacacacgggtctttccctctaaagcacaattgtgtgtgtgtcccaggtcctcctgcgtacggtgcgggagtgctcccacccaactgttgtaagcctgtccaacgcgtcgtcctggcaagactatgacgtcgcatgttccgctgcggatgccgaccgggtaaccggttccccagtgtgtgtagtgcgatcttccaggtcctcctggttggcgttgtccagaaactgcttcaggtaagtggggtgtgcccaatccctacaaaggttgattctttcaccaccttaggaatgctccggaggtaccccagcaacagctgggatctgaccggaggctaattgtctacgggtggtgtttcctttttcttttcacacaactctactgcgtacaactcactgactatccacttgctctgtcacg

SEQ ID NO: 3573 - DNA, 3751 bp, synthetic construct
  source 1..3751: mol_type = other DNA; note = Anabaena L9a5, intron GtoC
atgggagtgaaggtgctgttcgccctgatctgtattgccgtggccgaggccaagcctaccgagaacaacgaggacttcaacatcgtggccgtggcctccaatttcgccaccacagatctggacgccgacagaggaaagctgcccggcaagaagctgcctctggaagtgctgaaagagatggaagccaacgccagaaaggccggctgtaccagaggctgtctgatctgcctgagccacatcaagtgcacccctaagatgaagaagttcatccccggcagatgccacacctacgagggcgacaaagaatctgcccaaggcggaatcggagaggccatcgtggatatccctgagatccccggcttcaaggacctggaacctatggaacagtttatcgcccaggtggacctgtgcgtggactgtacaacaggctgcctgaaaggcctggccaacgtgcagtgtagcgacctgctgaagaagtggctgcctcagagatgcgccaccttcgcctctaagatccagggccaagtggacaagatcaaaggcgctggcggcgactaatagctaactagacaaaacaccaaacaaacaagctgcgagccacggacttaaataattgagccttaaagaagaaattctttaagtggatgctctcaaactcagggaaacctaaatctagttatagacaaggcaatcctgagccaagccgaagtagtaattagtaagttaacaatagatgacttacaactaatcggaaggtgcagagactcgacgggagctaccctaacgtcaagacgagggtaaagagagagtccaattctcaaagccaatatcaacagtaagtctagatatcggatcccgggaggctaggtggaggctcagtgtgataagtctgcgatggtggatgcatgtgtcatggtcatagctgtttcctgtgtgaaattgttatccgctcagagggcacaatcctattccgcgctatccgacaatctccaagacattaggtggagttcagttcggcgtatggcatatgtcgctggaaagaacatgtgagcaaaaggccagcaaaaggccaggaaccgtaaaaaggccgcgttgctggcgtttttccataggctccgcccccctgacgagcatcacaaaaatcgacgctcaagtcagaggtggcgaaacccgacaggactataaagataccaggcgtttccccctggaagctccctcgtgcgctctcctgttccgaccctgccgcttaccggatacctgtccgcctttctcccttcgggaagcgtggcgctttctcatagctcacgctgtaggtatctcagttcggtgtaggtcgttcgctccaagctgggctgtgtgcacgaaccccccgttcagcccgaccgctgcgccttatccggtaactatcgtcttgagtccaacccggtaagacacgacttatcgccactggcagcagccactggtaacaggattagcagagcgaggtatgtaggcggtgctacagagttcttgaagtggtggcctaactacggctacactagaagaacagtatttggtatctgcgctctgctgaagccagttaccttcggaaaaagagttggtagctcttgatccggcaaacaaaccaccgctggtagcggtggtttttttgtttgcaagcagcagattacgcgcagaaaaaaaggatctcaagaagatcctttgatcttttctacggggtctgacgctctattcaacaaagccgccgtcccgtcaagtcagcgtaaatgggtagggggcttcaaatcgtcctcgtgataccaattcggagcctgcttttttgtacaaacttgttgataatggcaattcaaggatcttcacctagatccttttaaattaaaaatgaagttttaaatcaatctaaagtatatatgagtaaacttggtctgacagttaccaatgcttaatcagtgaggcacctatctcagcgatctgtctatttcgttcatccatagttgcctgactccccgtcgtgtagataactacgatacgggagggcttaccatctggccccagtgctgcaatgataccgcgagagccacgctcaccggctccagatttatcagcaataaaccagccagccggaagggccgagcgcagaagtggtcctgcaactttatccgcctccatccagtctattaattgttgccgggaagctagagtaagtagttcgccagttaatagtttgcgcaacgttgttgccattgctacaggcatcgtggtgtcacgctcgtcgtttggtatggcttcattcagctccggttcccaacgatcaaggcgagttacatgatcccccatgttgtgcaaaaaagcggttagctccttcggtcctccgatcgttgtcagaagtaagttggccgcagtgttatcactcatggttatggcagcactgcataattctcttactgtcatgccatccgtaagatgcttttctgtgactggtgagtactcaaccaagtcattctgagaatagtgtatgcggcgaccgagttgctcttgcccggcgtcaatacgggataataccgcgccacatagcagaactttaaaagtgctcatcattggaaaacgttcttcggggcgaaaactctcaaggatcttaccgctgttgagatccagttcgatgtaacccactcgtgcacccaactgatcttcagcatcttttactttcaccagcgtttctgggtgagcaaaaacaggaaggcaaaatgccgcaaaaaagggaataagggcgacacggaaatgttgaatactcatactcttcctttttcaatattattgaagcatttatcagggttattgtctcatgagcggatacatatttgaatgtatttagaaaaataaacaaataggggttccgcgcacatttccccgaaaagtgccagatacctgaaacaaaacccatcgtacggccaaggaagtctccaataactgtgatccaccacaagcgccagggttttcccagtcacgacgttgtaaaacgacggccagtcatgcataatccgcacgcatctggaataaggaagtgccattccgcctgaccttaatacgactcactatagggagaccctcgaaaacaaaccacggcagtagcgaaagctgcaagagaatcaaaatccgtggctcgcagcaaacaccaaacaaaacaaacacaaaccaacaaaaagtggccacgcccgggccaccgatacttcccttcactccttcgggactgttggggaggaacacaacagggctcccctgttttcccattccttcccccttttcccaaccccaaccgccgtatctggtggcggcaagacacacgggtctttccctctaaagcacaattgtgtgtgtgtcccaggtcctcctgcgtacggtgcgggagtgctcccacccaactgttgtaagcctgtccaacgcgtcgtcctggcaagactatgacgtcgcatgttccgctgcggatgccgaccgggtaaccggttccccagtgtgtgtagtgcgatcttccaggtcctcctggttggcgttgtccagaaactgcttcaggtaagtggggtgtgcccaatccctacaaaggttgattctttcaccaccttaggaatgctccggaggtaccccagcaacagctgggatctgaccggaggctaattgtctacgggtggtgtttcctttttcttttcacacaactctactgcgtacaactcactgactatccacttgctctgtcacg

SEQ ID NO: 3574 - DNA, 3751 bp, synthetic construct
  source 1..3751: mol_type = other DNA; note = Anabaena L9a5, intron GtoA
atgggagtgaaggtgctgttcgccctgatctgtattgccgtggccgaggccaagcctaccgagaacaacgaggacttcaacatcgtggccgtggcctccaatttcgccaccacagatctggacgccgacagaggaaagctgcccggcaagaagctgcctctggaagtgctgaaagagatggaagccaacgccagaaaggccggctgtaccagaggctgtctgatctgcctgagccacatcaagtgcacccctaagatgaagaagttcatccccggcagatgccacacctacgagggcgacaaagaatctgcccaaggcggaatcggagaggccatcgtggatatccctgagatccccggcttcaaggacctggaacctatggaacagtttatcgcccaggtggacctgtgcgtggactgtacaacaggctgcctgaaaggcctggccaacgtgcagtgtagcgacctgctgaagaagtggctgcctcagagatgcgccaccttcgcctctaagatccagggccaagtggacaagatcaaaggcgctggcggcgactaatagctaactagacaaaacaccaaacaaacaagctgcgagccacggacttaaataattgagccttaaagaagaaattctttaagtggatgctctcaaactcagggaaacctaaatctagttatagacaaggcaatcctgagccaagccgaagtagtaattagtaagttaacaatagatgacttacaactaatcggaaggtgcagagactcgacgggagctaccctaacgtcaagacgagggtaaagagagagtccaattctcaaagccaatatcaacagtaagtctagatatcggatcccgggaggctaggtggaggctcagtgtgataagtctgcgatggtggatgcatgtgtcatggtcatagctgtttcctgtgtgaaattgttatccgctcagagggcacaatcctattccgcgctatccgacaatctccaagacattaggtggagttcagttcggcgtatggcatatgtcgctggaaagaacatgtgagcaaaaggccagcaaaaggccaggaaccgtaaaaaggccgcgttgctggcgtttttccataggctccgcccccctgacgagcatcacaaaaatcgacgctcaagtcagaggtggcgaaacccgacaggactataaagataccaggcgtttccccctggaagctccctcgtgcgctctcctgttccgaccctgccgcttaccggatacctgtccgcctttctcccttcgggaagcgtggcgctttctcatagctcacgctgtaggtatctcagttcggtgtaggtcgttcgctccaagctgggctgtgtgcacgaaccccccgttcagcccgaccgctgcgccttatccggtaactatcgtcttgagtccaacccggtaagacacgacttatcgccactggcagcagccactggtaacaggattagcagagcgaggtatgtaggcggtgctacagagttcttgaagtggtggcctaactacggctacactagaagaacagtatttggtatctgcgctctgctgaagccagttaccttcggaaaaagagttggtagctcttgatccggcaaacaaaccaccgctggtagcggtggtttttttgtttgcaagcagcagattacgcgcagaaaaaaaggatctcaagaagatcctttgatcttttctacggggtctgacgctctattcaacaaagccgccgtcccgtcaagtcagcgtaaatgggtagggggcttcaaatcgtcctcgtgataccaattcggagcctgcttttttgtacaaacttgttgataatggcaattcaaggatcttcacctagatccttttaaattaaaaatgaagttttaaatcaatctaaagtatatatgagtaaacttggtctgacagttaccaatgcttaatcagtgaggcacctatctcagcgatctgtctatttcgttcatccatagttgcctgactccccgtcgtgtagataactacgatacgggagggcttaccatctggccccagtgctgcaatgataccgcgagagccacgctcaccggctccagatttatcagcaataaaccagccagccggaagggccgagcgcagaagtggtcctgcaactttatccgcctccatccagtctattaattgttgccgggaagctagagtaagtagttcgccagttaatagtttgcgcaacgttgttgccattgctacaggcatcgtggtgtcacgctcgtcgtttggtatggcttcattcagctccggttcccaacgatcaaggcgagttacatgatcccccatgttgtgcaaaaaagcggttagctccttcggtcctccgatcgttgtcagaagtaagttggccgcagtgttatcactcatggttatggcagcactgcataattctcttactgtcatgccatccgtaagatgcttttctgtgactggtgagtactcaaccaagtcattctgagaatagtgtatgcggcgaccgagttgctcttgcccggcgtcaatacgggataataccgcgccacatagcagaactttaaaagtgctcatcattggaaaacgttcttcggggcgaaaactctcaaggatcttaccgctgttgagatccagttcgatgtaacccactcgtgcacccaactgatcttcagcatcttttactttcaccagcgtttctgggtgagcaaaaacaggaaggcaaaatgccgcaaaaaagggaataagggcgacacggaaatgttgaatactcatactcttcctttttcaatattattgaagcatttatcagggttattgtctcatgagcggatacatatttgaatgtatttagaaaaataaacaaataggggttccgcgcacatttccccgaaaagtgccagatacctgaaacaaaacccatcgtacggccaaggaagtctccaataactgtgatccaccacaagcgccagggttttcccagtcacgacgttgtaaaacgacggccagtcatgcataatccgcacgcatctggaataaggaagtgccattccgcctgaccttaatacgactcactatagggagaccctcgaaaacaaaccacggcagtagcgaaagctgcaagagaataaaaatccgtggctcgcagcaaacaccaaacaaaacaaacacaaaccaacaaaaagtggccacgcccgggccaccgatacttcccttcactccttcgggactgttggggaggaacacaacagggctcccctgttttcccattccttcccccttttcccaaccccaaccgccgtatctggtggcggcaagacacacgggtctttccctctaaagcacaattgtgtgtgtgtcccaggtcctcctgcgtacggtgcgggagtgctcccacccaactgttgtaagcctgtccaacgcgtcgtcctggcaagactatgacgtcgcatgttccgctgcggatgccgaccgggtaaccggttccccagtgtgtgtagtgcgatcttccaggtcctcctggttggcgttgtccagaaactgcttcaggtaagtggggtgtgcccaatccctacaaaggttgattctttcaccaccttaggaatgctccggaggtaccccagcaacagctgggatctgaccggaggctaattgtctacgggtggtgtttcctttttcttttcacacaactctactgcgtacaactcactgactatccacttgctctgtcacg

SEQ ID NO: 3575 - DNA, 3751 bp, synthetic construct
  source 1..3751: mol_type = other DNA; note = Anabaena L9a5, intron GtoT
atgggagtgaaggtgctgttcgccctgatctgtattgccgtggccgaggccaagcctaccgagaacaacgaggacttcaacatcgtggccgtggcctccaatttcgccaccacagatctggacgccgacagaggaaagctgcccggcaagaagctgcctctggaagtgctgaaagagatggaagccaacgccagaaaggccggctgtaccagaggctgtctgatctgcctgagccacatcaagtgcacccctaagatgaagaagttcatccccggcagatgccacacctacgagggcgacaaagaatctgcccaaggcggaatcggagaggccatcgtggatatccctgagatccccggcttcaaggacctggaacctatggaacagtttatcgcccaggtggacctgtgcgtggactgtacaacaggctgcctgaaaggcctggccaacgtgcagtgtagcgacctgctgaagaagtggctgcctcagagatgcgccaccttcgcctctaagatccagggccaagtggacaagatcaaaggcgctggcggcgactaatagctaactagacaaaacaccaaacaaacaagctgcgagccacggacttaaataattgagccttaaagaagaaattctttaagtggatgctctcaaactcagggaaacctaaatctagttatagacaaggcaatcctgagccaagccgaagtagtaattagtaagttaacaatagatgacttacaactaatcggaaggtgcagagactcgacgggagctaccctaacgtcaagacgagggtaaagagagagtccaattctcaaagccaatatcaacagtaagtctagatatcggatcccgggaggctaggtggaggctcagtgtgataagtctgcgatggtggatgcatgtgtcatggtcatagctgtttcctgtgtgaaattgttatccgctcagagggcacaatcctattccgcgctatccgacaatctccaagacattaggtggagttcagttcggcgtatggcatatgtcgctggaaagaacatgtgagcaaaaggccagcaaaaggccaggaaccgtaaaaaggccgcgttgctggcgtttttccataggctccgcccccctgacgagcatcacaaaaatcgacgctcaagtcagaggtggcgaaacccgacaggactataaagataccaggcgtttccccctggaagctccctcgtgcgctctcctgttccgaccctgccgcttaccggatacctgtccgcctttctcccttcgggaagcgtggcgctttctcatagctcacgctgtaggtatctcagttcggtgtaggtcgttcgctccaagctgggctgtgtgcacgaaccccccgttcagcccgaccgctgcgccttatccggtaactatcgtcttgagtccaacccggtaagacacgacttatcgccactggcagcagccactggtaacaggattagcagagcgaggtatgtaggcggtgctacagagttcttgaagtggtggcctaactacggctacactagaagaacagtatttggtatctgcgctctgctgaagccagttaccttcggaaaaagagttggtagctcttgatccggcaaacaaaccaccgctggtagcggtggtttttttgtttgcaagcagcagattacgcgcagaaaaaaaggatctcaagaagatcctttgatcttttctacggggtctgacgctctattcaacaaagccgccgtcccgtcaagtcagcgtaaatgggtagggggcttcaaatcgtcctcgtgataccaattcggagcctgcttttttgtacaaacttgttgataatggcaattcaaggatcttcacctagatccttttaaattaaaaatgaagttttaaatcaatctaaagtatatatgagtaaacttggtctgacagttaccaatgcttaatcagtgaggcacctatctcagcgatctgtctatttcgttcatccatagttgcctgactccccgtcgtgtagataactacgatacgggagggcttaccatctggccccagtgctgcaatgataccgcgagagccacgctcaccggctccagatttatcagcaataaaccagccagccggaagggccgagcgcagaagtggtcctgcaactttatccgcctccatccagtctattaattgttgccgggaagctagagtaagtagttcgccagttaatagtttgcgcaacgttgttgccattgctacaggcatcgtggtgtcacgctcgtcgtttggtatggcttcattcagctccggttcccaacgatcaaggcgagttacatgatcccccatgttgtgcaaaaaagcggttagctccttcggtcctccgatcgttgtcagaagtaagttggccgcagtgttatcactcatggttatggcagcactgcataattctcttactgtcatgccatccgtaagatgcttttctgtgactggtgagtactcaaccaagtcattctgagaatagtgtatgcggcgaccgagttgctcttgcccggcgtcaatacgggataataccgcgccacatagcagaactttaaaagtgctcatcattggaaaacgttcttcggggcgaaaactctcaaggatcttaccgctgttgagatccagttcgatgtaacccactcgtgcacccaactgatcttcagcatcttttactttcaccagcgtttctgggtgagcaaaaacaggaaggcaaaatgccgcaaaaaagggaataagggcgacacggaaatgttgaatactcatactcttcctttttcaatattattgaagcatttatcagggttattgtctcatgagcggatacatatttgaatgtatttagaaaaataaacaaataggggttccgcgcacatttccccgaaaagtgccagatacctgaaacaaaacccatcgtacggccaaggaagtctccaataactgtgatccaccacaagcgccagggttttcccagtcacgacgttgtaaaacgacggccagtcatgcataatccgcacgcatctggaataaggaagtgccattccgcctgaccttaatacgactcactatagggagaccctcgaaaacaaaccacggcagtagcgaaagctgcaagagaattaaaatccgtggctcgcagcaaacaccaaacaaaacaaacacaaaccaacaaaaagtggccacgcccgggccaccgatacttcccttcactccttcgggactgttggggaggaacacaacagggctcccctgttttcccattccttcccccttttcccaaccccaaccgccgtatctggtggcggcaagacacacgggtctttccctctaaagcacaattgtgtgtgtgtcccaggtcctcctgcgtacggtgcgggagtgctcccacccaactgttgtaagcctgtccaacgcgtcgtcctggcaagactatgacgtcgcatgttccgctgcggatgccgaccgggtaaccggttccccagtgtgtgtagtgcgatcttccaggtcctcctggttggcgttgtccagaaactgcttcaggtaagtggggtgtgcccaatccctacaaaggttgattctttcaccaccttaggaatgctccggaggtaccccagcaacagctgggatctgaccggaggctaattgtctacgggtggtgtttcctttttcttttcacacaactctactgcgtacaactcactgactatccacttgctctgtcacg

SEQ ID NO: 3576 - DNA, 3751 bp, synthetic construct
  source 1..3751: mol_type = other DNA; note = Anabaena L9a5, exon AtoT
atgggagtgaaggtgctgttcgccctgatctgtattgccgtggccgaggccaagcctaccgagaacaacgaggacttcaacatcgtggccgtggcctccaatttcgccaccacagatctggacgccgacagaggaaagctgcccggcaagaagctgcctctggaagtgctgaaagagatggaagccaacgccagaaaggccggctgtaccagaggctgtctgatctgcctgagccacatcaagtgcacccctaagatgaagaagttcatccccggcagatgccacacctacgagggcgacaaagaatctgcccaaggcggaatcggagaggccatcgtggatatccctgagatccccggcttcaaggacctggaacctatggaacagtttatcgcccaggtggacctgtgcgtggactgtacaacaggctgcctgaaaggcctggccaacgtgcagtgtagcgacctgctgaagaagtggctgcctcagagatgcgccaccttcgcctctaagatccagggccaagtggacaagatcaaaggcgctggcggcgactaatagctaactagacaaaacaccaaacaaacaagctgcgagccacggacttaaataattgagccttaaagaagaaattctttaagtggatgctctcaaactcagggaaacctaaatctagttatagacaaggcaatcctgagccaagccgaagtagtaattagtaagttaacaatagatgacttacaactaatcggaaggtgcagagactcgacgggagctaccctaacgtcaagacgagggtaaagagagagtccaattctcaaagccaatatcaacagtaagtctagatatcggatcccgggaggctaggtggaggctcagtgtgataagtctgcgatggtggatgcatgtgtcatggtcatagctgtttcctgtgtgaaattgttatccgctcagagggcacaatcctattccgcgctatccgacaatctccaagacattaggtggagttcagttcggcgtatggcatatgtcgctggaaagaacatgtgagcaaaaggccagcaaaaggccaggaaccgtaaaaaggccgcgttgctggcgtttttccataggctccgcccccctgacgagcatcacaaaaatcgacgctcaagtcagaggtggcgaaacccgacaggactataaagataccaggcgtttccccctggaagctccctcgtgcgctctcctgttccgaccctgccgcttaccggatacctgtccgcctttctcccttcgggaagcgtggcgctttctcatagctcacgctgtaggtatctcagttcggtgtaggtcgttcgctccaagctgggctgtgtgcacgaaccccccgttcagcccgaccgctgcgccttatccggtaactatcgtcttgagtccaacccggtaagacacgacttatcgccactggcagcagccactggtaacaggattagcagagcgaggtatgtaggcggtgctacagagttcttgaagtggtggcctaactacggctacactagaagaacagtatttggtatctgcgctctgctgaagccagttaccttcggaaaaagagttggtagctcttgatccggcaaacaaaccaccgctggtagcggtggtttttttgtttgcaagcagcagattacgcgcagaaaaaaaggatctcaagaagatcctttgatcttttctacggggtctgacgctctattcaacaaagccgccgtcccgtcaagtcagcgtaaatgggtagggggcttcaaatcgtcctcgtgataccaattcggagcctgcttttttgtacaaacttgttgataatggcaattcaaggatcttcacctagatccttttaaattaaaaatgaagttttaaatcaatctaaagtatatatgagtaaacttggtctgacagttaccaatgcttaatcagtgaggcacctatctcagcgatctgtctatttcgttcatccatagttgcctgactccccgtcgtgtagataactacgatacgggagggcttaccatctggccccagtgctgcaatgataccgcgagagccacgctcaccggctccagatttatcagcaataaaccagccagccggaagggccgagcgcagaagtggtcctgcaactttatccgcctccatccagtctattaattgttgccgggaagctagagtaagtagttcgccagttaatagtttgcgcaacgttgttgccattgctacaggcatcgtggtgtcacgctcgtcgtttggtatggcttcattcagctccggttcccaacgatcaaggcgagttacatgatcccccatgttgtgcaaaaaagcggttagctccttcggtcctccgatcgttgtcagaagtaagttggccgcagtgttatcactcatggttatggcagcactgcataattctcttactgtcatgccatccgtaagatgcttttctgtgactggtgagtactcaaccaagtcattctgagaatagtgtatgcggcgaccgagttgctcttgcccggcgtcaatacgggataataccgcgccacatagcagaactttaaaagtgctcatcattggaaaacgttcttcggggcgaaaactctcaaggatcttaccgctgttgagatccagttcgatgtaacccactcgtgcacccaactgatcttcagcatcttttactttcaccagcgtttctgggtgagcaaaaacaggaaggcaaaatgccgcaaaaaagggaataagggcgacacggaaatgttgaatactcatactcttcctttttcaatattattgaagcatttatcagggttattgtctcatgagcggatacatatttgaatgtatttagaaaaataaacaaataggggttccgcgcacatttccccgaaaagtgccagatacctgaaacaaaacccatcgtacggccaaggaagtctccaataactgtgatccaccacaagcgccagggttttcccagtcacgacgttgtaaaacgacggccagtcatgcataatccgcacgcatctggaataaggaagtgccattccgcctgaccttaatacgactcactatagggagaccctcgaaaacaaaccacggcagtagcgaaagctgcaagagaatgtaaatccgtggctcgcagcaaacaccaaacaaaacaaacacaaaccaacaaaaagtggccacgcccgggccaccgatacttcccttcactccttcgggactgttggggaggaacacaacagggctcccctgttttcccattccttcccccttttcccaaccccaaccgccgtatctggtggcggcaagacacacgggtctttccctctaaagcacaattgtgtgtgtgtcccaggtcctcctgcgtacggtgcgggagtgctcccacccaactgttgtaagcctgtccaacgcgtcgtcctggcaagactatgacgtcgcatgttccgctgcggatgccgaccgggtaaccggttccccagtgtgtgtagtgcgatcttccaggtcctcctggttggcgttgtccagaaactgcttcaggtaagtggggtgtgcccaatccctacaaaggttgattctttcaccaccttaggaatgctccggaggtaccccagcaacagctgggatctgaccggaggctaattgtctacgggtggtgtttcctttttcttttcacacaactctactgcgtacaactcactgactatccacttgctctgtcacg

SEQ ID NO: 3577 - DNA, 3751 bp, synthetic construct
  source 1..3751: mol_type = other DNA; note = Anabaena L9a5, exon AtoC
atgggagtgaaggtgctgttcgccctgatctgtattgccgtggccgaggccaagcctaccgagaacaacgaggacttcaacatcgtggccgtggcctccaatttcgccaccacagatctggacgccgacagaggaaagctgcccggcaagaagctgcctctggaagtgctgaaagagatggaagccaacgccagaaaggccggctgtaccagaggctgtctgatctgcctgagccacatcaagtgcacccctaagatgaagaagttcatccccggcagatgccacacctacgagggcgacaaagaatctgcccaaggcggaatcggagaggccatcgtggatatccctgagatccccggcttcaaggacctggaacctatggaacagtttatcgcccaggtggacctgtgcgtggactgtacaacaggctgcctgaaaggcctggccaacgtgcagtgtagcgacctgctgaagaagtggctgcctcagagatgcgccaccttcgcctctaagatccagggccaagtggacaagatcaaaggcgctggcggcgactaatagctaactagacaaaacaccaaacaaacaagctgcgagccacggacttaaataattgagccttaaagaagaaattctttaagtggatgctctcaaactcagggaaacctaaatctagttatagacaaggcaatcctgagccaagccgaagtagtaattagtaagttaacaatagatgacttacaactaatcggaaggtgcagagactcgacgggagctaccctaacgtcaagacgagggtaaagagagagtccaattctcaaagccaatatcaacagtaagtctagatatcggatcccgggaggctaggtggaggctcagtgtgataagtctgcgatggtggatgcatgtgtcatggtcatagctgtttcctgtgtgaaattgttatccgctcagagggcacaatcctattccgcgctatccgacaatctccaagacattaggtggagttcagttcggcgtatggcatatgtcgctggaaagaacatgtgagcaaaaggccagcaaaaggccaggaaccgtaaaaaggccgcgttgctggcgtttttccataggctccgcccccctgacgagcatcacaaaaatcgacgctcaagtcagaggtggcgaaacccgacaggactataaagataccaggcgtttccccctggaagctccctcgtgcgctctcctgttccgaccctgccgcttaccggatacctgtccgcctttctcccttcgggaagcgtggcgctttctcatagctcacgctgtaggtatctcagttcggtgtaggtcgttcgctccaagctgggctgtgtgcacgaaccccccgttcagcccgaccgctgcgccttatccggtaactatcgtcttgagtccaacccggtaagacacgacttatcgccactggcagcagccactggtaacaggattagcagagcgaggtatgtaggcggtgctacagagttcttgaagtggtggcctaactacggctacactagaagaacagtatttggtatctgcgctctgctgaagccagttaccttcggaaaaagagttggtagctcttgatccggcaaacaaaccaccgctggtagcggtggtttttttgtttgcaagcagcagattacgcgcagaaaaaaaggatctcaagaagatcctttgatcttttctacggggtctgacgctctattcaacaaagccgccgtcccgtcaagtcagcgtaaatgggtagggggcttcaaatcgtcctcgtgataccaattcggagcctgcttttttgtacaaacttgttgataatggcaattcaaggatcttcacctagatccttttaaattaaaaatgaagttttaaatcaatctaaagtatatatgagtaaacttggtctgacagttaccaatgcttaatcagtgaggcacctatctcagcgatctgtctatttcgttcatccatagttgcctgactccccgtcgtgtagataactacgatacgggagggcttaccatctggccccagtgctgcaatgataccgcgagagccacgctcaccggctccagatttatcagcaataaaccagccagccggaagggccgagcgcagaagtggtcctgcaactttatccgcctccatccagtctattaattgttgccgggaagctagagtaagtagttcgccagttaatagtttgcgcaacgttgttgccattgctacaggcatcgtggtgtcacgctcgtcgtttggtatggcttcattcagctccggttcccaacgatcaaggcgagttacatgatcccccatgttgtgcaaaaaagcggttagctccttcggtcctccgatcgttgtcagaagtaagttggccgcagtgttatcactcatggttatggcagcactgcataattctcttactgtcatgccatccgtaagatgcttttctgtgactggtgagtactcaaccaagtcattctgagaatagtgtatgcggcgaccgagttgctcttgcccggcgtcaatacgggataataccgcgccacatagcagaactttaaaagtgctcatcattggaaaacgttcttcggggcgaaaactctcaaggatcttaccgctgttgagatccagttcgatgtaacccactcgtgcacccaactgatcttcagcatcttttactttcaccagcgtttctgggtgagcaaaaacaggaaggcaaaatgccgcaaaaaagggaataagggcgacacggaaatgttgaatactcatactcttcctttttcaatattattgaagcatttatcagggttattgtctcatgagcggatacatatttgaatgtatttagaaaaataaacaaataggggttccgcgcacatttccccgaaaagtgccagatacctgaaacaaaacccatcgtacggccaaggaagtctccaataactgtgatccaccacaagcgccagggttttcccagtcacgacgttgtaaaacgacggccagtcatgcataatccgcacgcatctggaataaggaagtgccattccgcctgaccttaatacgactcactatagggagaccctcgaaaacaaaccacggcagtagcgaaagctgcaagagaatgcaaatccgtggctcgcagcaaacaccaaacaaaacaaacacaaaccaacaaaaagtggccacgcccgggccaccgatacttcccttcactccttcgggactgttggggaggaacacaacagggctcccctgttttcccattccttcccccttttcccaaccccaaccgccgtatctggtggcggcaagacacacgggtctttccctctaaagcacaattgtgtgtgtgtcccaggtcctcctgcgtacggtgcgggagtgctcccacccaactgttgtaagcctgtccaacgcgtcgtcctggcaagactatgacgtcgcatgttccgctgcggatgccgaccgggtaaccggttccccagtgtgtgtagtgcgatcttccaggtcctcctggttggcgttgtccagaaactgcttcaggtaagtggggtgtgcccaatccctacaaaggttgattctttcaccaccttaggaatgctccggaggtaccccagcaacagctgggatctgaccggaggctaattgtctacgggtggtgtttcctttttcttttcacacaactctactgcgtacaactcactgactatccacttgctctgtcacg

SEQ ID NO: 3578 - DNA, 3751 bp, synthetic construct
  source 1..3751: mol_type = other DNA; note = Anabaena L9a5, exon AtoG
atgggagtgaaggtgctgttcgccctgatctgtattgccgtggccgaggccaagcctaccgagaacaacgaggacttcaacatcgtggccgtggcctccaatttcgccaccacagatctggacgccgacagaggaaagctgcccggcaagaagctgcctctggaagtgctgaaagagatggaagccaacgccagaaaggccggctgtaccagaggctgtctgatctgcctgagccacatcaagtgcacccctaagatgaagaagttcatccccggcagatgccacacctacgagggcgacaaagaatctgcccaaggcggaatcggagaggccatcgtggatatccctgagatccccggcttcaaggacctggaacctatggaacagtttatcgcccaggtggacctgtgcgtggactgtacaacaggctgcctgaaaggcctggccaacgtgcagtgtagcgacctgctgaagaagtggctgcctcagagatgcgccaccttcgcctctaagatccagggccaagtggacaagatcaaaggcgctggcggcgactaatagctaactagacaaaacaccaaacaaacaagctgcgagccacggacttaaataattgagccttaaagaagaaattctttaagtggatgctctcaaactcagggaaacctaaatctagttatagacaaggcaatcctgagccaagccgaagtagtaattagtaagttaacaatagatgacttacaactaatcggaaggtgcagagactcgacgggagctaccctaacgtcaagacgagggtaaagagagagtccaattctcaaagccaatatcaacagtaagtctagatatcggatcccgggaggctaggtggaggctcagtgtgataagtctgcgatggtggatgcatgtgtcatggtcatagctgtttcctgtgtgaaattgttatccgctcagagggcacaatcctattccgcgctatccgacaatctccaagacattaggtggagttcagttcggcgtatggcatatgtcgctggaaagaacatgtgagcaaaaggccagcaaaaggccaggaaccgtaaaaaggccgcgttgctggcgtttttccataggctccgcccccctgacgagcatcacaaaaatcgacgctcaagtcagaggtggcgaaacccgacaggactataaagataccaggcgtttccccctggaagctccctcgtgcgctctcctgttccgaccctgccgcttaccggatacctgtccgcctttctcccttcgggaagcgtggcgctttctcatagctcacgctgtaggtatctcagttcggtgtaggtcgttcgctccaagctgggctgtgtgcacgaaccccccgttcagcccgaccgctgcgccttatccggtaactatcgtcttgagtccaacccggtaagacacgacttatcgccactggcagcagccactggtaacaggattagcagagcgaggtatgtaggcggtgctacagagttcttgaagtggtggcctaactacggctacactagaagaacagtatttggtatctgcgctctgctgaagccagttaccttcggaaaaagagttggtagctcttgatccggcaaacaaaccaccgctggtagcggtggtttttttgtttgcaagcagcagattacgcgcagaaaaaaaggatctcaagaagatcctttgatcttttctacggggtctgacgctctattcaacaaagccgccgtcccgtcaagtcagcgtaaatgggtagggggcttcaaatcgtcctcgtgataccaattcggagcctgcttttttgtacaaacttgttgataatggcaattcaaggatcttcacctagatccttttaaattaaaaatgaagttttaaatcaatctaaagtatatatgagtaaacttggtctgacagttaccaatgcttaatcagtgaggcacctatctcagcgatctgtctatttcgttcatccatagttgcctgactccccgtcgtgtagataactacgatacgggagggcttaccatctggccccagtgctgcaatgataccgcgagagccacgctcaccggctccagatttatcagcaataaaccagccagccggaagggccgagcgcagaagtggtcctgcaactttatccgcctccatccagtctattaattgttgccgggaagctagagtaagtagttcgccagttaatagtttgcgcaacgttgttgccattgctacaggcatcgtggtgtcacgctcgtcgtttggtatggcttcattcagctccggttcccaacgatcaaggcgagttacatgatcccccatgttgtgcaaaaaagcggttagctccttcggtcctccgatcgttgtcagaagtaagttggccgcagtgttatcactcatggttatggcagcactgcataattctcttactgtcatgccatccgtaagatgcttttctgtgactggtgagtactcaaccaagtcattctgagaatagtgtatgcggcgaccgagttgctcttgcccggcgtcaatacgggataataccgcgccacatagcagaactttaaaagtgctcatcattggaaaacgttcttcggggcgaaaactctcaaggatcttaccgctgttgagatccagttcgatgtaacccactcgtgcacccaactgatcttcagcatcttttactttcaccagcgtttctgggtgagcaaaaacaggaaggcaaaatgccgcaaaaaagggaataagggcgacacggaaatgttgaatactcatactcttcctttttcaatattattgaagcatttatcagggttattgtctcatgagcggatacatatttgaatgtatttagaaaaataaacaaataggggttccgcgcacatttccccgaaaagtgccagatacctgaaacaaaacccatcgtacggccaaggaagtctccaataactgtgatccaccacaagcgccagggttttcccagtcacgacgttgtaaaacgacggccagtcatgcataatccgcacgcatctggaataaggaagtgccattccgcctgaccttaatacgactcactatagggagaccctcgaaaacaaaccacggcagtagcgaaagctgcaagagaatggaaatccgtggctcgcagcaaacaccaaacaaaacaaacacaaaccaacaaaaagtggccacgcccgggccaccgatacttcccttcactccttcgggactgttggggaggaacacaacagggctcccctgttttcccattccttcccccttttcccaaccccaaccgccgtatctggtggcggcaagacacacgggtctttccctctaaagcacaattgtgtgtgtgtcccaggtcctcctgcgtacggtgcgggagtgctcccacccaactgttgtaagcctgtccaacgcgtcgtcctggcaagactatgacgtcgcatgttccgctgcggatgccgaccgggtaaccggttccccagtgtgtgtagtgcgatcttccaggtcctcctggttggcgttgtccagaaactgcttcaggtaagtggggtgtgcccaatccctacaaaggttgattctttcaccaccttaggaatgctccggaggtaccccagcaacagctgggatctgaccggaggctaattgtctacgggtggtgtttcctttttcttttcacacaactctactgcgtacaactcactgactatccacttgctctgtcacg

SEQ ID NO: 3579 - DNA, 3750 bp, synthetic construct
  source 1..3750: mol_type = other DNA; note = Anabaena L9a5, P1 exon min1
atgggagtgaaggtgctgttcgccctgatctgtattgccgtggccgaggccaagcctaccgagaacaacgaggacttcaacatcgtggccgtggcctccaatttcgccaccacagatctggacgccgacagaggaaagctgcccggcaagaagctgcctctggaagtgctgaaagagatggaagccaacgccagaaaggccggctgtaccagaggctgtctgatctgcctgagccacatcaagtgcacccctaagatgaagaagttcatccccggcagatgccacacctacgagggcgacaaagaatctgcccaaggcggaatcggagaggccatcgtggatatccctgagatccccggcttcaaggacctggaacctatggaacagtttatcgcccaggtggacctgtgcgtggactgtacaacaggctgcctgaaaggcctggccaacgtgcagtgtagcgacctgctgaagaagtggctgcctcagagatgcgccaccttcgcctctaagatccagggccaagtggacaagatcaaaggcgctggcggcgactaatagctaactagacaaaacaccaaacaaacaagctgcgagccacggacttaaataattgagccttaaagaagaaattctttaagtggatgctctcaaactcagggaaacctaaatctagttatagacaaggcaatcctgagccaagccgaagtagtaattagtaagttaacaatagatgacttacaactaatcggaaggtgcagagactcgacgggagctaccctaacgtcaagacgagggtaaagagagagtccaattctcaaagccaatatcaacagtaagtctagatatcggatcccgggaggctaggtggaggctcagtgtgataagtctgcgatggtggatgcatgtgtcatggtcatagctgtttcctgtgtgaaattgttatccgctcagagggcacaatcctattccgcgctatccgacaatctccaagacattaggtggagttcagttcggcgtatggcatatgtcgctggaaagaacatgtgagcaaaaggccagcaaaaggccaggaaccgtaaaaaggccgcgttgctggcgtttttccataggctccgcccccctgacgagcatcacaaaaatcgacgctcaagtcagaggtggcgaaacccgacaggactataaagataccaggcgtttccccctggaagctccctcgtgcgctctcctgttccgaccctgccgcttaccggatacctgtccgcctttctcccttcgggaagcgtggcgctttctcatagctcacgctgtaggtatctcagttcggtgtaggtcgttcgctccaagctgggctgtgtgcacgaaccccccgttcagcccgaccgctgcgccttatccggtaactatcgtcttgagtccaacccggtaagacacgacttatcgccactggcagcagccactggtaacaggattagcagagcgaggtatgtaggcggtgctacagagttcttgaagtggtggcctaactacggctacactagaagaacagtatttggtatctgcgctctgctgaagccagttaccttcggaaaaagagttggtagctcttgatccggcaaacaaaccaccgctggtagcggtggtttttttgtttgcaagcagcagattacgcgcagaaaaaaaggatctcaagaagatcctttgatcttttctacggggtctgacgctctattcaacaaagccgccgtcccgtcaagtcagcgtaaatgggtagggggcttcaaatcgtcctcgtgataccaattcggagcctgcttttttgtacaaacttgttgataatggcaattcaaggatcttcacctagatccttttaaattaaaaatgaagttttaaatcaatctaaagtatatatgagtaaacttggtctgacagttaccaatgcttaatcagtgaggcacctatctcagcgatctgtctatttcgttcatccatagttgcctgactccccgtcgtgtagataactacgatacgggagggcttaccatctggccccagtgctgcaatgataccgcgagagccacgctcaccggctccagatttatcagcaataaaccagccagccggaagggccgagcgcagaagtggtcctgcaactttatccgcctccatccagtctattaattgttgccgggaagctagagtaagtagttcgccagttaatagtttgcgcaacgttgttgccattgctacaggcatcgtggtgtcacgctcgtcgtttggtatggcttcattcagctccggttcccaacgatcaaggcgagttacatgatcccccatgttgtgcaaaaaagcggttagctccttcggtcctccgatcgttgtcagaagtaagttggccgcagtgttatcactcatggttatggcagcactgcataattctcttactgtcatgccatccgtaagatgcttttctgtgactggtgagtactcaaccaagtcattctgagaatagtgtatgcggcgaccgagttgctcttgcccggcgtcaatacgggataataccgcgccacatagcagaactttaaaagtgctcatcattggaaaacgttcttcggggcgaaaactctcaaggatcttaccgctgttgagatccagttcgatgtaacccactcgtgcacccaactgatcttcagcatcttttactttcaccagcgtttctgggtgagcaaaaacaggaaggcaaaatgccgcaaaaaagggaataagggcgacacggaaatgttgaatactcatactcttcctttttcaatattattgaagcatttatcagggttattgtctcatgagcggatacatatttgaatgtatttagaaaaataaacaaataggggttccgcgcacatttccccgaaaagtgccagatacctgaaacaaaacccatcgtacggccaaggaagtctccaataactgtgatccaccacaagcgccagggttttcccagtcacgacgttgtaaaacgacggccagtcatgcataatccgcacgcatctggaataaggaagtgccattccgcctgaccttaatacgactcactatagggagaccctcgaaaacaaaccacggcagtagcgaaagctgcaagagaatgaaatccgtggctcgcagcaaacaccaaacaaaacaaacacaaaccaacaaaaagtggccacgcccgggccaccgatacttcccttcactccttcgggactgttggggaggaacacaacagggctcccctgttttcccattccttcccccttttcccaaccccaaccgccgtatctggtggcggcaagacacacgggtctttccctctaaagcacaattgtgtgtgtgtcccaggtcctcctgcgtacggtgcgggagtgctcccacccaactgttgtaagcctgtccaacgcgtcgtcctggcaagactatgacgtcgcatgttccgctgcggatgccgaccgggtaaccggttccccagtgtgtgtagtgcgatcttccaggtcctcctggttggcgttgtccagaaactgcttcaggtaagtggggtgtgcccaatccctacaaaggttgattctttcaccaccttaggaatgctccggaggtaccccagcaacagctgggatctgaccggaggctaattgtctacgggtggtgtttcctttttcttttcacacaactctactgcgtacaactcactgactatccacttgctctgtcacg

SEQ ID NO: 3580 - DNA, 3749 bp, synthetic construct
  source 1..3749: mol_type = other DNA; note = Anabaena L9a5, P1 exon min2
atgggagtgaaggtgctgttcgccctgatctgtattgccgtggccgaggccaagcctaccgagaacaacgaggacttcaacatcgtggccgtggcctccaatttcgccaccacagatctggacgccgacagaggaaagctgcccggcaagaagctgcctctggaagtgctgaaagagatggaagccaacgccagaaaggccggctgtaccagaggctgtctgatctgcctgagccacatcaagtgcacccctaagatgaagaagttcatccccggcagatgccacacctacgagggcgacaaagaatctgcccaaggcggaatcggagaggccatcgtggatatccctgagatccccggcttcaaggacctggaacctatggaacagtttatcgcccaggtggacctgtgcgtggactgtacaacaggctgcctgaaaggcctggccaacgtgcagtgtagcgacctgctgaagaagtggctgcctcagagatgcgccaccttcgcctctaagatccagggccaagtggacaagatcaaaggcgctggcggcgactaatagctaactagacaaaacaccaaacaaacaagctgcgagccacggacttaaataattgagccttaaagaagaaattctttaagtggatgctctcaaactcagggaaacctaaatctagttatagacaaggcaatcctgagccaagccgaagtagtaattagtaagttaacaatagatgacttacaactaatcggaaggtgcagagactcgacgggagctaccctaacgtcaagacgagggtaaagagagagtccaattctcaaagccaatatcaacagtaagtctagatatcggatcccgggaggctaggtggaggctcagtgtgataagtctgcgatggtggatgcatgtgtcatggtcatagctgtttcctgtgtgaaattgttatccgctcagagggcacaatcctattccgcgctatccgacaatctccaagacattaggtggagttcagttcggcgtatggcatatgtcgctggaaagaacatgtgagcaaaaggccagcaaaaggccaggaaccgtaaaaaggccgcgttgctggcgtttttccataggctccgcccccctgacgagcatcacaaaaatcgacgctcaagtcagaggtggcgaaacccgacaggactataaagataccaggcgtttccccctggaagctccctcgtgcgctctcctgttccgaccctgccgcttaccggatacctgtccgcctttctcccttcgggaagcgtggcgctttctcatagctcacgctgtaggtatctcagttcggtgtaggtcgttcgctccaagctgggctgtgtgcacgaaccccccgttcagcccgaccgctgcgccttatccggtaactatcgtcttgagtccaacccggtaagacacgacttatcgccactggcagcagccactggtaacaggattagcagagcgaggtatgtaggcggtgctacagagttcttgaagtggtggcctaactacggctacactagaagaacagtatttggtatctgcgctctgctgaagccagttaccttcggaaaaagagttggtagctcttgatccggcaaacaaaccaccgctggtagcggtggtttttttgtttgcaagcagcagattacgcgcagaaaaaaaggatctcaagaagatcctttgatcttttctacggggtctgacgctctattcaacaaagccgccgtcccgtcaagtcagcgtaaatgggtagggggcttcaaatcgtcctcgtgataccaattcggagcctgcttttttgtacaaacttgttgataatggcaattcaaggatcttcacctagatccttttaaattaaaaatgaagttttaaatcaatctaaagtatatatgagtaaacttggtctgacagttaccaatgcttaatcagtgaggcacctatctcagcgatctgtctatttcgttcatccatagttgcctgactccccgtcgtgtagataactacgatacgggagggcttaccatctggccccagtgctgcaatgataccgcgagagccacgctcaccggctccagatttatcagcaataaaccagccagccggaagggccgagcgcagaagtggtcctgcaactttatccgcctccatccagtctattaattgttgccgggaagctagagtaagtagttcgccagttaatagtttgcgcaacgttgttgccattgctacaggcatcgtggtgtcacgctcgtcgtttggtatggcttcattcagctccggttcccaacgatcaaggcgagttacatgatcccccatgttgtgcaaaaaagcggttagctccttcggtcctccgatcgttgtcagaagtaagttggccgcagtgttatcactcatggttatggcagcactgcataattctcttactgtcatgccatccgtaagatgcttttctgtgactggtgagtactcaaccaagtcattctgagaatagtgtatgcggcgaccgagttgctcttgcccggcgtcaatacgggataataccgcgccacatagcagaactttaaaagtgctcatcattggaaaacgttcttcggggcgaaaactctcaaggatcttaccgctgttgagatccagttcgatgtaacccactcgtgcacccaactgatcttcagcatcttttactttcaccagcgtttctgggtgagcaaaaacaggaaggcaaaatgccgcaaaaaagggaataagggcgacacggaaatgttgaatactcatactcttcctttttcaatattattgaagcatttatcagggttattgtctcatgagcggatacatatttgaatgtatttagaaaaataaacaaataggggttccgcgcacatttccccgaaaagtgccagatacctgaaacaaaacccatcgtacggccaaggaagtctccaataactgtgatccaccacaagcgccagggttttcccagtcacgacgttgtaaaacgacggccagtcatgcataatccgcacgcatctggaataaggaagtgccattccgcctgaccttaatacgactcactatagggagaccctcgaaaacaaaccacggcagtagcgaaagctgcaagagaatgaatccgtggctcgcagcaaacaccaaacaaaacaaacacaaaccaacaaaaagtggccacgcccgggccaccgatacttcccttcactccttcgggactgttggggaggaacacaacagggctcccctgttttcccattccttcccccttttcccaaccccaaccgccgtatctggtggcggcaagacacacgggtctttccctctaaagcacaattgtgtgtgtgtcccaggtcctcctgcgtacggtgcgggagtgctcccacccaactgttgtaagcctgtccaacgcgtcgtcctggcaagactatgacgtcgcatgttccgctgcggatgccgaccgggtaaccggttccccagtgtgtgtagtgcgatcttccaggtcctcctggttggcgttgtccagaaactgcttcaggtaagtggggtgtgcccaatccctacaaaggttgattctttcaccaccttaggaatgctccggaggtaccccagcaacagctgggatctgaccggaggctaattgtctacgggtggtgtttcctttttcttttcacacaactctactgcgtacaactcactgactatccacttgctctgtcacg

SEQ ID NO: 3581 - DNA, 3748 bp, synthetic construct
  source 1..3748: mol_type = other DNA; note = Anabaena L9a5, P1 exon min3
atgggagtgaaggtgctgttcgccctgatctgtattgccgtggccgaggccaagcctaccgagaacaacgaggacttcaacatcgtggccgtggcctccaatttcgccaccacagatctggacgccgacagaggaaagctgcccggcaagaagctgcctctggaagtgctgaaagagatggaagccaacgccagaaaggccggctgtaccagaggctgtctgatctgcctgagccacatcaagtgcacccctaagatgaagaagttcatccccggcagatgccacacctacgagggcgacaaagaatctgcccaaggcggaatcggagaggccatcgtggatatccctgagatccccggcttcaaggacctggaacctatggaacagtttatcgcccaggtggacctgtgcgtggactgtacaacaggctgcctgaaaggcctggccaacgtgcagtgtagcgacctgctgaagaagtggctgcctcagagatgcgccaccttcgcctctaagatccagggccaagtggacaagatcaaaggcgctggcggcgactaatagctaactagacaaaacaccaaacaaacaagctgcgagccacggacttaaataattgagccttaaagaagaaattctttaagtggatgctctcaaactcagggaaacctaaatctagttatagacaaggcaatcctgagccaagccgaagtagtaattagtaagttaacaatagatgacttacaactaatcggaaggtgcagagactcgacgggagctaccctaacgtcaagacgagggtaaagagagagtccaattctcaaagccaatatcaacagtaagtctagatatcggatcccgggaggctaggtggaggctcagtgtgataagtctgcgatggtggatgcatgtgtcatggtcatagctgtttcctgtgtgaaattgttatccgctcagagggcacaatcctattccgcgctatccgacaatctccaagacattaggtggagttcagttcggcgtatggcatatgtcgctggaaagaacatgtgagcaaaaggccagcaaaaggccaggaaccgtaaaaaggccgcgttgctggcgtttttccataggctccgcccccctgacgagcatcacaaaaatcgacgctcaagtcagaggtggcgaaacccgacaggactataaagataccaggcgtttccccctggaagctccctcgtgcgctctcctgttccgaccctgccgcttaccggatacctgtccgcctttctcccttcgggaagcgtggcgctttctcatagctcacgctgtaggtatctcagttcggtgtaggtcgttcgctccaagctgggctgtgtgcacgaaccccccgttcagcccgaccgctgcgccttatccggtaactatcgtcttgagtccaacccggtaagacacgacttatcgccactggcagcagccactggtaacaggattagcagagcgaggtatgtaggcggtgctacagagttcttgaagtggtggcctaactacggctacactagaagaacagtatttggtatctgcgctctgctgaagccagttaccttcggaaaaagagttggtagctcttgatccggcaaacaaaccaccgctggtagcggtggtttttttgtttgcaagcagcagattacgcgcagaaaaaaaggatctcaagaagatcctttgatcttttctacggggtctgacgctctattcaacaaagccgccgtcccgtcaagtcagcgtaaatgggtagggggcttcaaatcgtcctcgtgataccaattcggagcctgcttttttgtacaaacttgttgataatggcaattcaaggatcttcacctagatccttttaaattaaaaatgaagttttaaatcaatctaaagtatatatgagtaaacttggtctgacagttaccaatgcttaatcagtgaggcacctatctcagcgatctgtctatttcgttcatccatagttgcctgactccccgtcgtgtagataactacgatacgggagggcttaccatctggccccagtgctgcaatgataccgcgagagccacgctcaccggctccagatttatcagcaataaaccagccagccggaagggccgagcgcagaagtggtcctgcaactttatccgcctccatccagtctattaattgttgccgggaagctagagtaagtagttcgccagttaatagtttgcgcaacgttgttgccattgctacaggcatcgtggtgtcacgctcgtcgtttggtatggcttcattcagctccggttcccaacgatcaaggcgagttacatgatcccccatgttgtgcaaaaaagcggttagctccttcggtcctccgatcgttgtcagaagtaagttggccgcagtgttatcactcatggttatggcagcactgcataattctcttactgtcatgccatccgtaagatgcttttctgtgactggtgagtactcaaccaagtcattctgagaatagtgtatgcggcgaccgagttgctcttgcccggcgtcaatacgggataataccgcgccacatagcagaactttaaaagtgctcatcattggaaaacgttcttcggggcgaaaactctcaaggatcttaccgctgttgagatccagttcgatgtaacccactcgtgcacccaactgatcttcagcatcttttactttcaccagcgtttctgggtgagcaaaaacaggaaggcaaaatgccgcaaaaaagggaataagggcgacacggaaatgttgaatactcatactcttcctttttcaatattattgaagcatttatcagggttattgtctcatgagcggatacatatttgaatgtatttagaaaaataaacaaataggggttccgcgcacatttccccgaaaagtgccagatacctgaaacaaaacccatcgtacggccaaggaagtctccaataactgtgatccaccacaagcgccagggttttcccagtcacgacgttgtaaaacgacggccagtcatgcataatccgcacgcatctggaataaggaagtgccattccgcctgaccttaatacgactcactatagggagaccctcgaaaacaaaccacggcagtagcgaaagctgcaagagaatgatccgtggctcgcagcaaacaccaaacaaaacaaacacaaaccaacaaaaagtggccacgcccgggccaccgatacttcccttcactccttcgggactgttggggaggaacacaacagggctcccctgttttcccattccttcccccttttcccaaccccaaccgccgtatctggtggcggcaagacacacgggtctttccctctaaagcacaattgtgtgtgtgtcccaggtcctcctgcgtacggtgcgggagtgctcccacccaactgttgtaagcctgtccaacgcgtcgtcctggcaagactatgacgtcgcatgttccgctgcggatgccgaccgggtaaccggttccccagtgtgtgtagtgcgatcttccaggtcctcctggttggcgttgtccagaaactgcttcaggtaagtggggtgtgcccaatccctacaaaggttgattctttcaccaccttaggaatgctccggaggtaccccagcaacagctgggatctgaccggaggctaattgtctacgggtggtgtttcctttttcttttcacacaactctactgcgtacaactcactgactatccacttgctctgtcacg

SEQ ID NO: 3582 - DNA, 3747 bp, synthetic construct
  source 1..3747: mol_type = other DNA; note = Anabaena L9a5, P1 exon min4
atgggagtgaaggtgctgttcgccctgatctgtattgccgtggccgaggccaagcctaccgagaacaacgaggacttcaacatcgtggccgtggcctccaatttcgccaccacagatctggacgccgacagaggaaagctgcccggcaagaagctgcctctggaagtgctgaaagagatggaagccaacgccagaaaggccggctgtaccagaggctgtctgatctgcctgagccacatcaagtgcacccctaagatgaagaagttcatccccggcagatgccacacctacgagggcgacaaagaatctgcccaaggcggaatcggagaggccatcgtggatatccctgagatccccggcttcaaggacctggaacctatggaacagtttatcgcccaggtggacctgtgcgtggactgtacaacaggctgcctgaaaggcctggccaacgtgcagtgtagcgacctgctgaagaagtggctgcctcagagatgcgccaccttcgcctctaagatccagggccaagtggacaagatcaaaggcgctggcggcgactaatagctaactagacaaaacaccaaacaaacaagctgcgagccacggacttaaataattgagccttaaagaagaaattctttaagtggatgctctcaaactcagggaaacctaaatctagttatagacaaggcaatcctgagccaagccgaagtagtaattagtaagttaacaatagatgacttacaactaatcggaaggtgcagagactcgacgggagctaccctaacgtcaagacgagggtaaagagagagtccaattctcaaagccaatatcaacagtaagtctagatatcggatcccgggaggctaggtggaggctcagtgtgataagtctgcgatggtggatgcatgtgtcatggtcatagctgtttcctgtgtgaaattgttatccgctcagagggcacaatcctattccgcgctatccgacaatctccaagacattaggtggagttcagttcggcgtatggcatatgtcgctggaaagaacatgtgagcaaaaggccagcaaaaggccaggaaccgtaaaaaggccgcgttgctggcgtttttccataggctccgcccccctgacgagcatcacaaaaatcgacgctcaagtcagaggtggcgaaacccgacaggactataaagataccaggcgtttccccctggaagctccctcgtgcgctctcctgttccgaccctgccgcttaccggatacctgtccgcctttctcccttcgggaagcgtggcgctttctcatagctcacgctgtaggtatctcagttcggtgtaggtcgttcgctccaagctgggctgtgtgcacgaaccccccgttcagcccgaccgctgcgccttatccggtaactatcgtcttgagtccaacccggtaagacacgacttatcgccactggcagcagccactggtaacaggattagcagagcgaggtatgtaggcggtgctacagagttcttgaagtggtggcctaactacggctacactagaagaacagtatttggtatctgcgctctgctgaagccagttaccttcggaaaaagagttggtagctcttgatccggcaaacaaaccaccgctggtagcggtggtttttttgtttgcaagcagcagattacgcgcagaaaaaaaggatctcaagaagatcctttgatcttttctacggggtctgacgctctattcaacaaagccgccgtcccgtcaagtcagcgtaaatgggtagggggcttcaaatcgtcctcgtgataccaattcggagcctgcttttttgtacaaacttgttgataatggcaattcaaggatcttcacctagatccttttaaattaaaaatgaagttttaaatcaatctaaagtatatatgagtaaacttggtctgacagttaccaatgcttaatcagtgaggcacctatctcagcgatctgtctatttcgttcatccatagttgcctgactccccgtcgtgtagataactacgatacgggagggcttaccatctggccccagtgctgcaatgataccgcgagagccacgctcaccggctccagatttatcagcaataaaccagccagccggaagggccgagcgcagaagtggtcctgcaactttatccgcctccatccagtctattaattgttgccgggaagctagagtaagtagttcgccagttaatagtttgcgcaacgttgttgccattgctacaggcatcgtggtgtcacgctcgtcgtttggtatggcttcattcagctccggttcccaacgatcaaggcgagttacatgatcccccatgttgtgcaaaaaagcggttagctccttcggtcctccgatcgttgtcagaagtaagttggccgcagtgttatcactcatggttatggcagcactgcataattctcttactgtcatgccatccgtaagatgcttttctgtgactggtgagtactcaaccaagtcattctgagaatagtgtatgcggcgaccgagttgctcttgcccggcgtcaatacgggataataccgcgccacatagcagaactttaaaagtgctcatcattggaaaacgttcttcggggcgaaaactctcaaggatcttaccgctgttgagatccagttcgatgtaacccactcgtgcacccaactgatcttcagcatcttttactttcaccagcgtttctgggtgagcaaaaacaggaaggcaaaatgccgcaaaaaagggaataagggcgacacggaaatgttgaatactcatactcttcctttttcaatattattgaagcatttatcagggttattgtctcatgagcggatacatatttgaatgtatttagaaaaataaacaaataggggttccgcgcacatttccccgaaaagtgccagatacctgaaacaaaacccatcgtacggccaaggaagtctccaataactgtgatccaccacaagcgccagggttttcccagtcacgacgttgtaaaacgacggccagtcatgcataatccgcacgcatctggaataaggaagtgccattccgcctgaccttaatacgactcactatagggagaccctcgaaaacaaaccacggcagtagcgaaagctgcaagagaatgtccgtggctcgcagcaaacaccaaacaaaacaaacacaaaccaacaaaaagtggccacgcccgggccaccgatacttcccttcactccttcgggactgttggggaggaacacaacagggctcccctgttttcccattccttcccccttttcccaaccccaaccgccgtatctggtggcggcaagacacacgggtctttccctctaaagcacaattgtgtgtgtgtcccaggtcctcctgcgtacggtgcgggagtgctcccacccaactgttgtaagcctgtccaacgcgtcgtcctggcaagactatgacgtcgcatgttccgctgcggatgccgaccgggtaaccggttccccagtgtgtgtagtgcgatcttccaggtcctcctggttggcgttgtccagaaactgcttcaggtaagtggggtgtgcccaatccctacaaaggttgattctttcaccaccttaggaatgctccggaggtaccccagcaacagctgggatctgaccggaggctaattgtctacgggtggtgtttcctttttcttttcacacaactctactgcgtacaactcactgactatccacttgctctgtcacg

SEQ ID NO: 3583 - DNA, 3746 bp, synthetic construct
  source 1..3746: mol_type = other DNA; note = Anabaena L9a5, P1 exon min5
atgggagtgaaggtgctgttcgccctgatctgtattgccgtggccgaggccaagcctaccgagaacaacgaggacttcaacatcgtggccgtggcctccaatttcgccaccacagatctggacgccgacagaggaaagctgcccggcaagaagctgcctctggaagtgctgaaagagatggaagccaacgccagaaaggccggctgtaccagaggctgtctgatctgcctgagccacatcaagtgcacccctaagatgaagaagttcatccccggcagatgccacacctacgagggcgacaaagaatctgcccaaggcggaatcggagaggccatcgtggatatccctgagatccccggcttcaaggacctggaacctatggaacagtttatcgcccaggtggacctgtgcgtggactgtacaacaggctgcctgaaaggcctggccaacgtgcagtgtagcgacctgctgaagaagtggctgcctcagagatgcgccaccttcgcctctaagatccagggccaagtggacaagatcaaaggcgctggcggcgactaatagctaactagacaaaacaccaaacaaacaagctgcgagccacggacttaaataattgagccttaaagaagaaattctttaagtggatgctctcaaactcagggaaacctaaatctagttatagacaaggcaatcctgagccaagccgaagtagtaattagtaagttaacaatagatgacttacaactaatcggaaggtgcagagactcgacgggagctaccctaacgtcaagacgagggtaaagagagagtccaattctcaaagccaatatcaacagtaagtctagatatcggatcccgggaggctaggtggaggctcagtgtgataagtctgcgatggtggatgcatgtgtcatggtcatagctgtttcctgtgtgaaattgttatccgctcagagggcacaatcctattccgcgctatccgacaatctccaagacattaggtggagttcagttcggcgtatggcatatgtcgctggaaagaacatgtgagcaaaaggccagcaaaaggccaggaaccgtaaaaaggccgcgttgctggcgtttttccataggctccgcccccctgacgagcatcacaaaaatcgacgctcaagtcagaggtggcgaaacccgacaggactataaagataccaggcgtttccccctggaagctccctcgtgcgctctcctgttccgaccctgccgcttaccggatacctgtccgcctttctcccttcgggaagcgtggcgctttctcatagctcacgctgtaggtatctcagttcggtgtaggtcgttcgctccaagctgggctgtgtgcacgaaccccccgttcagcccgaccgctgcgccttatccggtaactatcgtcttgagtccaacccggtaagacacgacttatcgccactggcagcagccactggtaacaggattagcagagcgaggtatgtaggcggtgctacagagttcttgaagtggtggcctaactacggctacactagaagaacagtatttggtatctgcgctctgctgaagccagttaccttcggaaaaagagttggtagctcttgatccggcaaacaaaccaccgctggtagcggtggtttttttgtttgcaagcagcagattacgcgcagaaaaaaaggatctcaagaagatcctttgatcttttctacggggtctgacgctctattcaacaaagccgccgtcccgtcaagtcagcgtaaatgggtagggggcttcaaatcgtcctcgtgataccaattcggagcctgcttttttgtacaaacttgttgataatggcaattcaaggatcttcacctagatccttttaaattaaaaatgaagttttaaatcaatctaaagtatatatgagtaaacttggtctgacagttaccaatgcttaatcagtgaggcacctatctcagcgatctgtctatttcgttcatccatagttgcctgactccccgtcgtgtagataactacgatacgggagggcttaccatctggccccagtgctgcaatgataccgcgagagccacgctcaccggctccagatttatcagcaataaaccagccagccggaagggccgagcgcagaagtggtcctgcaactttatccgcctccatccagtctattaattgttgccgggaagctagagtaagtagttcgccagttaatagtttgcgcaacgttgttgccattgctacaggcatcgtggtgtcacgctcgtcgtttggtatggcttcattcagctccggttcccaacgatcaaggcgagttacatgatcccccatgttgtgcaaaaaagcggttagctccttcggtcctccgatcgttgtcagaagtaagttggccgcagtgttatcactcatggttatggcagcactgcataattctcttactgtcatgccatccgtaagatgcttttctgtgactggtgagtactcaaccaagtcattctgagaatagtgtatgcggcgaccgagttgctcttgcccggcgtcaatacgggataataccgcgccacatagcagaactttaaaagtgctcatcattggaaaacgttcttcggggcgaaaactctcaaggatcttaccgctgttgagatccagttcgatgtaacccactcgtgcacccaactgatcttcagcatcttttactttcaccagcgtttctgggtgagcaaaaacaggaaggcaaaatgccgcaaaaaagggaataagggcgacacggaaatgttgaatactcatactcttcctttttcaatattattgaagcatttatcagggttattgtctcatgagcggatacatatttgaatgtatttagaaaaataaacaaataggggttccgcgcacatttccccgaaaagtgccagatacctgaaacaaaacccatcgtacggccaaggaagtctccaataactgtgatccaccacaagcgccagggttttcccagtcacgacgttgtaaaacgacggccagtcatgcataatccgcacgcatctggaataaggaagtgccattccgcctgaccttaatacgactcactatagggagaccctcgaaaacaaaccacggcagtagcgaaagctgcaagagaatgccgtggctcgcagcaaacaccaaacaaaacaaacacaaaccaacaaaaagtggccacgcccgggccaccgatacttcccttcactccttcgggactgttggggaggaacacaacagggctcccctgttttcccattccttcccccttttcccaaccccaaccgccgtatctggtggcggcaagacacacgggtctttccctctaaagcacaattgtgtgtgtgtcccaggtcctcctgcgtacggtgcgggagtgctcccacccaactgttgtaagcctgtccaacgcgtcgtcctggcaagactatgacgtcgcatgttccgctgcggatgccgaccgggtaaccggttccccagtgtgtgtagtgcgatcttccaggtcctcctggttggcgttgtccagaaactgcttcaggtaagtggggtgtgcccaatccctacaaaggttgattctttcaccaccttaggaatgctccggaggtaccccagcaacagctgggatctgaccggaggctaattgtctacgggtggtgtttcctttttcttttcacacaactctactgcgtacaactcactgactatccacttgctctgtcacg

SEQ ID NO: 3584 - DNA, 3745 bp, synthetic construct
  source 1..3745: mol_type = other DNA; note = Anabaena L9a5, P1 exon min6
atgggagtgaaggtgctgttcgccctgatctgtattgccgtggccgaggccaagcctaccgagaacaacgaggacttcaacatcgtggccgtggcctccaatttcgccaccacagatctggacgccgacagaggaaagctgcccggcaagaagctgcctctggaagtgctgaaagagatggaagccaacgccagaaaggccggctgtaccagaggctgtctgatctgcctgagccacatcaagtgcacccctaagatgaagaagttcatccccggcagatgccacacctacgagggcgacaaagaatctgcccaaggcggaatcggagaggccatcgtggatatccctgagatccccggcttcaaggacctggaacctatggaacagtttatcgcccaggtggacctgtgcgtggactgtacaacaggctgcctgaaaggcctggccaacgtgcagtgtagcgacctgctgaagaagtggctgcctcagagatgcgccaccttcgcctctaagatccagggccaagtggacaagatcaaaggcgctggcggcgactaatagctaactagacaaaacaccaaacaaacaagctgcgagccacggacttaaataattgagccttaaagaagaaattctttaagtggatgctctcaaactcagggaaacctaaatctagttatagacaaggcaatcctgagccaagccgaagtagtaattagtaagttaacaatagatgacttacaactaatcggaaggtgcagagactcgacgggagctaccctaacgtcaagacgagggtaaagagagagtccaattctcaaagccaatatcaacagtaagtctagatatcggatcccgggaggctaggtggaggctcagtgtgataagtctgcgatggtggatgcatgtgtcatggtcatagctgtttcctgtgtgaaattgttatccgctcagagggcacaatcctattccgcgctatccgacaatctccaagacattaggtggagttcagttcggcgtatggcatatgtcgctggaaagaacatgtgagcaaaaggccagcaaaaggccaggaaccgtaaaaaggccgcgttgctggcgtttttccataggctccgcccccctgacgagcatcacaaaaatcgacgctcaagtcagaggtggcgaaacccgacaggactataaagataccaggcgtttccccctggaagctccctcgtgcgctctcctgttccgaccctgccgcttaccggatacctgtccgcctttctcccttcgggaagcgtggcgctttctcatagctcacgctgtaggtatctcagttcggtgtaggtcgttcgctccaagctgggctgtgtgcacgaaccccccgttcagcccgaccgctgcgccttatccggtaactatcgtcttgagtccaacccggtaagacacgacttatcgccactggcagcagccactggtaacaggattagcagagcgaggtatgtaggcggtgctacagagttcttgaagtggtggcctaactacggctacactagaagaacagtatttggtatctgcgctctgctgaagccagttaccttcggaaaaagagttggtagctcttgatccggcaaacaaaccaccgctggtagcggtggtttttttgtttgcaagcagcagattacgcgcagaaaaaaaggatctcaagaagatcctttgatcttttctacggggtctgacgctctattcaacaaagccgccgtcccgtcaagtcagcgtaaatgggtagggggcttcaaatcgtcctcgtgataccaattcggagcctgcttttttgtacaaacttgttgataatggcaattcaaggatcttcacctagatccttttaaattaaaaatgaagttttaaatcaatctaaagtatatatgagtaaacttggtctgacagttaccaatgcttaatcagtgaggcacctatctcagcgatctgtctatttcgttcatccatagttgcctgactccccgtcgtgtagataactacgatacgggagggcttaccatctggccccagtgctgcaatgataccgcgagagccacgctcaccggctccagatttatcagcaataaaccagccagccggaagggccgagcgcagaagtggtcctgcaactttatccgcctccatccagtctattaattgttgccgggaagctagagtaagtagttcgccagttaatagtttgcgcaacgttgttgccattgctacaggcatcgtggtgtcacgctcgtcgtttggtatggcttcattcagctccggttcccaacgatcaaggcgagttacatgatcccccatgttgtgcaaaaaagcggttagctccttcggtcctccgatcgttgtcagaagtaagttggccgcagtgttatcactcatggttatggcagcactgcataattctcttactgtcatgccatccgtaagatgcttttctgtgactggtgagtactcaaccaagtcattctgagaatagtgtatgcggcgaccgagttgctcttgcccggcgtcaatacgggataataccgcgccacatagcagaactttaaaagtgctcatcattggaaaacgttcttcggggcgaaaactctcaaggatcttaccgctgttgagatccagttcgatgtaacccactcgtgcacccaactgatcttcagcatcttttactttcaccagcgtttctgggtgagcaaaaacaggaaggcaaaatgccgcaaaaaagggaataagggcgacacggaaatgttgaatactcatactcttcctttttcaatattattgaagcatttatcagggttattgtctcatgagcggatacatatttgaatgtatttagaaaaataaacaaataggggttccgcgcacatttccccgaaaagtgccagatacctgaaacaaaacccatcgtacggccaaggaagtctccaataactgtgatccaccacaagcgccagggttttcccagtcacgacgttgtaaaacgacggccagtcatgcataatccgcacgcatctggaataaggaagtgccattccgcctgaccttaatacgactcactatagggagaccctcgaaaacaaaccacggcagtagcgaaagctgcaagagaatgcgtggctcgcagcaaacaccaaacaaaacaaacacaaaccaacaaaaagtggccacgcccgggccaccgatacttcccttcactccttcgggactgttggggaggaacacaacagggctcccctgttttcccattccttcccccttttcccaaccccaaccgccgtatctggtggcggcaagacacacgggtctttccctctaaagcacaattgtgtgtgtgtcccaggtcctcctgcgtacggtgcgggagtgctcccacccaactgttgtaagcctgtccaacgcgtcgtcctggcaagactatgacgtcgcatgttccgctgcggatgccgaccgggtaaccggttccccagtgtgtgtagtgcgatcttccaggtcctcctggttggcgttgtccagaaactgcttcaggtaagtggggtgtgcccaatccctacaaaggttgattctttcaccaccttaggaatgctccggaggtaccccagcaacagctgggatctgaccggaggctaattgtctacgggtggtgtttcctttttcttttcacacaactctactgcgtacaactcactgactatccacttgctctgtcacg

SEQ ID NO: 3585 - DNA, 3744 bp, synthetic construct
  source 1..3744: mol_type = other DNA; note = Anabaena L9a5, P1 exon min7
atgggagtgaaggtgctgttcgccctgatctgtattgccgtggccgaggccaagcctaccgagaacaacgaggacttcaacatcgtggccgtggcctccaatttcgccaccacagatctggacgccgacagaggaaagctgcccggcaagaagctgcctctggaagtgctgaaagagatggaagccaacgccagaaaggccggctgtaccagaggctgtctgatctgcctgagccacatcaagtgcacccctaagatgaagaagttcatccccggcagatgccacacctacgagggcgacaaagaatctgcccaaggcggaatcggagaggccatcgtggatatccctgagatccccggcttcaaggacctggaacctatggaacagtttatcgcccaggtggacctgtgcgtggactgtacaacaggctgcctgaaaggcctggccaacgtgcagtgtagcgacctgctgaagaagtggctgcctcagagatgcgccaccttcgcctctaagatccagggccaagtggacaagatcaaaggcgctggcggcgactaatagctaactagacaaaacaccaaacaaacaagctgcgagccacggacttaaataattgagccttaaagaagaaattctttaagtggatgctctcaaactcagggaaacctaaatctagttatagacaaggcaatcctgagccaagccgaagtagtaattagtaagttaacaatagatgacttacaactaatcggaaggtgcagagactcgacgggagctaccctaacgtcaagacgagggtaaagagagagtccaattctcaaagccaatatcaacagtaagtctagatatcggatcccgggaggctaggtggaggctcagtgtgataagtctgcgatggtggatgcatgtgtcatggtcatagctgtttcctgtgtgaaattgttatccgctcagagggcacaatcctattccgcgctatccgacaatctccaagacattaggtggagttcagttcggcgtatggcatatgtcgctggaaagaacatgtgagcaaaaggccagcaaaaggccaggaaccgtaaaaaggccgcgttgctggcgtttttccataggctccgcccccctgacgagcatcacaaaaatcgacgctcaagtcagaggtggcgaaacccgacaggactataaagataccaggcgtttccccctggaagctccctcgtgcgctctcctgttccgaccctgccgcttaccggatacctgtccgcctttctcccttcgggaagcgtggcgctttctcatagctcacgctgtaggtatctcagttcggtgtaggtcgttcgctccaagctgggctgtgtgcacgaaccccccgttcagcccgaccgctgcgccttatccggtaactatcgtcttgagtccaacccggtaagacacgacttatcgccactggcagcagccactggtaacaggattagcagagcgaggtatgtaggcggtgctacagagttcttgaagtggtggcctaactacggctacactagaagaacagtatttggtatctgcgctctgctgaagccagttaccttcggaaaaagagttggtagctcttgatccggcaaacaaaccaccgctggtagcggtggtttttttgtttgcaagcagcagattacgcgcagaaaaaaaggatctcaagaagatcctttgatcttttctacggggtctgacgctctattcaacaaagccgccgtcccgtcaagtcagcgtaaatgggtagggggcttcaaatcgtcctcgtgataccaattcggagcctgcttttttgtacaaacttgttgataatggcaattcaaggatcttcacctagatccttttaaattaaaaatgaagttttaaatcaatctaaagtatatatgagtaaacttggtctgacagttaccaatgcttaatcagtgaggcacctatctcagcgatctgtctatttcgttcatccatagttgcctgactccccgtcgtgtagataactacgatacgggagggcttaccatctggccccagtgctgcaatgataccgcgagagccacgctcaccggctccagatttatcagcaataaaccagccagccggaagggccgagcgcagaagtggtcctgcaactttatccgcctccatccagtctattaattgttgccgggaagctagagtaagtagttcgccagttaatagtttgcgcaacgttgttgccattgctacaggcatcgtggtgtcacgctcgtcgtttggtatggcttcattcagctccggttcccaacgatcaaggcgagttacatgatcccccatgttgtgcaaaaaagcggttagctccttcggtcctccgatcgttgtcagaagtaagttggccgcagtgttatcactcatggttatggcagcactgcataattctcttactgtcatgccatccgtaagatgcttttctgtgactggtgagtactcaaccaagtcattctgagaatagtgtatgcggcgaccgagttgctcttgcccggcgtcaatacgggataataccgcgccacatagcagaactttaaaagtgctcatcattggaaaacgttcttcggggcgaaaactctcaaggatcttaccgctgttgagatccagttcgatgtaacccactcgtgcacccaactgatcttcagcatcttttactttcaccagcgtttctgggtgagcaaaaacaggaaggcaaaatgccgcaaaaaagggaataagggcgacacggaaatgttgaatactcatactcttcctttttcaatattattgaagcatttatcagggttattgtctcatgagcggatacatatttgaatgtatttagaaaaataaacaaataggggttccgcgcacatttccccgaaaagtgccagatacctgaaacaaaacccatcgtacggccaaggaagtctccaataactgtgatccaccacaagcgccagggttttcccagtcacgacgttgtaaaacgacggccagtcatgcataatccgcacgcatctggaataaggaagtgccattccgcctgaccttaatacgactcactatagggagaccctcgaaaacaaaccacggcagtagcgaaagctgcaagagaatggtggctcgcagcaaacaccaaacaaaacaaacacaaaccaacaaaaagtggccacgcccgggccaccgatacttcccttcactccttcgggactgttggggaggaacacaacagggctcccctgttttcccattccttcccccttttcccaaccccaaccgccgtatctggtggcggcaagacacacgggtctttccctctaaagcacaattgtgtgtgtgtcccaggtcctcctgcgtacggtgcgggagtgctcccacccaactgttgtaagcctgtccaacgcgtcgtcctggcaagactatgacgtcgcatgttccgctgcggatgccgaccgggtaaccggttccccagtgtgtgtagtgcgatcttccaggtcctcctggttggcgttgtccagaaactgcttcaggtaagtggggtgtgcccaatccctacaaaggttgattctttcaccaccttaggaatgctccggaggtaccccagcaacagctgggatctgaccggaggctaattgtctacgggtggtgtttcctttttcttttcacacaactctactgcgtacaactcactgactatccacttgctctgtcacg

SEQ ID NO: 3586 - DNA, 3743 bp, synthetic construct
  source 1..3743: mol_type = other DNA; note = Anabaena L9a5, P1 exon min8
atgggagtgaaggtgctgttcgccctgatctgtattgccgtggccgaggccaagcctaccgagaacaacgaggacttcaacatcgtggccgtggcctccaatttcgccaccacagatctggacgccgacagaggaaagctgcccggcaagaagctgcctctggaagtgctgaaagagatggaagccaacgccagaaaggccggctgtaccagaggctgtctgatctgcctgagccacatcaagtgcacccctaagatgaagaagttcatccccggcagatgccacacctacgagggcgacaaagaatctgcccaaggcggaatcggagaggccatcgtggatatccctgagatccccggcttcaaggacctggaacctatggaacagtttatcgcccaggtggacctgtgcgtggactgtacaacaggctgcctgaaaggcctggccaacgtgcagtgtagcgacctgctgaagaagtggctgcctcagagatgcgccaccttcgcctctaagatccagggccaagtggacaagatcaaaggcgctggcggcgactaatagctaactagacaaaacaccaaacaaacaagctgcgagccacggacttaaataattgagccttaaagaagaaattctttaagtggatgctctcaaactcagggaaacctaaatctagttatagacaaggcaatcctgagccaagccgaagtagtaattagtaagttaacaatagatgacttacaactaatcggaaggtgcagagactcgacgggagctaccctaacgtcaagacgagggtaaagagagagtccaattctcaaagccaatatcaacagtaagtctagatatcggatcccgggaggctaggtggaggctcagtgtgataagtctgcgatggtggatgcatgtgtcatggtcatagctgtttcctgtgtgaaattgttatccgctcagagggcacaatcctattccgcgctatccgacaatctccaagacattaggtggagttcagttcggcgtatggcatatgtcgctggaaagaacatgtgagcaaaaggccagcaaaaggccaggaaccgtaaaaaggccgcgttgctggcgtttttccataggctccgcccccctgacgagcatcacaaaaatcgacgctcaagtcagaggtggcgaaacccgacaggactataaagataccaggcgtttccccctggaagctccctcgtgcgctctcctgttccgaccctgccgcttaccggatacctgtccgcctttctcccttcgggaagcgtggcgctttctcatagctcacgctgtaggtatctcagttcggtgtaggtcgttcgctccaagctgggctgtgtgcacgaaccccccgttcagcccgaccgctgcgccttatccggtaactatcgtcttgagtccaacccggtaagacacgacttatcgccactggcagcagccactggtaacaggattagcagagcgaggtatgtaggcggtgctacagagttcttgaagtggtggcctaactacggctacactagaagaacagtatttggtatctgcgctctgctgaagccagttaccttcggaaaaagagttggtagctcttgatccggcaaacaaaccaccgctggtagcggtggtttttttgtttgcaagcagcagattacgcgcagaaaaaaaggatctcaagaagatcctttgatcttttctacggggtctgacgctctattcaacaaagccgccgtcccgtcaagtcagcgtaaatgggtagggggcttcaaatcgtcctcgtgataccaattcggagcctgcttttttgtacaaacttgttgataatggcaattcaaggatcttcacctagatccttttaaattaaaaatgaagttttaaatcaatctaaagtatatatgagtaaacttggtctgacagttaccaatgcttaatcagtgaggcacctatctcagcgatctgtctatttcgttcatccatagttgcctgactccccgtcgtgtagataactacgatacgggagggcttaccatctggccccagtgctgcaatgataccgcgagagccacgctcaccggctccagatttatcagcaataaaccagccagccggaagggccgagcgcagaagtggtcctgcaactttatccgcctccatccagtctattaattgttgccgggaagctagagtaagtagttcgccagttaatagtttgcgcaacgttgttgccattgctacaggcatcgtggtgtcacgctcgtcgtttggtatggcttcattcagctccggttcccaacgatcaaggcgagttacatgatcccccatgttgtgcaaaaaagcggttagctccttcggtcctccgatcgttgtcagaagtaagttggccgcagtgttatcactcatggttatggcagcactgcataattctcttactgtcatgccatccgtaagatgcttttctgtgactggtgagtactcaaccaagtcattctgagaatagtgtatgcggcgaccgagttgctcttgcccggcgtcaatacgggataataccgcgccacatagcagaactttaaaagtgctcatcattggaaaacgttcttcggggcgaaaactctcaaggatcttaccgctgttgagatccagttcgatgtaacccactcgtgcacccaactgatcttcagcatcttttactttcaccagcgtttctgggtgagcaaaaacaggaaggcaaaatgccgcaaaaaagggaataagggcgacacggaaatgttgaatactcatactcttcctttttcaatattattgaagcatttatcagggttattgtctcatgagcggatacatatttgaatgtatttagaaaaataaacaaataggggttccgcgcacatttccccgaaaagtgccagatacctgaaacaaaacccatcgtacggccaaggaagtctccaataactgtgatccaccacaagcgccagggttttcccagtcacgacgttgtaaaacgacggccagtcatgcataatccgcacgcatctggaataaggaagtgccattccgcctgaccttaatacgactcactatagggagaccctcgaaaacaaaccacggcagtagcgaaagctgcaagagaatgtggctcgcagcaaacaccaaacaaaacaaacacaaaccaacaaaaagtggccacgcccgggccaccgatacttcccttcactccttcgggactgttggggaggaacacaacagggctcccctgttttcccattccttcccccttttcccaaccccaaccgccgtatctggtggcggcaagacacacgggtctttccctctaaagcacaattgtgtgtgtgtcccaggtcctcctgcgtacggtgcgggagtgctcccacccaactgttgtaagcctgtccaacgcgtcgtcctggcaagactatgacgtcgcatgttccgctgcggatgccgaccgggtaaccggttccccagtgtgtgtagtgcgatcttccaggtcctcctggttggcgttgtccagaaactgcttcaggtaagtggggtgtgcccaatccctacaaaggttgattctttcaccaccttaggaatgctccggaggtaccccagcaacagctgggatctgaccggaggctaattgtctacgggtggtgtttcctttttcttttcacacaactctactgcgtacaactcactgactatccacttgctctgtcacg

SEQ ID NO: 3587 - DNA, 3742 bp, synthetic construct
  source 1..3742: mol_type = other DNA; note = Anabaena L9a5, no P1 exon
atgggagtgaaggtgctgttcgccctgatctgtattgccgtggccgaggccaagcctaccgagaacaacgaggacttcaacatcgtggccgtggcctccaatttcgccaccacagatctggacgccgacagaggaaagctgcccggcaagaagctgcctctggaagtgctgaaagagatggaagccaacgccagaaaggccggctgtaccagaggctgtctgatctgcctgagccacatcaagtgcacccctaagatgaagaagttcatccccggcagatgccacacctacgagggcgacaaagaatctgcccaaggcggaatcggagaggccatcgtggatatccctgagatccccggcttcaaggacctggaacctatggaacagtttatcgcccaggtggacctgtgcgtggactgtacaacaggctgcctgaaaggcctggccaacgtgcagtgtagcgacctgctgaagaagtggctgcctcagagatgcgccaccttcgcctctaagatccagggccaagtggacaagatcaaaggcgctggcggcgactaatagctaactagacaaaacaccaaacaaacaagctgcgagccacggacttaaataattgagccttaaagaagaaattctttaagtggatgctctcaaactcagggaaacctaaatctagttatagacaaggcaatcctgagccaagccgaagtagtaattagtaagttaacaatagatgacttacaactaatcggaaggtgcagagactcgacgggagctaccctaacgtcaagacgagggtaaagagagagtccaattctcaaagccaatatcaacagtaagtctagatatcggatcccgggaggctaggtggaggctcagtgtgataagtctgcgatggtggatgcatgtgtcatggtcatagctgtttcctgtgtgaaattgttatccgctcagagggcacaatcctattccgcgctatccgacaatctccaagacattaggtggagttcagttcggcgtatggcatatgtcgctggaaagaacatgtgagcaaaaggccagcaaaaggccaggaaccgtaaaaaggccgcgttgctggcgtttttccataggctccgcccccctgacgagcatcacaaaaatcgacgctcaagtcagaggtggcgaaacccgacaggactataaagataccaggcgtttccccctggaagctccctcgtgcgctctcctgttccgaccctgccgcttaccggatacctgtccgcctttctcccttcgggaagcgtggcgctttctcatagctcacgctgtaggtatctcagttcggtgtaggtcgttcgctccaagctgggctgtgtgcacgaaccccccgttcagcccgaccgctgcgccttatccggtaactatcgtcttgagtccaacccggtaagacacgacttatcgccactggcagcagccactggtaacaggattagcagagcgaggtatgtaggcggtgctacagagttcttgaagtggtggcctaactacggctacactagaagaacagtatttggtatctgcgctctgctgaagccagttaccttcggaaaaagagttggtagctcttgatccggcaaacaaaccaccgctggtagcggtggtttttttgtttgcaagcagcagattacgcgcagaaaaaaaggatctcaagaagatcctttgatcttttctacggggtctgacgctctattcaacaaagccgccgtcccgtcaagtcagcgtaaatgggtagggggcttcaaatcgtcctcgtgataccaattcggagcctgcttttttgtacaaacttgttgataatggcaattcaaggatcttcacctagatccttttaaattaaaaatgaagttttaaatcaatctaaagtatatatgagtaaacttggtctgacagttaccaatgcttaatcagtgaggcacctatctcagcgatctgtctatttcgttcatccatagttgcctgactccccgtcgtgtagataactacgatacgggagggcttaccatctggccccagtgctgcaatgataccgcgagagccacgctcaccggctccagatttatcagcaataaaccagccagccggaagggccgagcgcagaagtggtcctgcaactttatccgcctccatccagtctattaattgttgccgggaagctagagtaagtagttcgccagttaatagtttgcgcaacgttgttgccattgctacaggcatcgtggtgtcacgctcgtcgtttggtatggcttcattcagctccggttcccaacgatcaaggcgagttacatgatcccccatgttgtgcaaaaaagcggttagctccttcggtcctccgatcgttgtcagaagtaagttggccgcagtgttatcactcatggttatggcagcactgcataattctcttactgtcatgccatccgtaagatgcttttctgtgactggtgagtactcaaccaagtcattctgagaatagtgtatgcggcgaccgagttgctcttgcccggcgtcaatacgggataataccgcgccacatagcagaactttaaaagtgctcatcattggaaaacgttcttcggggcgaaaactctcaaggatcttaccgctgttgagatccagttcgatgtaacccactcgtgcacccaactgatcttcagcatcttttactttcaccagcgtttctgggtgagcaaaaacaggaaggcaaaatgccgcaaaaaagggaataagggcgacacggaaatgttgaatactcatactcttcctttttcaatattattgaagcatttatcagggttattgtctcatgagcggatacatatttgaatgtatttagaaaaataaacaaataggggttccgcgcacatttccccgaaaagtgccagatacctgaaacaaaacccatcgtacggccaaggaagtctccaataactgtgatccaccacaagcgccagggttttcccagtcacgacgttgtaaaacgacggccagtcatgcataatccgcacgcatctggaataaggaagtgccattccgcctgaccttaatacgactcactatagggagaccctcgaaaacaaaccacggcagtagcgaaagctgcaagagaatgggctcgcagcaaacaccaaacaaaacaaacacaaaccaacaaaaagtggccacgcccgggccaccgatacttcccttcactccttcgggactgttggggaggaacacaacagggctcccctgttttcccattccttcccccttttcccaaccccaaccgccgtatctggtggcggcaagacacacgggtctttccctctaaagcacaattgtgtgtgtgtcccaggtcctcctgcgtacggtgcgggagtgctcccacccaactgttgtaagcctgtccaacgcgtcgtcctggcaagactatgacgtcgcatgttccgctgcggatgccgaccgggtaaccggttccccagtgtgtgtagtgcgatcttccaggtcctcctggttggcgttgtccagaaactgcttcaggtaagtggggtgtgcccaatccctacaaaggttgattctttcaccaccttaggaatgctccggaggtaccccagcaacagctgggatctgaccggaggctaattgtctacgggtggtgtttcctttttcttttcacacaactctactgcgtacaactcactgactatccacttgctctgtcacg

SEQ ID NO: 3588 - DNA, 3749 bp, synthetic construct
  source 1..3749: mol_type = other DNA; note = Anabaena L9a5, P1 exon min1, P2 exon min1
atgggagtgaaggtgctgttcgccctgatctgtattgccgtggccgaggccaagcctaccgagaacaacgaggacttcaacatcgtggccgtggcctccaatttcgccaccacagatctggacgccgacagaggaaagctgcccggcaagaagctgcctctggaagtgctgaaagagatggaagccaacgccagaaaggccggctgtaccagaggctgtctgatctgcctgagccacatcaagtgcacccctaagatgaagaagttcatccccggcagatgccacacctacgagggcgacaaagaatctgcccaaggcggaatcggagaggccatcgtggatatccctgagatccccggcttcaaggacctggaacctatggaacagtttatcgcccaggtggacctgtgcgtggactgtacaacaggctgcctgaaaggcctggccaacgtgcagtgtagcgacctgctgaagaagtggctgcctcagagatgcgccaccttcgcctctaagatccagggccaagtggacaagatcaaaggcgctggcggcgactaatagctaactagacaaaacaccaaacaaacaagctgcgagccacggactaaataattgagccttaaagaagaaattctttaagtggatgctctcaaactcagggaaacctaaatctagttatagacaaggcaatcctgagccaagccgaagtagtaattagtaagttaacaatagatgacttacaactaatcggaaggtgcagagactcgacgggagctaccctaacgtcaagacgagggtaaagagagagtccaattctcaaagccaatatcaacagtaagtctagatatcggatcccgggaggctaggtggaggctcagtgtgataagtctgcgatggtggatgcatgtgtcatggtcatagctgtttcctgtgtgaaattgttatccgctcagagggcacaatcctattccgcgctatccgacaatctccaagacattaggtggagttcagttcggcgtatggcatatgtcgctggaaagaacatgtgagcaaaaggccagcaaaaggccaggaaccgtaaaaaggccgcgttgctggcgtttttccataggctccgcccccctgacgagcatcacaaaaatcgacgctcaagtcagaggtggcgaaacccgacaggactataaagataccaggcgtttccccctggaagctccctcgtgcgctctcctgttccgaccctgccgcttaccggatacctgtccgcctttctcccttcgggaagcgtggcgctttctcatagctcacgctgtaggtatctcagttcggtgtaggtcgttcgctccaagctgggctgtgtgcacgaaccccccgttcagcccgaccgctgcgccttatccggtaactatcgtcttgagtccaacccggtaagacacgacttatcgccactggcagcagccactggtaacaggattagcagagcgaggtatgtaggcggtgctacagagttcttgaagtggtggcctaactacggctacactagaagaacagtatttggtatctgcgctctgctgaagccagttaccttcggaaaaagagttggtagctcttgatccggcaaacaaaccaccgctggtagcggtggtttttttgtttgcaagcagcagattacgcgcagaaaaaaaggatctcaagaagatcctttgatcttttctacggggtctgacgctctattcaacaaagccgccgtcccgtcaagtcagcgtaaatgggtagggggcttcaaatcgtcctcgtgataccaattcggagcctgcttttttgtacaaacttgttgataatggcaattcaaggatcttcacctagatccttttaaattaaaaatgaagttttaaatcaatctaaagtatatatgagtaaacttggtctgacagttaccaatgcttaatcagtgaggcacctatctcagcgatctgtctatttcgttcatccatagttgcctgactccccgtcgtgtagataactacgatacgggagggcttaccatctggccccagtgctgcaatgataccgcgagagccacgctcaccggctccagatttatcagcaataaaccagccagccggaagggccgagcgcagaagtggtcctgcaactttatccgcctccatccagtctattaattgttgccgggaagctagagtaagtagttcgccagttaatagtttgcgcaacgttgttgccattgctacaggcatcgtggtgtcacgctcgtcgtttggtatggcttcattcagctccggttcccaacgatcaaggcgagttacatgatcccccatgttgtgcaaaaaagcggttagctccttcggtcctccgatcgttgtcagaagtaagttggccgcagtgttatcactcatggttatggcagcactgcataattctcttactgtcatgccatccgtaagatgcttttctgtgactggtgagtactcaaccaagtcattctgagaatagtgtatgcggcgaccgagttgctcttgcccggcgtcaatacgggataataccgcgccacatagcagaactttaaaagtgctcatcattggaaaacgttcttcggggcgaaaactctcaaggatcttaccgctgttgagatccagttcgatgtaacccactcgtgcacccaactgatcttcagcatcttttactttcaccagcgtttctgggtgagcaaaaacaggaaggcaaaatgccgcaaaaaagggaataagggcgacacggaaatgttgaatactcatactcttcctttttcaatattattgaagcatttatcagggttattgtctcatgagcggatacatatttgaatgtatttagaaaaataaacaaataggggttccgcgcacatttccccgaaaagtgccagatacctgaaacaaaacccatcgtacggccaaggaagtctccaataactgtgatccaccacaagcgccagggttttcccagtcacgacgttgtaaaacgacggccagtcatgcataatccgcacgcatctggaataaggaagtgccattccgcctgaccttaatacgactcactatagggagaccctcgaaaacaaaccacggcagtagcgaaagctgcaagagaatgaaatccgtggctcgcagcaaacaccaaacaaaacaaacacaaaccaacaaaaagtggccacgcccgggccaccgatacttcccttcactccttcgggactgttggggaggaacacaacagggctcccctgttttcccattccttcccccttttcccaaccccaaccgccgtatctggtggcggcaagacacacgggtctttccctctaaagcacaattgtgtgtgtgtcccaggtcctcctgcgtacggtgcgggagtgctcccacccaactgttgtaagcctgtccaacgcgtcgtcctggcaagactatgacgtcgcatgttccgctgcggatgccgaccgggtaaccggttccccagtgtgtgtagtgcgatcttccaggtcctcctggttggcgttgtccagaaactgcttcaggtaagtggggtgtgcccaatccctacaaaggttgattctttcaccaccttaggaatgctccggaggtaccccagcaacagctgggatctgaccggaggctaattgtctacgggtggtgtttcctttttcttttcacacaactctactgcgtacaactcactgactatccacttgctctgtcacg

SEQ ID NO: 3589 - DNA, 3747 bp, synthetic construct
  source 1..3747: mol_type = other DNA; note = Anabaena L9a5, P1 exon min2, P2 exon min2
atgggagtgaaggtgctgttcgccctgatctgtattgccgtggccgaggccaagcctaccgagaacaacgaggacttcaacatcgtggccgtggcctccaatttcgccaccacagatctggacgccgacagaggaaagctgcccggcaagaagctgcctctggaagtgctgaaagagatggaagccaacgccagaaaggccggctgtaccagaggctgtctgatctgcctgagccacatcaagtgcacccctaagatgaagaagttcatccccggcagatgccacacctacgagggcgacaaagaatctgcccaaggcggaatcggagaggccatcgtggatatccctgagatccccggcttcaaggacctggaacctatggaacagtttatcgcccaggtggacctgtgcgtggactgtacaacaggctgcctgaaaggcctggccaacgtgcagtgtagcgacctgctgaagaagtggctgcctcagagatgcgccaccttcgcctctaagatccagggccaagtggacaagatcaaaggcgctggcggcgactaatagctaactagacaaaacaccaaacaaacaagctgcgagccacggacaaataattgagccttaaagaagaaattctttaagtggatgctctcaaactcagggaaacctaaatctagttatagacaaggcaatcctgagccaagccgaagtagtaattagtaagttaacaatagatgacttacaactaatcggaaggtgcagagactcgacgggagctaccctaacgtcaagacgagggtaaagagagagtccaattctcaaagccaatatcaacagtaagtctagatatcggatcccgggaggctaggtggaggctcagtgtgataagtctgcgatggtggatgcatgtgtcatggtcatagctgtttcctgtgtgaaattgttatccgctcagagggcacaatcctattccgcgctatccgacaatctccaagacattaggtggagttcagttcggcgtatggcatatgtcgctggaaagaacatgtgagcaaaaggccagcaaaaggccaggaaccgtaaaaaggccgcgttgctggcgtttttccataggctccgcccccctgacgagcatcacaaaaatcgacgctcaagtcagaggtggcgaaacccgacaggactataaagataccaggcgtttccccctggaagctccctcgtgcgctctcctgttccgaccctgccgcttaccggatacctgtccgcctttctcccttcgggaagcgtggcgctttctcatagctcacgctgtaggtatctcagttcggtgtaggtcgttcgctccaagctgggctgtgtgcacgaaccccccgttcagcccgaccgctgcgccttatccggtaactatcgtcttgagtccaacccggtaagacacgacttatcgccactggcagcagccactggtaacaggattagcagagcgaggtatgtaggcggtgctacagagttcttgaagtggtggcctaactacggctacactagaagaacagtatttggtatctgcgctctgctgaagccagttaccttcggaaaaagagttggtagctcttgatccggcaaacaaaccaccgctggtagcggtggtttttttgtttgcaagcagcagattacgcgcagaaaaaaaggatctcaagaagatcctttgatcttttctacggggtctgacgctctattcaacaaagccgccgtcccgtcaagtcagcgtaaatgggtagggggcttcaaatcgtcctcgtgataccaattcggagcctgcttttttgtacaaacttgttgataatggcaattcaaggatcttcacctagatccttttaaattaaaaatgaagttttaaatcaatctaaagtatatatgagtaaacttggtctgacagttaccaatgcttaatcagtgaggcacctatctcagcgatctgtctatttcgttcatccatagttgcctgactccccgtcgtgtagataactacgatacgggagggcttaccatctggccccagtgctgcaatgataccgcgagagccacgctcaccggctccagatttatcagcaataaaccagccagccggaagggccgagcgcagaagtggtcctgcaactttatccgcctccatccagtctattaattgttgccgggaagctagagtaagtagttcgccagttaatagtttgcgcaacgttgttgccattgctacaggcatcgtggtgtcacgctcgtcgtttggtatggcttcattcagctccggttcccaacgatcaaggcgagttacatgatcccccatgttgtgcaaaaaagcggttagctccttcggtcctccgatcgttgtcagaagtaagttggccgcagtgttatcactcatggttatggcagcactgcataattctcttactgtcatgccatccgtaagatgcttttctgtgactggtgagtactcaaccaagtcattctgagaatagtgtatgcggcgaccgagttgctcttgcccggcgtcaatacgggataataccgcgccacatagcagaactttaaaagtgctcatcattggaaaacgttcttcggggcgaaaactctcaaggatcttaccgctgttgagatccagttcgatgtaacccactcgtgcacccaactgatcttcagcatcttttactttcaccagcgtttctgggtgagcaaaaacaggaaggcaaaatgccgcaaaaaagggaataagggcgacacggaaatgttgaatactcatactcttcctttttcaatattattgaagcatttatcagggttattgtctcatgagcggatacatatttgaatgtatttagaaaaataaacaaataggggttccgcgcacatttccccgaaaagtgccagatacctgaaacaaaacccatcgtacggccaaggaagtctccaataactgtgatccaccacaagcgccagggttttcccagtcacgacgttgtaaaacgacggccagtcatgcataatccgcacgcatctggaataaggaagtgccattccgcctgaccttaatacgactcactatagggagaccctcgaaaacaaaccacggcagtagcgaaagctgcaagagaatgaatccgtggctcgcagcaaacaccaaacaaaacaaacacaaaccaacaaaaagtggccacgcccgggccaccgatacttcccttcactccttcgggactgttggggaggaacacaacagggctcccctgttttcccattccttcccccttttcccaaccccaaccgccgtatctggtggcggcaagacacacgggtctttccctctaaagcacaattgtgtgtgtgtcccaggtcctcctgcgtacggtgcgggagtgctcccacccaactgttgtaagcctgtccaacgcgtcgtcctggcaagactatgacgtcgcatgttccgctgcggatgccgaccgggtaaccggttccccagtgtgtgtagtgcgatcttccaggtcctcctggttggcgttgtccagaaactgcttcaggtaagtggggtgtgcccaatccctacaaaggttgattctttcaccaccttaggaatgctccggaggtaccccagcaacagctgggatctgaccggaggctaattgtctacgggtggtgtttcctttttcttttcacacaactctactgcgtacaactcactgactatccacttgctctgtcacg

SEQ ID NO: 3590 - DNA, 3745 bp, synthetic construct
  source 1..3745: mol_type = other DNA; note = Anabaena L9a5, P1 exon min3, P2 exon min3
atgggagtgaaggtgctgttcgccctgatctgtattgccgtggccgaggccaagcctaccgagaacaacgaggacttcaacatcgtggccgtggcctccaatttcgccaccacagatctggacgccgacagaggaaagctgcccggcaagaagctgcctctggaagtgctgaaagagatggaagccaacgccagaaaggccggctgtaccagaggctgtctgatctgcctgagccacatcaagtgcacccctaagatgaagaagttcatccccggcagatgccacacctacgagggcgacaaagaatctgcccaaggcggaatcggagaggccatcgtggatatccctgagatccccggcttcaaggacctggaacctatggaacagtttatcgcccaggtggacctgtgcgtggactgtacaacaggctgcctgaaaggcctggccaacgtgcagtgtagcgacctgctgaagaagtggctgcctcagagatgcgccaccttcgcctctaagatccagggccaagtggacaagatcaaaggcgctggcggcgactaatagctaactagacaaaacaccaaacaaacaagctgcgagccacggaaaataattgagccttaaagaagaaattctttaagtggatgctctcaaactcagggaaacctaaatctagttatagacaaggcaatcctgagccaagccgaagtagtaattagtaagttaacaatagatgacttacaactaatcggaaggtgcagagactcgacgggagctaccctaacgtcaagacgagggtaaagagagagtccaattctcaaagccaatatcaacagtaagtctagatatcggatcccgggaggctaggtggaggctcagtgtgataagtctgcgatggtggatgcatgtgtcatggtcatagctgtttcctgtgtgaaattgttatccgctcagagggcacaatcctattccgcgctatccgacaatctccaagacattaggtggagttcagttcggcgtatggcatatgtcgctggaaagaacatgtgagcaaaaggccagcaaaaggccaggaaccgtaaaaaggccgcgttgctggcgtttttccataggctccgcccccctgacgagcatcacaaaaatcgacgctcaagtcagaggtggcgaaacccgacaggactataaagataccaggcgtttccccctggaagctccctcgtgcgctctcctgttccgaccctgccgcttaccggatacctgtccgcctttctcccttcgggaagcgtggcgctttctcatagctcacgctgtaggtatctcagttcggtgtaggtcgttcgctccaagctgggctgtgtgcacgaaccccccgttcagcccgaccgctgcgccttatccggtaactatcgtcttgagtccaacccggtaagacacgacttatcgccactggcagcagccactggtaacaggattagcagagcgaggtatgtaggcggtgctacagagttcttgaagtggtggcctaactacggctacactagaagaacagtatttggtatctgcgctctgctgaagccagttaccttcggaaaaagagttggtagctcttgatccggcaaacaaaccaccgctggtagcggtggtttttttgtttgcaagcagcagattacgcgcagaaaaaaaggatctcaagaagatcctttgatcttttctacggggtctgacgctctattcaacaaagccgccgtcccgtcaagtcagcgtaaatgggtagggggcttcaaatcgtcctcgtgataccaattcggagcctgcttttttgtacaaacttgttgataatggcaattcaaggatcttcacctagatccttttaaattaaaaatgaagttttaaatcaatctaaagtatatatgagtaaacttggtctgacagttaccaatgcttaatcagtgaggcacctatctcagcgatctgtctatttcgttcatccatagttgcctgactccccgtcgtgtagataactacgatacgggagggcttaccatctggccccagtgctgcaatgataccgcgagagccacgctcaccggctccagatttatcagcaataaaccagccagccggaagggccgagcgcagaagtggtcctgcaactttatccgcctccatccagtctattaattgttgccgggaagctagagtaagtagttcgccagttaatagtttgcgcaacgttgttgccattgctacaggcatcgtggtgtcacgctcgtcgtttggtatggcttcattcagctccggttcccaacgatcaaggcgagttacatgatcccccatgttgtgcaaaaaagcggttagctccttcggtcctccgatcgttgtcagaagtaagttggccgcagtgttatcactcatggttatggcagcactgcataattctcttactgtcatgccatccgtaagatgcttttctgtgactggtgagtactcaaccaagtcattctgagaatagtgtatgcggcgaccgagttgctcttgcccggcgtcaatacgggataataccgcgccacatagcagaactttaaaagtgctcatcattggaaaacgttcttcggggcgaaaactctcaaggatcttaccgctgttgagatccagttcgatgtaacccactcgtgcacccaactgatcttcagcatcttttactttcaccagcgtttctgggtgagcaaaaacaggaaggcaaaatgccgcaaaaaagggaataagggcgacacggaaatgttgaatactcatactcttcctttttcaatattattgaagcatttatcagggttattgtctcatgagcggatacatatttgaatgtatttagaaaaataaacaaataggggttccgcgcacatttccccgaaaagtgccagatacctgaaacaaaacccatcgtacggccaaggaagtctccaataactgtgatccaccacaagcgccagggttttcccagtcacgacgttgtaaaacgacggccagtcatgcataatccgcacgcatctggaataaggaagtgccattccgcctgaccttaatacgactcactatagggagaccctcgaaaacaaaccacggcagtagcgaaagctgcaagagaatgatccgtggctcgcagcaaacaccaaacaaaacaaacacaaaccaacaaaaagtggccacgcccgggccaccgatacttcccttcactccttcgggactgttggggaggaacacaacagggctcccctgttttcccattccttcccccttttcccaaccccaaccgccgtatctggtggcggcaagacacacgggtctttccctctaaagcacaattgtgtgtgtgtcccaggtcctcctgcgtacggtgcgggagtgctcccacccaactgttgtaagcctgtccaacgcgtcgtcctggcaagactatgacgtcgcatgttccgctgcggatgccgaccgggtaaccggttccccagtgtgtgtagtgcgatcttccaggtcctcctggttggcgttgtccagaaactgcttcaggtaagtggggtgtgcccaatccctacaaaggttgattctttcaccaccttaggaatgctccggaggtaccccagcaacagctgggatctgaccggaggctaattgtctacgggtggtgtttcctttttcttttcacacaactctactgcgtacaactcactgactatccacttgctctgtcacg

SEQ ID NO: 3591 - DNA, 3743 bp, synthetic construct
  source 1..3743: mol_type = other DNA; note = Anabaena L9a5, P1 exon min4, P2 exon min4
atgggagtgaaggtgctgttcgccctgatctgtattgccgtggccgaggccaagcctaccgagaacaacgaggacttcaacatcgtggccgtggcctccaatttcgccaccacagatctggacgccgacagaggaaagctgcccggcaagaagctgcctctggaagtgctgaaagagatggaagccaacgccagaaaggccggctgtaccagaggctgtctgatctgcctgagccacatcaagtgcacccctaagatgaagaagttcatccccggcagatgccacacctacgagggcgacaaagaatctgcccaaggcggaatcggagaggccatcgtggatatccctgagatccccggcttcaaggacctggaacctatggaacagtttatcgcccaggtggacctgtgcgtggactgtacaacaggctgcctgaaaggcctggccaacgtgcagtgtagcgacctgctgaagaagtggctgcctcagagatgcgccaccttcgcctctaagatccagggccaagtggacaagatcaaaggcgctggcggcgactaatagctaactagacaaaacaccaaacaaacaagctgcgagccacggaaataattgagccttaaagaagaaattctttaagtggatgctctcaaactcagggaaacctaaatctagttatagacaaggcaatcctgagccaagccgaagtagtaattagtaagttaacaatagatgacttacaactaatcggaaggtgcagagactcgacgggagctaccctaacgtcaagacgagggtaaagagagagtccaattctcaaagccaatatcaacagtaagtctagatatcggatcccgggaggctaggtggaggctcagtgtgataagtctgcgatggtggatgcatgtgtcatggtcatagctgtttcctgtgtgaaattgttatccgctcagagggcacaatcctattccgcgctatccgacaatctccaagacattaggtggagttcagttcggcgtatggcatatgtcgctggaaagaacatgtgagcaaaaggccagcaaaaggccaggaaccgtaaaaaggccgcgttgctggcgtttttccataggctccgcccccctgacgagcatcacaaaaatcgacgctcaagtcagaggtggcgaaacccgacaggactataaagataccaggcgtttccccctggaagctccctcgtgcgctctcctgttccgaccctgccgcttaccggatacctgtccgcctttctcccttcgggaagcgtggcgctttctcatagctcacgctgtaggtatctcagttcggtgtaggtcgttcgctccaagctgggctgtgtgcacgaaccccccgttcagcccgaccgctgcgccttatccggtaactatcgtcttgagtccaacccggtaagacacgacttatcgccactggcagcagccactggtaacaggattagcagagcgaggtatgtaggcggtgctacagagttcttgaagtggtggcctaactacggctacactagaagaacagtatttggtatctgcgctctgctgaagccagttaccttcggaaaaagagttggtagctcttgatccggcaaacaaaccaccgctggtagcggtggtttttttgtttgcaagcagcagattacgcgcagaaaaaaaggatctcaagaagatcctttgatcttttctacggggtctgacgctctattcaacaaagccgccgtcccgtcaagtcagcgtaaatgggtagggggcttcaaatcgtcctcgtgataccaattcggagcctgcttttttgtacaaacttgttgataatggcaattcaaggatcttcacctagatccttttaaattaaaaatgaagttttaaatcaatctaaagtatatatgagtaaacttggtctgacagttaccaatgcttaatcagtgaggcacctatctcagcgatctgtctatttcgttcatccatagttgcctgactccccgtcgtgtagataactacgatacgggagggcttaccatctggccccagtgctgcaatgataccgcgagagccacgctcaccggctccagatttatcagcaataaaccagccagccggaagggccgagcgcagaagtggtcctgcaactttatccgcctccatccagtctattaattgttgccgggaagctagagtaagtagttcgccagttaatagtttgcgcaacgttgttgccattgctacaggcatcgtggtgtcacgctcgtcgtttggtatggcttcattcagctccggttcccaacgatcaaggcgagttacatgatcccccatgttgtgcaaaaaagcggttagctccttcggtcctccgatcgttgtcagaagtaagttggccgcagtgttatcactcatggttatggcagcactgcataattctcttactgtcatgccatccgtaagatgcttttctgtgactggtgagtactcaaccaagtcattctgagaatagtgtatgcggcgaccgagttgctcttgcccggcgtcaatacgggataataccgcgccacatagcagaactttaaaagtgctcatcattggaaaacgttcttcggggcgaaaactctcaaggatcttaccgctgttgagatccagttcgatgtaacccactcgtgcacccaactgatcttcagcatcttttactttcaccagcgtttctgggtgagcaaaaacaggaaggcaaaatgccgcaaaaaagggaataagggcgacacggaaatgttgaatactcatactcttcctttttcaatattattgaagcatttatcagggttattgtctcatgagcggatacatatttgaatgtatttagaaaaataaacaaataggggttccgcgcacatttccccgaaaagtgccagatacctgaaacaaaacccatcgtacggccaaggaagtctccaataactgtgatccaccacaagcgccagggttttcccagtcacgacgttgtaaaacgacggccagtcatgcataatccgcacgcatctggaataaggaagtgccattccgcctgaccttaatacgactcactatagggagaccctcgaaaacaaaccacggcagtagcgaaagctgcaagagaatgtccgtggctcgcagcaaacaccaaacaaaacaaacacaaaccaacaaaaagtggccacgcccgggccaccgatacttcccttcactccttcgggactgttggggaggaacacaacagggctcccctgttttcccattccttcccccttttcccaaccccaaccgccgtatctggtggcggcaagacacacgggtctttccctctaaagcacaattgtgtgtgtgtcccaggtcctcctgcgtacggtgcgggagtgctcccacccaactgttgtaagcctgtccaacgcgtcgtcctggcaagactatgacgtcgcatgttccgctgcggatgccgaccgggtaaccggttccccagtgtgtgtagtgcgatcttccaggtcctcctggttggcgttgtccagaaactgcttcaggtaagtggggtgtgcccaatccctacaaaggttgattctttcaccaccttaggaatgctccggaggtaccccagcaacagctgggatctgaccggaggctaattgtctacgggtggtgtttcctttttcttttcacacaactctactgcgtacaactcactgactatccacttgctctgtcacg

SEQ ID NO: 3592 - DNA, 3741 bp, synthetic construct
  source 1..3741: mol_type = other DNA; note = Anabaena L9a5, P1 exon min5, P2 exon min5
atgggagtgaaggtgctgttcgccctgatctgtattgccgtggccgaggccaagcctaccgagaacaacgaggacttcaacatcgtggccgtggcctccaatttcgccaccacagatctggacgccgacagaggaaagctgcccggcaagaagctgcctctggaagtgctgaaagagatggaagccaacgccagaaaggccggctgtaccagaggctgtctgatctgcctgagccacatcaagtgcacccctaagatgaagaagttcatccccggcagatgccacacctacgagggcgacaaagaatctgcccaaggcggaatcggagaggccatcgtggatatccctgagatccccggcttcaaggacctggaacctatggaacagtttatcgcccaggtggacctgtgcgtggactgtacaacaggctgcctgaaaggcctggccaacgtgcagtgtagcgacctgctgaagaagtggctgcctcagagatgcgccaccttcgcctctaagatccagggccaagtggacaagatcaaaggcgctggcggcgactaatagctaactagacaaaacaccaaacaaacaagctgcgagccacgaaataattgagccttaaagaagaaattctttaagtggatgctctcaaactcagggaaacctaaatctagttatagacaaggcaatcctgagccaagccgaagtagtaattagtaagttaacaatagatgacttacaactaatcggaaggtgcagagactcgacgggagctaccctaacgtcaagacgagggtaaagagagagtccaattctcaaagccaatatcaacagtaagtctagatatcggatcccgggaggctaggtggaggctcagtgtgataagtctgcgatggtggatgcatgtgtcatggtcatagctgtttcctgtgtgaaattgttatccgctcagagggcacaatcctattccgcgctatccgacaatctccaagacattaggtggagttcagttcggcgtatggcatatgtcgctggaaagaacatgtgagcaaaaggccagcaaaaggccaggaaccgtaaaaaggccgcgttgctggcgtttttccataggctccgcccccctgacgagcatcacaaaaatcgacgctcaagtcagaggtggcgaaacccgacaggactataaagataccaggcgtttccccctggaagctccctcgtgcgctctcctgttccgaccctgccgcttaccggatacctgtccgcctttctcccttcgggaagcgtggcgctttctcatagctcacgctgtaggtatctcagttcggtgtaggtcgttcgctccaagctgggctgtgtgcacgaaccccccgttcagcccgaccgctgcgccttatccggtaactatcgtcttgagtccaacccggtaagacacgacttatcgccactggcagcagccactggtaacaggattagcagagcgaggtatgtaggcggtgctacagagttcttgaagtggtggcctaactacggctacactagaagaacagtatttggtatctgcgctctgctgaagccagttaccttcggaaaaagagttggtagctcttgatccggcaaacaaaccaccgctggtagcggtggtttttttgtttgcaagcagcagattacgcgcagaaaaaaaggatctcaagaagatcctttgatcttttctacggggtctgacgctctattcaacaaagccgccgtcccgtcaagtcagcgtaaatgggtagggggcttcaaatcgtcctcgtgataccaattcggagcctgcttttttgtacaaacttgttgataatggcaattcaaggatcttcacctagatccttttaaattaaaaatgaagttttaaatcaatctaaagtatatatgagtaaacttggtctgacagttaccaatgcttaatcagtgaggcacctatctcagcgatctgtctatttcgttcatccatagttgcctgactccccgtcgtgtagataactacgatacgggagggcttaccatctggccccagtgctgcaatgataccgcgagagccacgctcaccggctccagatttatcagcaataaaccagccagccggaagggccgagcgcagaagtggtcctgcaactttatccgcctccatccagtctattaattgttgccgggaagctagagtaagtagttcgccagttaatagtttgcgcaacgttgttgccattgctacaggcatcgtggtgtcacgctcgtcgtttggtatggcttcattcagctccggttcccaacgatcaaggcgagttacatgatcccccatgttgtgcaaaaaagcggttagctccttcggtcctccgatcgttgtcagaagtaagttggccgcagtgttatcactcatggttatggcagcactgcataattctcttactgtcatgccatccgtaagatgcttttctgtgactggtgagtactcaaccaagtcattctgagaatagtgtatgcggcgaccgagttgctcttgcccggcgtcaatacgggataataccgcgccacatagcagaactttaaaagtgctcatcattggaaaacgttcttcggggcgaaaactctcaaggatcttaccgctgttgagatccagttcgatgtaacccactcgtgcacccaactgatcttcagcatcttttactttcaccagcgtttctgggtgagcaaaaacaggaaggcaaaatgccgcaaaaaagggaataagggcgacacggaaatgttgaatactcatactcttcctttttcaatattattgaagcatttatcagggttattgtctcatgagcggatacatatttgaatgtatttagaaaaataaacaaataggggttccgcgcacatttccccgaaaagtgccagatacctgaaacaaaacccatcgtacggccaaggaagtctccaataactgtgatccaccacaagcgccagggttttcccagtcacgacgttgtaaaacgacggccagtcatgcataatccgcacgcatctggaataaggaagtgccattccgcctgaccttaatacgactcactatagggagaccctcgaaaacaaaccacggcagtagcgaaagctgcaagagaatgccgtggctcgcagcaaacaccaaacaaaacaaacacaaaccaacaaaaagtggccacgcccgggccaccgatacttcccttcactccttcgggactgttggggaggaacacaacagggctcccctgttttcccattccttcccccttttcccaaccccaaccgccgtatctggtggcggcaagacacacgggtctttccctctaaagcacaattgtgtgtgtgtcccaggtcctcctgcgtacggtgcgggagtgctcccacccaactgttgtaagcctgtccaacgcgtcgtcctggcaagactatgacgtcgcatgttccgctgcggatgccgaccgggtaaccggttccccagtgtgtgtagtgcgatcttccaggtcctcctggttggcgttgtccagaaactgcttcaggtaagtggggtgtgcccaatccctacaaaggttgattctttcaccaccttaggaatgctccggaggtaccccagcaacagctgggatctgaccggaggctaattgtctacgggtggtgtttcctttttcttttcacacaactctactgcgtacaactcactgactatccacttgctctgtcacg

SEQ ID NO: 3593 - DNA, 3739 bp, synthetic construct
  source 1..3739: mol_type = other DNA; note = Anabaena L9a5, P1 exon min6, P2 exon min6
atgggagtgaaggtgctgttcgccctgatctgtattgccgtggccgaggccaagcctaccgagaacaacgaggacttcaacatcgtggccgtggcctccaatttcgccaccacagatctggacgccgacagaggaaagctgcccggcaagaagctgcctctggaagtgctgaaagagatggaagccaacgccagaaaggccggctgtaccagaggctgtctgatctgcctgagccacatcaagtgcacccctaagatgaagaagttcatccccggcagatgccacacctacgagggcgacaaagaatctgcccaaggcggaatcggagaggccatcgtggatatccctgagatccccggcttcaaggacctggaacctatggaacagtttatcgcccaggtggacctgtgcgtggactgtacaacaggctgcctgaaaggcctggccaacgtgcagtgtagcgacctgctgaagaagtggctgcctcagagatgcgccaccttcgcctctaagatccagggccaagtggacaagatcaaaggcgctggcggcgactaatagctaactagacaaaacaccaaacaaacaagctgcgagccacaaataattgagccttaaagaagaaattctttaagtggatgctctcaaactcagggaaacctaaatctagttatagacaaggcaatcctgagccaagccgaagtagtaattagtaagttaacaatagatgacttacaactaatcggaaggtgcagagactcgacgggagctaccctaacgtcaagacgagggtaaagagagagtccaattctcaaagccaatatcaacagtaagtctagatatcggatcccgggaggctaggtggaggctcagtgtgataagtctgcgatggtggatgcatgtgtcatggtcatagctgtttcctgtgtgaaattgttatccgctcagagggcacaatcctattccgcgctatccgacaatctccaagacattaggtggagttcagttcggcgtatggcatatgtcgctggaaagaacatgtgagcaaaaggccagcaaaaggccaggaaccgtaaaaaggccgcgttgctggcgtttttccataggctccgcccccctgacgagcatcacaaaaatcgacgctcaagtcagaggtggcgaaacccgacaggactataaagataccaggcgtttccccctggaagctccctcgtgcgctctcctgttccgaccctgccgcttaccggatacctgtccgcctttctcccttcgggaagcgtggcgctttctcatagctcacgctgtaggtatctcagttcggtgtaggtcgttcgctccaagctgggctgtgtgcacgaaccccccgttcagcccgaccgctgcgccttatccggtaactatcgtcttgagtccaacccggtaagacacgacttatcgccactggcagcagccactggtaacaggattagcagagcgaggtatgtaggcggtgctacagagttcttgaagtggtggcctaactacggctacactagaagaacagtatttggtatctgcgctctgctgaagccagttaccttcggaaaaagagttggtagctcttgatccggcaaacaaaccaccgctggtagcggtggtttttttgtttgcaagcagcagattacgcgcagaaaaaaaggatctcaagaagatcctttgatcttttctacggggtctgacgctctattcaacaaagccgccgtcccgtcaagtcagcgtaaatgggtagggggcttcaaatcgtcctcgtgataccaattcggagcctgcttttttgtacaaacttgttgataatggcaattcaaggatcttcacctagatccttttaaattaaaaatgaagttttaaatcaatctaaagtatatatgagtaaacttggtctgacagttaccaatgcttaatcagtgaggcacctatctcagcgatctgtctatttcgttcatccatagttgcctgactccccgtcgtgtagataactacgatacgggagggcttaccatctggccccagtgctgcaatgataccgcgagagccacgctcaccggctccagatttatcagcaataaaccagccagccggaagggccgagcgcagaagtggtcctgcaactttatccgcctccatccagtctattaattgttgccgggaagctagagtaagtagttcgccagttaatagtttgcgcaacgttgttgccattgctacaggcatcgtggtgtcacgctcgtcgtttggtatggcttcattcagctccggttcccaacgatcaaggcgagttacatgatcccccatgttgtgcaaaaaagcggttagctccttcggtcctccgatcgttgtcagaagtaagttggccgcagtgttatcactcatggttatggcagcactgcataattctcttactgtcatgccatccgtaagatgcttttctgtgactggtgagtactcaaccaagtcattctgagaatagtgtatgcggcgaccgagttgctcttgcccggcgtcaatacgggataataccgcgccacatagcagaactttaaaagtgctcatcattggaaaacgttcttcggggcgaaaactctcaaggatcttaccgctgttgagatccagttcgatgtaacccactcgtgcacccaactgatcttcagcatcttttactttcaccagcgtttctgggtgagcaaaaacaggaaggcaaaatgccgcaaaaaagggaataagggcgacacggaaatgttgaatactcatactcttcctttttcaatattattgaagcatttatcagggttattgtctcatgagcggatacatatttgaatgtatttagaaaaataaacaaataggggttccgcgcacatttccccgaaaagtgccagatacctgaaacaaaacccatcgtacggccaaggaagtctccaataactgtgatccaccacaagcgccagggttttcccagtcacgacgttgtaaaacgacggccagtcatgcataatccgcacgcatctggaataaggaagtgccattccgcctgaccttaatacgactcactatagggagaccctcgaaaacaaaccacggcagtagcgaaagctgcaagagaatgcgtggctcgcagcaaacaccaaacaaaacaaacacaaaccaacaaaaagtggccacgcccgggccaccgatacttcccttcactccttcgggactgttggggaggaacacaacagggctcccctgttttcccattccttcccccttttcccaaccccaaccgccgtatctggtggcggcaagacacacgggtctttccctctaaagcacaattgtgtgtgtgtcccaggtcctcctgcgtacggtgcgggagtgctcccacccaactgttgtaagcctgtccaacgcgtcgtcctggcaagactatgacgtcgcatgttccgctgcggatgccgaccgggtaaccggttccccagtgtgtgtagtgcgatcttccaggtcctcctggttggcgttgtccagaaactgcttcaggtaagtggggtgtgcccaatccctacaaaggttgattctttcaccaccttaggaatgctccggaggtaccccagcaacagctgggatctgaccggaggctaattgtctacgggtggtgtttcctttttcttttcacacaactctactgcgtacaactcactgactatccacttgctctgtcacg

SEQ ID NO: 3594 - DNA, 3737 bp, synthetic construct
  source 1..3737: mol_type = other DNA; note = Anabaena L9a5, P1 exon min7, P2 exon min7
atgggagtgaaggtgctgttcgccctgatctgtattgccgtggccgaggccaagcctaccgagaacaacgaggacttcaacatcgtggccgtggcctccaatttcgccaccacagatctggacgccgacagaggaaagctgcccggcaagaagctgcctctggaagtgctgaaagagatggaagccaacgccagaaaggccggctgtaccagaggctgtctgatctgcctgagccacatcaagtgcacccctaagatgaagaagttcatccccggcagatgccacacctacgagggcgacaaagaatctgcccaaggcggaatcggagaggccatcgtggatatccctgagatccccggcttcaaggacctggaacctatggaacagtttatcgcccaggtggacctgtgcgtggactgtacaacaggctgcctgaaaggcctggccaacgtgcagtgtagcgacctgctgaagaagtggctgcctcagagatgcgccaccttcgcctctaagatccagggccaagtggacaagatcaaaggcgctggcggcgactaatagctaactagacaaaacaccaaacaaacaagctgcgagccaaaataattgagccttaaagaagaaattctttaagtggatgctctcaaactcagggaaacctaaatctagttatagacaaggcaatcctgagccaagccgaagtagtaattagtaagttaacaatagatgacttacaactaatcggaaggtgcagagactcgacgggagctaccctaacgtcaagacgagggtaaagagagagtccaattctcaaagccaatatcaacagtaagtctagatatcggatcccgggaggctaggtggaggctcagtgtgataagtctgcgatggtggatgcatgtgtcatggtcatagctgtttcctgtgtgaaattgttatccgctcagagggcacaatcctattccgcgctatccgacaatctccaagacattaggtggagttcagttcggcgtatggcatatgtcgctggaaagaacatgtgagcaaaaggccagcaaaaggccaggaaccgtaaaaaggccgcgttgctggcgtttttccataggctccgcccccctgacgagcatcacaaaaatcgacgctcaagtcagaggtggcgaaacccgacaggactataaagataccaggcgtttccccctggaagctccctcgtgcgctctcctgttccgaccctgccgcttaccggatacctgtccgcctttctcccttcgggaagcgtggcgctttctcatagctcacgctgtaggtatctcagttcggtgtaggtcgttcgctccaagctgggctgtgtgcacgaaccccccgttcagcccgaccgctgcgccttatccggtaactatcgtcttgagtccaacccggtaagacacgacttatcgccactggcagcagccactggtaacaggattagcagagcgaggtatgtaggcggtgctacagagttcttgaagtggtggcctaactacggctacactagaagaacagtatttggtatctgcgctctgctgaagccagttaccttcggaaaaagagttggtagctcttgatccggcaaacaaaccaccgctggtagcggtggtttttttgtttgcaagcagcagattacgcgcagaaaaaaaggatctcaagaagatcctttgatcttttctacggggtctgacgctctattcaacaaagccgccgtcccgtcaagtcagcgtaaatgggtagggggcttcaaatcgtcctcgtgataccaattcggagcctgcttttttgtacaaacttgttgataatggcaattcaaggatcttcacctagatccttttaaattaaaaatgaagttttaaatcaatctaaagtatatatgagtaaacttggtctgacagttaccaatgcttaatcagtgaggcacctatctcagcgatctgtctatttcgttcatccatagttgcctgactccccgtcgtgtagataactacgatacgggagggcttaccatctggccccagtgctgcaatgataccgcgagagccacgctcaccggctccagatttatcagcaataaaccagccagccggaagggccgagcgcagaagtggtcctgcaactttatccgcctccatccagtctattaattgttgccgggaagctagagtaagtagttcgccagttaatagtttgcgcaacgttgttgccattgctacaggcatcgtggtgtcacgctcgtcgtttggtatggcttcattcagctccggttcccaacgatcaaggcgagttacatgatcccccatgttgtgcaaaaaagcggttagctccttcggtcctccgatcgttgtcagaagtaagttggccgcagtgttatcactcatggttatggcagcactgcataattctcttactgtcatgccatccgtaagatgcttttctgtgactggtgagtactcaaccaagtcattctgagaatagtgtatgcggcgaccgagttgctcttgcccggcgtcaatacgggataataccgcgccacatagcagaactttaaaagtgctcatcattggaaaacgttcttcggggcgaaaactctcaaggatcttaccgctgttgagatccagttcgatgtaacccactcgtgcacccaactgatcttcagcatcttttactttcaccagcgtttctgggtgagcaaaaacaggaaggcaaaatgccgcaaaaaagggaataagggcgacacggaaatgttgaatactcatactcttcctttttcaatattattgaagcatttatcagggttattgtctcatgagcggatacatatttgaatgtatttagaaaaataaacaaataggggttccgcgcacatttccccgaaaagtgccagatacctgaaacaaaacccatcgtacggccaaggaagtctccaataactgtgatccaccacaagcgccagggttttcccagtcacgacgttgtaaaacgacggccagtcatgcataatccgcacgcatctggaataaggaagtgccattccgcctgaccttaatacgactcactatagggagaccctcgaaaacaaaccacggcagtagcgaaagctgcaagagaatggtggctcgcagcaaacaccaaacaaaacaaacacaaaccaacaaaaagtggccacgcccgggccaccgatacttcccttcactccttcgggactgttggggaggaacacaacagggctcccctgttttcccattccttcccccttttcccaaccccaaccgccgtatctggtggcggcaagacacacgggtctttccctctaaagcacaattgtgtgtgtgtcccaggtcctcctgcgtacggtgcgggagtgctcccacccaactgttgtaagcctgtccaacgcgtcgtcctggcaagactatgacgtcgcatgttccgctgcggatgccgaccgggtaaccggttccccagtgtgtgtagtgcgatcttccaggtcctcctggttggcgttgtccagaaactgcttcaggtaagtggggtgtgcccaatccctacaaaggttgattctttcaccaccttaggaatgctccggaggtaccccagcaacagctgggatctgaccggaggctaattgtctacgggtggtgtttcctttttcttttcacacaactctactgcgtacaactcactgactatccacttgctctgtcacg

SEQ ID NO: 3595 - DNA, 3735 bp, synthetic construct
  source 1..3735: mol_type = other DNA; note = Anabaena L9a5, P1 exon min8, no P2 exon
atgggagtgaaggtgctgttcgccctgatctgtattgccgtggccgaggccaagcctaccgagaacaacgaggacttcaacatcgtggccgtggcctccaatttcgccaccacagatctggacgccgacagaggaaagctgcccggcaagaagctgcctctggaagtgctgaaagagatggaagccaacgccagaaaggccggctgtaccagaggctgtctgatctgcctgagccacatcaagtgcacccctaagatgaagaagttcatccccggcagatgccacacctacgagggcgacaaagaatctgcccaaggcggaatcggagaggccatcgtggatatccctgagatccccggcttcaaggacctggaacctatggaacagtttatcgcccaggtggacctgtgcgtggactgtacaacaggctgcctgaaaggcctggccaacgtgcagtgtagcgacctgctgaagaagtggctgcctcagagatgcgccaccttcgcctctaagatccagggccaagtggacaagatcaaaggcgctggcggcgactaatagctaactagacaaaacaccaaacaaacaagctgcgagccaaataattgagccttaaagaagaaattctttaagtggatgctctcaaactcagggaaacctaaatctagttatagacaaggcaatcctgagccaagccgaagtagtaattagtaagttaacaatagatgacttacaactaatcggaaggtgcagagactcgacgggagctaccctaacgtcaagacgagggtaaagagagagtccaattctcaaagccaatatcaacagtaagtctagatatcggatcccgggaggctaggtggaggctcagtgtgataagtctgcgatggtggatgcatgtgtcatggtcatagctgtttcctgtgtgaaattgttatccgctcagagggcacaatcctattccgcgctatccgacaatctccaagacattaggtggagttcagttcggcgtatggcatatgtcgctggaaagaacatgtgagcaaaaggccagcaaaaggccaggaaccgtaaaaaggccgcgttgctggcgtttttccataggctccgcccccctgacgagcatcacaaaaatcgacgctcaagtcagaggtggcgaaacccgacaggactataaagataccaggcgtttccccctggaagctccctcgtgcgctctcctgttccgaccctgccgcttaccggatacctgtccgcctttctcccttcgggaagcgtggcgctttctcatagctcacgctgtaggtatctcagttcggtgtaggtcgttcgctccaagctgggctgtgtgcacgaaccccccgttcagcccgaccgctgcgccttatccggtaactatcgtcttgagtccaacccggtaagacacgacttatcgccactggcagcagccactggtaacaggattagcagagcgaggtatgtaggcggtgctacagagttcttgaagtggtggcctaactacggctacactagaagaacagtatttggtatctgcgctctgctgaagccagttaccttcggaaaaagagttggtagctcttgatccggcaaacaaaccaccgctggtagcggtggtttttttgtttgcaagcagcagattacgcgcagaaaaaaaggatctcaagaagatcctttgatcttttctacggggtctgacgctctattcaacaaagccgccgtcccgtcaagtcagcgtaaatgggtagggggcttcaaatcgtcctcgtgataccaattcggagcctgcttttttgtacaaacttgttgataatggcaattcaaggatcttcacctagatccttttaaattaaaaatgaagttttaaatcaatctaaagtatatatgagtaaacttggtctgacagttaccaatgcttaatcagtgaggcacctatctcagcgatctgtctatttcgttcatccatagttgcctgactccccgtcgtgtagataactacgatacgggagggcttaccatctggccccagtgctgcaatgataccgcgagagccacgctcaccggctccagatttatcagcaataaaccagccagccggaagggccgagcgcagaagtggtcctgcaactttatccgcctccatccagtctattaattgttgccgggaagctagagtaagtagttcgccagttaatagtttgcgcaacgttgttgccattgctacaggcatcgtggtgtcacgctcgtcgtttggtatggcttcattcagctccggttcccaacgatcaaggcgagttacatgatcccccatgttgtgcaaaaaagcggttagctccttcggtcctccgatcgttgtcagaagtaagttggccgcagtgttatcactcatggttatggcagcactgcataattctcttactgtcatgccatccgtaagatgcttttctgtgactggtgagtactcaaccaagtcattctgagaatagtgtatgcggcgaccgagttgctcttgcccggcgtcaatacgggataataccgcgccacatagcagaactttaaaagtgctcatcattggaaaacgttcttcggggcgaaaactctcaaggatcttaccgctgttgagatccagttcgatgtaacccactcgtgcacccaactgatcttcagcatcttttactttcaccagcgtttctgggtgagcaaaaacaggaaggcaaaatgccgcaaaaaagggaataagggcgacacggaaatgttgaatactcatactcttcctttttcaatattattgaagcatttatcagggttattgtctcatgagcggatacatatttgaatgtatttagaaaaataaacaaataggggttccgcgcacatttccccgaaaagtgccagatacctgaaacaaaacccatcgtacggccaaggaagtctccaataactgtgatccaccacaagcgccagggttttcccagtcacgacgttgtaaaacgacggccagtcatgcataatccgcacgcatctggaataaggaagtgccattccgcctgaccttaatacgactcactatagggagaccctcgaaaacaaaccacggcagtagcgaaagctgcaagagaatgtggctcgcagcaaacaccaaacaaaacaaacacaaaccaacaaaaagtggccacgcccgggccaccgatacttcccttcactccttcgggactgttggggaggaacacaacagggctcccctgttttcccattccttcccccttttcccaaccccaaccgccgtatctggtggcggcaagacacacgggtctttccctctaaagcacaattgtgtgtgtgtcccaggtcctcctgcgtacggtgcgggagtgctcccacccaactgttgtaagcctgtccaacgcgtcgtcctggcaagactatgacgtcgcatgttccgctgcggatgccgaccgggtaaccggttccccagtgtgtgtagtgcgatcttccaggtcctcctggttggcgttgtccagaaactgcttcaggtaagtggggtgtgcccaatccctacaaaggttgattctttcaccaccttaggaatgctccggaggtaccccagcaacagctgggatctgaccggaggctaattgtctacgggtggtgtttcctttttcttttcacacaactctactgcgtacaactcactgactatccacttgctctgtcacg

SEQ ID NO: 3596 - DNA, 3734 bp, synthetic construct
  source 1..3734: mol_type = other DNA; note = Anabaena L9a5, no P1 exon, no P2 exon
atgggagtgaaggtgctgttcgccctgatctgtattgccgtggccgaggccaagcctaccgagaacaacgaggacttcaacatcgtggccgtggcctccaatttcgccaccacagatctggacgccgacagaggaaagctgcccggcaagaagctgcctctggaagtgctgaaagagatggaagccaacgccagaaaggccggctgtaccagaggctgtctgatctgcctgagccacatcaagtgcacccctaagatgaagaagttcatccccggcagatgccacacctacgagggcgacaaagaatctgcccaaggcggaatcggagaggccatcgtggatatccctgagatccccggcttcaaggacctggaacctatggaacagtttatcgcccaggtggacctgtgcgtggactgtacaacaggctgcctgaaaggcctggccaacgtgcagtgtagcgacctgctgaagaagtggctgcctcagagatgcgccaccttcgcctctaagatccagggccaagtggacaagatcaaaggcgctggcggcgactaatagctaactagacaaaacaccaaacaaacaagctgcgagccaaataattgagccttaaagaagaaattctttaagtggatgctctcaaactcagggaaacctaaatctagttatagacaaggcaatcctgagccaagccgaagtagtaattagtaagttaacaatagatgacttacaactaatcggaaggtgcagagactcgacgggagctaccctaacgtcaagacgagggtaaagagagagtccaattctcaaagccaatatcaacagtaagtctagatatcggatcccgggaggctaggtggaggctcagtgtgataagtctgcgatggtggatgcatgtgtcatggtcatagctgtttcctgtgtgaaattgttatccgctcagagggcacaatcctattccgcgctatccgacaatctccaagacattaggtggagttcagttcggcgtatggcatatgtcgctggaaagaacatgtgagcaaaaggccagcaaaaggccaggaaccgtaaaaaggccgcgttgctggcgtttttccataggctccgcccccctgacgagcatcacaaaaatcgacgctcaagtcagaggtggcgaaacccgacaggactataaagataccaggcgtttccccctggaagctccctcgtgcgctctcctgttccgaccctgccgcttaccggatacctgtccgcctttctcccttcgggaagcgtggcgctttctcatagctcacgctgtaggtatctcagttcggtgtaggtcgttcgctccaagctgggctgtgtgcacgaaccccccgttcagcccgaccgctgcgccttatccggtaactatcgtcttgagtccaacccggtaagacacgacttatcgccactggcagcagccactggtaacaggattagcagagcgaggtatgtaggcggtgctacagagttcttgaagtggtggcctaactacggctacactagaagaacagtatttggtatctgcgctctgctgaagccagttaccttcggaaaaagagttggtagctcttgatccggcaaacaaaccaccgctggtagcggtggtttttttgtttgcaagcagcagattacgcgcagaaaaaaaggatctcaagaagatcctttgatcttttctacggggtctgacgctctattcaacaaagccgccgtcccgtcaagtcagcgtaaatgggtagggggcttcaaatcgtcctcgtgataccaattcggagcctgcttttttgtacaaacttgttgataatggcaattcaaggatcttcacctagatccttttaaattaaaaatgaagttttaaatcaatctaaagtatatatgagtaaacttggtctgacagttaccaatgcttaatcagtgaggcacctatctcagcgatctgtctatttcgttcatccatagttgcctgactccccgtcgtgtagataactacgatacgggagggcttaccatctggccccagtgctgcaatgataccgcgagagccacgctcaccggctccagatttatcagcaataaaccagccagccggaagggccgagcgcagaagtggtcctgcaactttatccgcctccatccagtctattaattgttgccgggaagctagagtaagtagttcgccagttaatagtttgcgcaacgttgttgccattgctacaggcatcgtggtgtcacgctcgtcgtttggtatggcttcattcagctccggttcccaacgatcaaggcgagttacatgatcccccatgttgtgcaaaaaagcggttagctccttcggtcctccgatcgttgtcagaagtaagttggccgcagtgttatcactcatggttatggcagcactgcataattctcttactgtcatgccatccgtaagatgcttttctgtgactggtgagtactcaaccaagtcattctgagaatagtgtatgcggcgaccgagttgctcttgcccggcgtcaatacgggataataccgcgccacatagcagaactttaaaagtgctcatcattggaaaacgttcttcggggcgaaaactctcaaggatcttaccgctgttgagatccagttcgatgtaacccactcgtgcacccaactgatcttcagcatcttttactttcaccagcgtttctgggtgagcaaaaacaggaaggcaaaatgccgcaaaaaagggaataagggcgacacggaaatgttgaatactcatactcttcctttttcaatattattgaagcatttatcagggttattgtctcatgagcggatacatatttgaatgtatttagaaaaataaacaaataggggttccgcgcacatttccccgaaaagtgccagatacctgaaacaaaacccatcgtacggccaaggaagtctccaataactgtgatccaccacaagcgccagggttttcccagtcacgacgttgtaaaacgacggccagtcatgcataatccgcacgcatctggaataaggaagtgccattccgcctgaccttaatacgactcactatagggagaccctcgaaaacaaaccacggcagtagcgaaagctgcaagagaatgggctcgcagcaaacaccaaacaaaacaaacacaaaccaacaaaaagtggccacgcccgggccaccgatacttcccttcactccttcgggactgttggggaggaacacaacagggctcccctgttttcccattccttcccccttttcccaaccccaaccgccgtatctggtggcggcaagacacacgggtctttccctctaaagcacaattgtgtgtgtgtcccaggtcctcctgcgtacggtgcgggagtgctcccacccaactgttgtaagcctgtccaacgcgtcgtcctggcaagactatgacgtcgcatgttccgctgcggatgccgaccgggtaaccggttccccagtgtgtgtagtgcgatcttccaggtcctcctggttggcgttgtccagaaactgcttcaggtaagtggggtgtgcccaatccctacaaaggttgattctttcaccaccttaggaatgctccggaggtaccccagcaacagctgggatctgaccggaggctaattgtctacgggtggtgtttcctttttcttttcacacaactctactgcgtacaactcactgactatccacttgctctgtcacg

SEQ ID NO: 3597 - DNA, 3724 bp, synthetic construct
  source 1..3724: mol_type = other DNA; note = Anabaena L9a5 no P1 intron
atgggagtgaaggtgctgttcgccctgatctgtattgccgtggccgaggccaagcctaccgagaacaacgaggacttcaacatcgtggccgtggcctccaatttcgccaccacagatctggacgccgacagaggaaagctgcccggcaagaagctgcctctggaagtgctgaaagagatggaagccaacgccagaaaggccggctgtaccagaggctgtctgatctgcctgagccacatcaagtgcacccctaagatgaagaagttcatccccggcagatgccacacctacgagggcgacaaagaatctgcccaaggcggaatcggagaggccatcgtggatatccctgagatccccggcttcaaggacctggaacctatggaacagtttatcgcccaggtggacctgtgcgtggactgtacaacaggctgcctgaaaggcctggccaacgtgcagtgtagcgacctgctgaagaagtggctgcctcagagatgcgccaccttcgcctctaagatccagggccaagtggacaagatcaaaggcgctggcggcgactaatagctaactagacaaaacaccaaacaaacaagctgcgagccacggacttaaataattgagccttaaagaagaaattctttaagtggatgctctcaaactcagggaaacctaaatctagttatagacaaggcaatcctgagccaagccgaagtagtaattagtaagttaacaatagatgacttacaactaatcggaaggtgcagagactcgacgggagctaccctaacgtcaagacgagggtaaagagagagtccaattctcaaagccaatatcaacagtaagtctagatatcggatcccgggaggctaggtggaggctcagtgtgataagtctgcgatggtggatgcatgtgtcatggtcatagctgtttcctgtgtgaaattgttatccgctcagagggcacaatcctattccgcgctatccgacaatctccaagacattaggtggagttcagttcggcgtatggcatatgtcgctggaaagaacatgtgagcaaaaggccagcaaaaggccaggaaccgtaaaaaggccgcgttgctggcgtttttccataggctccgcccccctgacgagcatcacaaaaatcgacgctcaagtcagaggtggcgaaacccgacaggactataaagataccaggcgtttccccctggaagctccctcgtgcgctctcctgttccgaccctgccgcttaccggatacctgtccgcctttctcccttcgggaagcgtggcgctttctcatagctcacgctgtaggtatctcagttcggtgtaggtcgttcgctccaagctgggctgtgtgcacgaaccccccgttcagcccgaccgctgcgccttatccggtaactatcgtcttgagtccaacccggtaagacacgacttatcgccactggcagcagccactggtaacaggattagcagagcgaggtatgtaggcggtgctacagagttcttgaagtggtggcctaactacggctacactagaagaacagtatttggtatctgcgctctgctgaagccagttaccttcggaaaaagagttggtagctcttgatccggcaaacaaaccaccgctggtagcggtggtttttttgtttgcaagcagcagattacgcgcagaaaaaaaggatctcaagaagatcctttgatcttttctacggggtctgacgctctattcaacaaagccgccgtcccgtcaagtcagcgtaaatgggtagggggcttcaaatcgtcctcgtgataccaattcggagcctgcttttttgtacaaacttgttgataatggcaattcaaggatcttcacctagatccttttaaattaaaaatgaagttttaaatcaatctaaagtatatatgagtaaacttggtctgacagttaccaatgcttaatcagtgaggcacctatctcagcgatctgtctatttcgttcatccatagttgcctgactccccgtcgtgtagataactacgatacgggagggcttaccatctggccccagtgctgcaatgataccgcgagagccacgctcaccggctccagatttatcagcaataaaccagccagccggaagggccgagcgcagaagtggtcctgcaactttatccgcctccatccagtctattaattgttgccgggaagctagagtaagtagttcgccagttaatagtttgcgcaacgttgttgccattgctacaggcatcgtggtgtcacgctcgtcgtttggtatggcttcattcagctccggttcccaacgatcaaggcgagttacatgatcccccatgttgtgcaaaaaagcggttagctccttcggtcctccgatcgttgtcagaagtaagttggccgcagtgttatcactcatggttatggcagcactgcataattctcttactgtcatgccatccgtaagatgcttttctgtgactggtgagtactcaaccaagtcattctgagaatagtgtatgcggcgaccgagttgctcttgcccggcgtcaatacgggataataccgcgccacatagcagaactttaaaagtgctcatcattggaaaacgttcttcggggcgaaaactctcaaggatcttaccgctgttgagatccagttcgatgtaacccactcgtgcacccaactgatcttcagcatcttttactttcaccagcgtttctgggtgagcaaaaacaggaaggcaaaatgccgcaaaaaagggaataagggcgacacggaaatgttgaatactcatactcttcctttttcaatattattgaagcatttatcagggttattgtctcatgagcggatacatatttgaatgtatttagaaaaataaacaaataggggttccgcgcacatttccccgaaaagtgccagatacctgaaacaaaacccatcgtacggccaaggaagtctccaataactgtgatccaccacaagcgccagggttttcccagtcacgacgttgtaaaacgacggccagtcatgcataatccgcacgcatctggaataaggaagtgccattccgcctgaccttaatacgactcactatagggagaccctcgaaaacaaaccacaaaatccgtggctcgcagcaaacaccaaacaaaacaaacacaaaccaacaaaaagtggccacgcccgggccaccgatacttcccttcactccttcgggactgttggggaggaacacaacagggctcccctgttttcccattccttcccccttttcccaaccccaaccgccgtatctggtggcggcaagacacacgggtctttccctctaaagcacaattgtgtgtgtgtcccaggtcctcctgcgtacggtgcgggagtgctcccacccaactgttgtaagcctgtccaacgcgtcgtcctggcaagactatgacgtcgcatgttccgctgcggatgccgaccgggtaaccggttccccagtgtgtgtagtgcgatcttccaggtcctcctggttggcgttgtccagaaactgcttcaggtaagtggggtgtgcccaatccctacaaaggttgattctttcaccaccttaggaatgctccggaggtaccccagcaacagctgggatctgaccggaggctaattgtctacgggtggtgtttcctttttcttttcacacaactctactgcgtacaactcactgactatccacttgctctgtcacg

SEQ ID NO: 3598 - DNA, 3724 bp, synthetic construct
  source 1..3724: mol_type = other DNA; note = Anabaena L9a5 no P1 intron, spacer CtoG
atgggagtgaaggtgctgttcgccctgatctgtattgccgtggccgaggccaagcctaccgagaacaacgaggacttcaacatcgtggccgtggcctccaatttcgccaccacagatctggacgccgacagaggaaagctgcccggcaagaagctgcctctggaagtgctgaaagagatggaagccaacgccagaaaggccggctgtaccagaggctgtctgatctgcctgagccacatcaagtgcacccctaagatgaagaagttcatccccggcagatgccacacctacgagggcgacaaagaatctgcccaaggcggaatcggagaggccatcgtggatatccctgagatccccggcttcaaggacctggaacctatggaacagtttatcgcccaggtggacctgtgcgtggactgtacaacaggctgcctgaaaggcctggccaacgtgcagtgtagcgacctgctgaagaagtggctgcctcagagatgcgccaccttcgcctctaagatccagggccaagtggacaagatcaaaggcgctggcggcgactaatagctaactagacaaaacaccaaacaaacaagctgcgagccacggacttaaataattgagccttaaagaagaaattctttaagtggatgctctcaaactcagggaaacctaaatctagttatagacaaggcaatcctgagccaagccgaagtagtaattagtaagttaacaatagatgacttacaactaatcggaaggtgcagagactcgacgggagctaccctaacgtcaagacgagggtaaagagagagtccaattctcaaagccaatatcaacagtaagtctagatatcggatcccgggaggctaggtggaggctcagtgtgataagtctgcgatggtggatgcatgtgtcatggtcatagctgtttcctgtgtgaaattgttatccgctcagagggcacaatcctattccgcgctatccgacaatctccaagacattaggtggagttcagttcggcgtatggcatatgtcgctggaaagaacatgtgagcaaaaggccagcaaaaggccaggaaccgtaaaaaggccgcgttgctggcgtttttccataggctccgcccccctgacgagcatcacaaaaatcgacgctcaagtcagaggtggcgaaacccgacaggactataaagataccaggcgtttccccctggaagctccctcgtgcgctctcctgttccgaccctgccgcttaccggatacctgtccgcctttctcccttcgggaagcgtggcgctttctcatagctcacgctgtaggtatctcagttcggtgtaggtcgttcgctccaagctgggctgtgtgcacgaaccccccgttcagcccgaccgctgcgccttatccggtaactatcgtcttgagtccaacccggtaagacacgacttatcgccactggcagcagccactggtaacaggattagcagagcgaggtatgtaggcggtgctacagagttcttgaagtggtggcctaactacggctacactagaagaacagtatttggtatctgcgctctgctgaagccagttaccttcggaaaaagagttggtagctcttgatccggcaaacaaaccaccgctggtagcggtggtttttttgtttgcaagcagcagattacgcgcagaaaaaaaggatctcaagaagatcctttgatcttttctacggggtctgacgctctattcaacaaagccgccgtcccgtcaagtcagcgtaaatgggtagggggcttcaaatcgtcctcgtgataccaattcggagcctgcttttttgtacaaacttgttgataatggcaattcaaggatcttcacctagatccttttaaattaaaaatgaagttttaaatcaatctaaagtatatatgagtaaacttggtctgacagttaccaatgcttaatcagtgaggcacctatctcagcgatctgtctatttcgttcatccatagttgcctgactccccgtcgtgtagataactacgatacgggagggcttaccatctggccccagtgctgcaatgataccgcgagagccacgctcaccggctccagatttatcagcaataaaccagccagccggaagggccgagcgcagaagtggtcctgcaactttatccgcctccatccagtctattaattgttgccgggaagctagagtaagtagttcgccagttaatagtttgcgcaacgttgttgccattgctacaggcatcgtggtgtcacgctcgtcgtttggtatggcttcattcagctccggttcccaacgatcaaggcgagttacatgatcccccatgttgtgcaaaaaagcggttagctccttcggtcctccgatcgttgtcagaagtaagttggccgcagtgttatcactcatggttatggcagcactgcataattctcttactgtcatgccatccgtaagatgcttttctgtgactggtgagtactcaaccaagtcattctgagaatagtgtatgcggcgaccgagttgctcttgcccggcgtcaatacgggataataccgcgccacatagcagaactttaaaagtgctcatcattggaaaacgttcttcggggcgaaaactctcaaggatcttaccgctgttgagatccagttcgatgtaacccactcgtgcacccaactgatcttcagcatcttttactttcaccagcgtttctgggtgagcaaaaacaggaaggcaaaatgccgcaaaaaagggaataagggcgacacggaaatgttgaatactcatactcttcctttttcaatattattgaagcatttatcagggttattgtctcatgagcggatacatatttgaatgtatttagaaaaataaacaaataggggttccgcgcacatttccccgaaaagtgccagatacctgaaacaaaacccatcgtacggccaaggaagtctccaataactgtgatccaccacaagcgccagggttttcccagtcacgacgttgtaaaacgacggccagtcatgcataatccgcacgcatctggaataaggaagtgccattccgcctgaccttaatacgactcactatagggagaccctcgaaaacaaaccagaaaatccgtggctcgcagcaaacaccaaacaaaacaaacacaaaccaacaaaaagtggccacgcccgggccaccgatacttcccttcactccttcgggactgttggggaggaacacaacagggctcccctgttttcccattccttcccccttttcccaaccccaaccgccgtatctggtggcggcaagacacacgggtctttccctctaaagcacaattgtgtgtgtgtcccaggtcctcctgcgtacggtgcgggagtgctcccacccaactgttgtaagcctgtccaacgcgtcgtcctggcaagactatgacgtcgcatgttccgctgcggatgccgaccgggtaaccggttccccagtgtgtgtagtgcgatcttccaggtcctcctggttggcgttgtccagaaactgcttcaggtaagtggggtgtgcccaatccctacaaaggttgattctttcaccaccttaggaatgctccggaggtaccccagcaacagctgggatctgaccggaggctaattgtctacgggtggtgtttcctttttcttttcacacaactctactgcgtacaactcactgactatccacttgctctgtcacg

SEQ ID NO: 3599 - DNA, 3724 bp, synthetic construct
  source 1..3724: mol_type = other DNA; note = Anabaena L9a5 no P1 intron, spacer CtoA
atgggagtgaaggtgctgttcgccctgatctgtattgccgtggccgaggccaagcctaccgagaacaacgaggacttcaacatcgtggccgtggcctccaatttcgccaccacagatctggacgccgacagaggaaagctgcccggcaagaagctgcctctggaagtgctgaaagagatggaagccaacgccagaaaggccggctgtaccagaggctgtctgatctgcctgagccacatcaagtgcacccctaagatgaagaagttcatccccggcagatgccacacctacgagggcgacaaagaatctgcccaaggcggaatcggagaggccatcgtggatatccctgagatccccggcttcaaggacctggaacctatggaacagtttatcgcccaggtggacctgtgcgtggactgtacaacaggctgcctgaaaggcctggccaacgtgcagtgtagcgacctgctgaagaagtggctgcctcagagatgcgccaccttcgcctctaagatccagggccaagtggacaagatcaaaggcgctggcggcgactaatagctaactagacaaaacaccaaacaaacaagctgcgagccacggacttaaataattgagccttaaagaagaaattctttaagtggatgctctcaaactcagggaaacctaaatctagttatagacaaggcaatcctgagccaagccgaagtagtaattagtaagttaacaatagatgacttacaactaatcggaaggtgcagagactcgacgggagctaccctaacgtcaagacgagggtaaagagagagtccaattctcaaagccaatatcaacagtaagtctagatatcggatcccgggaggctaggtggaggctcagtgtgataagtctgcgatggtggatgcatgtgtcatggtcatagctgtttcctgtgtgaaattgttatccgctcagagggcacaatcctattccgcgctatccgacaatctccaagacattaggtggagttcagttcggcgtatggcatatgtcgctggaaagaacatgtgagcaaaaggccagcaaaaggccaggaaccgtaaaaaggccgcgttgctggcgtttttccataggctccgcccccctgacgagcatcacaaaaatcgacgctcaagtcagaggtggcgaaacccgacaggactataaagataccaggcgtttccccctggaagctccctcgtgcgctctcctgttccgaccctgccgcttaccggatacctgtccgcctttctcccttcgggaagcgtggcgctttctcatagctcacgctgtaggtatctcagttcggtgtaggtcgttcgctccaagctgggctgtgtgcacgaaccccccgttcagcccgaccgctgcgccttatccggtaactatcgtcttgagtccaacccggtaagacacgacttatcgccactggcagcagccactggtaacaggattagcagagcgaggtatgtaggcggtgctacagagttcttgaagtggtggcctaactacggctacactagaagaacagtatttggtatctgcgctctgctgaagccagttaccttcggaaaaagagttggtagctcttgatccggcaaacaaaccaccgctggtagcggtggtttttttgtttgcaagcagcagattacgcgcagaaaaaaaggatctcaagaagatcctttgatcttttctacggggtctgacgctctattcaacaaagccgccgtcccgtcaagtcagcgtaaatgggtagggggcttcaaatcgtcctcgtgataccaattcggagcctgcttttttgtacaaacttgttgataatggcaattcaaggatcttcacctagatccttttaaattaaaaatgaagttttaaatcaatctaaagtatatatgagtaaacttggtctgacagttaccaatgcttaatcagtgaggcacctatctcagcgatctgtctatttcgttcatccatagttgcctgactccccgtcgtgtagataactacgatacgggagggcttaccatctggccccagtgctgcaatgataccgcgagagccacgctcaccggctccagatttatcagcaataaaccagccagccggaagggccgagcgcagaagtggtcctgcaactttatccgcctccatccagtctattaattgttgccgggaagctagagtaagtagttcgccagttaatagtttgcgcaacgttgttgccattgctacaggcatcgtggtgtcacgctcgtcgtttggtatggcttcattcagctccggttcccaacgatcaaggcgagttacatgatcccccatgttgtgcaaaaaagcggttagctccttcggtcctccgatcgttgtcagaagtaagttggccgcagtgttatcactcatggttatggcagcactgcataattctcttactgtcatgccatccgtaagatgcttttctgtgactggtgagtactcaaccaagtcattctgagaatagtgtatgcggcgaccgagttgctcttgcccggcgtcaatacgggataataccgcgccacatagcagaactttaaaagtgctcatcattggaaaacgttcttcggggcgaaaactctcaaggatcttaccgctgttgagatccagttcgatgtaacccactcgtgcacccaactgatcttcagcatcttttactttcaccagcgtttctgggtgagcaaaaacaggaaggcaaaatgccgcaaaaaagggaataagggcgacacggaaatgttgaatactcatactcttcctttttcaatattattgaagcatttatcagggttattgtctcatgagcggatacatatttgaatgtatttagaaaaataaacaaataggggttccgcgcacatttccccgaaaagtgccagatacctgaaacaaaacccatcgtacggccaaggaagtctccaataactgtgatccaccacaagcgccagggttttcccagtcacgacgttgtaaaacgacggccagtcatgcataatccgcacgcatctggaataaggaagtgccattccgcctgaccttaatacgactcactatagggagaccctcgaaaacaaaccaaaaaatccgtggctcgcagcaaacaccaaacaaaacaaacacaaaccaacaaaaagtggccacgcccgggccaccgatacttcccttcactccttcgggactgttggggaggaacacaacagggctcccctgttttcccattccttcccccttttcccaaccccaaccgccgtatctggtggcggcaagacacacgggtctttccctctaaagcacaattgtgtgtgtgtcccaggtcctcctgcgtacggtgcgggagtgctcccacccaactgttgtaagcctgtccaacgcgtcgtcctggcaagactatgacgtcgcatgttccgctgcggatgccgaccgggtaaccggttccccagtgtgtgtagtgcgatcttccaggtcctcctggttggcgttgtccagaaactgcttcaggtaagtggggtgtgcccaatccctacaaaggttgattctttcaccaccttaggaatgctccggaggtaccccagcaacagctgggatctgaccggaggctaattgtctacgggtggtgtttcctttttcttttcacacaactctactgcgtacaactcactgactatccacttgctctgtcacg

SEQ ID NO: 3600 - DNA, 3724 bp, synthetic construct
  source 1..3724: mol_type = other DNA; note = Anabaena L9a5 no P1 intron, spacer CtoT
atgggagtgaaggtgctgttcgccctgatctgtattgccgtggccgaggccaagcctaccgagaacaacgaggacttcaacatcgtggccgtggcctccaatttcgccaccacagatctggacgccgacagaggaaagctgcccggcaagaagctgcctctggaagtgctgaaagagatggaagccaacgccagaaaggccggctgtaccagaggctgtctgatctgcctgagccacatcaagtgcacccctaagatgaagaagttcatccccggcagatgccacacctacgagggcgacaaagaatctgcccaaggcggaatcggagaggccatcgtggatatccctgagatccccggcttcaaggacctggaacctatggaacagtttatcgcccaggtggacctgtgcgtggactgtacaacaggctgcctgaaaggcctggccaacgtgcagtgtagcgacctgctgaagaagtggctgcctcagagatgcgccaccttcgcctctaagatccagggccaagtggacaagatcaaaggcgctggcggcgactaatagctaactagacaaaacaccaaacaaacaagctgcgagccacggacttaaataattgagccttaaagaagaaattctttaagtggatgctctcaaactcagggaaacctaaatctagttatagacaaggcaatcctgagccaagccgaagtagtaattagtaagttaacaatagatgacttacaactaatcggaaggtgcagagactcgacgggagctaccctaacgtcaagacgagggtaaagagagagtccaattctcaaagccaatatcaacagtaagtctagatatcggatcccgggaggctaggtggaggctcagtgtgataagtctgcgatggtggatgcatgtgtcatggtcatagctgtttcctgtgtgaaattgttatccgctcagagggcacaatcctattccgcgctatccgacaatctccaagacattaggtggagttcagttcggcgtatggcatatgtcgctggaaagaacatgtgagcaaaaggccagcaaaaggccaggaaccgtaaaaaggccgcgttgctggcgtttttccataggctccgcccccctgacgagcatcacaaaaatcgacgctcaagtcagaggtggcgaaacccgacaggactataaagataccaggcgtttccccctggaagctccctcgtgcgctctcctgttccgaccctgccgcttaccggatacctgtccgcctttctcccttcgggaagcgtggcgctttctcatagctcacgctgtaggtatctcagttcggtgtaggtcgttcgctccaagctgggctgtgtgcacgaaccccccgttcagcccgaccgctgcgccttatccggtaactatcgtcttgagtccaacccggtaagacacgacttatcgccactggcagcagccactggtaacaggattagcagagcgaggtatgtaggcggtgctacagagttcttgaagtggtggcctaactacggctacactagaagaacagtatttggtatctgcgctctgctgaagccagttaccttcggaaaaagagttggtagctcttgatccggcaaacaaaccaccgctggtagcggtggtttttttgtttgcaagcagcagattacgcgcagaaaaaaaggatctcaagaagatcctttgatcttttctacggggtctgacgctctattcaacaaagccgccgtcccgtcaagtcagcgtaaatgggtagggggcttcaaatcgtcctcgtgataccaattcggagcctgcttttttgtacaaacttgttgataatggcaattcaaggatcttcacctagatccttttaaattaaaaatgaagttttaaatcaatctaaagtatatatgagtaaacttggtctgacagttaccaatgcttaatcagtgaggcacctatctcagcgatctgtctatttcgttcatccatagttgcctgactccccgtcgtgtagataactacgatacgggagggcttaccatctggccccagtgctgcaatgataccgcgagagccacgctcaccggctccagatttatcagcaataaaccagccagccggaagggccgagcgcagaagtggtcctgcaactttatccgcctccatccagtctattaattgttgccgggaagctagagtaagtagttcgccagttaatagtttgcgcaacgttgttgccattgctacaggcatcgtggtgtcacgctcgtcgtttggtatggcttcattcagctccggttcccaacgatcaaggcgagttacatgatcccccatgttgtgcaaaaaagcggttagctccttcggtcctccgatcgttgtcagaagtaagttggccgcagtgttatcactcatggttatggcagcactgcataattctcttactgtcatgccatccgtaagatgcttttctgtgactggtgagtactcaaccaagtcattctgagaatagtgtatgcggcgaccgagttgctcttgcccggcgtcaatacgggataataccgcgccacatagcagaactttaaaagtgctcatcattggaaaacgttcttcggggcgaaaactctcaaggatcttaccgctgttgagatccagttcgatgtaacccactcgtgcacccaactgatcttcagcatcttttactttcaccagcgtttctgggtgagcaaaaacaggaaggcaaaatgccgcaaaaaagggaataagggcgacacggaaatgttgaatactcatactcttcctttttcaatattattgaagcatttatcagggttattgtctcatgagcggatacatatttgaatgtatttagaaaaataaacaaataggggttccgcgcacatttccccgaaaagtgccagatacctgaaacaaaacccatcgtacggccaaggaagtctccaataactgtgatccaccacaagcgccagggttttcccagtcacgacgttgtaaaacgacggccagtcatgcataatccgcacgcatctggaataaggaagtgccattccgcctgaccttaatacgactcactatagggagaccctcgaaaacaaaccataaaatccgtggctcgcagcaaacaccaaacaaaacaaacacaaaccaacaaaaagtggccacgcccgggccaccgatacttcccttcactccttcgggactgttggggaggaacacaacagggctcccctgttttcccattccttcccccttttcccaaccccaaccgccgtatctggtggcggcaagacacacgggtctttccctctaaagcacaattgtgtgtgtgtcccaggtcctcctgcgtacggtgcgggagtgctcccacccaactgttgtaagcctgtccaacgcgtcgtcctggcaagactatgacgtcgcatgttccgctgcggatgccgaccgggtaaccggttccccagtgtgtgtagtgcgatcttccaggtcctcctggttggcgttgtccagaaactgcttcaggtaagtggggtgtgcccaatccctacaaaggttgattctttcaccaccttaggaatgctccggaggtaccccagcaacagctgggatctgaccggaggctaattgtctacgggtggtgtttcctttttcttttcacacaactctactgcgtacaactcactgactatccacttgctctgtcacg

SEQ ID NO: 3601 - DNA, 3724 bp, synthetic construct
  source 1..3724: mol_type = other DNA; note = Anabaena L9a5 no P1 intron, exon AtoT
atgggagtgaaggtgctgttcgccctgatctgtattgccgtggccgaggccaagcctaccgagaacaacgaggacttcaacatcgtggccgtggcctccaatttcgccaccacagatctggacgccgacagaggaaagctgcccggcaagaagctgcctctggaagtgctgaaagagatggaagccaacgccagaaaggccggctgtaccagaggctgtctgatctgcctgagccacatcaagtgcacccctaagatgaagaagttcatccccggcagatgccacacctacgagggcgacaaagaatctgcccaaggcggaatcggagaggccatcgtggatatccctgagatccccggcttcaaggacctggaacctatggaacagtttatcgcccaggtggacctgtgcgtggactgtacaacaggctgcctgaaaggcctggccaacgtgcagtgtagcgacctgctgaagaagtggctgcctcagagatgcgccaccttcgcctctaagatccagggccaagtggacaagatcaaaggcgctggcggcgactaatagctaactagacaaaacaccaaacaaacaagctgcgagccacggacttaaataattgagccttaaagaagaaattctttaagtggatgctctcaaactcagggaaacctaaatctagttatagacaaggcaatcctgagccaagccgaagtagtaattagtaagttaacaatagatgacttacaactaatcggaaggtgcagagactcgacgggagctaccctaacgtcaagacgagggtaaagagagagtccaattctcaaagccaatatcaacagtaagtctagatatcggatcccgggaggctaggtggaggctcagtgtgataagtctgcgatggtggatgcatgtgtcatggtcatagctgtttcctgtgtgaaattgttatccgctcagagggcacaatcctattccgcgctatccgacaatctccaagacattaggtggagttcagttcggcgtatggcatatgtcgctggaaagaacatgtgagcaaaaggccagcaaaaggccaggaaccgtaaaaaggccgcgttgctggcgtttttccataggctccgcccccctgacgagcatcacaaaaatcgacgctcaagtcagaggtggcgaaacccgacaggactataaagataccaggcgtttccccctggaagctccctcgtgcgctctcctgttccgaccctgccgcttaccggatacctgtccgcctttctcccttcgggaagcgtggcgctttctcatagctcacgctgtaggtatctcagttcggtgtaggtcgttcgctccaagctgggctgtgtgcacgaaccccccgttcagcccgaccgctgcgccttatccggtaactatcgtcttgagtccaacccggtaagacacgacttatcgccactggcagcagccactggtaacaggattagcagagcgaggtatgtaggcggtgctacagagttcttgaagtggtggcctaactacggctacactagaagaacagtatttggtatctgcgctctgctgaagccagttaccttcggaaaaagagttggtagctcttgatccggcaaacaaaccaccgctggtagcggtggtttttttgtttgcaagcagcagattacgcgcagaaaaaaaggatctcaagaagatcctttgatcttttctacggggtctgacgctctattcaacaaagccgccgtcccgtcaagtcagcgtaaatgggtagggggcttcaaatcgtcctcgtgataccaattcggagcctgcttttttgtacaaacttgttgataatggcaattcaaggatcttcacctagatccttttaaattaaaaatgaagttttaaatcaatctaaagtatatatgagtaaacttggtctgacagttaccaatgcttaatcagtgaggcacctatctcagcgatctgtctatttcgttcatccatagttgcctgactccccgtcgtgtagataactacgatacgggagggcttaccatctggccccagtgctgcaatgataccgcgagagccacgctcaccggctccagatttatcagcaataaaccagccagccggaagggccgagcgcagaagtggtcctgcaactttatccgcctccatccagtctattaattgttgccgggaagctagagtaagtagttcgccagttaatagtttgcgcaacgttgttgccattgctacaggcatcgtggtgtcacgctcgtcgtttggtatggcttcattcagctccggttcccaacgatcaaggcgagttacatgatcccccatgttgtgcaaaaaagcggttagctccttcggtcctccgatcgttgtcagaagtaagttggccgcagtgttatcactcatggttatggcagcactgcataattctcttactgtcatgccatccgtaagatgcttttctgtgactggtgagtactcaaccaagtcattctgagaatagtgtatgcggcgaccgagttgctcttgcccggcgtcaatacgggataataccgcgccacatagcagaactttaaaagtgctcatcattggaaaacgttcttcggggcgaaaactctcaaggatcttaccgctgttgagatccagttcgatgtaacccactcgtgcacccaactgatcttcagcatcttttactttcaccagcgtttctgggtgagcaaaaacaggaaggcaaaatgccgcaaaaaagggaataagggcgacacggaaatgttgaatactcatactcttcctttttcaatattattgaagcatttatcagggttattgtctcatgagcggatacatatttgaatgtatttagaaaaataaacaaataggggttccgcgcacatttccccgaaaagtgccagatacctgaaacaaaacccatcgtacggccaaggaagtctccaataactgtgatccaccacaagcgccagggttttcccagtcacgacgttgtaaaacgacggccagtcatgcataatccgcacgcatctggaataaggaagtgccattccgcctgaccttaatacgactcactatagggagaccctcgaaaacaaaccactaaatccgtggctcgcagcaaacaccaaacaaaacaaacacaaaccaacaaaaagtggccacgcccgggccaccgatacttcccttcactccttcgggactgttggggaggaacacaacagggctcccctgttttcccattccttcccccttttcccaaccccaaccgccgtatctggtggcggcaagacacacgggtctttccctctaaagcacaattgtgtgtgtgtcccaggtcctcctgcgtacggtgcgggagtgctcccacccaactgttgtaagcctgtccaacgcgtcgtcctggcaagactatgacgtcgcatgttccgctgcggatgccgaccgggtaaccggttccccagtgtgtgtagtgcgatcttccaggtcctcctggttggcgttgtccagaaactgcttcaggtaagtggggtgtgcccaatccctacaaaggttgattctttcaccaccttaggaatgctccggaggtaccccagcaacagctgggatctgaccggaggctaattgtctacgggtggtgtttcctttttcttttcacacaactctactgcgtacaactcactgactatccacttgctctgtcacg

SEQ ID NO: 3602 - DNA, 3724 bp, synthetic construct
  source 1..3724: mol_type = other DNA; note = Anabaena L9a5 no P1 intron, exon AtoC
atgggagtgaaggtgctgttcgccctgatctgtattgccgtggccgaggccaagcctaccgagaacaacgaggacttcaacatcgtggccgtggcctccaatttcgccaccacagatctggacgccgacagaggaaagctgcccggcaagaagctgcctctggaagtgctgaaagagatggaagccaacgccagaaaggccggctgtaccagaggctgtctgatctgcctgagccacatcaagtgcacccctaagatgaagaagttcatccccggcagatgccacacctacgagggcgacaaagaatctgcccaaggcggaatcggagaggccatcgtggatatccctgagatccccggcttcaaggacctggaacctatggaacagtttatcgcccaggtggacctgtgcgtggactgtacaacaggctgcctgaaaggcctggccaacgtgcagtgtagcgacctgctgaagaagtggctgcctcagagatgcgccaccttcgcctctaagatccagggccaagtggacaagatcaaaggcgctggcggcgactaatagctaactagacaaaacaccaaacaaacaagctgcgagccacggacttaaataattgagccttaaagaagaaattctttaagtggatgctctcaaactcagggaaacctaaatctagttatagacaaggcaatcctgagccaagccgaagtagtaattagtaagttaacaatagatgacttacaactaatcggaaggtgcagagactcgacgggagctaccctaacgtcaagacgagggtaaagagagagtccaattctcaaagccaatatcaacagtaagtctagatatcggatcccgggaggctaggtggaggctcagtgtgataagtctgcgatggtggatgcatgtgtcatggtcatagctgtttcctgtgtgaaattgttatccgctcagagggcacaatcctattccgcgctatccgacaatctccaagacattaggtggagttcagttcggcgtatggcatatgtcgctggaaagaacatgtgagcaaaaggccagcaaaaggccaggaaccgtaaaaaggccgcgttgctggcgtttttccataggctccgcccccctgacgagcatcacaaaaatcgacgctcaagtcagaggtggcgaaacccgacaggactataaagataccaggcgtttccccctggaagctccctcgtgcgctctcctgttccgaccctgccgcttaccggatacctgtccgcctttctcccttcgggaagcgtggcgctttctcatagctcacgctgtaggtatctcagttcggtgtaggtcgttcgctccaagctgggctgtgtgcacgaaccccccgttcagcccgaccgctgcgccttatccggtaactatcgtcttgagtccaacccggtaagacacgacttatcgccactggcagcagccactggtaacaggattagcagagcgaggtatgtaggcggtgctacagagttcttgaagtggtggcctaactacggctacactagaagaacagtatttggtatctgcgctctgctgaagccagttaccttcggaaaaagagttggtagctcttgatccggcaaacaaaccaccgctggtagcggtggtttttttgtttgcaagcagcagattacgcgcagaaaaaaaggatctcaagaagatcctttgatcttttctacggggtctgacgctctattcaacaaagccgccgtcccgtcaagtcagcgtaaatgggtagggggcttcaaatcgtcctcgtgataccaattcggagcctgcttttttgtacaaacttgttgataatggcaattcaaggatcttcacctagatccttttaaattaaaaatgaagttttaaatcaatctaaagtatatatgagtaaacttggtctgacagttaccaatgcttaatcagtgaggcacctatctcagcgatctgtctatttcgttcatccatagttgcctgactccccgtcgtgtagataactacgatacgggagggcttaccatctggccccagtgctgcaatgataccgcgagagccacgctcaccggctccagatttatcagcaataaaccagccagccggaagggccgagcgcagaagtggtcctgcaactttatccgcctccatccagtctattaattgttgccgggaagctagagtaagtagttcgccagttaatagtttgcgcaacgttgttgccattgctacaggcatcgtggtgtcacgctcgtcgtttggtatggcttcattcagctccggttcccaacgatcaaggcgagttacatgatcccccatgttgtgcaaaaaagcggttagctccttcggtcctccgatcgttgtcagaagtaagttggccgcagtgttatcactcatggttatggcagcactgcataattctcttactgtcatgccatccgtaagatgcttttctgtgactggtgagtactcaaccaagtcattctgagaatagtgtatgcggcgaccgagttgctcttgcccggcgtcaatacgggataataccgcgccacatagcagaactttaaaagtgctcatcattggaaaacgttcttcggggcgaaaactctcaaggatcttaccgctgttgagatccagttcgatgtaacccactcgtgcacccaactgatcttcagcatcttttactttcaccagcgtttctgggtgagcaaaaacaggaaggcaaaatgccgcaaaaaagggaataagggcgacacggaaatgttgaatactcatactcttcctttttcaatattattgaagcatttatcagggttattgtctcatgagcggatacatatttgaatgtatttagaaaaataaacaaataggggttccgcgcacatttccccgaaaagtgccagatacctgaaacaaaacccatcgtacggccaaggaagtctccaataactgtgatccaccacaagcgccagggttttcccagtcacgacgttgtaaaacgacggccagtcatgcataatccgcacgcatctggaataaggaagtgccattccgcctgaccttaatacgactcactatagggagaccctcgaaaacaaaccaccaaatccgtggctcgcagcaaacaccaaacaaaacaaacacaaaccaacaaaaagtggccacgcccgggccaccgatacttcccttcactccttcgggactgttggggaggaacacaacagggctcccctgttttcccattccttcccccttttcccaaccccaaccgccgtatctggtggcggcaagacacacgggtctttccctctaaagcacaattgtgtgtgtgtcccaggtcctcctgcgtacggtgcgggagtgctcccacccaactgttgtaagcctgtccaacgcgtcgtcctggcaagactatgacgtcgcatgttccgctgcggatgccgaccgggtaaccggttccccagtgtgtgtagtgcgatcttccaggtcctcctggttggcgttgtccagaaactgcttcaggtaagtggggtgtgcccaatccctacaaaggttgattctttcaccaccttaggaatgctccggaggtaccccagcaacagctgggatctgaccggaggctaattgtctacgggtggtgtttcctttttcttttcacacaactctactgcgtacaactcactgactatccacttgctctgtcacg

SEQ ID NO: 3603 - DNA, 3724 bp, synthetic construct
  source 1..3724: mol_type = other DNA; note = Anabaena L9a5 no P1 intron, exon AtoG
atgggagtgaaggtgctgttcgccctgatctgtattgccgtggccgaggccaagcctaccgagaacaacgaggacttcaacatcgtggccgtggcctccaatttcgccaccacagatctggacgccgacagaggaaagctgcccggcaagaagctgcctctggaagtgctgaaagagatggaagccaacgccagaaaggccggctgtaccagaggctgtctgatctgcctgagccacatcaagtgcacccctaagatgaagaagttcatccccggcagatgccacacctacgagggcgacaaagaatctgcccaaggcggaatcggagaggccatcgtggatatccctgagatccccggcttcaaggacctggaacctatggaacagtttatcgcccaggtggacctgtgcgtggactgtacaacaggctgcctgaaaggcctggccaacgtgcagtgtagcgacctgctgaagaagtggctgcctcagagatgcgccaccttcgcctctaagatccagggccaagtggacaagatcaaaggcgctggcggcgactaatagctaactagacaaaacaccaaacaaacaagctgcgagccacggacttaaataattgagccttaaagaagaaattctttaagtggatgctctcaaactcagggaaacctaaatctagttatagacaaggcaatcctgagccaagccgaagtagtaattagtaagttaacaatagatgacttacaactaatcggaaggtgcagagactcgacgggagctaccctaacgtcaagacgagggtaaagagagagtccaattctcaaagccaatatcaacagtaagtctagatatcggatcccgggaggctaggtggaggctcagtgtgataagtctgcgatggtggatgcatgtgtcatggtcatagctgtttcctgtgtgaaattgttatccgctcagagggcacaatcctattccgcgctatccgacaatctccaagacattaggtggagttcagttcggcgtatggcatatgtcgctggaaagaacatgtgagcaaaaggccagcaaaaggccaggaaccgtaaaaaggccgcgttgctggcgtttttccataggctccgcccccctgacgagcatcacaaaaatcgacgctcaagtcagaggtggcgaaacccgacaggactataaagataccaggcgtttccccctggaagctccctcgtgcgctctcctgttccgaccctgccgcttaccggatacctgtccgcctttctcccttcgggaagcgtggcgctttctcatagctcacgctgtaggtatctcagttcggtgtaggtcgttcgctccaagctgggctgtgtgcacgaaccccccgttcagcccgaccgctgcgccttatccggtaactatcgtcttgagtccaacccggtaagacacgacttatcgccactggcagcagccactggtaacaggattagcagagcgaggtatgtaggcggtgctacagagttcttgaagtggtggcctaactacggctacactagaagaacagtatttggtatctgcgctctgctgaagccagttaccttcggaaaaagagttggtagctcttgatccggcaaacaaaccaccgctggtagcggtggtttttttgtttgcaagcagcagattacgcgcagaaaaaaaggatctcaagaagatcctttgatcttttctacggggtctgacgctctattcaacaaagccgccgtcccgtcaagtcagcgtaaatgggtagggggcttcaaatcgtcctcgtgataccaattcggagcctgcttttttgtacaaacttgttgataatggcaattcaaggatcttcacctagatccttttaaattaaaaatgaagttttaaatcaatctaaagtatatatgagtaaacttggtctgacagttaccaatgcttaatcagtgaggcacctatctcagcgatctgtctatttcgttcatccatagttgcctgactccccgtcgtgtagataactacgatacgggagggcttaccatctggccccagtgctgcaatgataccgcgagagccacgctcaccggctccagatttatcagcaataaaccagccagccggaagggccgagcgcagaagtggtcctgcaactttatccgcctccatccagtctattaattgttgccgggaagctagagtaagtagttcgccagttaatagtttgcgcaacgttgttgccattgctacaggcatcgtggtgtcacgctcgtcgtttggtatggcttcattcagctccggttcccaacgatcaaggcgagttacatgatcccccatgttgtgcaaaaaagcggttagctccttcggtcctccgatcgttgtcagaagtaagttggccgcagtgttatcactcatggttatggcagcactgcataattctcttactgtcatgccatccgtaagatgcttttctgtgactggtgagtactcaaccaagtcattctgagaatagtgtatgcggcgaccgagttgctcttgcccggcgtcaatacgggataataccgcgccacatagcagaactttaaaagtgctcatcattggaaaacgttcttcggggcgaaaactctcaaggatcttaccgctgttgagatccagttcgatgtaacccactcgtgcacccaactgatcttcagcatcttttactttcaccagcgtttctgggtgagcaaaaacaggaaggcaaaatgccgcaaaaaagggaataagggcgacacggaaatgttgaatactcatactcttcctttttcaatattattgaagcatttatcagggttattgtctcatgagcggatacatatttgaatgtatttagaaaaataaacaaataggggttccgcgcacatttccccgaaaagtgccagatacctgaaacaaaacccatcgtacggccaaggaagtctccaataactgtgatccaccacaagcgccagggttttcccagtcacgacgttgtaaaacgacggccagtcatgcataatccgcacgcatctggaataaggaagtgccattccgcctgaccttaatacgactcactatagggagaccctcgaaaacaaaccacgaaatccgtggctcgcagcaaacaccaaacaaaacaaacacaaaccaacaaaaagtggccacgcccgggccaccgatacttcccttcactccttcgggactgttggggaggaacacaacagggctcccctgttttcccattccttcccccttttcccaaccccaaccgccgtatctggtggcggcaagacacacgggtctttccctctaaagcacaattgtgtgtgtgtcccaggtcctcctgcgtacggtgcgggagtgctcccacccaactgttgtaagcctgtccaacgcgtcgtcctggcaagactatgacgtcgcatgttccgctgcggatgccgaccgggtaaccggttccccagtgtgtgtagtgcgatcttccaggtcctcctggttggcgttgtccagaaactgcttcaggtaagtggggtgtgcccaatccctacaaaggttgattctttcaccaccttaggaatgctccggaggtaccccagcaacagctgggatctgaccggaggctaattgtctacgggtggtgtttcctttttcttttcacacaactctactgcgtacaactcactgactatccacttgctctgtcacg

SEQ ID NO: 3604 - DNA, 3723 bp, synthetic construct
  source 1..3723: mol_type = other DNA; note = Anabaena L9a5 no P1 intron, P1 exon min1
atgggagtgaaggtgctgttcgccctgatctgtattgccgtggccgaggccaagcctaccgagaacaacgaggacttcaacatcgtggccgtggcctccaatttcgccaccacagatctggacgccgacagaggaaagctgcccggcaagaagctgcctctggaagtgctgaaagagatggaagccaacgccagaaaggccggctgtaccagaggctgtctgatctgcctgagccacatcaagtgcacccctaagatgaagaagttcatccccggcagatgccacacctacgagggcgacaaagaatctgcccaaggcggaatcggagaggccatcgtggatatccctgagatccccggcttcaaggacctggaacctatggaacagtttatcgcccaggtggacctgtgcgtggactgtacaacaggctgcctgaaaggcctggccaacgtgcagtgtagcgacctgctgaagaagtggctgcctcagagatgcgccaccttcgcctctaagatccagggccaagtggacaagatcaaaggcgctggcggcgactaatagctaactagacaaaacaccaaacaaacaagctgcgagccacggacttaaataattgagccttaaagaagaaattctttaagtggatgctctcaaactcagggaaacctaaatctagttatagacaaggcaatcctgagccaagccgaagtagtaattagtaagttaacaatagatgacttacaactaatcggaaggtgcagagactcgacgggagctaccctaacgtcaagacgagggtaaagagagagtccaattctcaaagccaatatcaacagtaagtctagatatcggatcccgggaggctaggtggaggctcagtgtgataagtctgcgatggtggatgcatgtgtcatggtcatagctgtttcctgtgtgaaattgttatccgctcagagggcacaatcctattccgcgctatccgacaatctccaagacattaggtggagttcagttcggcgtatggcatatgtcgctggaaagaacatgtgagcaaaaggccagcaaaaggccaggaaccgtaaaaaggccgcgttgctggcgtttttccataggctccgcccccctgacgagcatcacaaaaatcgacgctcaagtcagaggtggcgaaacccgacaggactataaagataccaggcgtttccccctggaagctccctcgtgcgctctcctgttccgaccctgccgcttaccggatacctgtccgcctttctcccttcgggaagcgtggcgctttctcatagctcacgctgtaggtatctcagttcggtgtaggtcgttcgctccaagctgggctgtgtgcacgaaccccccgttcagcccgaccgctgcgccttatccggtaactatcgtcttgagtccaacccggtaagacacgacttatcgccactggcagcagccactggtaacaggattagcagagcgaggtatgtaggcggtgctacagagttcttgaagtggtggcctaactacggctacactagaagaacagtatttggtatctgcgctctgctgaagccagttaccttcggaaaaagagttggtagctcttgatccggcaaacaaaccaccgctggtagcggtggtttttttgtttgcaagcagcagattacgcgcagaaaaaaaggatctcaagaagatcctttgatcttttctacggggtctgacgctctattcaacaaagccgccgtcccgtcaagtcagcgtaaatgggtagggggcttcaaatcgtcctcgtgataccaattcggagcctgcttttttgtacaaacttgttgataatggcaattcaaggatcttcacctagatccttttaaattaaaaatgaagttttaaatcaatctaaagtatatatgagtaaacttggtctgacagttaccaatgcttaatcagtgaggcacctatctcagcgatctgtctatttcgttcatccatagttgcctgactccccgtcgtgtagataactacgatacgggagggcttaccatctggccccagtgctgcaatgataccgcgagagccacgctcaccggctccagatttatcagcaataaaccagccagccggaagggccgagcgcagaagtggtcctgcaactttatccgcctccatccagtctattaattgttgccgggaagctagagtaagtagttcgccagttaatagtttgcgcaacgttgttgccattgctacaggcatcgtggtgtcacgctcgtcgtttggtatggcttcattcagctccggttcccaacgatcaaggcgagttacatgatcccccatgttgtgcaaaaaagcggttagctccttcggtcctccgatcgttgtcagaagtaagttggccgcagtgttatcactcatggttatggcagcactgcataattctcttactgtcatgccatccgtaagatgcttttctgtgactggtgagtactcaaccaagtcattctgagaatagtgtatgcggcgaccgagttgctcttgcccggcgtcaatacgggataataccgcgccacatagcagaactttaaaagtgctcatcattggaaaacgttcttcggggcgaaaactctcaaggatcttaccgctgttgagatccagttcgatgtaacccactcgtgcacccaactgatcttcagcatcttttactttcaccagcgtttctgggtgagcaaaaacaggaaggcaaaatgccgcaaaaaagggaataagggcgacacggaaatgttgaatactcatactcttcctttttcaatattattgaagcatttatcagggttattgtctcatgagcggatacatatttgaatgtatttagaaaaataaacaaataggggttccgcgcacatttccccgaaaagtgccagatacctgaaacaaaacccatcgtacggccaaggaagtctccaataactgtgatccaccacaagcgccagggttttcccagtcacgacgttgtaaaacgacggccagtcatgcataatccgcacgcatctggaataaggaagtgccattccgcctgaccttaatacgactcactatagggagaccctcgaaaacaaaccacaaatccgtggctcgcagcaaacaccaaacaaaacaaacacaaaccaacaaaaagtggccacgcccgggccaccgatacttcccttcactccttcgggactgttggggaggaacacaacagggctcccctgttttcccattccttcccccttttcccaaccccaaccgccgtatctggtggcggcaagacacacgggtctttccctctaaagcacaattgtgtgtgtgtcccaggtcctcctgcgtacggtgcgggagtgctcccacccaactgttgtaagcctgtccaacgcgtcgtcctggcaagactatgacgtcgcatgttccgctgcggatgccgaccgggtaaccggttccccagtgtgtgtagtgcgatcttccaggtcctcctggttggcgttgtccagaaactgcttcaggtaagtggggtgtgcccaatccctacaaaggttgattctttcaccaccttaggaatgctccggaggtaccccagcaacagctgggatctgaccggaggctaattgtctacgggtggtgtttcctttttcttttcacacaactctactgcgtacaactcactgactatccacttgctctgtcacg

SEQ ID NO: 3605 - DNA, 3722 bp, synthetic construct
  source 1..3722: mol_type = other DNA; note = Anabaena L9a5 no P1 intron, P1 exon min2
atgggagtgaaggtgctgttcgccctgatctgtattgccgtggccgaggccaagcctaccgagaacaacgaggacttcaacatcgtggccgtggcctccaatttcgccaccacagatctggacgccgacagaggaaagctgcccggcaagaagctgcctctggaagtgctgaaagagatggaagccaacgccagaaaggccggctgtaccagaggctgtctgatctgcctgagccacatcaagtgcacccctaagatgaagaagttcatccccggcagatgccacacctacgagggcgacaaagaatctgcccaaggcggaatcggagaggccatcgtggatatccctgagatccccggcttcaaggacctggaacctatggaacagtttatcgcccaggtggacctgtgcgtggactgtacaacaggctgcctgaaaggcctggccaacgtgcagtgtagcgacctgctgaagaagtggctgcctcagagatgcgccaccttcgcctctaagatccagggccaagtggacaagatcaaaggcgctggcggcgactaatagctaactagacaaaacaccaaacaaacaagctgcgagccacggacttaaataattgagccttaaagaagaaattctttaagtggatgctctcaaactcagggaaacctaaatctagttatagacaaggcaatcctgagccaagccgaagtagtaattagtaagttaacaatagatgacttacaactaatcggaaggtgcagagactcgacgggagctaccctaacgtcaagacgagggtaaagagagagtccaattctcaaagccaatatcaacagtaagtctagatatcggatcccgggaggctaggtggaggctcagtgtgataagtctgcgatggtggatgcatgtgtcatggtcatagctgtttcctgtgtgaaattgttatccgctcagagggcacaatcctattccgcgctatccgacaatctccaagacattaggtggagttcagttcggcgtatggcatatgtcgctggaaagaacatgtgagcaaaaggccagcaaaaggccaggaaccgtaaaaaggccgcgttgctggcgtttttccataggctccgcccccctgacgagcatcacaaaaatcgacgctcaagtcagaggtggcgaaacccgacaggactataaagataccaggcgtttccccctggaagctccctcgtgcgctctcctgttccgaccctgccgcttaccggatacctgtccgcctttctcccttcgggaagcgtggcgctttctcatagctcacgctgtaggtatctcagttcggtgtaggtcgttcgctccaagctgggctgtgtgcacgaaccccccgttcagcccgaccgctgcgccttatccggtaactatcgtcttgagtccaacccggtaagacacgacttatcgccactggcagcagccactggtaacaggattagcagagcgaggtatgtaggcggtgctacagagttcttgaagtggtggcctaactacggctacactagaagaacagtatttggtatctgcgctctgctgaagccagttaccttcggaaaaagagttggtagctcttgatccggcaaacaaaccaccgctggtagcggtggtttttttgtttgcaagcagcagattacgcgcagaaaaaaaggatctcaagaagatcctttgatcttttctacggggtctgacgctctattcaacaaagccgccgtcccgtcaagtcagcgtaaatgggtagggggcttcaaatcgtcctcgtgataccaattcggagcctgcttttttgtacaaacttgttgataatggcaattcaaggatcttcacctagatccttttaaattaaaaatgaagttttaaatcaatctaaagtatatatgagtaaacttggtctgacagttaccaatgcttaatcagtgaggcacctatctcagcgatctgtctatttcgttcatccatagttgcctgactccccgtcgtgtagataactacgatacgggagggcttaccatctggccccagtgctgcaatgataccgcgagagccacgctcaccggctccagatttatcagcaataaaccagccagccggaagggccgagcgcagaagtggtcctgcaactttatccgcctccatccagtctattaattgttgccgggaagctagagtaagtagttcgccagttaatagtttgcgcaacgttgttgccattgctacaggcatcgtggtgtcacgctcgtcgtttggtatggcttcattcagctccggttcccaacgatcaaggcgagttacatgatcccccatgttgtgcaaaaaagcggttagctccttcggtcctccgatcgttgtcagaagtaagttggccgcagtgttatcactcatggttatggcagcactgcataattctcttactgtcatgccatccgtaagatgcttttctgtgactggtgagtactcaaccaagtcattctgagaatagtgtatgcggcgaccgagttgctcttgcccggcgtcaatacgggataataccgcgccacatagcagaactttaaaagtgctcatcattggaaaacgttcttcggggcgaaaactctcaaggatcttaccgctgttgagatccagttcgatgtaacccactcgtgcacccaactgatcttcagcatcttttactttcaccagcgtttctgggtgagcaaaaacaggaaggcaaaatgccgcaaaaaagggaataagggcgacacggaaatgttgaatactcatactcttcctttttcaatattattgaagcatttatcagggttattgtctcatgagcggatacatatttgaatgtatttagaaaaataaacaaataggggttccgcgcacatttccccgaaaagtgccagatacctgaaacaaaacccatcgtacggccaaggaagtctccaataactgtgatccaccacaagcgccagggttttcccagtcacgacgttgtaaaacgacggccagtcatgcataatccgcacgcatctggaataaggaagtgccattccgcctgaccttaatacgactcactatagggagaccctcgaaaacaaaccacaatccgtggctcgcagcaaacaccaaacaaaacaaacacaaaccaacaaaaagtggccacgcccgggccaccgatacttcccttcactccttcgggactgttggggaggaacacaacagggctcccctgttttcccattccttcccccttttcccaaccccaaccgccgtatctggtggcggcaagacacacgggtctttccctctaaagcacaattgtgtgtgtgtcccaggtcctcctgcgtacggtgcgggagtgctcccacccaactgttgtaagcctgtccaacgcgtcgtcctggcaagactatgacgtcgcatgttccgctgcggatgccgaccgggtaaccggttccccagtgtgtgtagtgcgatcttccaggtcctcctggttggcgttgtccagaaactgcttcaggtaagtggggtgtgcccaatccctacaaaggttgattctttcaccaccttaggaatgctccggaggtaccccagcaacagctgggatctgaccggaggctaattgtctacgggtggtgtttcctttttcttttcacacaactctactgcgtacaactcactgactatccacttgctctgtcacg

SEQ ID NO: 3606 - DNA, 3721 bp, synthetic construct
  source 1..3721: mol_type = other DNA; note = Anabaena L9a5 no P1 intron, P1 exon min3
atgggagtgaaggtgctgttcgccctgatctgtattgccgtggccgaggccaagcctaccgagaacaacgaggacttcaacatcgtggccgtggcctccaatttcgccaccacagatctggacgccgacagaggaaagctgcccggcaagaagctgcctctggaagtgctgaaagagatggaagccaacgccagaaaggccggctgtaccagaggctgtctgatctgcctgagccacatcaagtgcacccctaagatgaagaagttcatccccggcagatgccacacctacgagggcgacaaagaatctgcccaaggcggaatcggagaggccatcgtggatatccctgagatccccggcttcaaggacctggaacctatggaacagtttatcgcccaggtggacctgtgcgtggactgtacaacaggctgcctgaaaggcctggccaacgtgcagtgtagcgacctgctgaagaagtggctgcctcagagatgcgccaccttcgcctctaagatccagggccaagtggacaagatcaaaggcgctggcggcgactaatagctaactagacaaaacaccaaacaaacaagctgcgagccacggacttaaataattgagccttaaagaagaaattctttaagtggatgctctcaaactcagggaaacctaaatctagttatagacaaggcaatcctgagccaagccgaagtagtaattagtaagttaacaatagatgacttacaactaatcggaaggtgcagagactcgacgggagctaccctaacgtcaagacgagggtaaagagagagtccaattctcaaagccaatatcaacagtaagtctagatatcggatcccgggaggctaggtggaggctcagtgtgataagtctgcgatggtggatgcatgtgtcatggtcatagctgtttcctgtgtgaaattgttatccgctcagagggcacaatcctattccgcgctatccgacaatctccaagacattaggtggagttcagttcggcgtatggcatatgtcgctggaaagaacatgtgagcaaaaggccagcaaaaggccaggaaccgtaaaaaggccgcgttgctggcgtttttccataggctccgcccccctgacgagcatcacaaaaatcgacgctcaagtcagaggtggcgaaacccgacaggactataaagataccaggcgtttccccctggaagctccctcgtgcgctctcctgttccgaccctgccgcttaccggatacctgtccgcctttctcccttcgggaagcgtggcgctttctcatagctcacgctgtaggtatctcagttcggtgtaggtcgttcgctccaagctgggctgtgtgcacgaaccccccgttcagcccgaccgctgcgccttatccggtaactatcgtcttgagtccaacccggtaagacacgacttatcgccactggcagcagccactggtaacaggattagcagagcgaggtatgtaggcggtgctacagagttcttgaagtggtggcctaactacggctacactagaagaacagtatttggtatctgcgctctgctgaagccagttaccttcggaaaaagagttggtagctcttgatccggcaaacaaaccaccgctggtagcggtggtttttttgtttgcaagcagcagattacgcgcagaaaaaaaggatctcaagaagatcctttgatcttttctacggggtctgacgctctattcaacaaagccgccgtcccgtcaagtcagcgtaaatgggtagggggcttcaaatcgtcctcgtgataccaattcggagcctgcttttttgtacaaacttgttgataatggcaattcaaggatcttcacctagatccttttaaattaaaaatgaagttttaaatcaatctaaagtatatatgagtaaacttggtctgacagttaccaatgcttaatcagtgaggcacctatctcagcgatctgtctatttcgttcatccatagttgcctgactccccgtcgtgtagataactacgatacgggagggcttaccatctggccccagtgctgcaatgataccgcgagagccacgctcaccggctccagatttatcagcaataaaccagccagccggaagggccgagcgcagaagtggtcctgcaactttatccgcctccatccagtctattaattgttgccgggaagctagagtaagtagttcgccagttaatagtttgcgcaacgttgttgccattgctacaggcatcgtggtgtcacgctcgtcgtttggtatggcttcattcagctccggttcccaacgatcaaggcgagttacatgatcccccatgttgtgcaaaaaagcggttagctccttcggtcctccgatcgttgtcagaagtaagttggccgcagtgttatcactcatggttatggcagcactgcataattctcttactgtcatgccatccgtaagatgcttttctgtgactggtgagtactcaaccaagtcattctgagaatagtgtatgcggcgaccgagttgctcttgcccggcgtcaatacgggataataccgcgccacatagcagaactttaaaagtgctcatcattggaaaacgttcttcggggcgaaaactctcaaggatcttaccgctgttgagatccagttcgatgtaacccactcgtgcacccaactgatcttcagcatcttttactttcaccagcgtttctgggtgagcaaaaacaggaaggcaaaatgccgcaaaaaagggaataagggcgacacggaaatgttgaatactcatactcttcctttttcaatattattgaagcatttatcagggttattgtctcatgagcggatacatatttgaatgtatttagaaaaataaacaaataggggttccgcgcacatttccccgaaaagtgccagatacctgaaacaaaacccatcgtacggccaaggaagtctccaataactgtgatccaccacaagcgccagggttttcccagtcacgacgttgtaaaacgacggccagtcatgcataatccgcacgcatctggaataaggaagtgccattccgcctgaccttaatacgactcactatagggagaccctcgaaaacaaaccacatccgtggctcgcagcaaacaccaaacaaaacaaacacaaaccaacaaaaagtggccacgcccgggccaccgatacttcccttcactccttcgggactgttggggaggaacacaacagggctcccctgttttcccattccttcccccttttcccaaccccaaccgccgtatctggtggcggcaagacacacgggtctttccctctaaagcacaattgtgtgtgtgtcccaggtcctcctgcgtacggtgcgggagtgctcccacccaactgttgtaagcctgtccaacgcgtcgtcctggcaagactatgacgtcgcatgttccgctgcggatgccgaccgggtaaccggttccccagtgtgtgtagtgcgatcttccaggtcctcctggttggcgttgtccagaaactgcttcaggtaagtggggtgtgcccaatccctacaaaggttgattctttcaccaccttaggaatgctccggaggtaccccagcaacagctgggatctgaccggaggctaattgtctacgggtggtgtttcctttttcttttcacacaactctactgcgtacaactcactgactatccacttgctctgtcacg

SEQ ID NO: 3607 - DNA, 3720 bp, synthetic construct
  source 1..3720: mol_type = other DNA; note = Anabaena L9a5 no P1 intron, P1 exon min4
atgggagtgaaggtgctgttcgccctgatctgtattgccgtggccgaggccaagcctaccgagaacaacgaggacttcaacatcgtggccgtggcctccaatttcgccaccacagatctggacgccgacagaggaaagctgcccggcaagaagctgcctctggaagtgctgaaagagatggaagccaacgccagaaaggccggctgtaccagaggctgtctgatctgcctgagccacatcaagtgcacccctaagatgaagaagttcatccccggcagatgccacacctacgagggcgacaaagaatctgcccaaggcggaatcggagaggccatcgtggatatccctgagatccccggcttcaaggacctggaacctatggaacagtttatcgcccaggtggacctgtgcgtggactgtacaacaggctgcctgaaaggcctggccaacgtgcagtgtagcgacctgctgaagaagtggctgcctcagagatgcgccaccttcgcctctaagatccagggccaagtggacaagatcaaaggcgctggcggcgactaatagctaactagacaaaacaccaaacaaacaagctgcgagccacggacttaaataattgagccttaaagaagaaattctttaagtggatgctctcaaactcagggaaacctaaatctagttatagacaaggcaatcctgagccaagccgaagtagtaattagtaagttaacaatagatgacttacaactaatcggaaggtgcagagactcgacgggagctaccctaacgtcaagacgagggtaaagagagagtccaattctcaaagccaatatcaacagtaagtctagatatcggatcccgggaggctaggtggaggctcagtgtgataagtctgcgatggtggatgcatgtgtcatggtcatagctgtttcctgtgtgaaattgttatccgctcagagggcacaatcctattccgcgctatccgacaatctccaagacattaggtggagttcagttcggcgtatggcatatgtcgctggaaagaacatgtgagcaaaaggccagcaaaaggccaggaaccgtaaaaaggccgcgttgctggcgtttttccataggctccgcccccctgacgagcatcacaaaaatcgacgctcaagtcagaggtggcgaaacccgacaggactataaagataccaggcgtttccccctggaagctccctcgtgcgctctcctgttccgaccctgccgcttaccggatacctgtccgcctttctcccttcgggaagcgtggcgctttctcatagctcacgctgtaggtatctcagttcggtgtaggtcgttcgctccaagctgggctgtgtgcacgaaccccccgttcagcccgaccgctgcgccttatccggtaactatcgtcttgagtccaacccggtaagacacgacttatcgccactggcagcagccactggtaacaggattagcagagcgaggtatgtaggcggtgctacagagttcttgaagtggtggcctaactacggctacactagaagaacagtatttggtatctgcgctctgctgaagccagttaccttcggaaaaagagttggtagctcttgatccggcaaacaaaccaccgctggtagcggtggtttttttgtttgcaagcagcagattacgcgcagaaaaaaaggatctcaagaagatcctttgatcttttctacggggtctgacgctctattcaacaaagccgccgtcccgtcaagtcagcgtaaatgggtagggggcttcaaatcgtcctcgtgataccaattcggagcctgcttttttgtacaaacttgttgataatggcaattcaaggatcttcacctagatccttttaaattaaaaatgaagttttaaatcaatctaaagtatatatgagtaaacttggtctgacagttaccaatgcttaatcagtgaggcacctatctcagcgatctgtctatttcgttcatccatagttgcctgactccccgtcgtgtagataactacgatacgggagggcttaccatctggccccagtgctgcaatgataccgcgagagccacgctcaccggctccagatttatcagcaataaaccagccagccggaagggccgagcgcagaagtggtcctgcaactttatccgcctccatccagtctattaattgttgccgggaagctagagtaagtagttcgccagttaatagtttgcgcaacgttgttgccattgctacaggcatcgtggtgtcacgctcgtcgtttggtatggcttcattcagctccggttcccaacgatcaaggcgagttacatgatcccccatgttgtgcaaaaaagcggttagctccttcggtcctccgatcgttgtcagaagtaagttggccgcagtgttatcactcatggttatggcagcactgcataattctcttactgtcatgccatccgtaagatgcttttctgtgactggtgagtactcaaccaagtcattctgagaatagtgtatgcggcgaccgagttgctcttgcccggcgtcaatacgggataataccgcgccacatagcagaactttaaaagtgctcatcattggaaaacgttcttcggggcgaaaactctcaaggatcttaccgctgttgagatccagttcgatgtaacccactcgtgcacccaactgatcttcagcatcttttactttcaccagcgtttctgggtgagcaaaaacaggaaggcaaaatgccgcaaaaaagggaataagggcgacacggaaatgttgaatactcatactcttcctttttcaatattattgaagcatttatcagggttattgtctcatgagcggatacatatttgaatgtatttagaaaaataaacaaataggggttccgcgcacatttccccgaaaagtgccagatacctgaaacaaaacccatcgtacggccaaggaagtctccaataactgtgatccaccacaagcgccagggttttcccagtcacgacgttgtaaaacgacggccagtcatgcataatccgcacgcatctggaataaggaagtgccattccgcctgaccttaatacgactcactatagggagaccctcgaaaacaaaccactccgtggctcgcagcaaacaccaaacaaaacaaacacaaaccaacaaaaagtggccacgcccgggccaccgatacttcccttcactccttcgggactgttggggaggaacacaacagggctcccctgttttcccattccttcccccttttcccaaccccaaccgccgtatctggtggcggcaagacacacgggtctttccctctaaagcacaattgtgtgtgtgtcccaggtcctcctgcgtacggtgcgggagtgctcccacccaactgttgtaagcctgtccaacgcgtcgtcctggcaagactatgacgtcgcatgttccgctgcggatgccgaccgggtaaccggttccccagtgtgtgtagtgcgatcttccaggtcctcctggttggcgttgtccagaaactgcttcaggtaagtggggtgtgcccaatccctacaaaggttgattctttcaccaccttaggaatgctccggaggtaccccagcaacagctgggatctgaccggaggctaattgtctacgggtggtgtttcctttttcttttcacacaactctactgcgtacaactcactgactatccacttgctctgtcacg

SEQ ID NO: 3608 - DNA, 3719 bp, synthetic construct
  source 1..3719: mol_type = other DNA; note = Anabaena L9a5 no P1 intron, P1 exon min5
atgggagtgaaggtgctgttcgccctgatctgtattgccgtggccgaggccaagcctaccgagaacaacgaggacttcaacatcgtggccgtggcctccaatttcgccaccacagatctggacgccgacagaggaaagctgcccggcaagaagctgcctctggaagtgctgaaagagatggaagccaacgccagaaaggccggctgtaccagaggctgtctgatctgcctgagccacatcaagtgcacccctaagatgaagaagttcatccccggcagatgccacacctacgagggcgacaaagaatctgcccaaggcggaatcggagaggccatcgtggatatccctgagatccccggcttcaaggacctggaacctatggaacagtttatcgcccaggtggacctgtgcgtggactgtacaacaggctgcctgaaaggcctggccaacgtgcagtgtagcgacctgctgaagaagtggctgcctcagagatgcgccaccttcgcctctaagatccagggccaagtggacaagatcaaaggcgctggcggcgactaatagctaactagacaaaacaccaaacaaacaagctgcgagccacggacttaaataattgagccttaaagaagaaattctttaagtggatgctctcaaactcagggaaacctaaatctagttatagacaaggcaatcctgagccaagccgaagtagtaattagtaagttaacaatagatgacttacaactaatcggaaggtgcagagactcgacgggagctaccctaacgtcaagacgagggtaaagagagagtccaattctcaaagccaatatcaacagtaagtctagatatcggatcccgggaggctaggtggaggctcagtgtgataagtctgcgatggtggatgcatgtgtcatggtcatagctgtttcctgtgtgaaattgttatccgctcagagggcacaatcctattccgcgctatccgacaatctccaagacattaggtggagttcagttcggcgtatggcatatgtcgctggaaagaacatgtgagcaaaaggccagcaaaaggccaggaaccgtaaaaaggccgcgttgctggcgtttttccataggctccgcccccctgacgagcatcacaaaaatcgacgctcaagtcagaggtggcgaaacccgacaggactataaagataccaggcgtttccccctggaagctccctcgtgcgctctcctgttccgaccctgccgcttaccggatacctgtccgcctttctcccttcgggaagcgtggcgctttctcatagctcacgctgtaggtatctcagttcggtgtaggtcgttcgctccaagctgggctgtgtgcacgaaccccccgttcagcccgaccgctgcgccttatccggtaactatcgtcttgagtccaacccggtaagacacgacttatcgccactggcagcagccactggtaacaggattagcagagcgaggtatgtaggcggtgctacagagttcttgaagtggtggcctaactacggctacactagaagaacagtatttggtatctgcgctctgctgaagccagttaccttcggaaaaagagttggtagctcttgatccggcaaacaaaccaccgctggtagcggtggtttttttgtttgcaagcagcagattacgcgcagaaaaaaaggatctcaagaagatcctttgatcttttctacggggtctgacgctctattcaacaaagccgccgtcccgtcaagtcagcgtaaatgggtagggggcttcaaatcgtcctcgtgataccaattcggagcctgcttttttgtacaaacttgttgataatggcaattcaaggatcttcacctagatccttttaaattaaaaatgaagttttaaatcaatctaaagtatatatgagtaaacttggtctgacagttaccaatgcttaatcagtgaggcacctatctcagcgatctgtctatttcgttcatccatagttgcctgactccccgtcgtgtagataactacgatacgggagggcttaccatctggccccagtgctgcaatgataccgcgagagccacgctcaccggctccagatttatcagcaataaaccagccagccggaagggccgagcgcagaagtggtcctgcaactttatccgcctccatccagtctattaattgttgccgggaagctagagtaagtagttcgccagttaatagtttgcgcaacgttgttgccattgctacaggcatcgtggtgtcacgctcgtcgtttggtatggcttcattcagctccggttcccaacgatcaaggcgagttacatgatcccccatgttgtgcaaaaaagcggttagctccttcggtcctccgatcgttgtcagaagtaagttggccgcagtgttatcactcatggttatggcagcactgcataattctcttactgtcatgccatccgtaagatgcttttctgtgactggtgagtactcaaccaagtcattctgagaatagtgtatgcggcgaccgagttgctcttgcccggcgtcaatacgggataataccgcgccacatagcagaactttaaaagtgctcatcattggaaaacgttcttcggggcgaaaactctcaaggatcttaccgctgttgagatccagttcgatgtaacccactcgtgcacccaactgatcttcagcatcttttactttcaccagcgtttctgggtgagcaaaaacaggaaggcaaaatgccgcaaaaaagggaataagggcgacacggaaatgttgaatactcatactcttcctttttcaatattattgaagcatttatcagggttattgtctcatgagcggatacatatttgaatgtatttagaaaaataaacaaataggggttccgcgcacatttccccgaaaagtgccagatacctgaaacaaaacccatcgtacggccaaggaagtctccaataactgtgatccaccacaagcgccagggttttcccagtcacgacgttgtaaaacgacggccagtcatgcataatccgcacgcatctggaataaggaagtgccattccgcctgaccttaatacgactcactatagggagaccctcgaaaacaaaccacccgtggctcgcagcaaacaccaaacaaaacaaacacaaaccaacaaaaagtggccacgcccgggccaccgatacttcccttcactccttcgggactgttggggaggaacacaacagggctcccctgttttcccattccttcccccttttcccaaccccaaccgccgtatctggtggcggcaagacacacgggtctttccctctaaagcacaattgtgtgtgtgtcccaggtcctcctgcgtacggtgcgggagtgctcccacccaactgttgtaagcctgtccaacgcgtcgtcctggcaagactatgacgtcgcatgttccgctgcggatgccgaccgggtaaccggttccccagtgtgtgtagtgcgatcttccaggtcctcctggttggcgttgtccagaaactgcttcaggtaagtggggtgtgcccaatccctacaaaggttgattctttcaccaccttaggaatgctccggaggtaccccagcaacagctgggatctgaccggaggctaattgtctacgggtggtgtttcctttttcttttcacacaactctactgcgtacaactcactgactatccacttgctctgtcacg

SEQ ID NO: 3609 - DNA, 3718 bp, synthetic construct
  source 1..3718: mol_type = other DNA; note = Anabaena L9a5 no P1 intron, P1 exon min6
atgggagtgaaggtgctgttcgccctgatctgtattgccgtggccgaggccaagcctaccgagaacaacgaggacttcaacatcgtggccgtggcctccaatttcgccaccacagatctggacgccgacagaggaaagctgcccggcaagaagctgcctctggaagtgctgaaagagatggaagccaacgccagaaaggccggctgtaccagaggctgtctgatctgcctgagccacatcaagtgcacccctaagatgaagaagttcatccccggcagatgccacacctacgagggcgacaaagaatctgcccaaggcggaatcggagaggccatcgtggatatccctgagatccccggcttcaaggacctggaacctatggaacagtttatcgcccaggtggacctgtgcgtggactgtacaacaggctgcctgaaaggcctggccaacgtgcagtgtagcgacctgctgaagaagtggctgcctcagagatgcgccaccttcgcctctaagatccagggccaagtggacaagatcaaaggcgctggcggcgactaatagctaactagacaaaacaccaaacaaacaagctgcgagccacggacttaaataattgagccttaaagaagaaattctttaagtggatgctctcaaactcagggaaacctaaatctagttatagacaaggcaatcctgagccaagccgaagtagtaattagtaagttaacaatagatgacttacaactaatcggaaggtgcagagactcgacgggagctaccctaacgtcaagacgagggtaaagagagagtccaattctcaaagccaatatcaacagtaagtctagatatcggatcccgggaggctaggtggaggctcagtgtgataagtctgcgatggtggatgcatgtgtcatggtcatagctgtttcctgtgtgaaattgttatccgctcagagggcacaatcctattccgcgctatccgacaatctccaagacattaggtggagttcagttcggcgtatggcatatgtcgctggaaagaacatgtgagcaaaaggccagcaaaaggccaggaaccgtaaaaaggccgcgttgctggcgtttttccataggctccgcccccctgacgagcatcacaaaaatcgacgctcaagtcagaggtggcgaaacccgacaggactataaagataccaggcgtttccccctggaagctccctcgtgcgctctcctgttccgaccctgccgcttaccggatacctgtccgcctttctcccttcgggaagcgtggcgctttctcatagctcacgctgtaggtatctcagttcggtgtaggtcgttcgctccaagctgggctgtgtgcacgaaccccccgttcagcccgaccgctgcgccttatccggtaactatcgtcttgagtccaacccggtaagacacgacttatcgccactggcagcagccactggtaacaggattagcagagcgaggtatgtaggcggtgctacagagttcttgaagtggtggcctaactacggctacactagaagaacagtatttggtatctgcgctctgctgaagccagttaccttcggaaaaagagttggtagctcttgatccggcaaacaaaccaccgctggtagcggtggtttttttgtttgcaagcagcagattacgcgcagaaaaaaaggatctcaagaagatcctttgatcttttctacggggtctgacgctctattcaacaaagccgccgtcccgtcaagtcagcgtaaatgggtagggggcttcaaatcgtcctcgtgataccaattcggagcctgcttttttgtacaaacttgttgataatggcaattcaaggatcttcacctagatccttttaaattaaaaatgaagttttaaatcaatctaaagtatatatgagtaaacttggtctgacagttaccaatgcttaatcagtgaggcacctatctcagcgatctgtctatttcgttcatccatagttgcctgactccccgtcgtgtagataactacgatacgggagggcttaccatctggccccagtgctgcaatgataccgcgagagccacgctcaccggctccagatttatcagcaataaaccagccagccggaagggccgagcgcagaagtggtcctgcaactttatccgcctccatccagtctattaattgttgccgggaagctagagtaagtagttcgccagttaatagtttgcgcaacgttgttgccattgctacaggcatcgtggtgtcacgctcgtcgtttggtatggcttcattcagctccggttcccaacgatcaaggcgagttacatgatcccccatgttgtgcaaaaaagcggttagctccttcggtcctccgatcgttgtcagaagtaagttggccgcagtgttatcactcatggttatggcagcactgcataattctcttactgtcatgccatccgtaagatgcttttctgtgactggtgagtactcaaccaagtcattctgagaatagtgtatgcggcgaccgagttgctcttgcccggcgtcaatacgggataataccgcgccacatagcagaactttaaaagtgctcatcattggaaaacgttcttcggggcgaaaactctcaaggatcttaccgctgttgagatccagttcgatgtaacccactcgtgcacccaactgatcttcagcatcttttactttcaccagcgtttctgggtgagcaaaaacaggaaggcaaaatgccgcaaaaaagggaataagggcgacacggaaatgttgaatactcatactcttcctttttcaatattattgaagcatttatcagggttattgtctcatgagcggatacatatttgaatgtatttagaaaaataaacaaataggggttccgcgcacatttccccgaaaagtgccagatacctgaaacaaaacccatcgtacggccaaggaagtctccaataactgtgatccaccacaagcgccagggttttcccagtcacgacgttgtaaaacgacggccagtcatgcataatccgcacgcatctggaataaggaagtgccattccgcctgaccttaatacgactcactatagggagaccctcgaaaacaaaccaccgtggctcgcagcaaacaccaaacaaaacaaacacaaaccaacaaaaagtggccacgcccgggccaccgatacttcccttcactccttcgggactgttggggaggaacacaacagggctcccctgttttcccattccttcccccttttcccaaccccaaccgccgtatctggtggcggcaagacacacgggtctttccctctaaagcacaattgtgtgtgtgtcccaggtcctcctgcgtacggtgcgggagtgctcccacccaactgttgtaagcctgtccaacgcgtcgtcctggcaagactatgacgtcgcatgttccgctgcggatgccgaccgggtaaccggttccccagtgtgtgtagtgcgatcttccaggtcctcctggttggcgttgtccagaaactgcttcaggtaagtggggtgtgcccaatccctacaaaggttgattctttcaccaccttaggaatgctccggaggtaccccagcaacagctgggatctgaccggaggctaattgtctacgggtggtgtttcctttttcttttcacacaactctactgcgtacaactcactgactatccacttgctctgtcacg

SEQ ID NO: 3610 - DNA, 3717 bp, synthetic construct
  source 1..3717: mol_type = other DNA; note = Anabaena L9a5 no P1 intron, P1 exon min7
atgggagtgaaggtgctgttcgccctgatctgtattgccgtggccgaggccaagcctaccgagaacaacgaggacttcaacatcgtggccgtggcctccaatttcgccaccacagatctggacgccgacagaggaaagctgcccggcaagaagctgcctctggaagtgctgaaagagatggaagccaacgccagaaaggccggctgtaccagaggctgtctgatctgcctgagccacatcaagtgcacccctaagatgaagaagttcatccccggcagatgccacacctacgagggcgacaaagaatctgcccaaggcggaatcggagaggccatcgtggatatccctgagatccccggcttcaaggacctggaacctatggaacagtttatcgcccaggtggacctgtgcgtggactgtacaacaggctgcctgaaaggcctggccaacgtgcagtgtagcgacctgctgaagaagtggctgcctcagagatgcgccaccttcgcctctaagatccagggccaagtggacaagatcaaaggcgctggcggcgactaatagctaactagacaaaacaccaaacaaacaagctgcgagccacggacttaaataattgagccttaaagaagaaattctttaagtggatgctctcaaactcagggaaacctaaatctagttatagacaaggcaatcctgagccaagccgaagtagtaattagtaagttaacaatagatgacttacaactaatcggaaggtgcagagactcgacgggagctaccctaacgtcaagacgagggtaaagagagagtccaattctcaaagccaatatcaacagtaagtctagatatcggatcccgggaggctaggtggaggctcagtgtgataagtctgcgatggtggatgcatgtgtcatggtcatagctgtttcctgtgtgaaattgttatccgctcagagggcacaatcctattccgcgctatccgacaatctccaagacattaggtggagttcagttcggcgtatggcatatgtcgctggaaagaacatgtgagcaaaaggccagcaaaaggccaggaaccgtaaaaaggccgcgttgctggcgtttttccataggctccgcccccctgacgagcatcacaaaaatcgacgctcaagtcagaggtggcgaaacccgacaggactataaagataccaggcgtttccccctggaagctccctcgtgcgctctcctgttccgaccctgccgcttaccggatacctgtccgcctttctcccttcgggaagcgtggcgctttctcatagctcacgctgtaggtatctcagttcggtgtaggtcgttcgctccaagctgggctgtgtgcacgaaccccccgttcagcccgaccgctgcgccttatccggtaactatcgtcttgagtccaacccggtaagacacgacttatcgccactggcagcagccactggtaacaggattagcagagcgaggtatgtaggcggtgctacagagttcttgaagtggtggcctaactacggctacactagaagaacagtatttggtatctgcgctctgctgaagccagttaccttcggaaaaagagttggtagctcttgatccggcaaacaaaccaccgctggtagcggtggtttttttgtttgcaagcagcagattacgcgcagaaaaaaaggatctcaagaagatcctttgatcttttctacggggtctgacgctctattcaacaaagccgccgtcccgtcaagtcagcgtaaatgggtagggggcttcaaatcgtcctcgtgataccaattcggagcctgcttttttgtacaaacttgttgataatggcaattcaaggatcttcacctagatccttttaaattaaaaatgaagttttaaatcaatctaaagtatatatgagtaaacttggtctgacagttaccaatgcttaatcagtgaggcacctatctcagcgatctgtctatttcgttcatccatagttgcctgactccccgtcgtgtagataactacgatacgggagggcttaccatctggccccagtgctgcaatgataccgcgagagccacgctcaccggctccagatttatcagcaataaaccagccagccggaagggccgagcgcagaagtggtcctgcaactttatccgcctccatccagtctattaattgttgccgggaagctagagtaagtagttcgccagttaatagtttgcgcaacgttgttgccattgctacaggcatcgtggtgtcacgctcgtcgtttggtatggcttcattcagctccggttcccaacgatcaaggcgagttacatgatcccccatgttgtgcaaaaaagcggttagctccttcggtcctccgatcgttgtcagaagtaagttggccgcagtgttatcactcatggttatggcagcactgcataattctcttactgtcatgccatccgtaagatgcttttctgtgactggtgagtactcaaccaagtcattctgagaatagtgtatgcggcgaccgagttgctcttgcccggcgtcaatacgggataataccgcgccacatagcagaactttaaaagtgctcatcattggaaaacgttcttcggggcgaaaactctcaaggatcttaccgctgttgagatccagttcgatgtaacccactcgtgcacccaactgatcttcagcatcttttactttcaccagcgtttctgggtgagcaaaaacaggaaggcaaaatgccgcaaaaaagggaataagggcgacacggaaatgttgaatactcatactcttcctttttcaatattattgaagcatttatcagggttattgtctcatgagcggatacatatttgaatgtatttagaaaaataaacaaataggggttccgcgcacatttccccgaaaagtgccagatacctgaaacaaaacccatcgtacggccaaggaagtctccaataactgtgatccaccacaagcgccagggttttcccagtcacgacgttgtaaaacgacggccagtcatgcataatccgcacgcatctggaataaggaagtgccattccgcctgaccttaatacgactcactatagggagaccctcgaaaacaaaccacgtggctcgcagcaaacaccaaacaaaacaaacacaaaccaacaaaaagtggccacgcccgggccaccgatacttcccttcactccttcgggactgttggggaggaacacaacagggctcccctgttttcccattccttcccccttttcccaaccccaaccgccgtatctggtggcggcaagacacacgggtctttccctctaaagcacaattgtgtgtgtgtcccaggtcctcctgcgtacggtgcgggagtgctcccacccaactgttgtaagcctgtccaacgcgtcgtcctggcaagactatgacgtcgcatgttccgctgcggatgccgaccgggtaaccggttccccagtgtgtgtagtgcgatcttccaggtcctcctggttggcgttgtccagaaactgcttcaggtaagtggggtgtgcccaatccctacaaaggttgattctttcaccaccttaggaatgctccggaggtaccccagcaacagctgggatctgaccggaggctaattgtctacgggtggtgtttcctttttcttttcacacaactctactgcgtacaactcactgactatccacttgctctgtcacg

SEQ ID NO: 3611 - DNA, 3716 bp, synthetic construct
  source 1..3716: mol_type = other DNA; note = Anabaena L9a5 no P1 intron, P1 exon min8
atgggagtgaaggtgctgttcgccctgatctgtattgccgtggccgaggccaagcctaccgagaacaacgaggacttcaacatcgtggccgtggcctccaatttcgccaccacagatctggacgccgacagaggaaagctgcccggcaagaagctgcctctggaagtgctgaaagagatggaagccaacgccagaaaggccggctgtaccagaggctgtctgatctgcctgagccacatcaagtgcacccctaagatgaagaagttcatccccggcagatgccacacctacgagggcgacaaagaatctgcccaaggcggaatcggagaggccatcgtggatatccctgagatccccggcttcaaggacctggaacctatggaacagtttatcgcccaggtggacctgtgcgtggactgtacaacaggctgcctgaaaggcctggccaacgtgcagtgtagcgacctgctgaagaagtggctgcctcagagatgcgccaccttcgcctctaagatccagggccaagtggacaagatcaaaggcgctggcggcgactaatagctaactagacaaaacaccaaacaaacaagctgcgagccacggacttaaataattgagccttaaagaagaaattctttaagtggatgctctcaaactcagggaaacctaaatctagttatagacaaggcaatcctgagccaagccgaagtagtaattagtaagttaacaatagatgacttacaactaatcggaaggtgcagagactcgacgggagctaccctaacgtcaagacgagggtaaagagagagtccaattctcaaagccaatatcaacagtaagtctagatatcggatcccgggaggctaggtggaggctcagtgtgataagtctgcgatggtggatgcatgtgtcatggtcatagctgtttcctgtgtgaaattgttatccgctcagagggcacaatcctattccgcgctatccgacaatctccaagacattaggtggagttcagttcggcgtatggcatatgtcgctggaaagaacatgtgagcaaaaggccagcaaaaggccaggaaccgtaaaaaggccgcgttgctggcgtttttccataggctccgcccccctgacgagcatcacaaaaatcgacgctcaagtcagaggtggcgaaacccgacaggactataaagataccaggcgtttccccctggaagctccctcgtgcgctctcctgttccgaccctgccgcttaccggatacctgtccgcctttctcccttcgggaagcgtggcgctttctcatagctcacgctgtaggtatctcagttcggtgtaggtcgttcgctccaagctgggctgtgtgcacgaaccccccgttcagcccgaccgctgcgccttatccggtaactatcgtcttgagtccaacccggtaagacacgacttatcgccactggcagcagccactggtaacaggattagcagagcgaggtatgtaggcggtgctacagagttcttgaagtggtggcctaactacggctacactagaagaacagtatttggtatctgcgctctgctgaagccagttaccttcggaaaaagagttggtagctcttgatccggcaaacaaaccaccgctggtagcggtggtttttttgtttgcaagcagcagattacgcgcagaaaaaaaggatctcaagaagatcctttgatcttttctacggggtctgacgctctattcaacaaagccgccgtcccgtcaagtcagcgtaaatgggtagggggcttcaaatcgtcctcgtgataccaattcggagcctgcttttttgtacaaacttgttgataatggcaattcaaggatcttcacctagatccttttaaattaaaaatgaagttttaaatcaatctaaagtatatatgagtaaacttggtctgacagttaccaatgcttaatcagtgaggcacctatctcagcgatctgtctatttcgttcatccatagttgcctgactccccgtcgtgtagataactacgatacgggagggcttaccatctggccccagtgctgcaatgataccgcgagagccacgctcaccggctccagatttatcagcaataaaccagccagccggaagggccgagcgcagaagtggtcctgcaactttatccgcctccatccagtctattaattgttgccgggaagctagagtaagtagttcgccagttaatagtttgcgcaacgttgttgccattgctacaggcatcgtggtgtcacgctcgtcgtttggtatggcttcattcagctccggttcccaacgatcaaggcgagttacatgatcccccatgttgtgcaaaaaagcggttagctccttcggtcctccgatcgttgtcagaagtaagttggccgcagtgttatcactcatggttatggcagcactgcataattctcttactgtcatgccatccgtaagatgcttttctgtgactggtgagtactcaaccaagtcattctgagaatagtgtatgcggcgaccgagttgctcttgcccggcgtcaatacgggataataccgcgccacatagcagaactttaaaagtgctcatcattggaaaacgttcttcggggcgaaaactctcaaggatcttaccgctgttgagatccagttcgatgtaacccactcgtgcacccaactgatcttcagcatcttttactttcaccagcgtttctgggtgagcaaaaacaggaaggcaaaatgccgcaaaaaagggaataagggcgacacggaaatgttgaatactcatactcttcctttttcaatattattgaagcatttatcagggttattgtctcatgagcggatacatatttgaatgtatttagaaaaataaacaaataggggttccgcgcacatttccccgaaaagtgccagatacctgaaacaaaacccatcgtacggccaaggaagtctccaataactgtgatccaccacaagcgccagggttttcccagtcacgacgttgtaaaacgacggccagtcatgcataatccgcacgcatctggaataaggaagtgccattccgcctgaccttaatacgactcactatagggagaccctcgaaaacaaaccactggctcgcagcaaacaccaaacaaaacaaacacaaaccaacaaaaagtggccacgcccgggccaccgatacttcccttcactccttcgggactgttggggaggaacacaacagggctcccctgttttcccattccttcccccttttcccaaccccaaccgccgtatctggtggcggcaagacacacgggtctttccctctaaagcacaattgtgtgtgtgtcccaggtcctcctgcgtacggtgcgggagtgctcccacccaactgttgtaagcctgtccaacgcgtcgtcctggcaagactatgacgtcgcatgttccgctgcggatgccgaccgggtaaccggttccccagtgtgtgtagtgcgatcttccaggtcctcctggttggcgttgtccagaaactgcttcaggtaagtggggtgtgcccaatccctacaaaggttgattctttcaccaccttaggaatgctccggaggtaccccagcaacagctgggatctgaccggaggctaattgtctacgggtggtgtttcctttttcttttcacacaactctactgcgtacaactcactgactatccacttgctctgtcacg

SEQ ID NO: 3612 - DNA, 3715 bp, synthetic construct
  source 1..3715: mol_type = other DNA; note = Anabaena L9a5 no P1 intron, no P1 exon
atgggagtgaaggtgctgttcgccctgatctgtattgccgtggccgaggccaagcctaccgagaacaacgaggacttcaacatcgtggccgtggcctccaatttcgccaccacagatctggacgccgacagaggaaagctgcccggcaagaagctgcctctggaagtgctgaaagagatggaagccaacgccagaaaggccggctgtaccagaggctgtctgatctgcctgagccacatcaagtgcacccctaagatgaagaagttcatccccggcagatgccacacctacgagggcgacaaagaatctgcccaaggcggaatcggagaggccatcgtggatatccctgagatccccggcttcaaggacctggaacctatggaacagtttatcgcccaggtggacctgtgcgtggactgtacaacaggctgcctgaaaggcctggccaacgtgcagtgtagcgacctgctgaagaagtggctgcctcagagatgcgccaccttcgcctctaagatccagggccaagtggacaagatcaaaggcgctggcggcgactaatagctaactagacaaaacaccaaacaaacaagctgcgagccacggacttaaataattgagccttaaagaagaaattctttaagtggatgctctcaaactcagggaaacctaaatctagttatagacaaggcaatcctgagccaagccgaagtagtaattagtaagttaacaatagatgacttacaactaatcggaaggtgcagagactcgacgggagctaccctaacgtcaagacgagggtaaagagagagtccaattctcaaagccaatatcaacagtaagtctagatatcggatcccgggaggctaggtggaggctcagtgtgataagtctgcgatggtggatgcatgtgtcatggtcatagctgtttcctgtgtgaaattgttatccgctcagagggcacaatcctattccgcgctatccgacaatctccaagacattaggtggagttcagttcggcgtatggcatatgtcgctggaaagaacatgtgagcaaaaggccagcaaaaggccaggaaccgtaaaaaggccgcgttgctggcgtttttccataggctccgcccccctgacgagcatcacaaaaatcgacgctcaagtcagaggtggcgaaacccgacaggactataaagataccaggcgtttccccctggaagctccctcgtgcgctctcctgttccgaccctgccgcttaccggatacctgtccgcctttctcccttcgggaagcgtggcgctttctcatagctcacgctgtaggtatctcagttcggtgtaggtcgttcgctccaagctgggctgtgtgcacgaaccccccgttcagcccgaccgctgcgccttatccggtaactatcgtcttgagtccaacccggtaagacacgacttatcgccactggcagcagccactggtaacaggattagcagagcgaggtatgtaggcggtgctacagagttcttgaagtggtggcctaactacggctacactagaagaacagtatttggtatctgcgctctgctgaagccagttaccttcggaaaaagagttggtagctcttgatccggcaaacaaaccaccgctggtagcggtggtttttttgtttgcaagcagcagattacgcgcagaaaaaaaggatctcaagaagatcctttgatcttttctacggggtctgacgctctattcaacaaagccgccgtcccgtcaagtcagcgtaaatgggtagggggcttcaaatcgtcctcgtgataccaattcggagcctgcttttttgtacaaacttgttgataatggcaattcaaggatcttcacctagatccttttaaattaaaaatgaagttttaaatcaatctaaagtatatatgagtaaacttggtctgacagttaccaatgcttaatcagtgaggcacctatctcagcgatctgtctatttcgttcatccatagttgcctgactccccgtcgtgtagataactacgatacgggagggcttaccatctggccccagtgctgcaatgataccgcgagagccacgctcaccggctccagatttatcagcaataaaccagccagccggaagggccgagcgcagaagtggtcctgcaactttatccgcctccatccagtctattaattgttgccgggaagctagagtaagtagttcgccagttaatagtttgcgcaacgttgttgccattgctacaggcatcgtggtgtcacgctcgtcgtttggtatggcttcattcagctccggttcccaacgatcaaggcgagttacatgatcccccatgttgtgcaaaaaagcggttagctccttcggtcctccgatcgttgtcagaagtaagttggccgcagtgttatcactcatggttatggcagcactgcataattctcttactgtcatgccatccgtaagatgcttttctgtgactggtgagtactcaaccaagtcattctgagaatagtgtatgcggcgaccgagttgctcttgcccggcgtcaatacgggataataccgcgccacatagcagaactttaaaagtgctcatcattggaaaacgttcttcggggcgaaaactctcaaggatcttaccgctgttgagatccagttcgatgtaacccactcgtgcacccaactgatcttcagcatcttttactttcaccagcgtttctgggtgagcaaaaacaggaaggcaaaatgccgcaaaaaagggaataagggcgacacggaaatgttgaatactcatactcttcctttttcaatattattgaagcatttatcagggttattgtctcatgagcggatacatatttgaatgtatttagaaaaataaacaaataggggttccgcgcacatttccccgaaaagtgccagatacctgaaacaaaacccatcgtacggccaaggaagtctccaataactgtgatccaccacaagcgccagggttttcccagtcacgacgttgtaaaacgacggccagtcatgcataatccgcacgcatctggaataaggaagtgccattccgcctgaccttaatacgactcactatagggagaccctcgaaaacaaaccacggctcgcagcaaacaccaaacaaaacaaacacaaaccaacaaaaagtggccacgcccgggccaccgatacttcccttcactccttcgggactgttggggaggaacacaacagggctcccctgttttcccattccttcccccttttcccaaccccaaccgccgtatctggtggcggcaagacacacgggtctttccctctaaagcacaattgtgtgtgtgtcccaggtcctcctgcgtacggtgcgggagtgctcccacccaactgttgtaagcctgtccaacgcgtcgtcctggcaagactatgacgtcgcatgttccgctgcggatgccgaccgggtaaccggttccccagtgtgtgtagtgcgatcttccaggtcctcctggttggcgttgtccagaaactgcttcaggtaagtggggtgtgcccaatccctacaaaggttgattctttcaccaccttaggaatgctccggaggtaccccagcaacagctgggatctgaccggaggctaattgtctacgggtggtgtttcctttttcttttcacacaactctactgcgtacaactcactgactatccacttgctctgtcacg

SEQ ID NO: 3613 - DNA, 3722 bp, synthetic construct
  source 1..3722: mol_type = other DNA; note = Anabaena L9a5 no P1 intron, P1 exon min1, P2 exon min1
atgggagtgaaggtgctgttcgccctgatctgtattgccgtggccgaggccaagcctaccgagaacaacgaggacttcaacatcgtggccgtggcctccaatttcgccaccacagatctggacgccgacagaggaaagctgcccggcaagaagctgcctctggaagtgctgaaagagatggaagccaacgccagaaaggccggctgtaccagaggctgtctgatctgcctgagccacatcaagtgcacccctaagatgaagaagttcatccccggcagatgccacacctacgagggcgacaaagaatctgcccaaggcggaatcggagaggccatcgtggatatccctgagatccccggcttcaaggacctggaacctatggaacagtttatcgcccaggtggacctgtgcgtggactgtacaacaggctgcctgaaaggcctggccaacgtgcagtgtagcgacctgctgaagaagtggctgcctcagagatgcgccaccttcgcctctaagatccagggccaagtggacaagatcaaaggcgctggcggcgactaatagctaactagacaaaacaccaaacaaacaagctgcgagccacggactaaataattgagccttaaagaagaaattctttaagtggatgctctcaaactcagggaaacctaaatctagttatagacaaggcaatcctgagccaagccgaagtagtaattagtaagttaacaatagatgacttacaactaatcggaaggtgcagagactcgacgggagctaccctaacgtcaagacgagggtaaagagagagtccaattctcaaagccaatatcaacagtaagtctagatatcggatcccgggaggctaggtggaggctcagtgtgataagtctgcgatggtggatgcatgtgtcatggtcatagctgtttcctgtgtgaaattgttatccgctcagagggcacaatcctattccgcgctatccgacaatctccaagacattaggtggagttcagttcggcgtatggcatatgtcgctggaaagaacatgtgagcaaaaggccagcaaaaggccaggaaccgtaaaaaggccgcgttgctggcgtttttccataggctccgcccccctgacgagcatcacaaaaatcgacgctcaagtcagaggtggcgaaacccgacaggactataaagataccaggcgtttccccctggaagctccctcgtgcgctctcctgttccgaccctgccgcttaccggatacctgtccgcctttctcccttcgggaagcgtggcgctttctcatagctcacgctgtaggtatctcagttcggtgtaggtcgttcgctccaagctgggctgtgtgcacgaaccccccgttcagcccgaccgctgcgccttatccggtaactatcgtcttgagtccaacccggtaagacacgacttatcgccactggcagcagccactggtaacaggattagcagagcgaggtatgtaggcggtgctacagagttcttgaagtggtggcctaactacggctacactagaagaacagtatttggtatctgcgctctgctgaagccagttaccttcggaaaaagagttggtagctcttgatccggcaaacaaaccaccgctggtagcggtggtttttttgtttgcaagcagcagattacgcgcagaaaaaaaggatctcaagaagatcctttgatcttttctacggggtctgacgctctattcaacaaagccgccgtcccgtcaagtcagcgtaaatgggtagggggcttcaaatcgtcctcgtgataccaattcggagcctgcttttttgtacaaacttgttgataatggcaattcaaggatcttcacctagatccttttaaattaaaaatgaagttttaaatcaatctaaagtatatatgagtaaacttggtctgacagttaccaatgcttaatcagtgaggcacctatctcagcgatctgtctatttcgttcatccatagttgcctgactccccgtcgtgtagataactacgatacgggagggcttaccatctggccccagtgctgcaatgataccgcgagagccacgctcaccggctccagatttatcagcaataaaccagccagccggaagggccgagcgcagaagtggtcctgcaactttatccgcctccatccagtctattaattgttgccgggaagctagagtaagtagttcgccagttaatagtttgcgcaacgttgttgccattgctacaggcatcgtggtgtcacgctcgtcgtttggtatggcttcattcagctccggttcccaacgatcaaggcgagttacatgatcccccatgttgtgcaaaaaagcggttagctccttcggtcctccgatcgttgtcagaagtaagttggccgcagtgttatcactcatggttatggcagcactgcataattctcttactgtcatgccatccgtaagatgcttttctgtgactggtgagtactcaaccaagtcattctgagaatagtgtatgcggcgaccgagttgctcttgcccggcgtcaatacgggataataccgcgccacatagcagaactttaaaagtgctcatcattggaaaacgttcttcggggcgaaaactctcaaggatcttaccgctgttgagatccagttcgatgtaacccactcgtgcacccaactgatcttcagcatcttttactttcaccagcgtttctgggtgagcaaaaacaggaaggcaaaatgccgcaaaaaagggaataagggcgacacggaaatgttgaatactcatactcttcctttttcaatattattgaagcatttatcagggttattgtctcatgagcggatacatatttgaatgtatttagaaaaataaacaaataggggttccgcgcacatttccccgaaaagtgccagatacctgaaacaaaacccatcgtacggccaaggaagtctccaataactgtgatccaccacaagcgccagggttttcccagtcacgacgttgtaaaacgacggccagtcatgcataatccgcacgcatctggaataaggaagtgccattccgcctgaccttaatacgactcactatagggagaccctcgaaaacaaaccacaaatccgtggctcgcagcaaacaccaaacaaaacaaacacaaaccaacaaaaagtggccacgcccgggccaccgatacttcccttcactccttcgggactgttggggaggaacacaacagggctcccctgttttcccattccttcccccttttcccaaccccaaccgccgtatctggtggcggcaagacacacgggtctttccctctaaagcacaattgtgtgtgtgtcccaggtcctcctgcgtacggtgcgggagtgctcccacccaactgttgtaagcctgtccaacgcgtcgtcctggcaagactatgacgtcgcatgttccgctgcggatgccgaccgggtaaccggttccccagtgtgtgtagtgcgatcttccaggtcctcctggttggcgttgtccagaaactgcttcaggtaagtggggtgtgcccaatccctacaaaggttgattctttcaccaccttaggaatgctccggaggtaccccagcaacagctgggatctgaccggaggctaattgtctacgggtggtgtttcctttttcttttcacacaactctactgcgtacaactcactgactatccacttgctctgtcacg

SEQ ID NO: 3614 - DNA, 3720 bp, synthetic construct
  source 1..3720: mol_type = other DNA; note = Anabaena L9a5 no P1 intron, P1 exon min2 P2 exon min2
atgggagtgaaggtgctgttcgccctgatctgtattgccgtggccgaggccaagcctaccgagaacaacgaggacttcaacatcgtggccgtggcctccaatttcgccaccacagatctggacgccgacagaggaaagctgcccggcaagaagctgcctctggaagtgctgaaagagatggaagccaacgccagaaaggccggctgtaccagaggctgtctgatctgcctgagccacatcaagtgcacccctaagatgaagaagttcatccccggcagatgccacacctacgagggcgacaaagaatctgcccaaggcggaatcggagaggccatcgtggatatccctgagatccccggcttcaaggacctggaacctatggaacagtttatcgcccaggtggacctgtgcgtggactgtacaacaggctgcctgaaaggcctggccaacgtgcagtgtagcgacctgctgaagaagtggctgcctcagagatgcgccaccttcgcctctaagatccagggccaagtggacaagatcaaaggcgctggcggcgactaatagctaactagacaaaacaccaaacaaacaagctgcgagccacggacaaataattgagccttaaagaagaaattctttaagtggatgctctcaaactcagggaaacctaaatctagttatagacaaggcaatcctgagccaagccgaagtagtaattagtaagttaacaatagatgacttacaactaatcggaaggtgcagagactcgacgggagctaccctaacgtcaagacgagggtaaagagagagtccaattctcaaagccaatatcaacagtaagtctagatatcggatcccgggaggctaggtggaggctcagtgtgataagtctgcgatggtggatgcatgtgtcatggtcatagctgtttcctgtgtgaaattgttatccgctcagagggcacaatcctattccgcgctatccgacaatctccaagacattaggtggagttcagttcggcgtatggcatatgtcgctggaaagaacatgtgagcaaaaggccagcaaaaggccaggaaccgtaaaaaggccgcgttgctggcgtttttccataggctccgcccccctgacgagcatcacaaaaatcgacgctcaagtcagaggtggcgaaacccgacaggactataaagataccaggcgtttccccctggaagctccctcgtgcgctctcctgttccgaccctgccgcttaccggatacctgtccgcctttctcccttcgggaagcgtggcgctttctcatagctcacgctgtaggtatctcagttcggtgtaggtcgttcgctccaagctgggctgtgtgcacgaaccccccgttcagcccgaccgctgcgccttatccggtaactatcgtcttgagtccaacccggtaagacacgacttatcgccactggcagcagccactggtaacaggattagcagagcgaggtatgtaggcggtgctacagagttcttgaagtggtggcctaactacggctacactagaagaacagtatttggtatctgcgctctgctgaagccagttaccttcggaaaaagagttggtagctcttgatccggcaaacaaaccaccgctggtagcggtggtttttttgtttgcaagcagcagattacgcgcagaaaaaaaggatctcaagaagatcctttgatcttttctacggggtctgacgctctattcaacaaagccgccgtcccgtcaagtcagcgtaaatgggtagggggcttcaaatcgtcctcgtgataccaattcggagcctgcttttttgtacaaacttgttgataatggcaattcaaggatcttcacctagatccttttaaattaaaaatgaagttttaaatcaatctaaagtatatatgagtaaacttggtctgacagttaccaatgcttaatcagtgaggcacctatctcagcgatctgtctatttcgttcatccatagttgcctgactccccgtcgtgtagataactacgatacgggagggcttaccatctggccccagtgctgcaatgataccgcgagagccacgctcaccggctccagatttatcagcaataaaccagccagccggaagggccgagcgcagaagtggtcctgcaactttatccgcctccatccagtctattaattgttgccgggaagctagagtaagtagttcgccagttaatagtttgcgcaacgttgttgccattgctacaggcatcgtggtgtcacgctcgtcgtttggtatggcttcattcagctccggttcccaacgatcaaggcgagttacatgatcccccatgttgtgcaaaaaagcggttagctccttcggtcctccgatcgttgtcagaagtaagttggccgcagtgttatcactcatggttatggcagcactgcataattctcttactgtcatgccatccgtaagatgcttttctgtgactggtgagtactcaaccaagtcattctgagaatagtgtatgcggcgaccgagttgctcttgcccggcgtcaatacgggataataccgcgccacatagcagaactttaaaagtgctcatcattggaaaacgttcttcggggcgaaaactctcaaggatcttaccgctgttgagatccagttcgatgtaacccactcgtgcacccaactgatcttcagcatcttttactttcaccagcgtttctgggtgagcaaaaacaggaaggcaaaatgccgcaaaaaagggaataagggcgacacggaaatgttgaatactcatactcttcctttttcaatattattgaagcatttatcagggttattgtctcatgagcggatacatatttgaatgtatttagaaaaataaacaaataggggttccgcgcacatttccccgaaaagtgccagatacctgaaacaaaacccatcgtacggccaaggaagtctccaataactgtgatccaccacaagcgccagggttttcccagtcacgacgttgtaaaacgacggccagtcatgcataatccgcacgcatctggaataaggaagtgccattccgcctgaccttaatacgactcactatagggagaccctcgaaaacaaaccacaatccgtggctcgcagcaaacaccaaacaaaacaaacacaaaccaacaaaaagtggccacgcccgggccaccgatacttcccttcactccttcgggactgttggggaggaacacaacagggctcccctgttttcccattccttcccccttttcccaaccccaaccgccgtatctggtggcggcaagacacacgggtctttccctctaaagcacaattgtgtgtgtgtcccaggtcctcctgcgtacggtgcgggagtgctcccacccaactgttgtaagcctgtccaacgcgtcgtcctggcaagactatgacgtcgcatgttccgctgcggatgccgaccgggtaaccggttccccagtgtgtgtagtgcgatcttccaggtcctcctggttggcgttgtccagaaactgcttcaggtaagtggggtgtgcccaatccctacaaaggttgattctttcaccaccttaggaatgctccggaggtaccccagcaacagctgggatctgaccggaggctaattgtctacgggtggtgtttcctttttcttttcacacaactctactgcgtacaactcactgactatccacttgctctgtcacg

SEQ ID NO: 3615 - DNA, 3718 bp, synthetic construct
  source 1..3718: mol_type = other DNA; note = Anabaena L9a5 no P1 intron, P1 exon min3 P2 exon min3
atgggagtgaaggtgctgttcgccctgatctgtattgccgtggccgaggccaagcctaccgagaacaacgaggacttcaacatcgtggccgtggcctccaatttcgccaccacagatctggacgccgacagaggaaagctgcccggcaagaagctgcctctggaagtgctgaaagagatggaagccaacgccagaaaggccggctgtaccagaggctgtctgatctgcctgagccacatcaagtgcacccctaagatgaagaagttcatccccggcagatgccacacctacgagggcgacaaagaatctgcccaaggcggaatcggagaggccatcgtggatatccctgagatccccggcttcaaggacctggaacctatggaacagtttatcgcccaggtggacctgtgcgtggactgtacaacaggctgcctgaaaggcctggccaacgtgcagtgtagcgacctgctgaagaagtggctgcctcagagatgcgccaccttcgcctctaagatccagggccaagtggacaagatcaaaggcgctggcggcgactaatagctaactagacaaaacaccaaacaaacaagctgcgagccacggaaaataattgagccttaaagaagaaattctttaagtggatgctctcaaactcagggaaacctaaatctagttatagacaaggcaatcctgagccaagccgaagtagtaattagtaagttaacaatagatgacttacaactaatcggaaggtgcagagactcgacgggagctaccctaacgtcaagacgagggtaaagagagagtccaattctcaaagccaatatcaacagtaagtctagatatcggatcccgggaggctaggtggaggctcagtgtgataagtctgcgatggtggatgcatgtgtcatggtcatagctgtttcctgtgtgaaattgttatccgctcagagggcacaatcctattccgcgctatccgacaatctccaagacattaggtggagttcagttcggcgtatggcatatgtcgctggaaagaacatgtgagcaaaaggccagcaaaaggccaggaaccgtaaaaaggccgcgttgctggcgtttttccataggctccgcccccctgacgagcatcacaaaaatcgacgctcaagtcagaggtggcgaaacccgacaggactataaagataccaggcgtttccccctggaagctccctcgtgcgctctcctgttccgaccctgccgcttaccggatacctgtccgcctttctcccttcgggaagcgtggcgctttctcatagctcacgctgtaggtatctcagttcggtgtaggtcgttcgctccaagctgggctgtgtgcacgaaccccccgttcagcccgaccgctgcgccttatccggtaactatcgtcttgagtccaacccggtaagacacgacttatcgccactggcagcagccactggtaacaggattagcagagcgaggtatgtaggcggtgctacagagttcttgaagtggtggcctaactacggctacactagaagaacagtatttggtatctgcgctctgctgaagccagttaccttcggaaaaagagttggtagctcttgatccggcaaacaaaccaccgctggtagcggtggtttttttgtttgcaagcagcagattacgcgcagaaaaaaaggatctcaagaagatcctttgatcttttctacggggtctgacgctctattcaacaaagccgccgtcccgtcaagtcagcgtaaatgggtagggggcttcaaatcgtcctcgtgataccaattcggagcctgcttttttgtacaaacttgttgataatggcaattcaaggatcttcacctagatccttttaaattaaaaatgaagttttaaatcaatctaaagtatatatgagtaaacttggtctgacagttaccaatgcttaatcagtgaggcacctatctcagcgatctgtctatttcgttcatccatagttgcctgactccccgtcgtgtagataactacgatacgggagggcttaccatctggccccagtgctgcaatgataccgcgagagccacgctcaccggctccagatttatcagcaataaaccagccagccggaagggccgagcgcagaagtggtcctgcaactttatccgcctccatccagtctattaattgttgccgggaagctagagtaagtagttcgccagttaatagtttgcgcaacgttgttgccattgctacaggcatcgtggtgtcacgctcgtcgtttggtatggcttcattcagctccggttcccaacgatcaaggcgagttacatgatcccccatgttgtgcaaaaaagcggttagctccttcggtcctccgatcgttgtcagaagtaagttggccgcagtgttatcactcatggttatggcagcactgcataattctcttactgtcatgccatccgtaagatgcttttctgtgactggtgagtactcaaccaagtcattctgagaatagtgtatgcggcgaccgagttgctcttgcccggcgtcaatacgggataataccgcgccacatagcagaactttaaaagtgctcatcattggaaaacgttcttcggggcgaaaactctcaaggatcttaccgctgttgagatccagttcgatgtaacccactcgtgcacccaactgatcttcagcatcttttactttcaccagcgtttctgggtgagcaaaaacaggaaggcaaaatgccgcaaaaaagggaataagggcgacacggaaatgttgaatactcatactcttcctttttcaatattattgaagcatttatcagggttattgtctcatgagcggatacatatttgaatgtatttagaaaaataaacaaataggggttccgcgcacatttccccgaaaagtgccagatacctgaaacaaaacccatcgtacggccaaggaagtctccaataactgtgatccaccacaagcgccagggttttcccagtcacgacgttgtaaaacgacggccagtcatgcataatccgcacgcatctggaataaggaagtgccattccgcctgaccttaatacgactcactatagggagaccctcgaaaacaaaccacatccgtggctcgcagcaaacaccaaacaaaacaaacacaaaccaacaaaaagtggccacgcccgggccaccgatacttcccttcactccttcgggactgttggggaggaacacaacagggctcccctgttttcccattccttcccccttttcccaaccccaaccgccgtatctggtggcggcaagacacacgggtctttccctctaaagcacaattgtgtgtgtgtcccaggtcctcctgcgtacggtgcgggagtgctcccacccaactgttgtaagcctgtccaacgcgtcgtcctggcaagactatgacgtcgcatgttccgctgcggatgccgaccgggtaaccggttccccagtgtgtgtagtgcgatcttccaggtcctcctggttggcgttgtccagaaactgcttcaggtaagtggggtgtgcccaatccctacaaaggttgattctttcaccaccttaggaatgctccggaggtaccccagcaacagctgggatctgaccggaggctaattgtctacgggtggtgtttcctttttcttttcacacaactctactgcgtacaactcactgactatccacttgctctgtcacg

SEQ ID NO: 3616 - DNA, 3716 bp, synthetic construct
  source 1..3716: mol_type = other DNA; note = Anabaena L9a5 no P1 intron, P1 exon min4 P2 exon min4
atgggagtgaaggtgctgttcgccctgatctgtattgccgtggccgaggccaagcctaccgagaacaacgaggacttcaacatcgtggccgtggcctccaatttcgccaccacagatctggacgccgacagaggaaagctgcccggcaagaagctgcctctggaagtgctgaaagagatggaagccaacgccagaaaggccggctgtaccagaggctgtctgatctgcctgagccacatcaagtgcacccctaagatgaagaagttcatccccggcagatgccacacctacgagggcgacaaagaatctgcccaaggcggaatcggagaggccatcgtggatatccctgagatccccggcttcaaggacctggaacctatggaacagtttatcgcccaggtggacctgtgcgtggactgtacaacaggctgcctgaaaggcctggccaacgtgcagtgtagcgacctgctgaagaagtggctgcctcagagatgcgccaccttcgcctctaagatccagggccaagtggacaagatcaaaggcgctggcggcgactaatagctaactagacaaaacaccaaacaaacaagctgcgagccacggaaataattgagccttaaagaagaaattctttaagtggatgctctcaaactcagggaaacctaaatctagttatagacaaggcaatcctgagccaagccgaagtagtaattagtaagttaacaatagatgacttacaactaatcggaaggtgcagagactcgacgggagctaccctaacgtcaagacgagggtaaagagagagtccaattctcaaagccaatatcaacagtaagtctagatatcggatcccgggaggctaggtggaggctcagtgtgataagtctgcgatggtggatgcatgtgtcatggtcatagctgtttcctgtgtgaaattgttatccgctcagagggcacaatcctattccgcgctatccgacaatctccaagacattaggtggagttcagttcggcgtatggcatatgtcgctggaaagaacatgtgagcaaaaggccagcaaaaggccaggaaccgtaaaaaggccgcgttgctggcgtttttccataggctccgcccccctgacgagcatcacaaaaatcgacgctcaagtcagaggtggcgaaacccgacaggactataaagataccaggcgtttccccctggaagctccctcgtgcgctctcctgttccgaccctgccgcttaccggatacctgtccgcctttctcccttcgggaagcgtggcgctttctcatagctcacgctgtaggtatctcagttcggtgtaggtcgttcgctccaagctgggctgtgtgcacgaaccccccgttcagcccgaccgctgcgccttatccggtaactatcgtcttgagtccaacccggtaagacacgacttatcgccactggcagcagccactggtaacaggattagcagagcgaggtatgtaggcggtgctacagagttcttgaagtggtggcctaactacggctacactagaagaacagtatttggtatctgcgctctgctgaagccagttaccttcggaaaaagagttggtagctcttgatccggcaaacaaaccaccgctggtagcggtggtttttttgtttgcaagcagcagattacgcgcagaaaaaaaggatctcaagaagatcctttgatcttttctacggggtctgacgctctattcaacaaagccgccgtcccgtcaagtcagcgtaaatgggtagggggcttcaaatcgtcctcgtgataccaattcggagcctgcttttttgtacaaacttgttgataatggcaattcaaggatcttcacctagatccttttaaattaaaaatgaagttttaaatcaatctaaagtatatatgagtaaacttggtctgacagttaccaatgcttaatcagtgaggcacctatctcagcgatctgtctatttcgttcatccatagttgcctgactccccgtcgtgtagataactacgatacgggagggcttaccatctggccccagtgctgcaatgataccgcgagagccacgctcaccggctccagatttatcagcaataaaccagccagccggaagggccgagcgcagaagtggtcctgcaactttatccgcctccatccagtctattaattgttgccgggaagctagagtaagtagttcgccagttaatagtttgcgcaacgttgttgccattgctacaggcatcgtggtgtcacgctcgtcgtttggtatggcttcattcagctccggttcccaacgatcaaggcgagttacatgatcccccatgttgtgcaaaaaagcggttagctccttcggtcctccgatcgttgtcagaagtaagttggccgcagtgttatcactcatggttatggcagcactgcataattctcttactgtcatgccatccgtaagatgcttttctgtgactggtgagtactcaaccaagtcattctgagaatagtgtatgcggcgaccgagttgctcttgcccggcgtcaatacgggataataccgcgccacatagcagaactttaaaagtgctcatcattggaaaacgttcttcggggcgaaaactctcaaggatcttaccgctgttgagatccagttcgatgtaacccactcgtgcacccaactgatcttcagcatcttttactttcaccagcgtttctgggtgagcaaaaacaggaaggcaaaatgccgcaaaaaagggaataagggcgacacggaaatgttgaatactcatactcttcctttttcaatattattgaagcatttatcagggttattgtctcatgagcggatacatatttgaatgtatttagaaaaataaacaaataggggttccgcgcacatttccccgaaaagtgccagatacctgaaacaaaacccatcgtacggccaaggaagtctccaataactgtgatccaccacaagcgccagggttttcccagtcacgacgttgtaaaacgacggccagtcatgcataatccgcacgcatctggaataaggaagtgccattccgcctgaccttaatacgactcactatagggagaccctcgaaaacaaaccactccgtggctcgcagcaaacaccaaacaaaacaaacacaaaccaacaaaaagtggccacgcccgggccaccgatacttcccttcactccttcgggactgttggggaggaacacaacagggctcccctgttttcccattccttcccccttttcccaaccccaaccgccgtatctggtggcggcaagacacacgggtctttccctctaaagcacaattgtgtgtgtgtcccaggtcctcctgcgtacggtgcgggagtgctcccacccaactgttgtaagcctgtccaacgcgtcgtcctggcaagactatgacgtcgcatgttccgctgcggatgccgaccgggtaaccggttccccagtgtgtgtagtgcgatcttccaggtcctcctggttggcgttgtccagaaactgcttcaggtaagtggggtgtgcccaatccctacaaaggttgattctttcaccaccttaggaatgctccggaggtaccccagcaacagctgggatctgaccggaggctaattgtctacgggtggtgtttcctttttcttttcacacaactctactgcgtacaactcactgactatccacttgctctgtcacg

SEQ ID NO: 3617 - DNA, 3714 bp, synthetic construct
  source 1..3714: mol_type = other DNA; note = Anabaena L9a5 no P1 intron, P1 exon min5 P2 exon min5
atgggagtgaaggtgctgttcgccctgatctgtattgccgtggccgaggccaagcctaccgagaacaacgaggacttcaacatcgtggccgtggcctccaatttcgccaccacagatctggacgccgacagaggaaagctgcccggcaagaagctgcctctggaagtgctgaaagagatggaagccaacgccagaaaggccggctgtaccagaggctgtctgatctgcctgagccacatcaagtgcacccctaagatgaagaagttcatccccggcagatgccacacctacgagggcgacaaagaatctgcccaaggcggaatcggagaggccatcgtggatatccctgagatccccggcttcaaggacctggaacctatggaacagtttatcgcccaggtggacctgtgcgtggactgtacaacaggctgcctgaaaggcctggccaacgtgcagtgtagcgacctgctgaagaagtggctgcctcagagatgcgccaccttcgcctctaagatccagggccaagtggacaagatcaaaggcgctggcggcgactaatagctaactagacaaaacaccaaacaaacaagctgcgagccacgaaataattgagccttaaagaagaaattctttaagtggatgctctcaaactcagggaaacctaaatctagttatagacaaggcaatcctgagccaagccgaagtagtaattagtaagttaacaatagatgacttacaactaatcggaaggtgcagagactcgacgggagctaccctaacgtcaagacgagggtaaagagagagtccaattctcaaagccaatatcaacagtaagtctagatatcggatcccgggaggctaggtggaggctcagtgtgataagtctgcgatggtggatgcatgtgtcatggtcatagctgtttcctgtgtgaaattgttatccgctcagagggcacaatcctattccgcgctatccgacaatctccaagacattaggtggagttcagttcggcgtatggcatatgtcgctggaaagaacatgtgagcaaaaggccagcaaaaggccaggaaccgtaaaaaggccgcgttgctggcgtttttccataggctccgcccccctgacgagcatcacaaaaatcgacgctcaagtcagaggtggcgaaacccgacaggactataaagataccaggcgtttccccctggaagctccctcgtgcgctctcctgttccgaccctgccgcttaccggatacctgtccgcctttctcccttcgggaagcgtggcgctttctcatagctcacgctgtaggtatctcagttcggtgtaggtcgttcgctccaagctgggctgtgtgcacgaaccccccgttcagcccgaccgctgcgccttatccggtaactatcgtcttgagtccaacccggtaagacacgacttatcgccactggcagcagccactggtaacaggattagcagagcgaggtatgtaggcggtgctacagagttcttgaagtggtggcctaactacggctacactagaagaacagtatttggtatctgcgctctgctgaagccagttaccttcggaaaaagagttggtagctcttgatccggcaaacaaaccaccgctggtagcggtggtttttttgtttgcaagcagcagattacgcgcagaaaaaaaggatctcaagaagatcctttgatcttttctacggggtctgacgctctattcaacaaagccgccgtcccgtcaagtcagcgtaaatgggtagggggcttcaaatcgtcctcgtgataccaattcggagcctgcttttttgtacaaacttgttgataatggcaattcaaggatcttcacctagatccttttaaattaaaaatgaagttttaaatcaatctaaagtatatatgagtaaacttggtctgacagttaccaatgcttaatcagtgaggcacctatctcagcgatctgtctatttcgttcatccatagttgcctgactccccgtcgtgtagataactacgatacgggagggcttaccatctggccccagtgctgcaatgataccgcgagagccacgctcaccggctccagatttatcagcaataaaccagccagccggaagggccgagcgcagaagtggtcctgcaactttatccgcctccatccagtctattaattgttgccgggaagctagagtaagtagttcgccagttaatagtttgcgcaacgttgttgccattgctacaggcatcgtggtgtcacgctcgtcgtttggtatggcttcattcagctccggttcccaacgatcaaggcgagttacatgatcccccatgttgtgcaaaaaagcggttagctccttcggtcctccgatcgttgtcagaagtaagttggccgcagtgttatcactcatggttatggcagcactgcataattctcttactgtcatgccatccgtaagatgcttttctgtgactggtgagtactcaaccaagtcattctgagaatagtgtatgcggcgaccgagttgctcttgcccggcgtcaatacgggataataccgcgccacatagcagaactttaaaagtgctcatcattggaaaacgttcttcggggcgaaaactctcaaggatcttaccgctgttgagatccagttcgatgtaacccactcgtgcacccaactgatcttcagcatcttttactttcaccagcgtttctgggtgagcaaaaacaggaaggcaaaatgccgcaaaaaagggaataagggcgacacggaaatgttgaatactcatactcttcctttttcaatattattgaagcatttatcagggttattgtctcatgagcggatacatatttgaatgtatttagaaaaataaacaaataggggttccgcgcacatttccccgaaaagtgccagatacctgaaacaaaacccatcgtacggccaaggaagtctccaataactgtgatccaccacaagcgccagggttttcccagtcacgacgttgtaaaacgacggccagtcatgcataatccgcacgcatctggaataaggaagtgccattccgcctgaccttaatacgactcactatagggagaccctcgaaaacaaaccacccgtggctcgcagcaaacaccaaacaaaacaaacacaaaccaacaaaaagtggccacgcccgggccaccgatacttcccttcactccttcgggactgttggggaggaacacaacagggctcccctgttttcccattccttcccccttttcccaaccccaaccgccgtatctggtggcggcaagacacacgggtctttccctctaaagcacaattgtgtgtgtgtcccaggtcctcctgcgtacggtgcgggagtgctcccacccaactgttgtaagcctgtccaacgcgtcgtcctggcaagactatgacgtcgcatgttccgctgcggatgccgaccgggtaaccggttccccagtgtgtgtagtgcgatcttccaggtcctcctggttggcgttgtccagaaactgcttcaggtaagtggggtgtgcccaatccctacaaaggttgattctttcaccaccttaggaatgctccggaggtaccccagcaacagctgggatctgaccggaggctaattgtctacgggtggtgtttcctttttcttttcacacaactctactgcgtacaactcactgactatccacttgctctgtcacg

SEQ ID NO: 3618 - DNA, 3712 bp, synthetic construct
  source 1..3712: mol_type = other DNA; note = Anabaena L9a5 no P1 intron, P1 exon min6 P2 exon min6
atgggagtgaaggtgctgttcgccctgatctgtattgccgtggccgaggccaagcctaccgagaacaacgaggacttcaacatcgtggccgtggcctccaatttcgccaccacagatctggacgccgacagaggaaagctgcccggcaagaagctgcctctggaagtgctgaaagagatggaagccaacgccagaaaggccggctgtaccagaggctgtctgatctgcctgagccacatcaagtgcacccctaagatgaagaagttcatccccggcagatgccacacctacgagggcgacaaagaatctgcccaaggcggaatcggagaggccatcgtggatatccctgagatccccggcttcaaggacctggaacctatggaacagtttatcgcccaggtggacctgtgcgtggactgtacaacaggctgcctgaaaggcctggccaacgtgcagtgtagcgacctgctgaagaagtggctgcctcagagatgcgccaccttcgcctctaagatccagggccaagtggacaagatcaaaggcgctggcggcgactaatagctaactagacaaaacaccaaacaaacaagctgcgagccacaaataattgagccttaaagaagaaattctttaagtggatgctctcaaactcagggaaacctaaatctagttatagacaaggcaatcctgagccaagccgaagtagtaattagtaagttaacaatagatgacttacaactaatcggaaggtgcagagactcgacgggagctaccctaacgtcaagacgagggtaaagagagagtccaattctcaaagccaatatcaacagtaagtctagatatcggatcccgggaggctaggtggaggctcagtgtgataagtctgcgatggtggatgcatgtgtcatggtcatagctgtttcctgtgtgaaattgttatccgctcagagggcacaatcctattccgcgctatccgacaatctccaagacattaggtggagttcagttcggcgtatggcatatgtcgctggaaagaacatgtgagcaaaaggccagcaaaaggccaggaaccgtaaaaaggccgcgttgctggcgtttttccataggctccgcccccctgacgagcatcacaaaaatcgacgctcaagtcagaggtggcgaaacccgacaggactataaagataccaggcgtttccccctggaagctccctcgtgcgctctcctgttccgaccctgccgcttaccggatacctgtccgcctttctcccttcgggaagcgtggcgctttctcatagctcacgctgtaggtatctcagttcggtgtaggtcgttcgctccaagctgggctgtgtgcacgaaccccccgttcagcccgaccgctgcgccttatccggtaactatcgtcttgagtccaacccggtaagacacgacttatcgccactggcagcagccactggtaacaggattagcagagcgaggtatgtaggcggtgctacagagttcttgaagtggtggcctaactacggctacactagaagaacagtatttggtatctgcgctctgctgaagccagttaccttcggaaaaagagttggtagctcttgatccggcaaacaaaccaccgctggtagcggtggtttttttgtttgcaagcagcagattacgcgcagaaaaaaaggatctcaagaagatcctttgatcttttctacggggtctgacgctctattcaacaaagccgccgtcccgtcaagtcagcgtaaatgggtagggggcttcaaatcgtcctcgtgataccaattcggagcctgcttttttgtacaaacttgttgataatggcaattcaaggatcttcacctagatccttttaaattaaaaatgaagttttaaatcaatctaaagtatatatgagtaaacttggtctgacagttaccaatgcttaatcagtgaggcacctatctcagcgatctgtctatttcgttcatccatagttgcctgactccccgtcgtgtagataactacgatacgggagggcttaccatctggccccagtgctgcaatgataccgcgagagccacgctcaccggctccagatttatcagcaataaaccagccagccggaagggccgagcgcagaagtggtcctgcaactttatccgcctccatccagtctattaattgttgccgggaagctagagtaagtagttcgccagttaatagtttgcgcaacgttgttgccattgctacaggcatcgtggtgtcacgctcgtcgtttggtatggcttcattcagctccggttcccaacgatcaaggcgagttacatgatcccccatgttgtgcaaaaaagcggttagctccttcggtcctccgatcgttgtcagaagtaagttggccgcagtgttatcactcatggttatggcagcactgcataattctcttactgtcatgccatccgtaagatgcttttctgtgactggtgagtactcaaccaagtcattctgagaatagtgtatgcggcgaccgagttgctcttgcccggcgtcaatacgggataataccgcgccacatagcagaactttaaaagtgctcatcattggaaaacgttcttcggggcgaaaactctcaaggatcttaccgctgttgagatccagttcgatgtaacccactcgtgcacccaactgatcttcagcatcttttactttcaccagcgtttctgggtgagcaaaaacaggaaggcaaaatgccgcaaaaaagggaataagggcgacacggaaatgttgaatactcatactcttcctttttcaatattattgaagcatttatcagggttattgtctcatgagcggatacatatttgaatgtatttagaaaaataaacaaataggggttccgcgcacatttccccgaaaagtgccagatacctgaaacaaaacccatcgtacggccaaggaagtctccaataactgtgatccaccacaagcgccagggttttcccagtcacgacgttgtaaaacgacggccagtcatgcataatccgcacgcatctggaataaggaagtgccattccgcctgaccttaatacgactcactatagggagaccctcgaaaacaaaccaccgtggctcgcagcaaacaccaaacaaaacaaacacaaaccaacaaaaagtggccacgcccgggccaccgatacttcccttcactccttcgggactgttggggaggaacacaacagggctcccctgttttcccattccttcccccttttcccaaccccaaccgccgtatctggtggcggcaagacacacgggtctttccctctaaagcacaattgtgtgtgtgtcccaggtcctcctgcgtacggtgcgggagtgctcccacccaactgttgtaagcctgtccaacgcgtcgtcctggcaagactatgacgtcgcatgttccgctgcggatgccgaccgggtaaccggttccccagtgtgtgtagtgcgatcttccaggtcctcctggttggcgttgtccagaaactgcttcaggtaagtggggtgtgcccaatccctacaaaggttgattctttcaccaccttaggaatgctccggaggtaccccagcaacagctgggatctgaccggaggctaattgtctacgggtggtgtttcctttttcttttcacacaactctactgcgtacaactcactgactatccacttgctctgtcacg

SEQ ID NO: 3619 - DNA, 3710 bp, synthetic construct
  source 1..3710: mol_type = other DNA; note = Anabaena L9a5 no P1 intron, P1 exon min7 P2 exon min7
atgggagtgaaggtgctgttcgccctgatctgtattgccgtggccgaggccaagcctaccgagaacaacgaggacttcaacatcgtggccgtggcctccaatttcgccaccacagatctggacgccgacagaggaaagctgcccggcaagaagctgcctctggaagtgctgaaagagatggaagccaacgccagaaaggccggctgtaccagaggctgtctgatctgcctgagccacatcaagtgcacccctaagatgaagaagttcatccccggcagatgccacacctacgagggcgacaaagaatctgcccaaggcggaatcggagaggccatcgtggatatccctgagatccccggcttcaaggacctggaacctatggaacagtttatcgcccaggtggacctgtgcgtggactgtacaacaggctgcctgaaaggcctggccaacgtgcagtgtagcgacctgctgaagaagtggctgcctcagagatgcgccaccttcgcctctaagatccagggccaagtggacaagatcaaaggcgctggcggcgactaatagctaactagacaaaacaccaaacaaacaagctgcgagccaaaataattgagccttaaagaagaaattctttaagtggatgctctcaaactcagggaaacctaaatctagttatagacaaggcaatcctgagccaagccgaagtagtaattagtaagttaacaatagatgacttacaactaatcggaaggtgcagagactcgacgggagctaccctaacgtcaagacgagggtaaagagagagtccaattctcaaagccaatatcaacagtaagtctagatatcggatcccgggaggctaggtggaggctcagtgtgataagtctgcgatggtggatgcatgtgtcatggtcatagctgtttcctgtgtgaaattgttatccgctcagagggcacaatcctattccgcgctatccgacaatctccaagacattaggtggagttcagttcggcgtatggcatatgtcgctggaaagaacatgtgagcaaaaggccagcaaaaggccaggaaccgtaaaaaggccgcgttgctggcgtttttccataggctccgcccccctgacgagcatcacaaaaatcgacgctcaagtcagaggtggcgaaacccgacaggactataaagataccaggcgtttccccctggaagctccctcgtgcgctctcctgttccgaccctgccgcttaccggatacctgtccgcctttctcccttcgggaagcgtggcgctttctcatagctcacgctgtaggtatctcagttcggtgtaggtcgttcgctccaagctgggctgtgtgcacgaaccccccgttcagcccgaccgctgcgccttatccggtaactatcgtcttgagtccaacccggtaagacacgacttatcgccactggcagcagccactggtaacaggattagcagagcgaggtatgtaggcggtgctacagagttcttgaagtggtggcctaactacggctacactagaagaacagtatttggtatctgcgctctgctgaagccagttaccttcggaaaaagagttggtagctcttgatccggcaaacaaaccaccgctggtagcggtggtttttttgtttgcaagcagcagattacgcgcagaaaaaaaggatctcaagaagatcctttgatcttttctacggggtctgacgctctattcaacaaagccgccgtcccgtcaagtcagcgtaaatgggtagggggcttcaaatcgtcctcgtgataccaattcggagcctgcttttttgtacaaacttgttgataatggcaattcaaggatcttcacctagatccttttaaattaaaaatgaagttttaaatcaatctaaagtatatatgagtaaacttggtctgacagttaccaatgcttaatcagtgaggcacctatctcagcgatctgtctatttcgttcatccatagttgcctgactccccgtcgtgtagataactacgatacgggagggcttaccatctggccccagtgctgcaatgataccgcgagagccacgctcaccggctccagatttatcagcaataaaccagccagccggaagggccgagcgcagaagtggtcctgcaactttatccgcctccatccagtctattaattgttgccgggaagctagagtaagtagttcgccagttaatagtttgcgcaacgttgttgccattgctacaggcatcgtggtgtcacgctcgtcgtttggtatggcttcattcagctccggttcccaacgatcaaggcgagttacatgatcccccatgttgtgcaaaaaagcggttagctccttcggtcctccgatcgttgtcagaagtaagttggccgcagtgttatcactcatggttatggcagcactgcataattctcttactgtcatgccatccgtaagatgcttttctgtgactggtgagtactcaaccaagtcattctgagaatagtgtatgcggcgaccgagttgctcttgcccggcgtcaatacgggataataccgcgccacatagcagaactttaaaagtgctcatcattggaaaacgttcttcggggcgaaaactctcaaggatcttaccgctgttgagatccagttcgatgtaacccactcgtgcacccaactgatcttcagcatcttttactttcaccagcgtttctgggtgagcaaaaacaggaaggcaaaatgccgcaaaaaagggaataagggcgacacggaaatgttgaatactcatactcttcctttttcaatattattgaagcatttatcagggttattgtctcatgagcggatacatatttgaatgtatttagaaaaataaacaaataggggttccgcgcacatttccccgaaaagtgccagatacctgaaacaaaacccatcgtacggccaaggaagtctccaataactgtgatccaccacaagcgccagggttttcccagtcacgacgttgtaaaacgacggccagtcatgcataatccgcacgcatctggaataaggaagtgccattccgcctgaccttaatacgactcactatagggagaccctcgaaaacaaaccacgtggctcgcagcaaacaccaaacaaaacaaacacaaaccaacaaaaagtggccacgcccgggccaccgatacttcccttcactccttcgggactgttggggaggaacacaacagggctcccctgttttcccattccttcccccttttcccaaccccaaccgccgtatctggtggcggcaagacacacgggtctttccctctaaagcacaattgtgtgtgtgtcccaggtcctcctgcgtacggtgcgggagtgctcccacccaactgttgtaagcctgtccaacgcgtcgtcctggcaagactatgacgtcgcatgttccgctgcggatgccgaccgggtaaccggttccccagtgtgtgtagtgcgatcttccaggtcctcctggttggcgttgtccagaaactgcttcaggtaagtggggtgtgcccaatccctacaaaggttgattctttcaccaccttaggaatgctccggaggtaccccagcaacagctgggatctgaccggaggctaattgtctacgggtggtgtttcctttttcttttcacacaactctactgcgtacaactcactgactatccacttgctctgtcacg

SEQ ID NO: 3620 - DNA, 3708 bp, synthetic construct
  source 1..3708: mol_type = other DNA; note = Anabaena L9a5 no P1 intron, P1 exon min8, no P2 exon
atgggagtgaaggtgctgttcgccctgatctgtattgccgtggccgaggccaagcctaccgagaacaacgaggacttcaacatcgtggccgtggcctccaatttcgccaccacagatctggacgccgacagaggaaagctgcccggcaagaagctgcctctggaagtgctgaaagagatggaagccaacgccagaaaggccggctgtaccagaggctgtctgatctgcctgagccacatcaagtgcacccctaagatgaagaagttcatccccggcagatgccacacctacgagggcgacaaagaatctgcccaaggcggaatcggagaggccatcgtggatatccctgagatccccggcttcaaggacctggaacctatggaacagtttatcgcccaggtggacctgtgcgtggactgtacaacaggctgcctgaaaggcctggccaacgtgcagtgtagcgacctgctgaagaagtggctgcctcagagatgcgccaccttcgcctctaagatccagggccaagtggacaagatcaaaggcgctggcggcgactaatagctaactagacaaaacaccaaacaaacaagctgcgagccaaataattgagccttaaagaagaaattctttaagtggatgctctcaaactcagggaaacctaaatctagttatagacaaggcaatcctgagccaagccgaagtagtaattagtaagttaacaatagatgacttacaactaatcggaaggtgcagagactcgacgggagctaccctaacgtcaagacgagggtaaagagagagtccaattctcaaagccaatatcaacagtaagtctagatatcggatcccgggaggctaggtggaggctcagtgtgataagtctgcgatggtggatgcatgtgtcatggtcatagctgtttcctgtgtgaaattgttatccgctcagagggcacaatcctattccgcgctatccgacaatctccaagacattaggtggagttcagttcggcgtatggcatatgtcgctggaaagaacatgtgagcaaaaggccagcaaaaggccaggaaccgtaaaaaggccgcgttgctggcgtttttccataggctccgcccccctgacgagcatcacaaaaatcgacgctcaagtcagaggtggcgaaacccgacaggactataaagataccaggcgtttccccctggaagctccctcgtgcgctctcctgttccgaccctgccgcttaccggatacctgtccgcctttctcccttcgggaagcgtggcgctttctcatagctcacgctgtaggtatctcagttcggtgtaggtcgttcgctccaagctgggctgtgtgcacgaaccccccgttcagcccgaccgctgcgccttatccggtaactatcgtcttgagtccaacccggtaagacacgacttatcgccactggcagcagccactggtaacaggattagcagagcgaggtatgtaggcggtgctacagagttcttgaagtggtggcctaactacggctacactagaagaacagtatttggtatctgcgctctgctgaagccagttaccttcggaaaaagagttggtagctcttgatccggcaaacaaaccaccgctggtagcggtggtttttttgtttgcaagcagcagattacgcgcagaaaaaaaggatctcaagaagatcctttgatcttttctacggggtctgacgctctattcaacaaagccgccgtcccgtcaagtcagcgtaaatgggtagggggcttcaaatcgtcctcgtgataccaattcggagcctgcttttttgtacaaacttgttgataatggcaattcaaggatcttcacctagatccttttaaattaaaaatgaagttttaaatcaatctaaagtatatatgagtaaacttggtctgacagttaccaatgcttaatcagtgaggcacctatctcagcgatctgtctatttcgttcatccatagttgcctgactccccgtcgtgtagataactacgatacgggagggcttaccatctggccccagtgctgcaatgataccgcgagagccacgctcaccggctccagatttatcagcaataaaccagccagccggaagggccgagcgcagaagtggtcctgcaactttatccgcctccatccagtctattaattgttgccgggaagctagagtaagtagttcgccagttaatagtttgcgcaacgttgttgccattgctacaggcatcgtggtgtcacgctcgtcgtttggtatggcttcattcagctccggttcccaacgatcaaggcgagttacatgatcccccatgttgtgcaaaaaagcggttagctccttcggtcctccgatcgttgtcagaagtaagttggccgcagtgttatcactcatggttatggcagcactgcataattctcttactgtcatgccatccgtaagatgcttttctgtgactggtgagtactcaaccaagtcattctgagaatagtgtatgcggcgaccgagttgctcttgcccggcgtcaatacgggataataccgcgccacatagcagaactttaaaagtgctcatcattggaaaacgttcttcggggcgaaaactctcaaggatcttaccgctgttgagatccagttcgatgtaacccactcgtgcacccaactgatcttcagcatcttttactttcaccagcgtttctgggtgagcaaaaacaggaaggcaaaatgccgcaaaaaagggaataagggcgacacggaaatgttgaatactcatactcttcctttttcaatattattgaagcatttatcagggttattgtctcatgagcggatacatatttgaatgtatttagaaaaataaacaaataggggttccgcgcacatttccccgaaaagtgccagatacctgaaacaaaacccatcgtacggccaaggaagtctccaataactgtgatccaccacaagcgccagggttttcccagtcacgacgttgtaaaacgacggccagtcatgcataatccgcacgcatctggaataaggaagtgccattccgcctgaccttaatacgactcactatagggagaccctcgaaaacaaaccactggctcgcagcaaacaccaaacaaaacaaacacaaaccaacaaaaagtggccacgcccgggccaccgatacttcccttcactccttcgggactgttggggaggaacacaacagggctcccctgttttcccattccttcccccttttcccaaccccaaccgccgtatctggtggcggcaagacacacgggtctttccctctaaagcacaattgtgtgtgtgtcccaggtcctcctgcgtacggtgcgggagtgctcccacccaactgttgtaagcctgtccaacgcgtcgtcctggcaagactatgacgtcgcatgttccgctgcggatgccgaccgggtaaccggttccccagtgtgtgtagtgcgatcttccaggtcctcctggttggcgttgtccagaaactgcttcaggtaagtggggtgtgcccaatccctacaaaggttgattctttcaccaccttaggaatgctccggaggtaccccagcaacagctgggatctgaccggaggctaattgtctacgggtggtgtttcctttttcttttcacacaactctactgcgtacaactcactgactatccacttgctctgtcacg

SEQ ID NO: 3621 - DNA, 3707 bp, synthetic construct
  source 1..3707: mol_type = other DNA; note = Anabaena L9a5 no P1 intron, no P1 exon, no P2 exon
atgggagtgaaggtgctgttcgccctgatctgtattgccgtggccgaggccaagcctaccgagaacaacgaggacttcaacatcgtggccgtggcctccaatttcgccaccacagatctggacgccgacagaggaaagctgcccggcaagaagctgcctctggaagtgctgaaagagatggaagccaacgccagaaaggccggctgtaccagaggctgtctgatctgcctgagccacatcaagtgcacccctaagatgaagaagttcatccccggcagatgccacacctacgagggcgacaaagaatctgcccaaggcggaatcggagaggccatcgtggatatccctgagatccccggcttcaaggacctggaacctatggaacagtttatcgcccaggtggacctgtgcgtggactgtacaacaggctgcctgaaaggcctggccaacgtgcagtgtagcgacctgctgaagaagtggctgcctcagagatgcgccaccttcgcctctaagatccagggccaagtggacaagatcaaaggcgctggcggcgactaatagctaactagacaaaacaccaaacaaacaagctgcgagccaaataattgagccttaaagaagaaattctttaagtggatgctctcaaactcagggaaacctaaatctagttatagacaaggcaatcctgagccaagccgaagtagtaattagtaagttaacaatagatgacttacaactaatcggaaggtgcagagactcgacgggagctaccctaacgtcaagacgagggtaaagagagagtccaattctcaaagccaatatcaacagtaagtctagatatcggatcccgggaggctaggtggaggctcagtgtgataagtctgcgatggtggatgcatgtgtcatggtcatagctgtttcctgtgtgaaattgttatccgctcagagggcacaatcctattccgcgctatccgacaatctccaagacattaggtggagttcagttcggcgtatggcatatgtcgctggaaagaacatgtgagcaaaaggccagcaaaaggccaggaaccgtaaaaaggccgcgttgctggcgtttttccataggctccgcccccctgacgagcatcacaaaaatcgacgctcaagtcagaggtggcgaaacccgacaggactataaagataccaggcgtttccccctggaagctccctcgtgcgctctcctgttccgaccctgccgcttaccggatacctgtccgcctttctcccttcgggaagcgtggcgctttctcatagctcacgctgtaggtatctcagttcggtgtaggtcgttcgctccaagctgggctgtgtgcacgaaccccccgttcagcccgaccgctgcgccttatccggtaactatcgtcttgagtccaacccggtaagacacgacttatcgccactggcagcagccactggtaacaggattagcagagcgaggtatgtaggcggtgctacagagttcttgaagtggtggcctaactacggctacactagaagaacagtatttggtatctgcgctctgctgaagccagttaccttcggaaaaagagttggtagctcttgatccggcaaacaaaccaccgctggtagcggtggtttttttgtttgcaagcagcagattacgcgcagaaaaaaaggatctcaagaagatcctttgatcttttctacggggtctgacgctctattcaacaaagccgccgtcccgtcaagtcagcgtaaatgggtagggggcttcaaatcgtcctcgtgataccaattcggagcctgcttttttgtacaaacttgttgataatggcaattcaaggatcttcacctagatccttttaaattaaaaatgaagttttaaatcaatctaaagtatatatgagtaaacttggtctgacagttaccaatgcttaatcagtgaggcacctatctcagcgatctgtctatttcgttcatccatagttgcctgactccccgtcgtgtagataactacgatacgggagggcttaccatctggccccagtgctgcaatgataccgcgagagccacgctcaccggctccagatttatcagcaataaaccagccagccggaagggccgagcgcagaagtggtcctgcaactttatccgcctccatccagtctattaattgttgccgggaagctagagtaagtagttcgccagttaatagtttgcgcaacgttgttgccattgctacaggcatcgtggtgtcacgctcgtcgtttggtatggcttcattcagctccggttcccaacgatcaaggcgagttacatgatcccccatgttgtgcaaaaaagcggttagctccttcggtcctccgatcgttgtcagaagtaagttggccgcagtgttatcactcatggttatggcagcactgcataattctcttactgtcatgccatccgtaagatgcttttctgtgactggtgagtactcaaccaagtcattctgagaatagtgtatgcggcgaccgagttgctcttgcccggcgtcaatacgggataataccgcgccacatagcagaactttaaaagtgctcatcattggaaaacgttcttcggggcgaaaactctcaaggatcttaccgctgttgagatccagttcgatgtaacccactcgtgcacccaactgatcttcagcatcttttactttcaccagcgtttctgggtgagcaaaaacaggaaggcaaaatgccgcaaaaaagggaataagggcgacacggaaatgttgaatactcatactcttcctttttcaatattattgaagcatttatcagggttattgtctcatgagcggatacatatttgaatgtatttagaaaaataaacaaataggggttccgcgcacatttccccgaaaagtgccagatacctgaaacaaaacccatcgtacggccaaggaagtctccaataactgtgatccaccacaagcgccagggttttcccagtcacgacgttgtaaaacgacggccagtcatgcataatccgcacgcatctggaataaggaagtgccattccgcctgaccttaatacgactcactatagggagaccctcgaaaacaaaccacggctcgcagcaaacaccaaacaaaacaaacacaaaccaacaaaaagtggccacgcccgggccaccgatacttcccttcactccttcgggactgttggggaggaacacaacagggctcccctgttttcccattccttcccccttttcccaaccccaaccgccgtatctggtggcggcaagacacacgggtctttccctctaaagcacaattgtgtgtgtgtcccaggtcctcctgcgtacggtgcgggagtgctcccacccaactgttgtaagcctgtccaacgcgtcgtcctggcaagactatgacgtcgcatgttccgctgcggatgccgaccgggtaaccggttccccagtgtgtgtagtgcgatcttccaggtcctcctggttggcgttgtccagaaactgcttcaggtaagtggggtgtgcccaatccctacaaaggttgattctttcaccaccttaggaatgctccggaggtaccccagcaacagctgggatctgaccggaggctaattgtctacgggtggtgtttcctttttcttttcacacaactctactgcgtacaactcactgactatccacttgctctgtcacg

SEQ ID NO: 3622 - DNA, 3752 bp, synthetic construct
  source 1..3752: mol_type = other DNA; note = Anabaena L9a5  exon reverse complements
atgggagtgaaggtgctgttcgccctgatctgtattgccgtggccgaggccaagcctaccgagaacaacgaggacttcaacatcgtggccgtggcctccaatttcgccaccacagatctggacgccgacagaggaaagctgcccggcaagaagctgcctctggaagtgctgaaagagatggaagccaacgccagaaaggccggctgtaccagaggctgtctgatctgcctgagccacatcaagtgcacccctaagatgaagaagttcatccccggcagatgccacacctacgagggcgacaaagaatctgcccaaggcggaatcggagaggccatcgtggatatccctgagatccccggcttcaaggacctggaacctatggaacagtttatcgcccaggtggacctgtgcgtggactgtacaacaggctgcctgaaaggcctggccaacgtgcagtgtagcgacctgctgaagaagtggctgcctcagagatgcgccaccttcgcctctaagatccagggccaagtggacaagatcaaaggcgctggcggcgactaatagctaactagacaaaacaccaaacaaacaagctgcgagccacggattttaaataattgagccttaaagaagaaattctttaagtggatgctctcaaactcagggaaacctaaatctagttatagacaaggcaatcctgagccaagccgaagtagtaattagtaagttaacaatagatgacttacaactaatcggaaggtgcagagactcgacgggagctaccctaacgtcaagacgagggtaaagagagagtccaattctcaaagccaatatcaacagtaagtctagatatcggatcccgggaggctaggtggaggctcagtgtgataagtctgcgatggtggatgcatgtgtcatggtcatagctgtttcctgtgtgaaattgttatccgctcagagggcacaatcctattccgcgctatccgacaatctccaagacattaggtggagttcagttcggcgtatggcatatgtcgctggaaagaacatgtgagcaaaaggccagcaaaaggccaggaaccgtaaaaaggccgcgttgctggcgtttttccataggctccgcccccctgacgagcatcacaaaaatcgacgctcaagtcagaggtggcgaaacccgacaggactataaagataccaggcgtttccccctggaagctccctcgtgcgctctcctgttccgaccctgccgcttaccggatacctgtccgcctttctcccttcgggaagcgtggcgctttctcatagctcacgctgtaggtatctcagttcggtgtaggtcgttcgctccaagctgggctgtgtgcacgaaccccccgttcagcccgaccgctgcgccttatccggtaactatcgtcttgagtccaacccggtaagacacgacttatcgccactggcagcagccactggtaacaggattagcagagcgaggtatgtaggcggtgctacagagttcttgaagtggtggcctaactacggctacactagaagaacagtatttggtatctgcgctctgctgaagccagttaccttcggaaaaagagttggtagctcttgatccggcaaacaaaccaccgctggtagcggtggtttttttgtttgcaagcagcagattacgcgcagaaaaaaaggatctcaagaagatcctttgatcttttctacggggtctgacgctctattcaacaaagccgccgtcccgtcaagtcagcgtaaatgggtagggggcttcaaatcgtcctcgtgataccaattcggagcctgcttttttgtacaaacttgttgataatggcaattcaaggatcttcacctagatccttttaaattaaaaatgaagttttaaatcaatctaaagtatatatgagtaaacttggtctgacagttaccaatgcttaatcagtgaggcacctatctcagcgatctgtctatttcgttcatccatagttgcctgactccccgtcgtgtagataactacgatacgggagggcttaccatctggccccagtgctgcaatgataccgcgagagccacgctcaccggctccagatttatcagcaataaaccagccagccggaagggccgagcgcagaagtggtcctgcaactttatccgcctccatccagtctattaattgttgccgggaagctagagtaagtagttcgccagttaatagtttgcgcaacgttgttgccattgctacaggcatcgtggtgtcacgctcgtcgtttggtatggcttcattcagctccggttcccaacgatcaaggcgagttacatgatcccccatgttgtgcaaaaaagcggttagctccttcggtcctccgatcgttgtcagaagtaagttggccgcagtgttatcactcatggttatggcagcactgcataattctcttactgtcatgccatccgtaagatgcttttctgtgactggtgagtactcaaccaagtcattctgagaatagtgtatgcggcgaccgagttgctcttgcccggcgtcaatacgggataataccgcgccacatagcagaactttaaaagtgctcatcattggaaaacgttcttcggggcgaaaactctcaaggatcttaccgctgttgagatccagttcgatgtaacccactcgtgcacccaactgatcttcagcatcttttactttcaccagcgtttctgggtgagcaaaaacaggaaggcaaaatgccgcaaaaaagggaataagggcgacacggaaatgttgaatactcatactcttcctttttcaatattattgaagcatttatcagggttattgtctcatgagcggatacatatttgaatgtatttagaaaaataaacaaataggggttccgcgcacatttccccgaaaagtgccagatacctgaaacaaaacccatcgtacggccaaggaagtctccaataactgtgatccaccacaagcgccagggttttcccagtcacgacgttgtaaaacgacggccagtcatgcataatccgcacgcatctggaataaggaagtgccattccgcctgaccttaatacgactcactatagggagaccctcgaaaacaaaccacggcagtagcgaaagctgcaagagaatgaaaatccgtggctcgcagcaaacaccaaacaaaacaaacacaaaccaacaaaaagtggccacgcccgggccaccgatacttcccttcactccttcgggactgttggggaggaacacaacagggctcccctgttttcccattccttcccccttttcccaaccccaaccgccgtatctggtggcggcaagacacacgggtctttccctctaaagcacaattgtgtgtgtgtcccaggtcctcctgcgtacggtgcgggagtgctcccacccaactgttgtaagcctgtccaacgcgtcgtcctggcaagactatgacgtcgcatgttccgctgcggatgccgaccgggtaaccggttccccagtgtgtgtagtgcgatcttccaggtcctcctggttggcgttgtccagaaactgcttcaggtaagtggggtgtgcccaatccctacaaaggttgattctttcaccaccttaggaatgctccggaggtaccccagcaacagctgggatctgaccggaggctaattgtctacgggtggtgtttcctttttcttttcacacaactctactgcgtacaactcactgactatccacttgctctgtcacg

SEQ ID NO: 3623 - DNA, 3725 bp, synthetic construct
  source 1..3725: mol_type = other DNA; note = Anabaena L9a5 no P1 intron, exon reverse complements
atgggagtgaaggtgctgttcgccctgatctgtattgccgtggccgaggccaagcctaccgagaacaacgaggacttcaacatcgtggccgtggcctccaatttcgccaccacagatctggacgccgacagaggaaagctgcccggcaagaagctgcctctggaagtgctgaaagagatggaagccaacgccagaaaggccggctgtaccagaggctgtctgatctgcctgagccacatcaagtgcacccctaagatgaagaagttcatccccggcagatgccacacctacgagggcgacaaagaatctgcccaaggcggaatcggagaggccatcgtggatatccctgagatccccggcttcaaggacctggaacctatggaacagtttatcgcccaggtggacctgtgcgtggactgtacaacaggctgcctgaaaggcctggccaacgtgcagtgtagcgacctgctgaagaagtggctgcctcagagatgcgccaccttcgcctctaagatccagggccaagtggacaagatcaaaggcgctggcggcgactaatagctaactagacaaaacaccaaacaaacaagctgcgagccacggattttaaataattgagccttaaagaagaaattctttaagtggatgctctcaaactcagggaaacctaaatctagttatagacaaggcaatcctgagccaagccgaagtagtaattagtaagttaacaatagatgacttacaactaatcggaaggtgcagagactcgacgggagctaccctaacgtcaagacgagggtaaagagagagtccaattctcaaagccaatatcaacagtaagtctagatatcggatcccgggaggctaggtggaggctcagtgtgataagtctgcgatggtggatgcatgtgtcatggtcatagctgtttcctgtgtgaaattgttatccgctcagagggcacaatcctattccgcgctatccgacaatctccaagacattaggtggagttcagttcggcgtatggcatatgtcgctggaaagaacatgtgagcaaaaggccagcaaaaggccaggaaccgtaaaaaggccgcgttgctggcgtttttccataggctccgcccccctgacgagcatcacaaaaatcgacgctcaagtcagaggtggcgaaacccgacaggactataaagataccaggcgtttccccctggaagctccctcgtgcgctctcctgttccgaccctgccgcttaccggatacctgtccgcctttctcccttcgggaagcgtggcgctttctcatagctcacgctgtaggtatctcagttcggtgtaggtcgttcgctccaagctgggctgtgtgcacgaaccccccgttcagcccgaccgctgcgccttatccggtaactatcgtcttgagtccaacccggtaagacacgacttatcgccactggcagcagccactggtaacaggattagcagagcgaggtatgtaggcggtgctacagagttcttgaagtggtggcctaactacggctacactagaagaacagtatttggtatctgcgctctgctgaagccagttaccttcggaaaaagagttggtagctcttgatccggcaaacaaaccaccgctggtagcggtggtttttttgtttgcaagcagcagattacgcgcagaaaaaaaggatctcaagaagatcctttgatcttttctacggggtctgacgctctattcaacaaagccgccgtcccgtcaagtcagcgtaaatgggtagggggcttcaaatcgtcctcgtgataccaattcggagcctgcttttttgtacaaacttgttgataatggcaattcaaggatcttcacctagatccttttaaattaaaaatgaagttttaaatcaatctaaagtatatatgagtaaacttggtctgacagttaccaatgcttaatcagtgaggcacctatctcagcgatctgtctatttcgttcatccatagttgcctgactccccgtcgtgtagataactacgatacgggagggcttaccatctggccccagtgctgcaatgataccgcgagagccacgctcaccggctccagatttatcagcaataaaccagccagccggaagggccgagcgcagaagtggtcctgcaactttatccgcctccatccagtctattaattgttgccgggaagctagagtaagtagttcgccagttaatagtttgcgcaacgttgttgccattgctacaggcatcgtggtgtcacgctcgtcgtttggtatggcttcattcagctccggttcccaacgatcaaggcgagttacatgatcccccatgttgtgcaaaaaagcggttagctccttcggtcctccgatcgttgtcagaagtaagttggccgcagtgttatcactcatggttatggcagcactgcataattctcttactgtcatgccatccgtaagatgcttttctgtgactggtgagtactcaaccaagtcattctgagaatagtgtatgcggcgaccgagttgctcttgcccggcgtcaatacgggataataccgcgccacatagcagaactttaaaagtgctcatcattggaaaacgttcttcggggcgaaaactctcaaggatcttaccgctgttgagatccagttcgatgtaacccactcgtgcacccaactgatcttcagcatcttttactttcaccagcgtttctgggtgagcaaaaacaggaaggcaaaatgccgcaaaaaagggaataagggcgacacggaaatgttgaatactcatactcttcctttttcaatattattgaagcatttatcagggttattgtctcatgagcggatacatatttgaatgtatttagaaaaataaacaaataggggttccgcgcacatttccccgaaaagtgccagatacctgaaacaaaacccatcgtacggccaaggaagtctccaataactgtgatccaccacaagcgccagggttttcccagtcacgacgttgtaaaacgacggccagtcatgcataatccgcacgcatctggaataaggaagtgccattccgcctgaccttaatacgactcactatagggagaccctcgaaaacaaaccacaaaatccgtggctcgcagcaaacaccaaacaaaacaaacacaaaccaacaaaaagtggccacgcccgggccaccgatacttcccttcactccttcgggactgttggggaggaacacaacagggctcccctgttttcccattccttcccccttttcccaaccccaaccgccgtatctggtggcggcaagacacacgggtctttccctctaaagcacaattgtgtgtgtgtcccaggtcctcctgcgtacggtgcgggagtgctcccacccaactgttgtaagcctgtccaacgcgtcgtcctggcaagactatgacgtcgcatgttccgctgcggatgccgaccgggtaaccggttccccagtgtgtgtagtgcgatcttccaggtcctcctggttggcgttgtccagaaactgcttcaggtaagtggggtgtgcccaatccctacaaaggttgattctttcaccaccttaggaatgctccggaggtaccccagcaacagctgggatctgaccggaggctaattgtctacgggtggtgtttcctttttcttttcacacaactctactgcgtacaactcactgactatccacttgctctgtcacg

SEQ ID NO: 3624 - DNA, 3752 bp, synthetic construct
  source 1..3752: mol_type = other DNA; note = Anabaena L9a5, P1 exon scramble1, P2 exon complement
atgggagtgaaggtgctgttcgccctgatctgtattgccgtggccgaggccaagcctaccgagaacaacgaggacttcaacatcgtggccgtggcctccaatttcgccaccacagatctggacgccgacagaggaaagctgcccggcaagaagctgcctctggaagtgctgaaagagatggaagccaacgccagaaaggccggctgtaccagaggctgtctgatctgcctgagccacatcaagtgcacccctaagatgaagaagttcatccccggcagatgccacacctacgagggcgacaaagaatctgcccaaggcggaatcggagaggccatcgtggatatccctgagatccccggcttcaaggacctggaacctatggaacagtttatcgcccaggtggacctgtgcgtggactgtacaacaggctgcctgaaaggcctggccaacgtgcagtgtagcgacctgctgaagaagtggctgcctcagagatgcgccaccttcgcctctaagatccagggccaagtggacaagatcaaaggcgctggcggcgactaatagctaactagacaaaacaccaaacaaacaagctgcgagccgcaagttttaaataattgagccttaaagaagaaattctttaagtggatgctctcaaactcagggaaacctaaatctagttatagacaaggcaatcctgagccaagccgaagtagtaattagtaagttaacaatagatgacttacaactaatcggaaggtgcagagactcgacgggagctaccctaacgtcaagacgagggtaaagagagagtccaattctcaaagccaatatcaacagtaagtctagatatcggatcccgggaggctaggtggaggctcagtgtgataagtctgcgatggtggatgcatgtgtcatggtcatagctgtttcctgtgtgaaattgttatccgctcagagggcacaatcctattccgcgctatccgacaatctccaagacattaggtggagttcagttcggcgtatggcatatgtcgctggaaagaacatgtgagcaaaaggccagcaaaaggccaggaaccgtaaaaaggccgcgttgctggcgtttttccataggctccgcccccctgacgagcatcacaaaaatcgacgctcaagtcagaggtggcgaaacccgacaggactataaagataccaggcgtttccccctggaagctccctcgtgcgctctcctgttccgaccctgccgcttaccggatacctgtccgcctttctcccttcgggaagcgtggcgctttctcatagctcacgctgtaggtatctcagttcggtgtaggtcgttcgctccaagctgggctgtgtgcacgaaccccccgttcagcccgaccgctgcgccttatccggtaactatcgtcttgagtccaacccggtaagacacgacttatcgccactggcagcagccactggtaacaggattagcagagcgaggtatgtaggcggtgctacagagttcttgaagtggtggcctaactacggctacactagaagaacagtatttggtatctgcgctctgctgaagccagttaccttcggaaaaagagttggtagctcttgatccggcaaacaaaccaccgctggtagcggtggtttttttgtttgcaagcagcagattacgcgcagaaaaaaaggatctcaagaagatcctttgatcttttctacggggtctgacgctctattcaacaaagccgccgtcccgtcaagtcagcgtaaatgggtagggggcttcaaatcgtcctcgtgataccaattcggagcctgcttttttgtacaaacttgttgataatggcaattcaaggatcttcacctagatccttttaaattaaaaatgaagttttaaatcaatctaaagtatatatgagtaaacttggtctgacagttaccaatgcttaatcagtgaggcacctatctcagcgatctgtctatttcgttcatccatagttgcctgactccccgtcgtgtagataactacgatacgggagggcttaccatctggccccagtgctgcaatgataccgcgagagccacgctcaccggctccagatttatcagcaataaaccagccagccggaagggccgagcgcagaagtggtcctgcaactttatccgcctccatccagtctattaattgttgccgggaagctagagtaagtagttcgccagttaatagtttgcgcaacgttgttgccattgctacaggcatcgtggtgtcacgctcgtcgtttggtatggcttcattcagctccggttcccaacgatcaaggcgagttacatgatcccccatgttgtgcaaaaaagcggttagctccttcggtcctccgatcgttgtcagaagtaagttggccgcagtgttatcactcatggttatggcagcactgcataattctcttactgtcatgccatccgtaagatgcttttctgtgactggtgagtactcaaccaagtcattctgagaatagtgtatgcggcgaccgagttgctcttgcccggcgtcaatacgggataataccgcgccacatagcagaactttaaaagtgctcatcattggaaaacgttcttcggggcgaaaactctcaaggatcttaccgctgttgagatccagttcgatgtaacccactcgtgcacccaactgatcttcagcatcttttactttcaccagcgtttctgggtgagcaaaaacaggaaggcaaaatgccgcaaaaaagggaataagggcgacacggaaatgttgaatactcatactcttcctttttcaatattattgaagcatttatcagggttattgtctcatgagcggatacatatttgaatgtatttagaaaaataaacaaataggggttccgcgcacatttccccgaaaagtgccagatacctgaaacaaaacccatcgtacggccaaggaagtctccaataactgtgatccaccacaagcgccagggttttcccagtcacgacgttgtaaaacgacggccagtcatgcataatccgcacgcatctggaataaggaagtgccattccgcctgaccttaatacgactcactatagggagaccctcgaaaacaaaccacggcagtagcgaaagctgcaagagaatgaaaacttgcggctcgcagcaaacaccaaacaaaacaaacacaaaccaacaaaaagtggccacgcccgggccaccgatacttcccttcactccttcgggactgttggggaggaacacaacagggctcccctgttttcccattccttcccccttttcccaaccccaaccgccgtatctggtggcggcaagacacacgggtctttccctctaaagcacaattgtgtgtgtgtcccaggtcctcctgcgtacggtgcgggagtgctcccacccaactgttgtaagcctgtccaacgcgtcgtcctggcaagactatgacgtcgcatgttccgctgcggatgccgaccgggtaaccggttccccagtgtgtgtagtgcgatcttccaggtcctcctggttggcgttgtccagaaactgcttcaggtaagtggggtgtgcccaatccctacaaaggttgattctttcaccaccttaggaatgctccggaggtaccccagcaacagctgggatctgaccggaggctaattgtctacgggtggtgtttcctttttcttttcacacaactctactgcgtacaactcactgactatccacttgctctgtcacg

SEQ ID NO: 3625 - DNA, 3752 bp, synthetic construct
  source 1..3752: mol_type = other DNA; note = Anabaena L9a5, P1 exon scramble2, P2 exon complement
atgggagtgaaggtgctgttcgccctgatctgtattgccgtggccgaggccaagcctaccgagaacaacgaggacttcaacatcgtggccgtggcctccaatttcgccaccacagatctggacgccgacagaggaaagctgcccggcaagaagctgcctctggaagtgctgaaagagatggaagccaacgccagaaaggccggctgtaccagaggctgtctgatctgcctgagccacatcaagtgcacccctaagatgaagaagttcatccccggcagatgccacacctacgagggcgacaaagaatctgcccaaggcggaatcggagaggccatcgtggatatccctgagatccccggcttcaaggacctggaacctatggaacagtttatcgcccaggtggacctgtgcgtggactgtacaacaggctgcctgaaaggcctggccaacgtgcagtgtagcgacctgctgaagaagtggctgcctcagagatgcgccaccttcgcctctaagatccagggccaagtggacaagatcaaaggcgctggcggcgactaatagctaactagacaaaacaccaaacaaacaagctgcgagccattgtagtcaaataattgagccttaaagaagaaattctttaagtggatgctctcaaactcagggaaacctaaatctagttatagacaaggcaatcctgagccaagccgaagtagtaattagtaagttaacaatagatgacttacaactaatcggaaggtgcagagactcgacgggagctaccctaacgtcaagacgagggtaaagagagagtccaattctcaaagccaatatcaacagtaagtctagatatcggatcccgggaggctaggtggaggctcagtgtgataagtctgcgatggtggatgcatgtgtcatggtcatagctgtttcctgtgtgaaattgttatccgctcagagggcacaatcctattccgcgctatccgacaatctccaagacattaggtggagttcagttcggcgtatggcatatgtcgctggaaagaacatgtgagcaaaaggccagcaaaaggccaggaaccgtaaaaaggccgcgttgctggcgtttttccataggctccgcccccctgacgagcatcacaaaaatcgacgctcaagtcagaggtggcgaaacccgacaggactataaagataccaggcgtttccccctggaagctccctcgtgcgctctcctgttccgaccctgccgcttaccggatacctgtccgcctttctcccttcgggaagcgtggcgctttctcatagctcacgctgtaggtatctcagttcggtgtaggtcgttcgctccaagctgggctgtgtgcacgaaccccccgttcagcccgaccgctgcgccttatccggtaactatcgtcttgagtccaacccggtaagacacgacttatcgccactggcagcagccactggtaacaggattagcagagcgaggtatgtaggcggtgctacagagttcttgaagtggtggcctaactacggctacactagaagaacagtatttggtatctgcgctctgctgaagccagttaccttcggaaaaagagttggtagctcttgatccggcaaacaaaccaccgctggtagcggtggtttttttgtttgcaagcagcagattacgcgcagaaaaaaaggatctcaagaagatcctttgatcttttctacggggtctgacgctctattcaacaaagccgccgtcccgtcaagtcagcgtaaatgggtagggggcttcaaatcgtcctcgtgataccaattcggagcctgcttttttgtacaaacttgttgataatggcaattcaaggatcttcacctagatccttttaaattaaaaatgaagttttaaatcaatctaaagtatatatgagtaaacttggtctgacagttaccaatgcttaatcagtgaggcacctatctcagcgatctgtctatttcgttcatccatagttgcctgactccccgtcgtgtagataactacgatacgggagggcttaccatctggccccagtgctgcaatgataccgcgagagccacgctcaccggctccagatttatcagcaataaaccagccagccggaagggccgagcgcagaagtggtcctgcaactttatccgcctccatccagtctattaattgttgccgggaagctagagtaagtagttcgccagttaatagtttgcgcaacgttgttgccattgctacaggcatcgtggtgtcacgctcgtcgtttggtatggcttcattcagctccggttcccaacgatcaaggcgagttacatgatcccccatgttgtgcaaaaaagcggttagctccttcggtcctccgatcgttgtcagaagtaagttggccgcagtgttatcactcatggttatggcagcactgcataattctcttactgtcatgccatccgtaagatgcttttctgtgactggtgagtactcaaccaagtcattctgagaatagtgtatgcggcgaccgagttgctcttgcccggcgtcaatacgggataataccgcgccacatagcagaactttaaaagtgctcatcattggaaaacgttcttcggggcgaaaactctcaaggatcttaccgctgttgagatccagttcgatgtaacccactcgtgcacccaactgatcttcagcatcttttactttcaccagcgtttctgggtgagcaaaaacaggaaggcaaaatgccgcaaaaaagggaataagggcgacacggaaatgttgaatactcatactcttcctttttcaatattattgaagcatttatcagggttattgtctcatgagcggatacatatttgaatgtatttagaaaaataaacaaataggggttccgcgcacatttccccgaaaagtgccagatacctgaaacaaaacccatcgtacggccaaggaagtctccaataactgtgatccaccacaagcgccagggttttcccagtcacgacgttgtaaaacgacggccagtcatgcataatccgcacgcatctggaataaggaagtgccattccgcctgaccttaatacgactcactatagggagaccctcgaaaacaaaccacggcagtagcgaaagctgcaagagaatggactacaatggctcgcagcaaacaccaaacaaaacaaacacaaaccaacaaaaagtggccacgcccgggccaccgatacttcccttcactccttcgggactgttggggaggaacacaacagggctcccctgttttcccattccttcccccttttcccaaccccaaccgccgtatctggtggcggcaagacacacgggtctttccctctaaagcacaattgtgtgtgtgtcccaggtcctcctgcgtacggtgcgggagtgctcccacccaactgttgtaagcctgtccaacgcgtcgtcctggcaagactatgacgtcgcatgttccgctgcggatgccgaccgggtaaccggttccccagtgtgtgtagtgcgatcttccaggtcctcctggttggcgttgtccagaaactgcttcaggtaagtggggtgtgcccaatccctacaaaggttgattctttcaccaccttaggaatgctccggaggtaccccagcaacagctgggatctgaccggaggctaattgtctacgggtggtgtttcctttttcttttcacacaactctactgcgtacaactcactgactatccacttgctctgtcacg

SEQ ID NO: 3626 - DNA, 3751 bp, synthetic construct
  source 1..3751: mol_type = other DNA; note = Anabaena L9a5, P1 exon scramble1, P2 exon scramble1
atgggagtgaaggtgctgttcgccctgatctgtattgccgtggccgaggccaagcctaccgagaacaacgaggacttcaacatcgtggccgtggcctccaatttcgccaccacagatctggacgccgacagaggaaagctgcccggcaagaagctgcctctggaagtgctgaaagagatggaagccaacgccagaaaggccggctgtaccagaggctgtctgatctgcctgagccacatcaagtgcacccctaagatgaagaagttcatccccggcagatgccacacctacgagggcgacaaagaatctgcccaaggcggaatcggagaggccatcgtggatatccctgagatccccggcttcaaggacctggaacctatggaacagtttatcgcccaggtggacctgtgcgtggactgtacaacaggctgcctgaaaggcctggccaacgtgcagtgtagcgacctgctgaagaagtggctgcctcagagatgcgccaccttcgcctctaagatccagggccaagtggacaagatcaaaggcgctggcggcgactaatagctaactagacaaaacaccaaacaaacaagctgcgagccacgcattgaaataattgagccttaaagaagaaattctttaagtggatgctctcaaactcagggaaacctaaatctagttatagacaaggcaatcctgagccaagccgaagtagtaattagtaagttaacaatagatgacttacaactaatcggaaggtgcagagactcgacgggagctaccctaacgtcaagacgagggtaaagagagagtccaattctcaaagccaatatcaacagtaagtctagatatcggatcccgggaggctaggtggaggctcagtgtgataagtctgcgatggtggatgcatgtgtcatggtcatagctgtttcctgtgtgaaattgttatccgctcagagggcacaatcctattccgcgctatccgacaatctccaagacattaggtggagttcagttcggcgtatggcatatgtcgctggaaagaacatgtgagcaaaaggccagcaaaaggccaggaaccgtaaaaaggccgcgttgctggcgtttttccataggctccgcccccctgacgagcatcacaaaaatcgacgctcaagtcagaggtggcgaaacccgacaggactataaagataccaggcgtttccccctggaagctccctcgtgcgctctcctgttccgaccctgccgcttaccggatacctgtccgcctttctcccttcgggaagcgtggcgctttctcatagctcacgctgtaggtatctcagttcggtgtaggtcgttcgctccaagctgggctgtgtgcacgaaccccccgttcagcccgaccgctgcgccttatccggtaactatcgtcttgagtccaacccggtaagacacgacttatcgccactggcagcagccactggtaacaggattagcagagcgaggtatgtaggcggtgctacagagttcttgaagtggtggcctaactacggctacactagaagaacagtatttggtatctgcgctctgctgaagccagttaccttcggaaaaagagttggtagctcttgatccggcaaacaaaccaccgctggtagcggtggtttttttgtttgcaagcagcagattacgcgcagaaaaaaaggatctcaagaagatcctttgatcttttctacggggtctgacgctctattcaacaaagccgccgtcccgtcaagtcagcgtaaatgggtagggggcttcaaatcgtcctcgtgataccaattcggagcctgcttttttgtacaaacttgttgataatggcaattcaaggatcttcacctagatccttttaaattaaaaatgaagttttaaatcaatctaaagtatatatgagtaaacttggtctgacagttaccaatgcttaatcagtgaggcacctatctcagcgatctgtctatttcgttcatccatagttgcctgactccccgtcgtgtagataactacgatacgggagggcttaccatctggccccagtgctgcaatgataccgcgagagccacgctcaccggctccagatttatcagcaataaaccagccagccggaagggccgagcgcagaagtggtcctgcaactttatccgcctccatccagtctattaattgttgccgggaagctagagtaagtagttcgccagttaatagtttgcgcaacgttgttgccattgctacaggcatcgtggtgtcacgctcgtcgtttggtatggcttcattcagctccggttcccaacgatcaaggcgagttacatgatcccccatgttgtgcaaaaaagcggttagctccttcggtcctccgatcgttgtcagaagtaagttggccgcagtgttatcactcatggttatggcagcactgcataattctcttactgtcatgccatccgtaagatgcttttctgtgactggtgagtactcaaccaagtcattctgagaatagtgtatgcggcgaccgagttgctcttgcccggcgtcaatacgggataataccgcgccacatagcagaactttaaaagtgctcatcattggaaaacgttcttcggggcgaaaactctcaaggatcttaccgctgttgagatccagttcgatgtaacccactcgtgcacccaactgatcttcagcatcttttactttcaccagcgtttctgggtgagcaaaaacaggaaggcaaaatgccgcaaaaaagggaataagggcgacacggaaatgttgaatactcatactcttcctttttcaatattattgaagcatttatcagggttattgtctcatgagcggatacatatttgaatgtatttagaaaaataaacaaataggggttccgcgcacatttccccgaaaagtgccagatacctgaaacaaaacccatcgtacggccaaggaagtctccaataactgtgatccaccacaagcgccagggttttcccagtcacgacgttgtaaaacgacggccagtcatgcataatccgcacgcatctggaataaggaagtgccattccgcctgaccttaatacgactcactatagggagaccctcgaaaacaaaccacggcagtagcgaaagctgcaagagaatgaaaacttgcggctcgcagcaaacaccaaacaaaacaaacacaaaccaacaaaaagtggccacgcccgggccaccgatacttcccttcactccttcgggactgttggggaggaacacaacagggctcccctgttttcccattccttcccccttttcccaaccccaaccgccgtatctggtggcggcaagacacacgggtctttccctctaaagcacaattgtgtgtgtgtcccaggtcctcctgcgtacggtgcgggagtgctcccacccaactgttgtaagcctgtccaacgcgtcgtcctggcaagactatgacgtcgcatgttccgctgcggatgccgaccgggtaaccggttccccagtgtgtgtagtgcgatcttccaggtcctcctggttggcgttgtccagaaactgcttcaggtaagtggggtgtgcccaatccctacaaaggttgattctttcaccaccttaggaatgctccggaggtaccccagcaacagctgggatctgaccggaggctaattgtctacgggtggtgtttcctttttcttttcacacaactctactgcgtacaactcactgactatccacttgctctgtcacg

SEQ ID NO: 3627 - DNA, 3751 bp, synthetic construct
  source 1..3751: mol_type = other DNA; note = Anabaena L9a5, P1 exon scramble2, P2 exon scramble2
atgggagtgaaggtgctgttcgccctgatctgtattgccgtggccgaggccaagcctaccgagaacaacgaggacttcaacatcgtggccgtggcctccaatttcgccaccacagatctggacgccgacagaggaaagctgcccggcaagaagctgcctctggaagtgctgaaagagatggaagccaacgccagaaaggccggctgtaccagaggctgtctgatctgcctgagccacatcaagtgcacccctaagatgaagaagttcatccccggcagatgccacacctacgagggcgacaaagaatctgcccaaggcggaatcggagaggccatcgtggatatccctgagatccccggcttcaaggacctggaacctatggaacagtttatcgcccaggtggacctgtgcgtggactgtacaacaggctgcctgaaaggcctggccaacgtgcagtgtagcgacctgctgaagaagtggctgcctcagagatgcgccaccttcgcctctaagatccagggccaagtggacaagatcaaaggcgctggcggcgactaatagctaactagacaaaacaccaaacaaacaagctgcgagccgaattcgcaaataattgagccttaaagaagaaattctttaagtggatgctctcaaactcagggaaacctaaatctagttatagacaaggcaatcctgagccaagccgaagtagtaattagtaagttaacaatagatgacttacaactaatcggaaggtgcagagactcgacgggagctaccctaacgtcaagacgagggtaaagagagagtccaattctcaaagccaatatcaacagtaagtctagatatcggatcccgggaggctaggtggaggctcagtgtgataagtctgcgatggtggatgcatgtgtcatggtcatagctgtttcctgtgtgaaattgttatccgctcagagggcacaatcctattccgcgctatccgacaatctccaagacattaggtggagttcagttcggcgtatggcatatgtcgctggaaagaacatgtgagcaaaaggccagcaaaaggccaggaaccgtaaaaaggccgcgttgctggcgtttttccataggctccgcccccctgacgagcatcacaaaaatcgacgctcaagtcagaggtggcgaaacccgacaggactataaagataccaggcgtttccccctggaagctccctcgtgcgctctcctgttccgaccctgccgcttaccggatacctgtccgcctttctcccttcgggaagcgtggcgctttctcatagctcacgctgtaggtatctcagttcggtgtaggtcgttcgctccaagctgggctgtgtgcacgaaccccccgttcagcccgaccgctgcgccttatccggtaactatcgtcttgagtccaacccggtaagacacgacttatcgccactggcagcagccactggtaacaggattagcagagcgaggtatgtaggcggtgctacagagttcttgaagtggtggcctaactacggctacactagaagaacagtatttggtatctgcgctctgctgaagccagttaccttcggaaaaagagttggtagctcttgatccggcaaacaaaccaccgctggtagcggtggtttttttgtttgcaagcagcagattacgcgcagaaaaaaaggatctcaagaagatcctttgatcttttctacggggtctgacgctctattcaacaaagccgccgtcccgtcaagtcagcgtaaatgggtagggggcttcaaatcgtcctcgtgataccaattcggagcctgcttttttgtacaaacttgttgataatggcaattcaaggatcttcacctagatccttttaaattaaaaatgaagttttaaatcaatctaaagtatatatgagtaaacttggtctgacagttaccaatgcttaatcagtgaggcacctatctcagcgatctgtctatttcgttcatccatagttgcctgactccccgtcgtgtagataactacgatacgggagggcttaccatctggccccagtgctgcaatgataccgcgagagccacgctcaccggctccagatttatcagcaataaaccagccagccggaagggccgagcgcagaagtggtcctgcaactttatccgcctccatccagtctattaattgttgccgggaagctagagtaagtagttcgccagttaatagtttgcgcaacgttgttgccattgctacaggcatcgtggtgtcacgctcgtcgtttggtatggcttcattcagctccggttcccaacgatcaaggcgagttacatgatcccccatgttgtgcaaaaaagcggttagctccttcggtcctccgatcgttgtcagaagtaagttggccgcagtgttatcactcatggttatggcagcactgcataattctcttactgtcatgccatccgtaagatgcttttctgtgactggtgagtactcaaccaagtcattctgagaatagtgtatgcggcgaccgagttgctcttgcccggcgtcaatacgggataataccgcgccacatagcagaactttaaaagtgctcatcattggaaaacgttcttcggggcgaaaactctcaaggatcttaccgctgttgagatccagttcgatgtaacccactcgtgcacccaactgatcttcagcatcttttactttcaccagcgtttctgggtgagcaaaaacaggaaggcaaaatgccgcaaaaaagggaataagggcgacacggaaatgttgaatactcatactcttcctttttcaatattattgaagcatttatcagggttattgtctcatgagcggatacatatttgaatgtatttagaaaaataaacaaataggggttccgcgcacatttccccgaaaagtgccagatacctgaaacaaaacccatcgtacggccaaggaagtctccaataactgtgatccaccacaagcgccagggttttcccagtcacgacgttgtaaaacgacggccagtcatgcataatccgcacgcatctggaataaggaagtgccattccgcctgaccttaatacgactcactatagggagaccctcgaaaacaaaccacggcagtagcgaaagctgcaagagaatggactacaatggctcgcagcaaacaccaaacaaaacaaacacaaaccaacaaaaagtggccacgcccgggccaccgatacttcccttcactccttcgggactgttggggaggaacacaacagggctcccctgttttcccattccttcccccttttcccaaccccaaccgccgtatctggtggcggcaagacacacgggtctttccctctaaagcacaattgtgtgtgtgtcccaggtcctcctgcgtacggtgcgggagtgctcccacccaactgttgtaagcctgtccaacgcgtcgtcctggcaagactatgacgtcgcatgttccgctgcggatgccgaccgggtaaccggttccccagtgtgtgtagtgcgatcttccaggtcctcctggttggcgttgtccagaaactgcttcaggtaagtggggtgtgcccaatccctacaaaggttgattctttcaccaccttaggaatgctccggaggtaccccagcaacagctgggatctgaccggaggctaattgtctacgggtggtgtttcctttttcttttcacacaactctactgcgtacaactcactgactatccacttgctctgtcacg

SEQ ID NO: 3628 - DNA, 3731 bp, synthetic construct
  source 1..3731: mol_type = other DNA; note = Anabaena L9a5, no IH
atgggagtgaaggtgctgttcgccctgatctgtattgccgtggccgaggccaagcctaccgagaacaacgaggacttcaacatcgtggccgtggcctccaatttcgccaccacagatctggacgccgacagaggaaagctgcccggcaagaagctgcctctggaagtgctgaaagagatggaagccaacgccagaaaggccggctgtaccagaggctgtctgatctgcctgagccacatcaagtgcacccctaagatgaagaagttcatccccggcagatgccacacctacgagggcgacaaagaatctgcccaaggcggaatcggagaggccatcgtggatatccctgagatccccggcttcaaggacctggaacctatggaacagtttatcgcccaggtggacctgtgcgtggactgtacaacaggctgcctgaaaggcctggccaacgtgcagtgtagcgacctgctgaagaagtggctgcctcagagatgcgccaccttcgcctctaagatccagggccaagtggacaagatcaaaggcgctggcggcgactaatagctaactagacaaaacaccaaacaaacaaacggacttaaataattgagccttaaagaagaaattctttaagtggatgctctcaaactcagggaaacctaaatctagttatagacaaggcaatcctgagccaagccgaagtagtaattagtaagttaacaatagatgacttacaactaatcggaaggtgcagagactcgacgggagctaccctaacgtcaagacgagggtaaagagagagtccaattctcaaagccaatatcaacagtaagtctagatatcggatcccgggaggctaggtggaggctcagtgtgataagtctgcgatggtggatgcatgtgtcatggtcatagctgtttcctgtgtgaaattgttatccgctcagagggcacaatcctattccgcgctatccgacaatctccaagacattaggtggagttcagttcggcgtatggcatatgtcgctggaaagaacatgtgagcaaaaggccagcaaaaggccaggaaccgtaaaaaggccgcgttgctggcgtttttccataggctccgcccccctgacgagcatcacaaaaatcgacgctcaagtcagaggtggcgaaacccgacaggactataaagataccaggcgtttccccctggaagctccctcgtgcgctctcctgttccgaccctgccgcttaccggatacctgtccgcctttctcccttcgggaagcgtggcgctttctcatagctcacgctgtaggtatctcagttcggtgtaggtcgttcgctccaagctgggctgtgtgcacgaaccccccgttcagcccgaccgctgcgccttatccggtaactatcgtcttgagtccaacccggtaagacacgacttatcgccactggcagcagccactggtaacaggattagcagagcgaggtatgtaggcggtgctacagagttcttgaagtggtggcctaactacggctacactagaagaacagtatttggtatctgcgctctgctgaagccagttaccttcggaaaaagagttggtagctcttgatccggcaaacaaaccaccgctggtagcggtggtttttttgtttgcaagcagcagattacgcgcagaaaaaaaggatctcaagaagatcctttgatcttttctacggggtctgacgctctattcaacaaagccgccgtcccgtcaagtcagcgtaaatgggtagggggcttcaaatcgtcctcgtgataccaattcggagcctgcttttttgtacaaacttgttgataatggcaattcaaggatcttcacctagatccttttaaattaaaaatgaagttttaaatcaatctaaagtatatatgagtaaacttggtctgacagttaccaatgcttaatcagtgaggcacctatctcagcgatctgtctatttcgttcatccatagttgcctgactccccgtcgtgtagataactacgatacgggagggcttaccatctggccccagtgctgcaatgataccgcgagagccacgctcaccggctccagatttatcagcaataaaccagccagccggaagggccgagcgcagaagtggtcctgcaactttatccgcctccatccagtctattaattgttgccgggaagctagagtaagtagttcgccagttaatagtttgcgcaacgttgttgccattgctacaggcatcgtggtgtcacgctcgtcgtttggtatggcttcattcagctccggttcccaacgatcaaggcgagttacatgatcccccatgttgtgcaaaaaagcggttagctccttcggtcctccgatcgttgtcagaagtaagttggccgcagtgttatcactcatggttatggcagcactgcataattctcttactgtcatgccatccgtaagatgcttttctgtgactggtgagtactcaaccaagtcattctgagaatagtgtatgcggcgaccgagttgctcttgcccggcgtcaatacgggataataccgcgccacatagcagaactttaaaagtgctcatcattggaaaacgttcttcggggcgaaaactctcaaggatcttaccgctgttgagatccagttcgatgtaacccactcgtgcacccaactgatcttcagcatcttttactttcaccagcgtttctgggtgagcaaaaacaggaaggcaaaatgccgcaaaaaagggaataagggcgacacggaaatgttgaatactcatactcttcctttttcaatattattgaagcatttatcagggttattgtctcatgagcggatacatatttgaatgtatttagaaaaataaacaaataggggttccgcgcacatttccccgaaaagtgccagatacctgaaacaaaacccatcgtacggccaaggaagtctccaataactgtgatccaccacaagcgccagggttttcccagtcacgacgttgtaaaacgacggccagtcatgcataatccgcacgcatctggaataaggaagtgccattccgcctgaccttaatacgactcactatagggagaccctcgaaaacaaaccacggcagtagcgaaagctgcaagagaatgaaaatccgtaaacaccaaacaaaacaaacacaaaccaacaaaaagtggccacgcccgggccaccgatacttcccttcactccttcgggactgttggggaggaacacaacagggctcccctgttttcccattccttcccccttttcccaaccccaaccgccgtatctggtggcggcaagacacacgggtctttccctctaaagcacaattgtgtgtgtgtcccaggtcctcctgcgtacggtgcgggagtgctcccacccaactgttgtaagcctgtccaacgcgtcgtcctggcaagactatgacgtcgcatgttccgctgcggatgccgaccgggtaaccggttccccagtgtgtgtagtgcgatcttccaggtcctcctggttggcgttgtccagaaactgcttcaggtaagtggggtgtgcccaatccctacaaaggttgattctttcaccaccttaggaatgctccggaggtaccccagcaacagctgggatctgaccggaggctaattgtctacgggtggtgtttcctttttcttttcacacaactctactgcgtacaactcactgactatccacttgctctgtcacg

SEQ ID NO: 3629 - DNA, 3725 bp, synthetic construct
  source 1..3725: mol_type = other DNA; note = Anabaena L9a5 no P1 intron, P1 exon scramble1, P2 exon complement
atgggagtgaaggtgctgttcgccctgatctgtattgccgtggccgaggccaagcctaccgagaacaacgaggacttcaacatcgtggccgtggcctccaatttcgccaccacagatctggacgccgacagaggaaagctgcccggcaagaagctgcctctggaagtgctgaaagagatggaagccaacgccagaaaggccggctgtaccagaggctgtctgatctgcctgagccacatcaagtgcacccctaagatgaagaagttcatccccggcagatgccacacctacgagggcgacaaagaatctgcccaaggcggaatcggagaggccatcgtggatatccctgagatccccggcttcaaggacctggaacctatggaacagtttatcgcccaggtggacctgtgcgtggactgtacaacaggctgcctgaaaggcctggccaacgtgcagtgtagcgacctgctgaagaagtggctgcctcagagatgcgccaccttcgcctctaagatccagggccaagtggacaagatcaaaggcgctggcggcgactaatagctaactagacaaaacaccaaacaaacaagctgcgagccgcaagttttaaataattgagccttaaagaagaaattctttaagtggatgctctcaaactcagggaaacctaaatctagttatagacaaggcaatcctgagccaagccgaagtagtaattagtaagttaacaatagatgacttacaactaatcggaaggtgcagagactcgacgggagctaccctaacgtcaagacgagggtaaagagagagtccaattctcaaagccaatatcaacagtaagtctagatatcggatcccgggaggctaggtggaggctcagtgtgataagtctgcgatggtggatgcatgtgtcatggtcatagctgtttcctgtgtgaaattgttatccgctcagagggcacaatcctattccgcgctatccgacaatctccaagacattaggtggagttcagttcggcgtatggcatatgtcgctggaaagaacatgtgagcaaaaggccagcaaaaggccaggaaccgtaaaaaggccgcgttgctggcgtttttccataggctccgcccccctgacgagcatcacaaaaatcgacgctcaagtcagaggtggcgaaacccgacaggactataaagataccaggcgtttccccctggaagctccctcgtgcgctctcctgttccgaccctgccgcttaccggatacctgtccgcctttctcccttcgggaagcgtggcgctttctcatagctcacgctgtaggtatctcagttcggtgtaggtcgttcgctccaagctgggctgtgtgcacgaaccccccgttcagcccgaccgctgcgccttatccggtaactatcgtcttgagtccaacccggtaagacacgacttatcgccactggcagcagccactggtaacaggattagcagagcgaggtatgtaggcggtgctacagagttcttgaagtggtggcctaactacggctacactagaagaacagtatttggtatctgcgctctgctgaagccagttaccttcggaaaaagagttggtagctcttgatccggcaaacaaaccaccgctggtagcggtggtttttttgtttgcaagcagcagattacgcgcagaaaaaaaggatctcaagaagatcctttgatcttttctacggggtctgacgctctattcaacaaagccgccgtcccgtcaagtcagcgtaaatgggtagggggcttcaaatcgtcctcgtgataccaattcggagcctgcttttttgtacaaacttgttgataatggcaattcaaggatcttcacctagatccttttaaattaaaaatgaagttttaaatcaatctaaagtatatatgagtaaacttggtctgacagttaccaatgcttaatcagtgaggcacctatctcagcgatctgtctatttcgttcatccatagttgcctgactccccgtcgtgtagataactacgatacgggagggcttaccatctggccccagtgctgcaatgataccgcgagagccacgctcaccggctccagatttatcagcaataaaccagccagccggaagggccgagcgcagaagtggtcctgcaactttatccgcctccatccagtctattaattgttgccgggaagctagagtaagtagttcgccagttaatagtttgcgcaacgttgttgccattgctacaggcatcgtggtgtcacgctcgtcgtttggtatggcttcattcagctccggttcccaacgatcaaggcgagttacatgatcccccatgttgtgcaaaaaagcggttagctccttcggtcctccgatcgttgtcagaagtaagttggccgcagtgttatcactcatggttatggcagcactgcataattctcttactgtcatgccatccgtaagatgcttttctgtgactggtgagtactcaaccaagtcattctgagaatagtgtatgcggcgaccgagttgctcttgcccggcgtcaatacgggataataccgcgccacatagcagaactttaaaagtgctcatcattggaaaacgttcttcggggcgaaaactctcaaggatcttaccgctgttgagatccagttcgatgtaacccactcgtgcacccaactgatcttcagcatcttttactttcaccagcgtttctgggtgagcaaaaacaggaaggcaaaatgccgcaaaaaagggaataagggcgacacggaaatgttgaatactcatactcttcctttttcaatattattgaagcatttatcagggttattgtctcatgagcggatacatatttgaatgtatttagaaaaataaacaaataggggttccgcgcacatttccccgaaaagtgccagatacctgaaacaaaacccatcgtacggccaaggaagtctccaataactgtgatccaccacaagcgccagggttttcccagtcacgacgttgtaaaacgacggccagtcatgcataatccgcacgcatctggaataaggaagtgccattccgcctgaccttaatacgactcactatagggagaccctcgaaaacaaaccacaaaacttgcggctcgcagcaaacaccaaacaaaacaaacacaaaccaacaaaaagtggccacgcccgggccaccgatacttcccttcactccttcgggactgttggggaggaacacaacagggctcccctgttttcccattccttcccccttttcccaaccccaaccgccgtatctggtggcggcaagacacacgggtctttccctctaaagcacaattgtgtgtgtgtcccaggtcctcctgcgtacggtgcgggagtgctcccacccaactgttgtaagcctgtccaacgcgtcgtcctggcaagactatgacgtcgcatgttccgctgcggatgccgaccgggtaaccggttccccagtgtgtgtagtgcgatcttccaggtcctcctggttggcgttgtccagaaactgcttcaggtaagtggggtgtgcccaatccctacaaaggttgattctttcaccaccttaggaatgctccggaggtaccccagcaacagctgggatctgaccggaggctaattgtctacgggtggtgtttcctttttcttttcacacaactctactgcgtacaactcactgactatccacttgctctgtcacg

SEQ ID NO: 3630 - DNA, 3725 bp, synthetic construct
  source 1..3725: mol_type = other DNA; note = Anabaena L9a5 no P1 intron, P1 exon scramble2, P2 exon complement
atgggagtgaaggtgctgttcgccctgatctgtattgccgtggccgaggccaagcctaccgagaacaacgaggacttcaacatcgtggccgtggcctccaatttcgccaccacagatctggacgccgacagaggaaagctgcccggcaagaagctgcctctggaagtgctgaaagagatggaagccaacgccagaaaggccggctgtaccagaggctgtctgatctgcctgagccacatcaagtgcacccctaagatgaagaagttcatccccggcagatgccacacctacgagggcgacaaagaatctgcccaaggcggaatcggagaggccatcgtggatatccctgagatccccggcttcaaggacctggaacctatggaacagtttatcgcccaggtggacctgtgcgtggactgtacaacaggctgcctgaaaggcctggccaacgtgcagtgtagcgacctgctgaagaagtggctgcctcagagatgcgccaccttcgcctctaagatccagggccaagtggacaagatcaaaggcgctggcggcgactaatagctaactagacaaaacaccaaacaaacaagctgcgagccattgtagtcaaataattgagccttaaagaagaaattctttaagtggatgctctcaaactcagggaaacctaaatctagttatagacaaggcaatcctgagccaagccgaagtagtaattagtaagttaacaatagatgacttacaactaatcggaaggtgcagagactcgacgggagctaccctaacgtcaagacgagggtaaagagagagtccaattctcaaagccaatatcaacagtaagtctagatatcggatcccgggaggctaggtggaggctcagtgtgataagtctgcgatggtggatgcatgtgtcatggtcatagctgtttcctgtgtgaaattgttatccgctcagagggcacaatcctattccgcgctatccgacaatctccaagacattaggtggagttcagttcggcgtatggcatatgtcgctggaaagaacatgtgagcaaaaggccagcaaaaggccaggaaccgtaaaaaggccgcgttgctggcgtttttccataggctccgcccccctgacgagcatcacaaaaatcgacgctcaagtcagaggtggcgaaacccgacaggactataaagataccaggcgtttccccctggaagctccctcgtgcgctctcctgttccgaccctgccgcttaccggatacctgtccgcctttctcccttcgggaagcgtggcgctttctcatagctcacgctgtaggtatctcagttcggtgtaggtcgttcgctccaagctgggctgtgtgcacgaaccccccgttcagcccgaccgctgcgccttatccggtaactatcgtcttgagtccaacccggtaagacacgacttatcgccactggcagcagccactggtaacaggattagcagagcgaggtatgtaggcggtgctacagagttcttgaagtggtggcctaactacggctacactagaagaacagtatttggtatctgcgctctgctgaagccagttaccttcggaaaaagagttggtagctcttgatccggcaaacaaaccaccgctggtagcggtggtttttttgtttgcaagcagcagattacgcgcagaaaaaaaggatctcaagaagatcctttgatcttttctacggggtctgacgctctattcaacaaagccgccgtcccgtcaagtcagcgtaaatgggtagggggcttcaaatcgtcctcgtgataccaattcggagcctgcttttttgtacaaacttgttgataatggcaattcaaggatcttcacctagatccttttaaattaaaaatgaagttttaaatcaatctaaagtatatatgagtaaacttggtctgacagttaccaatgcttaatcagtgaggcacctatctcagcgatctgtctatttcgttcatccatagttgcctgactccccgtcgtgtagataactacgatacgggagggcttaccatctggccccagtgctgcaatgataccgcgagagccacgctcaccggctccagatttatcagcaataaaccagccagccggaagggccgagcgcagaagtggtcctgcaactttatccgcctccatccagtctattaattgttgccgggaagctagagtaagtagttcgccagttaatagtttgcgcaacgttgttgccattgctacaggcatcgtggtgtcacgctcgtcgtttggtatggcttcattcagctccggttcccaacgatcaaggcgagttacatgatcccccatgttgtgcaaaaaagcggttagctccttcggtcctccgatcgttgtcagaagtaagttggccgcagtgttatcactcatggttatggcagcactgcataattctcttactgtcatgccatccgtaagatgcttttctgtgactggtgagtactcaaccaagtcattctgagaatagtgtatgcggcgaccgagttgctcttgcccggcgtcaatacgggataataccgcgccacatagcagaactttaaaagtgctcatcattggaaaacgttcttcggggcgaaaactctcaaggatcttaccgctgttgagatccagttcgatgtaacccactcgtgcacccaactgatcttcagcatcttttactttcaccagcgtttctgggtgagcaaaaacaggaaggcaaaatgccgcaaaaaagggaataagggcgacacggaaatgttgaatactcatactcttcctttttcaatattattgaagcatttatcagggttattgtctcatgagcggatacatatttgaatgtatttagaaaaataaacaaataggggttccgcgcacatttccccgaaaagtgccagatacctgaaacaaaacccatcgtacggccaaggaagtctccaataactgtgatccaccacaagcgccagggttttcccagtcacgacgttgtaaaacgacggccagtcatgcataatccgcacgcatctggaataaggaagtgccattccgcctgaccttaatacgactcactatagggagaccctcgaaaacaaaccacgactacaatggctcgcagcaaacaccaaacaaaacaaacacaaaccaacaaaaagtggccacgcccgggccaccgatacttcccttcactccttcgggactgttggggaggaacacaacagggctcccctgttttcccattccttcccccttttcccaaccccaaccgccgtatctggtggcggcaagacacacgggtctttccctctaaagcacaattgtgtgtgtgtcccaggtcctcctgcgtacggtgcgggagtgctcccacccaactgttgtaagcctgtccaacgcgtcgtcctggcaagactatgacgtcgcatgttccgctgcggatgccgaccgggtaaccggttccccagtgtgtgtagtgcgatcttccaggtcctcctggttggcgttgtccagaaactgcttcaggtaagtggggtgtgcccaatccctacaaaggttgattctttcaccaccttaggaatgctccggaggtaccccagcaacagctgggatctgaccggaggctaattgtctacgggtggtgtttcctttttcttttcacacaactctactgcgtacaactcactgactatccacttgctctgtcacg

SEQ ID NO: 3631 - DNA, 3724 bp, synthetic construct
  source 1..3724: mol_type = other DNA; note = Anabaena L9a5 no P1 intron, P1 exon scramble1, P2 exon scramble1
atgggagtgaaggtgctgttcgccctgatctgtattgccgtggccgaggccaagcctaccgagaacaacgaggacttcaacatcgtggccgtggcctccaatttcgccaccacagatctggacgccgacagaggaaagctgcccggcaagaagctgcctctggaagtgctgaaagagatggaagccaacgccagaaaggccggctgtaccagaggctgtctgatctgcctgagccacatcaagtgcacccctaagatgaagaagttcatccccggcagatgccacacctacgagggcgacaaagaatctgcccaaggcggaatcggagaggccatcgtggatatccctgagatccccggcttcaaggacctggaacctatggaacagtttatcgcccaggtggacctgtgcgtggactgtacaacaggctgcctgaaaggcctggccaacgtgcagtgtagcgacctgctgaagaagtggctgcctcagagatgcgccaccttcgcctctaagatccagggccaagtggacaagatcaaaggcgctggcggcgactaatagctaactagacaaaacaccaaacaaacaagctgcgagccacgcattgaaataattgagccttaaagaagaaattctttaagtggatgctctcaaactcagggaaacctaaatctagttatagacaaggcaatcctgagccaagccgaagtagtaattagtaagttaacaatagatgacttacaactaatcggaaggtgcagagactcgacgggagctaccctaacgtcaagacgagggtaaagagagagtccaattctcaaagccaatatcaacagtaagtctagatatcggatcccgggaggctaggtggaggctcagtgtgataagtctgcgatggtggatgcatgtgtcatggtcatagctgtttcctgtgtgaaattgttatccgctcagagggcacaatcctattccgcgctatccgacaatctccaagacattaggtggagttcagttcggcgtatggcatatgtcgctggaaagaacatgtgagcaaaaggccagcaaaaggccaggaaccgtaaaaaggccgcgttgctggcgtttttccataggctccgcccccctgacgagcatcacaaaaatcgacgctcaagtcagaggtggcgaaacccgacaggactataaagataccaggcgtttccccctggaagctccctcgtgcgctctcctgttccgaccctgccgcttaccggatacctgtccgcctttctcccttcgggaagcgtggcgctttctcatagctcacgctgtaggtatctcagttcggtgtaggtcgttcgctccaagctgggctgtgtgcacgaaccccccgttcagcccgaccgctgcgccttatccggtaactatcgtcttgagtccaacccggtaagacacgacttatcgccactggcagcagccactggtaacaggattagcagagcgaggtatgtaggcggtgctacagagttcttgaagtggtggcctaactacggctacactagaagaacagtatttggtatctgcgctctgctgaagccagttaccttcggaaaaagagttggtagctcttgatccggcaaacaaaccaccgctggtagcggtggtttttttgtttgcaagcagcagattacgcgcagaaaaaaaggatctcaagaagatcctttgatcttttctacggggtctgacgctctattcaacaaagccgccgtcccgtcaagtcagcgtaaatgggtagggggcttcaaatcgtcctcgtgataccaattcggagcctgcttttttgtacaaacttgttgataatggcaattcaaggatcttcacctagatccttttaaattaaaaatgaagttttaaatcaatctaaagtatatatgagtaaacttggtctgacagttaccaatgcttaatcagtgaggcacctatctcagcgatctgtctatttcgttcatccatagttgcctgactccccgtcgtgtagataactacgatacgggagggcttaccatctggccccagtgctgcaatgataccgcgagagccacgctcaccggctccagatttatcagcaataaaccagccagccggaagggccgagcgcagaagtggtcctgcaactttatccgcctccatccagtctattaattgttgccgggaagctagagtaagtagttcgccagttaatagtttgcgcaacgttgttgccattgctacaggcatcgtggtgtcacgctcgtcgtttggtatggcttcattcagctccggttcccaacgatcaaggcgagttacatgatcccccatgttgtgcaaaaaagcggttagctccttcggtcctccgatcgttgtcagaagtaagttggccgcagtgttatcactcatggttatggcagcactgcataattctcttactgtcatgccatccgtaagatgcttttctgtgactggtgagtactcaaccaagtcattctgagaatagtgtatgcggcgaccgagttgctcttgcccggcgtcaatacgggataataccgcgccacatagcagaactttaaaagtgctcatcattggaaaacgttcttcggggcgaaaactctcaaggatcttaccgctgttgagatccagttcgatgtaacccactcgtgcacccaactgatcttcagcatcttttactttcaccagcgtttctgggtgagcaaaaacaggaaggcaaaatgccgcaaaaaagggaataagggcgacacggaaatgttgaatactcatactcttcctttttcaatattattgaagcatttatcagggttattgtctcatgagcggatacatatttgaatgtatttagaaaaataaacaaataggggttccgcgcacatttccccgaaaagtgccagatacctgaaacaaaacccatcgtacggccaaggaagtctccaataactgtgatccaccacaagcgccagggttttcccagtcacgacgttgtaaaacgacggccagtcatgcataatccgcacgcatctggaataaggaagtgccattccgcctgaccttaatacgactcactatagggagaccctcgaaaacaaaccacaaaacttgcggctcgcagcaaacaccaaacaaaacaaacacaaaccaacaaaaagtggccacgcccgggccaccgatacttcccttcactccttcgggactgttggggaggaacacaacagggctcccctgttttcccattccttcccccttttcccaaccccaaccgccgtatctggtggcggcaagacacacgggtctttccctctaaagcacaattgtgtgtgtgtcccaggtcctcctgcgtacggtgcgggagtgctcccacccaactgttgtaagcctgtccaacgcgtcgtcctggcaagactatgacgtcgcatgttccgctgcggatgccgaccgggtaaccggttccccagtgtgtgtagtgcgatcttccaggtcctcctggttggcgttgtccagaaactgcttcaggtaagtggggtgtgcccaatccctacaaaggttgattctttcaccaccttaggaatgctccggaggtaccccagcaacagctgggatctgaccggaggctaattgtctacgggtggtgtttcctttttcttttcacacaactctactgcgtacaactcactgactatccacttgctctgtcacg

SEQ ID NO: 3632 - DNA, 3724 bp, synthetic construct
  source 1..3724: mol_type = other DNA; note = Anabaena L9a5 no P1 intron, P1 exon scramble2, P2 exon scramble2
atgggagtgaaggtgctgttcgccctgatctgtattgccgtggccgaggccaagcctaccgagaacaacgaggacttcaacatcgtggccgtggcctccaatttcgccaccacagatctggacgccgacagaggaaagctgcccggcaagaagctgcctctggaagtgctgaaagagatggaagccaacgccagaaaggccggctgtaccagaggctgtctgatctgcctgagccacatcaagtgcacccctaagatgaagaagttcatccccggcagatgccacacctacgagggcgacaaagaatctgcccaaggcggaatcggagaggccatcgtggatatccctgagatccccggcttcaaggacctggaacctatggaacagtttatcgcccaggtggacctgtgcgtggactgtacaacaggctgcctgaaaggcctggccaacgtgcagtgtagcgacctgctgaagaagtggctgcctcagagatgcgccaccttcgcctctaagatccagggccaagtggacaagatcaaaggcgctggcggcgactaatagctaactagacaaaacaccaaacaaacaagctgcgagccgaattcgcaaataattgagccttaaagaagaaattctttaagtggatgctctcaaactcagggaaacctaaatctagttatagacaaggcaatcctgagccaagccgaagtagtaattagtaagttaacaatagatgacttacaactaatcggaaggtgcagagactcgacgggagctaccctaacgtcaagacgagggtaaagagagagtccaattctcaaagccaatatcaacagtaagtctagatatcggatcccgggaggctaggtggaggctcagtgtgataagtctgcgatggtggatgcatgtgtcatggtcatagctgtttcctgtgtgaaattgttatccgctcagagggcacaatcctattccgcgctatccgacaatctccaagacattaggtggagttcagttcggcgtatggcatatgtcgctggaaagaacatgtgagcaaaaggccagcaaaaggccaggaaccgtaaaaaggccgcgttgctggcgtttttccataggctccgcccccctgacgagcatcacaaaaatcgacgctcaagtcagaggtggcgaaacccgacaggactataaagataccaggcgtttccccctggaagctccctcgtgcgctctcctgttccgaccctgccgcttaccggatacctgtccgcctttctcccttcgggaagcgtggcgctttctcatagctcacgctgtaggtatctcagttcggtgtaggtcgttcgctccaagctgggctgtgtgcacgaaccccccgttcagcccgaccgctgcgccttatccggtaactatcgtcttgagtccaacccggtaagacacgacttatcgccactggcagcagccactggtaacaggattagcagagcgaggtatgtaggcggtgctacagagttcttgaagtggtggcctaactacggctacactagaagaacagtatttggtatctgcgctctgctgaagccagttaccttcggaaaaagagttggtagctcttgatccggcaaacaaaccaccgctggtagcggtggtttttttgtttgcaagcagcagattacgcgcagaaaaaaaggatctcaagaagatcctttgatcttttctacggggtctgacgctctattcaacaaagccgccgtcccgtcaagtcagcgtaaatgggtagggggcttcaaatcgtcctcgtgataccaattcggagcctgcttttttgtacaaacttgttgataatggcaattcaaggatcttcacctagatccttttaaattaaaaatgaagttttaaatcaatctaaagtatatatgagtaaacttggtctgacagttaccaatgcttaatcagtgaggcacctatctcagcgatctgtctatttcgttcatccatagttgcctgactccccgtcgtgtagataactacgatacgggagggcttaccatctggccccagtgctgcaatgataccgcgagagccacgctcaccggctccagatttatcagcaataaaccagccagccggaagggccgagcgcagaagtggtcctgcaactttatccgcctccatccagtctattaattgttgccgggaagctagagtaagtagttcgccagttaatagtttgcgcaacgttgttgccattgctacaggcatcgtggtgtcacgctcgtcgtttggtatggcttcattcagctccggttcccaacgatcaaggcgagttacatgatcccccatgttgtgcaaaaaagcggttagctccttcggtcctccgatcgttgtcagaagtaagttggccgcagtgttatcactcatggttatggcagcactgcataattctcttactgtcatgccatccgtaagatgcttttctgtgactggtgagtactcaaccaagtcattctgagaatagtgtatgcggcgaccgagttgctcttgcccggcgtcaatacgggataataccgcgccacatagcagaactttaaaagtgctcatcattggaaaacgttcttcggggcgaaaactctcaaggatcttaccgctgttgagatccagttcgatgtaacccactcgtgcacccaactgatcttcagcatcttttactttcaccagcgtttctgggtgagcaaaaacaggaaggcaaaatgccgcaaaaaagggaataagggcgacacggaaatgttgaatactcatactcttcctttttcaatattattgaagcatttatcagggttattgtctcatgagcggatacatatttgaatgtatttagaaaaataaacaaataggggttccgcgcacatttccccgaaaagtgccagatacctgaaacaaaacccatcgtacggccaaggaagtctccaataactgtgatccaccacaagcgccagggttttcccagtcacgacgttgtaaaacgacggccagtcatgcataatccgcacgcatctggaataaggaagtgccattccgcctgaccttaatacgactcactatagggagaccctcgaaaacaaaccacgactacaatggctcgcagcaaacaccaaacaaaacaaacacaaaccaacaaaaagtggccacgcccgggccaccgatacttcccttcactccttcgggactgttggggaggaacacaacagggctcccctgttttcccattccttcccccttttcccaaccccaaccgccgtatctggtggcggcaagacacacgggtctttccctctaaagcacaattgtgtgtgtgtcccaggtcctcctgcgtacggtgcgggagtgctcccacccaactgttgtaagcctgtccaacgcgtcgtcctggcaagactatgacgtcgcatgttccgctgcggatgccgaccgggtaaccggttccccagtgtgtgtagtgcgatcttccaggtcctcctggttggcgttgtccagaaactgcttcaggtaagtggggtgtgcccaatccctacaaaggttgattctttcaccaccttaggaatgctccggaggtaccccagcaacagctgggatctgaccggaggctaattgtctacgggtggtgtttcctttttcttttcacacaactctactgcgtacaactcactgactatccacttgctctgtcacg

SEQ ID NO: 3633 - DNA, 3751 bp, synthetic construct
  source 1..3751: mol_type = other DNA; note = Anabaena L9a5, P2 Monotron
atgggagtgaaggtgctgttcgccctgatctgtattgccgtggccgaggccaagcctaccgagaacaacgaggacttcaacatcgtggccgtggcctccaatttcgccaccacagatctggacgccgacagaggaaagctgcccggcaagaagctgcctctggaagtgctgaaagagatggaagccaacgccagaaaggccggctgtaccagaggctgtctgatctgcctgagccacatcaagtgcacccctaagatgaagaagttcatccccggcagatgccacacctacgagggcgacaaagaatctgcccaaggcggaatcggagaggccatcgtggatatccctgagatccccggcttcaaggacctggaacctatggaacagtttatcgcccaggtggacctgtgcgtggactgtacaacaggctgcctgaaaggcctggccaacgtgcagtgtagcgacctgctgaagaagtggctgcctcagagatgcgccaccttcgcctctaagatccagggccaagtggacaagatcaaaggcgctggcggcgactaatagctaactagacaaaacaccaaacaaacaagctgcgagccacggacttaaataattgagccttaaagaagaaattctttaagtggatgctctcaaactcagggaaacctaaatctagttatagacaaggcaatcctgagccaagccgaagtagtaattagtaagttaacaatagatgacttacaactaatcggaaggtgcagagactcgacgggagctaccctaacgtcaagacgagggtaaagagagagtccaattctcaaagccaataggcagtagcgaaagctgcaagagaatgtcaacagtaagtctagatatcggatcccgggaggctaggtggaggctcagtgtgataagtctgcgatggtggatgcatgtgtcatggtcatagctgtttcctgtgtgaaattgttatccgctcagagggcacaatcctattccgcgctatccgacaatctccaagacattaggtggagttcagttcggcgtatggcatatgtcgctggaaagaacatgtgagcaaaaggccagcaaaaggccaggaaccgtaaaaaggccgcgttgctggcgtttttccataggctccgcccccctgacgagcatcacaaaaatcgacgctcaagtcagaggtggcgaaacccgacaggactataaagataccaggcgtttccccctggaagctccctcgtgcgctctcctgttccgaccctgccgcttaccggatacctgtccgcctttctcccttcgggaagcgtggcgctttctcatagctcacgctgtaggtatctcagttcggtgtaggtcgttcgctccaagctgggctgtgtgcacgaaccccccgttcagcccgaccgctgcgccttatccggtaactatcgtcttgagtccaacccggtaagacacgacttatcgccactggcagcagccactggtaacaggattagcagagcgaggtatgtaggcggtgctacagagttcttgaagtggtggcctaactacggctacactagaagaacagtatttggtatctgcgctctgctgaagccagttaccttcggaaaaagagttggtagctcttgatccggcaaacaaaccaccgctggtagcggtggtttttttgtttgcaagcagcagattacgcgcagaaaaaaaggatctcaagaagatcctttgatcttttctacggggtctgacgctctattcaacaaagccgccgtcccgtcaagtcagcgtaaatgggtagggggcttcaaatcgtcctcgtgataccaattcggagcctgcttttttgtacaaacttgttgataatggcaattcaaggatcttcacctagatccttttaaattaaaaatgaagttttaaatcaatctaaagtatatatgagtaaacttggtctgacagttaccaatgcttaatcagtgaggcacctatctcagcgatctgtctatttcgttcatccatagttgcctgactccccgtcgtgtagataactacgatacgggagggcttaccatctggccccagtgctgcaatgataccgcgagagccacgctcaccggctccagatttatcagcaataaaccagccagccggaagggccgagcgcagaagtggtcctgcaactttatccgcctccatccagtctattaattgttgccgggaagctagagtaagtagttcgccagttaatagtttgcgcaacgttgttgccattgctacaggcatcgtggtgtcacgctcgtcgtttggtatggcttcattcagctccggttcccaacgatcaaggcgagttacatgatcccccatgttgtgcaaaaaagcggttagctccttcggtcctccgatcgttgtcagaagtaagttggccgcagtgttatcactcatggttatggcagcactgcataattctcttactgtcatgccatccgtaagatgcttttctgtgactggtgagtactcaaccaagtcattctgagaatagtgtatgcggcgaccgagttgctcttgcccggcgtcaatacgggataataccgcgccacatagcagaactttaaaagtgctcatcattggaaaacgttcttcggggcgaaaactctcaaggatcttaccgctgttgagatccagttcgatgtaacccactcgtgcacccaactgatcttcagcatcttttactttcaccagcgtttctgggtgagcaaaaacaggaaggcaaaatgccgcaaaaaagggaataagggcgacacggaaatgttgaatactcatactcttcctttttcaatattattgaagcatttatcagggttattgtctcatgagcggatacatatttgaatgtatttagaaaaataaacaaataggggttccgcgcacatttccccgaaaagtgccagatacctgaaacaaaacccatcgtacggccaaggaagtctccaataactgtgatccaccacaagcgccagggttttcccagtcacgacgttgtaaaacgacggccagtcatgcataatccgcacgcatctggaataaggaagtgccattccgcctgaccttaatacgactcactatagggagaccctcgaaaacaaaccacaaaatccgtggctcgcagcaaacaccaaacaaaacaaacacaaaccaacaaaaagtggccacgcccgggccaccgatacttcccttcactccttcgggactgttggggaggaacacaacagggctcccctgttttcccattccttcccccttttcccaaccccaaccgccgtatctggtggcggcaagacacacgggtctttccctctaaagcacaattgtgtgtgtgtcccaggtcctcctgcgtacggtgcgggagtgctcccacccaactgttgtaagcctgtccaacgcgtcgtcctggcaagactatgacgtcgcatgttccgctgcggatgccgaccgggtaaccggttccccagtgtgtgtagtgcgatcttccaggtcctcctggttggcgttgtccagaaactgcttcaggtaagtggggtgtgcccaatccctacaaaggttgattctttcaccaccttaggaatgctccggaggtaccccagcaacagctgggatctgaccggaggctaattgtctacgggtggtgtttcctttttcttttcacacaactctactgcgtacaactcactgactatccacttgctctgtcacg

SEQ ID NO: 3634 - DNA, 3731 bp, synthetic construct
  source 1..3731: mol_type = other DNA; note = Anabaena L9a5, no IH, P2 Monotron
atgggagtgaaggtgctgttcgccctgatctgtattgccgtggccgaggccaagcctaccgagaacaacgaggacttcaacatcgtggccgtggcctccaatttcgccaccacagatctggacgccgacagaggaaagctgcccggcaagaagctgcctctggaagtgctgaaagagatggaagccaacgccagaaaggccggctgtaccagaggctgtctgatctgcctgagccacatcaagtgcacccctaagatgaagaagttcatccccggcagatgccacacctacgagggcgacaaagaatctgcccaaggcggaatcggagaggccatcgtggatatccctgagatccccggcttcaaggacctggaacctatggaacagtttatcgcccaggtggacctgtgcgtggactgtacaacaggctgcctgaaaggcctggccaacgtgcagtgtagcgacctgctgaagaagtggctgcctcagagatgcgccaccttcgcctctaagatccagggccaagtggacaagatcaaaggcgctggcggcgactaatagctaactagacaaaacaccaaacaaacaaacggacttaaataattgagccttaaagaagaaattctttaagtggatgctctcaaactcagggaaacctaaatctagttatagacaaggcaatcctgagccaagccgaagtagtaattagtaagttaacaatagatgacttacaactaatcggaaggtgcagagactcgacgggagctaccctaacgtcaagacgagggtaaagagagagtccaattctcaaagccaataggcagtagcgaaagctgcaagagaatgtcaacagtaagtctagatatcggatcccgggaggctaggtggaggctcagtgtgataagtctgcgatggtggatgcatgtgtcatggtcatagctgtttcctgtgtgaaattgttatccgctcagagggcacaatcctattccgcgctatccgacaatctccaagacattaggtggagttcagttcggcgtatggcatatgtcgctggaaagaacatgtgagcaaaaggccagcaaaaggccaggaaccgtaaaaaggccgcgttgctggcgtttttccataggctccgcccccctgacgagcatcacaaaaatcgacgctcaagtcagaggtggcgaaacccgacaggactataaagataccaggcgtttccccctggaagctccctcgtgcgctctcctgttccgaccctgccgcttaccggatacctgtccgcctttctcccttcgggaagcgtggcgctttctcatagctcacgctgtaggtatctcagttcggtgtaggtcgttcgctccaagctgggctgtgtgcacgaaccccccgttcagcccgaccgctgcgccttatccggtaactatcgtcttgagtccaacccggtaagacacgacttatcgccactggcagcagccactggtaacaggattagcagagcgaggtatgtaggcggtgctacagagttcttgaagtggtggcctaactacggctacactagaagaacagtatttggtatctgcgctctgctgaagccagttaccttcggaaaaagagttggtagctcttgatccggcaaacaaaccaccgctggtagcggtggtttttttgtttgcaagcagcagattacgcgcagaaaaaaaggatctcaagaagatcctttgatcttttctacggggtctgacgctctattcaacaaagccgccgtcccgtcaagtcagcgtaaatgggtagggggcttcaaatcgtcctcgtgataccaattcggagcctgcttttttgtacaaacttgttgataatggcaattcaaggatcttcacctagatccttttaaattaaaaatgaagttttaaatcaatctaaagtatatatgagtaaacttggtctgacagttaccaatgcttaatcagtgaggcacctatctcagcgatctgtctatttcgttcatccatagttgcctgactccccgtcgtgtagataactacgatacgggagggcttaccatctggccccagtgctgcaatgataccgcgagagccacgctcaccggctccagatttatcagcaataaaccagccagccggaagggccgagcgcagaagtggtcctgcaactttatccgcctccatccagtctattaattgttgccgggaagctagagtaagtagttcgccagttaatagtttgcgcaacgttgttgccattgctacaggcatcgtggtgtcacgctcgtcgtttggtatggcttcattcagctccggttcccaacgatcaaggcgagttacatgatcccccatgttgtgcaaaaaagcggttagctccttcggtcctccgatcgttgtcagaagtaagttggccgcagtgttatcactcatggttatggcagcactgcataattctcttactgtcatgccatccgtaagatgcttttctgtgactggtgagtactcaaccaagtcattctgagaatagtgtatgcggcgaccgagttgctcttgcccggcgtcaatacgggataataccgcgccacatagcagaactttaaaagtgctcatcattggaaaacgttcttcggggcgaaaactctcaaggatcttaccgctgttgagatccagttcgatgtaacccactcgtgcacccaactgatcttcagcatcttttactttcaccagcgtttctgggtgagcaaaaacaggaaggcaaaatgccgcaaaaaagggaataagggcgacacggaaatgttgaatactcatactcttcctttttcaatattattgaagcatttatcagggttattgtctcatgagcggatacatatttgaatgtatttagaaaaataaacaaataggggttccgcgcacatttccccgaaaagtgccagatacctgaaacaaaacccatcgtacggccaaggaagtctccaataactgtgatccaccacaagcgccagggttttcccagtcacgacgttgtaaaacgacggccagtcatgcataatccgcacgcatctggaataaggaagtgccattccgcctgaccttaatacgactcactatagggagaccctcgaaaacaaaccacaaaatccgtaaacaccaaacaaaacaaacacaaaccaacaaaaagtggccacgcccgggccaccgatacttcccttcactccttcgggactgttggggaggaacacaacagggctcccctgttttcccattccttcccccttttcccaaccccaaccgccgtatctggtggcggcaagacacacgggtctttccctctaaagcacaattgtgtgtgtgtcccaggtcctcctgcgtacggtgcgggagtgctcccacccaactgttgtaagcctgtccaacgcgtcgtcctggcaagactatgacgtcgcatgttccgctgcggatgccgaccgggtaaccggttccccagtgtgtgtagtgcgatcttccaggtcctcctggttggcgttgtccagaaactgcttcaggtaagtggggtgtgcccaatccctacaaaggttgattctttcaccaccttaggaatgctccggaggtaccccagcaacagctgggatctgaccggaggctaattgtctacgggtggtgtttcctttttcttttcacacaactctactgcgtacaactcactgactatccacttgctctgtcacg

SEQ ID NO: 3635 - DNA, 3885 bp, Coxiella sp.
  source 1..3885: mol_type = genomic DNA; note = Monotron
agagtaagtagttcgccagttaatagtttgcgcaacgttgttgccattgctacaggcatcgtggtgtcacgctcgtcgtttggtatggcttcattcagctccggttcccaacgatcaaggcgagttacatgatcccccatgttgtgcaaaaaagcggttagctccttcggtcctccgatcgttgtcagaagtaagttggccgcagtgttatcactcatggttatggcagcactgcataattctcttactgtcatgccatccgtaagatgcttttctgtgactggtgagtactcaaccaagtcattctgagaatagtgtatgcggcgaccgagttgctcttgcccggcgtcaatacgggataataccgcgccacatagcagaactttaaaagtgctcatcattggaaaacgttcttcggggcgaaaactctcaaggatcttaccgctgttgagatccagttcgatgtaacccactcgtgcacccaactgatcttcagcatcttttactttcaccagcgtttctgggtgagcaaaaacaggaaggcaaaatgccgcaaaaaagggaataagggcgacacggaaatgttgaatactcatactcttcctttttcaatattattgaagcatttatcagggttattgtctcatgagcggatacatatttgaatgtatttagaaaaataaacaaataggggttccgcgcacatttccccgaaaagtgccagatacctgaaacaaaacccatcgtacggccaaggaagtctccaataactgtgatccaccacaagcgccagggttttcccagtcacgacgttgtaaaacgacggccagtcatgcataatccgcacgcatctggaataaggaagtgccattccgcctgacctccaagctttaatacgactcactatagggagaccctcgaaaacaaaccacgtcgggtaaaaaattgctgcgagccaaacaccaaacaaaacaaacacaaaccaacaaaaagtggccacgcccgggccaccgatacttcccttcactccttcgggactgttggggaggaacacaacagggctcccctgttttcccattccttcccccttttcccaaccccaaccgccgtatctggtggcggcaagacacacgggtctttccctctaaagcacaattgtgtgtgtgtcccaggtcctcctgcgtacggtgcgggagtgctcccacccaactgttgtaagcctgtccaacgcgtcgtcctggcaagactatgacgtcgcatgttccgctgcggatgccgaccgggtaaccggttccccagtgtgtgtagtgcgatcttccaggtcctcctggttggcgttgtccagaaactgcttcaggtaagtggggtgtgcccaatccctacaaaggttgattctttcaccaccttaggaatgctccggaggtaccccagcaacagctgggatctgaccggaggctaattgtctacgggtggtgtttcctttttcttttcacacaactctactgcgtacaactcactgactatccacttgctctgtcacgatgggagtgaaggtgctgttcgccctgatctgtattgccgtggccgaggccaagcctaccgagaacaacgaggacttcaacatcgtggccgtggcctccaatttcgccaccacagatctggacgccgacagaggaaagctgcccggcaagaagctgcctctggaagtgctgaaagagatggaagccaacgccagaaaggccggctgtaccagaggctgtctgatctgcctgagccacatcaagtgcacccctaagatgaagaagttcatccccggcagatgccacacctacgagggcgacaaagaatctgcccaaggcggaatcggagaggccatcgtggatatccctgagatccccggcttcaaggacctggaacctatggaacagtttatcgcccaggtggacctgtgcgtggactgtacaacaggctgcctgaaaggcctggccaacgtgcagtgtagcgacctgctgaagaagtggctgcctcagagatgcgccaccttcgcctctaagatccagggccaagtggacaagatcaaaggcgctggcggcgactaatagctaactagacaaaacaccaaacaaacaagctgcgagcctggggttagccctcgggcgaagctcttgatcgaagccccggtaaacggcggccgtaactataaattaaccgttgtagttacgtaaataaacttggctatatgctggaaactccgagtatcctccagtactcatctcaactaaaattgaggtagtaaaaatctgcgaggtgcggacaatcagcaggaaagactaatctttttgattagaatcctcagagactaatacgccgagcgtacttagaaaaaatccattctaagtgtgatgatagagtccgatctctatagcgatatagagggttttcaaaagaaacctgttaatcattatcccatgattaacataacgtcaataaacggtcctaaggtagcgaaattcctttcaacagtaagtctagatatcggatcccgggaggctaggtggaggctcagtgatgataagtctgcgatggtggatgcatgtgtcatggtcatagctgtttcctgtgtgaaattgttatccgctcagagggcacaatcctattccgcgctatccgacaatctccaagacattaggtggagttcagttcggcgtatggcatatgtcgctggaaagaacatgtgagcaaaaggccagcaaaaggccaggaaccgtaaaaaggccgcgttgctggcgtttttccataggctccgcccccctgacgagcatcacaaaaatcgacgctcaagtcagaggtggcgaaacccgacaggactataaagataccaggcgtttccccctggaagctccctcgtgcgctctcctgttccgaccctgccgcttaccggatacctgtccgcctttctcccttcgggaagcgtggcgctttctcatagctcacgctgtaggtatctcagttcggtgtaggtcgttcgctccaagctgggctgtgtgcacgaaccccccgttcagcccgaccgctgcgccttatccggtaactatcgtcttgagtccaacccggtaagacacgacttatcgccactggcagcagccactggtaacaggattagcagagcgaggtatgtaggcggtgctacagagttcttgaagtggtggcctaactacggctacactagaagaacagtatttggtatctgcgctctgctgaagccagttaccttcggaaaaagagttggtagctcttgatccggcaaacaaaccaccgctggtagcggtggtttttttgtttgcaagcagcagattacgcgcagaaaaaaaggatctcaagaagatcctttgatcttttctacggggtctgacgctctattcaacaaagccgccgtcccgtcaagtcagcgtaaatgggtagggggcttcaaatcgtcctcgtgataccaattcggagcctgcttttttgtacaaacttgttgataatggcaattcaaggatcttcacctagatccttttaaattaaaaatgaagttttaaatcaatctaaagtatatatgagtaaacttggtctgacagttaccaatgcttaatcagtgaggcacctatctcagcgatctgtctatttcgttcatccatagttgcctgactccccgtcgtgtagataactacgatacgggagggcttaccatctggccccagtgctgcaatgataccgcgagagccacgctcaccggctccagatttatcagcaataaaccagccagccggaagggccgagcgcagaagtggtcctgcaactttatccgcctccatccagtctattaattgttgccgggaagct

SEQ ID NO: 3636 - DNA, 3885 bp, synthetic construct
  source 1..3885: mol_type = other DNA; note = Coxiella Monotron, Spacer CtoG
agagtaagtagttcgccagttaatagtttgcgcaacgttgttgccattgctacaggcatcgtggtgtcacgctcgtcgtttggtatggcttcattcagctccggttcccaacgatcaaggcgagttacatgatcccccatgttgtgcaaaaaagcggttagctccttcggtcctccgatcgttgtcagaagtaagttggccgcagtgttatcactcatggttatggcagcactgcataattctcttactgtcatgccatccgtaagatgcttttctgtgactggtgagtactcaaccaagtcattctgagaatagtgtatgcggcgaccgagttgctcttgcccggcgtcaatacgggataataccgcgccacatagcagaactttaaaagtgctcatcattggaaaacgttcttcggggcgaaaactctcaaggatcttaccgctgttgagatccagttcgatgtaacccactcgtgcacccaactgatcttcagcatcttttactttcaccagcgtttctgggtgagcaaaaacaggaaggcaaaatgccgcaaaaaagggaataagggcgacacggaaatgttgaatactcatactcttcctttttcaatattattgaagcatttatcagggttattgtctcatgagcggatacatatttgaatgtatttagaaaaataaacaaataggggttccgcgcacatttccccgaaaagtgccagatacctgaaacaaaacccatcgtacggccaaggaagtctccaataactgtgatccaccacaagcgccagggttttcccagtcacgacgttgtaaaacgacggccagtcatgcataatccgcacgcatctggaataaggaagtgccattccgcctgacctccaagctttaatacgactcactatagggagaccctcgaaaacaaaccaggtcgggtaaaaaattgctgcgagccaaacaccaaacaaaacaaacacaaaccaacaaaaagtggccacgcccgggccaccgatacttcccttcactccttcgggactgttggggaggaacacaacagggctcccctgttttcccattccttcccccttttcccaaccccaaccgccgtatctggtggcggcaagacacacgggtctttccctctaaagcacaattgtgtgtgtgtcccaggtcctcctgcgtacggtgcgggagtgctcccacccaactgttgtaagcctgtccaacgcgtcgtcctggcaagactatgacgtcgcatgttccgctgcggatgccgaccgggtaaccggttccccagtgtgtgtagtgcgatcttccaggtcctcctggttggcgttgtccagaaactgcttcaggtaagtggggtgtgcccaatccctacaaaggttgattctttcaccaccttaggaatgctccggaggtaccccagcaacagctgggatctgaccggaggctaattgtctacgggtggtgtttcctttttcttttcacacaactctactgcgtacaactcactgactatccacttgctctgtcacgatgggagtgaaggtgctgttcgccctgatctgtattgccgtggccgaggccaagcctaccgagaacaacgaggacttcaacatcgtggccgtggcctccaatttcgccaccacagatctggacgccgacagaggaaagctgcccggcaagaagctgcctctggaagtgctgaaagagatggaagccaacgccagaaaggccggctgtaccagaggctgtctgatctgcctgagccacatcaagtgcacccctaagatgaagaagttcatccccggcagatgccacacctacgagggcgacaaagaatctgcccaaggcggaatcggagaggccatcgtggatatccctgagatccccggcttcaaggacctggaacctatggaacagtttatcgcccaggtggacctgtgcgtggactgtacaacaggctgcctgaaaggcctggccaacgtgcagtgtagcgacctgctgaagaagtggctgcctcagagatgcgccaccttcgcctctaagatccagggccaagtggacaagatcaaaggcgctggcggcgactaatagctaactagacaaaacaccaaacaaacaagctgcgagcctggggttagccctcgggcgaagctcttgatcgaagccccggtaaacggcggccgtaactataaattaaccgttgtagttacgtaaataaacttggctatatgctggaaactccgagtatcctccagtactcatctcaactaaaattgaggtagtaaaaatctgcgaggtgcggacaatcagcaggaaagactaatctttttgattagaatcctcagagactaatacgccgagcgtacttagaaaaaatccattctaagtgtgatgatagagtccgatctctatagcgatatagagggttttcaaaagaaacctgttaatcattatcccatgattaacataacgtcaataaacggtcctaaggtagcgaaattcctttcaacagtaagtctagatatcggatcccgggaggctaggtggaggctcagtgatgataagtctgcgatggtggatgcatgtgtcatggtcatagctgtttcctgtgtgaaattgttatccgctcagagggcacaatcctattccgcgctatccgacaatctccaagacattaggtggagttcagttcggcgtatggcatatgtcgctggaaagaacatgtgagcaaaaggccagcaaaaggccaggaaccgtaaaaaggccgcgttgctggcgtttttccataggctccgcccccctgacgagcatcacaaaaatcgacgctcaagtcagaggtggcgaaacccgacaggactataaagataccaggcgtttccccctggaagctccctcgtgcgctctcctgttccgaccctgccgcttaccggatacctgtccgcctttctcccttcgggaagcgtggcgctttctcatagctcacgctgtaggtatctcagttcggtgtaggtcgttcgctccaagctgggctgtgtgcacgaaccccccgttcagcccgaccgctgcgccttatccggtaactatcgtcttgagtccaacccggtaagacacgacttatcgccactggcagcagccactggtaacaggattagcagagcgaggtatgtaggcggtgctacagagttcttgaagtggtggcctaactacggctacactagaagaacagtatttggtatctgcgctctgctgaagccagttaccttcggaaaaagagttggtagctcttgatccggcaaacaaaccaccgctggtagcggtggtttttttgtttgcaagcagcagattacgcgcagaaaaaaaggatctcaagaagatcctttgatcttttctacggggtctgacgctctattcaacaaagccgccgtcccgtcaagtcagcgtaaatgggtagggggcttcaaatcgtcctcgtgataccaattcggagcctgcttttttgtacaaacttgttgataatggcaattcaaggatcttcacctagatccttttaaattaaaaatgaagttttaaatcaatctaaagtatatatgagtaaacttggtctgacagttaccaatgcttaatcagtgaggcacctatctcagcgatctgtctatttcgttcatccatagttgcctgactccccgtcgtgtagataactacgatacgggagggcttaccatctggccccagtgctgcaatgataccgcgagagccacgctcaccggctccagatttatcagcaataaaccagccagccggaagggccgagcgcagaagtggtcctgcaactttatccgcctccatccagtctattaattgttgccgggaagct

SEQ ID NO: 3637 - DNA, 3885 bp, synthetic construct
  source 1..3885: mol_type = other DNA; note = Coxiella Monotron, Spacer CtoA
agagtaagtagttcgccagttaatagtttgcgcaacgttgttgccattgctacaggcatcgtggtgtcacgctcgtcgtttggtatggcttcattcagctccggttcccaacgatcaaggcgagttacatgatcccccatgttgtgcaaaaaagcggttagctccttcggtcctccgatcgttgtcagaagtaagttggccgcagtgttatcactcatggttatggcagcactgcataattctcttactgtcatgccatccgtaagatgcttttctgtgactggtgagtactcaaccaagtcattctgagaatagtgtatgcggcgaccgagttgctcttgcccggcgtcaatacgggataataccgcgccacatagcagaactttaaaagtgctcatcattggaaaacgttcttcggggcgaaaactctcaaggatcttaccgctgttgagatccagttcgatgtaacccactcgtgcacccaactgatcttcagcatcttttactttcaccagcgtttctgggtgagcaaaaacaggaaggcaaaatgccgcaaaaaagggaataagggcgacacggaaatgttgaatactcatactcttcctttttcaatattattgaagcatttatcagggttattgtctcatgagcggatacatatttgaatgtatttagaaaaataaacaaataggggttccgcgcacatttccccgaaaagtgccagatacctgaaacaaaacccatcgtacggccaaggaagtctccaataactgtgatccaccacaagcgccagggttttcccagtcacgacgttgtaaaacgacggccagtcatgcataatccgcacgcatctggaataaggaagtgccattccgcctgacctccaagctttaatacgactcactatagggagaccctcgaaaacaaaccaagtcgggtaaaaaattgctgcgagccaaacaccaaacaaaacaaacacaaaccaacaaaaagtggccacgcccgggccaccgatacttcccttcactccttcgggactgttggggaggaacacaacagggctcccctgttttcccattccttcccccttttcccaaccccaaccgccgtatctggtggcggcaagacacacgggtctttccctctaaagcacaattgtgtgtgtgtcccaggtcctcctgcgtacggtgcgggagtgctcccacccaactgttgtaagcctgtccaacgcgtcgtcctggcaagactatgacgtcgcatgttccgctgcggatgccgaccgggtaaccggttccccagtgtgtgtagtgcgatcttccaggtcctcctggttggcgttgtccagaaactgcttcaggtaagtggggtgtgcccaatccctacaaaggttgattctttcaccaccttaggaatgctccggaggtaccccagcaacagctgggatctgaccggaggctaattgtctacgggtggtgtttcctttttcttttcacacaactctactgcgtacaactcactgactatccacttgctctgtcacgatgggagtgaaggtgctgttcgccctgatctgtattgccgtggccgaggccaagcctaccgagaacaacgaggacttcaacatcgtggccgtggcctccaatttcgccaccacagatctggacgccgacagaggaaagctgcccggcaagaagctgcctctggaagtgctgaaagagatggaagccaacgccagaaaggccggctgtaccagaggctgtctgatctgcctgagccacatcaagtgcacccctaagatgaagaagttcatccccggcagatgccacacctacgagggcgacaaagaatctgcccaaggcggaatcggagaggccatcgtggatatccctgagatccccggcttcaaggacctggaacctatggaacagtttatcgcccaggtggacctgtgcgtggactgtacaacaggctgcctgaaaggcctggccaacgtgcagtgtagcgacctgctgaagaagtggctgcctcagagatgcgccaccttcgcctctaagatccagggccaagtggacaagatcaaaggcgctggcggcgactaatagctaactagacaaaacaccaaacaaacaagctgcgagcctggggttagccctcgggcgaagctcttgatcgaagccccggtaaacggcggccgtaactataaattaaccgttgtagttacgtaaataaacttggctatatgctggaaactccgagtatcctccagtactcatctcaactaaaattgaggtagtaaaaatctgcgaggtgcggacaatcagcaggaaagactaatctttttgattagaatcctcagagactaatacgccgagcgtacttagaaaaaatccattctaagtgtgatgatagagtccgatctctatagcgatatagagggttttcaaaagaaacctgttaatcattatcccatgattaacataacgtcaataaacggtcctaaggtagcgaaattcctttcaacagtaagtctagatatcggatcccgggaggctaggtggaggctcagtgatgataagtctgcgatggtggatgcatgtgtcatggtcatagctgtttcctgtgtgaaattgttatccgctcagagggcacaatcctattccgcgctatccgacaatctccaagacattaggtggagttcagttcggcgtatggcatatgtcgctggaaagaacatgtgagcaaaaggccagcaaaaggccaggaaccgtaaaaaggccgcgttgctggcgtttttccataggctccgcccccctgacgagcatcacaaaaatcgacgctcaagtcagaggtggcgaaacccgacaggactataaagataccaggcgtttccccctggaagctccctcgtgcgctctcctgttccgaccctgccgcttaccggatacctgtccgcctttctcccttcgggaagcgtggcgctttctcatagctcacgctgtaggtatctcagttcggtgtaggtcgttcgctccaagctgggctgtgtgcacgaaccccccgttcagcccgaccgctgcgccttatccggtaactatcgtcttgagtccaacccggtaagacacgacttatcgccactggcagcagccactggtaacaggattagcagagcgaggtatgtaggcggtgctacagagttcttgaagtggtggcctaactacggctacactagaagaacagtatttggtatctgcgctctgctgaagccagttaccttcggaaaaagagttggtagctcttgatccggcaaacaaaccaccgctggtagcggtggtttttttgtttgcaagcagcagattacgcgcagaaaaaaaggatctcaagaagatcctttgatcttttctacggggtctgacgctctattcaacaaagccgccgtcccgtcaagtcagcgtaaatgggtagggggcttcaaatcgtcctcgtgataccaattcggagcctgcttttttgtacaaacttgttgataatggcaattcaaggatcttcacctagatccttttaaattaaaaatgaagttttaaatcaatctaaagtatatatgagtaaacttggtctgacagttaccaatgcttaatcagtgaggcacctatctcagcgatctgtctatttcgttcatccatagttgcctgactccccgtcgtgtagataactacgatacgggagggcttaccatctggccccagtgctgcaatgataccgcgagagccacgctcaccggctccagatttatcagcaataaaccagccagccggaagggccgagcgcagaagtggtcctgcaactttatccgcctccatccagtctattaattgttgccgggaagct

SEQ ID NO: 3638 - DNA, 3885 bp, synthetic construct
  source 1..3885: mol_type = other DNA; note = Coxiella Monotron, Spacer CtoT
agagtaagtagttcgccagttaatagtttgcgcaacgttgttgccattgctacaggcatcgtggtgtcacgctcgtcgtttggtatggcttcattcagctccggttcccaacgatcaaggcgagttacatgatcccccatgttgtgcaaaaaagcggttagctccttcggtcctccgatcgttgtcagaagtaagttggccgcagtgttatcactcatggttatggcagcactgcataattctcttactgtcatgccatccgtaagatgcttttctgtgactggtgagtactcaaccaagtcattctgagaatagtgtatgcggcgaccgagttgctcttgcccggcgtcaatacgggataataccgcgccacatagcagaactttaaaagtgctcatcattggaaaacgttcttcggggcgaaaactctcaaggatcttaccgctgttgagatccagttcgatgtaacccactcgtgcacccaactgatcttcagcatcttttactttcaccagcgtttctgggtgagcaaaaacaggaaggcaaaatgccgcaaaaaagggaataagggcgacacggaaatgttgaatactcatactcttcctttttcaatattattgaagcatttatcagggttattgtctcatgagcggatacatatttgaatgtatttagaaaaataaacaaataggggttccgcgcacatttccccgaaaagtgccagatacctgaaacaaaacccatcgtacggccaaggaagtctccaataactgtgatccaccacaagcgccagggttttcccagtcacgacgttgtaaaacgacggccagtcatgcataatccgcacgcatctggaataaggaagtgccattccgcctgacctccaagctttaatacgactcactatagggagaccctcgaaaacaaaccatgtcgggtaaaaaattgctgcgagccaaacaccaaacaaaacaaacacaaaccaacaaaaagtggccacgcccgggccaccgatacttcccttcactccttcgggactgttggggaggaacacaacagggctcccctgttttcccattccttcccccttttcccaaccccaaccgccgtatctggtggcggcaagacacacgggtctttccctctaaagcacaattgtgtgtgtgtcccaggtcctcctgcgtacggtgcgggagtgctcccacccaactgttgtaagcctgtccaacgcgtcgtcctggcaagactatgacgtcgcatgttccgctgcggatgccgaccgggtaaccggttccccagtgtgtgtagtgcgatcttccaggtcctcctggttggcgttgtccagaaactgcttcaggtaagtggggtgtgcccaatccctacaaaggttgattctttcaccaccttaggaatgctccggaggtaccccagcaacagctgggatctgaccggaggctaattgtctacgggtggtgtttcctttttcttttcacacaactctactgcgtacaactcactgactatccacttgctctgtcacgatgggagtgaaggtgctgttcgccctgatctgtattgccgtggccgaggccaagcctaccgagaacaacgaggacttcaacatcgtggccgtggcctccaatttcgccaccacagatctggacgccgacagaggaaagctgcccggcaagaagctgcctctggaagtgctgaaagagatggaagccaacgccagaaaggccggctgtaccagaggctgtctgatctgcctgagccacatcaagtgcacccctaagatgaagaagttcatccccggcagatgccacacctacgagggcgacaaagaatctgcccaaggcggaatcggagaggccatcgtggatatccctgagatccccggcttcaaggacctggaacctatggaacagtttatcgcccaggtggacctgtgcgtggactgtacaacaggctgcctgaaaggcctggccaacgtgcagtgtagcgacctgctgaagaagtggctgcctcagagatgcgccaccttcgcctctaagatccagggccaagtggacaagatcaaaggcgctggcggcgactaatagctaactagacaaaacaccaaacaaacaagctgcgagcctggggttagccctcgggcgaagctcttgatcgaagccccggtaaacggcggccgtaactataaattaaccgttgtagttacgtaaataaacttggctatatgctggaaactccgagtatcctccagtactcatctcaactaaaattgaggtagtaaaaatctgcgaggtgcggacaatcagcaggaaagactaatctttttgattagaatcctcagagactaatacgccgagcgtacttagaaaaaatccattctaagtgtgatgatagagtccgatctctatagcgatatagagggttttcaaaagaaacctgttaatcattatcccatgattaacataacgtcaataaacggtcctaaggtagcgaaattcctttcaacagtaagtctagatatcggatcccgggaggctaggtggaggctcagtgatgataagtctgcgatggtggatgcatgtgtcatggtcatagctgtttcctgtgtgaaattgttatccgctcagagggcacaatcctattccgcgctatccgacaatctccaagacattaggtggagttcagttcggcgtatggcatatgtcgctggaaagaacatgtgagcaaaaggccagcaaaaggccaggaaccgtaaaaaggccgcgttgctggcgtttttccataggctccgcccccctgacgagcatcacaaaaatcgacgctcaagtcagaggtggcgaaacccgacaggactataaagataccaggcgtttccccctggaagctccctcgtgcgctctcctgttccgaccctgccgcttaccggatacctgtccgcctttctcccttcgggaagcgtggcgctttctcatagctcacgctgtaggtatctcagttcggtgtaggtcgttcgctccaagctgggctgtgtgcacgaaccccccgttcagcccgaccgctgcgccttatccggtaactatcgtcttgagtccaacccggtaagacacgacttatcgccactggcagcagccactggtaacaggattagcagagcgaggtatgtaggcggtgctacagagttcttgaagtggtggcctaactacggctacactagaagaacagtatttggtatctgcgctctgctgaagccagttaccttcggaaaaagagttggtagctcttgatccggcaaacaaaccaccgctggtagcggtggtttttttgtttgcaagcagcagattacgcgcagaaaaaaaggatctcaagaagatcctttgatcttttctacggggtctgacgctctattcaacaaagccgccgtcccgtcaagtcagcgtaaatgggtagggggcttcaaatcgtcctcgtgataccaattcggagcctgcttttttgtacaaacttgttgataatggcaattcaaggatcttcacctagatccttttaaattaaaaatgaagttttaaatcaatctaaagtatatatgagtaaacttggtctgacagttaccaatgcttaatcagtgaggcacctatctcagcgatctgtctatttcgttcatccatagttgcctgactccccgtcgtgtagataactacgatacgggagggcttaccatctggccccagtgctgcaatgataccgcgagagccacgctcaccggctccagatttatcagcaataaaccagccagccggaagggccgagcgcagaagtggtcctgcaactttatccgcctccatccagtctattaattgttgccgggaagct

SEQ ID NO: 3639 - DNA, 3885 bp, synthetic construct
  source 1..3885: mol_type = other DNA; note = Coxiella Monotron, Exon GtoC
agagtaagtagttcgccagttaatagtttgcgcaacgttgttgccattgctacaggcatcgtggtgtcacgctcgtcgtttggtatggcttcattcagctccggttcccaacgatcaaggcgagttacatgatcccccatgttgtgcaaaaaagcggttagctccttcggtcctccgatcgttgtcagaagtaagttggccgcagtgttatcactcatggttatggcagcactgcataattctcttactgtcatgccatccgtaagatgcttttctgtgactggtgagtactcaaccaagtcattctgagaatagtgtatgcggcgaccgagttgctcttgcccggcgtcaatacgggataataccgcgccacatagcagaactttaaaagtgctcatcattggaaaacgttcttcggggcgaaaactctcaaggatcttaccgctgttgagatccagttcgatgtaacccactcgtgcacccaactgatcttcagcatcttttactttcaccagcgtttctgggtgagcaaaaacaggaaggcaaaatgccgcaaaaaagggaataagggcgacacggaaatgttgaatactcatactcttcctttttcaatattattgaagcatttatcagggttattgtctcatgagcggatacatatttgaatgtatttagaaaaataaacaaataggggttccgcgcacatttccccgaaaagtgccagatacctgaaacaaaacccatcgtacggccaaggaagtctccaataactgtgatccaccacaagcgccagggttttcccagtcacgacgttgtaaaacgacggccagtcatgcataatccgcacgcatctggaataaggaagtgccattccgcctgacctccaagctttaatacgactcactatagggagaccctcgaaaacaaaccacctcgggtaaaaaattgctgcgagccaaacaccaaacaaaacaaacacaaaccaacaaaaagtggccacgcccgggccaccgatacttcccttcactccttcgggactgttggggaggaacacaacagggctcccctgttttcccattccttcccccttttcccaaccccaaccgccgtatctggtggcggcaagacacacgggtctttccctctaaagcacaattgtgtgtgtgtcccaggtcctcctgcgtacggtgcgggagtgctcccacccaactgttgtaagcctgtccaacgcgtcgtcctggcaagactatgacgtcgcatgttccgctgcggatgccgaccgggtaaccggttccccagtgtgtgtagtgcgatcttccaggtcctcctggttggcgttgtccagaaactgcttcaggtaagtggggtgtgcccaatccctacaaaggttgattctttcaccaccttaggaatgctccggaggtaccccagcaacagctgggatctgaccggaggctaattgtctacgggtggtgtttcctttttcttttcacacaactctactgcgtacaactcactgactatccacttgctctgtcacgatgggagtgaaggtgctgttcgccctgatctgtattgccgtggccgaggccaagcctaccgagaacaacgaggacttcaacatcgtggccgtggcctccaatttcgccaccacagatctggacgccgacagaggaaagctgcccggcaagaagctgcctctggaagtgctgaaagagatggaagccaacgccagaaaggccggctgtaccagaggctgtctgatctgcctgagccacatcaagtgcacccctaagatgaagaagttcatccccggcagatgccacacctacgagggcgacaaagaatctgcccaaggcggaatcggagaggccatcgtggatatccctgagatccccggcttcaaggacctggaacctatggaacagtttatcgcccaggtggacctgtgcgtggactgtacaacaggctgcctgaaaggcctggccaacgtgcagtgtagcgacctgctgaagaagtggctgcctcagagatgcgccaccttcgcctctaagatccagggccaagtggacaagatcaaaggcgctggcggcgactaatagctaactagacaaaacaccaaacaaacaagctgcgagcctggggttagccctcgggcgaagctcttgatcgaagccccggtaaacggcggccgtaactataaattaaccgttgtagttacgtaaataaacttggctatatgctggaaactccgagtatcctccagtactcatctcaactaaaattgaggtagtaaaaatctgcgaggtgcggacaatcagcaggaaagactaatctttttgattagaatcctcagagactaatacgccgagcgtacttagaaaaaatccattctaagtgtgatgatagagtccgatctctatagcgatatagagggttttcaaaagaaacctgttaatcattatcccatgattaacataacgtcaataaacggtcctaaggtagcgaaattcctttcaacagtaagtctagatatcggatcccgggaggctaggtggaggctcagtgatgataagtctgcgatggtggatgcatgtgtcatggtcatagctgtttcctgtgtgaaattgttatccgctcagagggcacaatcctattccgcgctatccgacaatctccaagacattaggtggagttcagttcggcgtatggcatatgtcgctggaaagaacatgtgagcaaaaggccagcaaaaggccaggaaccgtaaaaaggccgcgttgctggcgtttttccataggctccgcccccctgacgagcatcacaaaaatcgacgctcaagtcagaggtggcgaaacccgacaggactataaagataccaggcgtttccccctggaagctccctcgtgcgctctcctgttccgaccctgccgcttaccggatacctgtccgcctttctcccttcgggaagcgtggcgctttctcatagctcacgctgtaggtatctcagttcggtgtaggtcgttcgctccaagctgggctgtgtgcacgaaccccccgttcagcccgaccgctgcgccttatccggtaactatcgtcttgagtccaacccggtaagacacgacttatcgccactggcagcagccactggtaacaggattagcagagcgaggtatgtaggcggtgctacagagttcttgaagtggtggcctaactacggctacactagaagaacagtatttggtatctgcgctctgctgaagccagttaccttcggaaaaagagttggtagctcttgatccggcaaacaaaccaccgctggtagcggtggtttttttgtttgcaagcagcagattacgcgcagaaaaaaaggatctcaagaagatcctttgatcttttctacggggtctgacgctctattcaacaaagccgccgtcccgtcaagtcagcgtaaatgggtagggggcttcaaatcgtcctcgtgataccaattcggagcctgcttttttgtacaaacttgttgataatggcaattcaaggatcttcacctagatccttttaaattaaaaatgaagttttaaatcaatctaaagtatatatgagtaaacttggtctgacagttaccaatgcttaatcagtgaggcacctatctcagcgatctgtctatttcgttcatccatagttgcctgactccccgtcgtgtagataactacgatacgggagggcttaccatctggccccagtgctgcaatgataccgcgagagccacgctcaccggctccagatttatcagcaataaaccagccagccggaagggccgagcgcagaagtggtcctgcaactttatccgcctccatccagtctattaattgttgccgggaagct

SEQ ID NO: 3640 - DNA, 3885 bp, synthetic construct
  source 1..3885: mol_type = other DNA; note = Coxiella Monotron, Exon GtoA
agagtaagtagttcgccagttaatagtttgcgcaacgttgttgccattgctacaggcatcgtggtgtcacgctcgtcgtttggtatggcttcattcagctccggttcccaacgatcaaggcgagttacatgatcccccatgttgtgcaaaaaagcggttagctccttcggtcctccgatcgttgtcagaagtaagttggccgcagtgttatcactcatggttatggcagcactgcataattctcttactgtcatgccatccgtaagatgcttttctgtgactggtgagtactcaaccaagtcattctgagaatagtgtatgcggcgaccgagttgctcttgcccggcgtcaatacgggataataccgcgccacatagcagaactttaaaagtgctcatcattggaaaacgttcttcggggcgaaaactctcaaggatcttaccgctgttgagatccagttcgatgtaacccactcgtgcacccaactgatcttcagcatcttttactttcaccagcgtttctgggtgagcaaaaacaggaaggcaaaatgccgcaaaaaagggaataagggcgacacggaaatgttgaatactcatactcttcctttttcaatattattgaagcatttatcagggttattgtctcatgagcggatacatatttgaatgtatttagaaaaataaacaaataggggttccgcgcacatttccccgaaaagtgccagatacctgaaacaaaacccatcgtacggccaaggaagtctccaataactgtgatccaccacaagcgccagggttttcccagtcacgacgttgtaaaacgacggccagtcatgcataatccgcacgcatctggaataaggaagtgccattccgcctgacctccaagctttaatacgactcactatagggagaccctcgaaaacaaaccacatcgggtaaaaaattgctgcgagccaaacaccaaacaaaacaaacacaaaccaacaaaaagtggccacgcccgggccaccgatacttcccttcactccttcgggactgttggggaggaacacaacagggctcccctgttttcccattccttcccccttttcccaaccccaaccgccgtatctggtggcggcaagacacacgggtctttccctctaaagcacaattgtgtgtgtgtcccaggtcctcctgcgtacggtgcgggagtgctcccacccaactgttgtaagcctgtccaacgcgtcgtcctggcaagactatgacgtcgcatgttccgctgcggatgccgaccgggtaaccggttccccagtgtgtgtagtgcgatcttccaggtcctcctggttggcgttgtccagaaactgcttcaggtaagtggggtgtgcccaatccctacaaaggttgattctttcaccaccttaggaatgctccggaggtaccccagcaacagctgggatctgaccggaggctaattgtctacgggtggtgtttcctttttcttttcacacaactctactgcgtacaactcactgactatccacttgctctgtcacgatgggagtgaaggtgctgttcgccctgatctgtattgccgtggccgaggccaagcctaccgagaacaacgaggacttcaacatcgtggccgtggcctccaatttcgccaccacagatctggacgccgacagaggaaagctgcccggcaagaagctgcctctggaagtgctgaaagagatggaagccaacgccagaaaggccggctgtaccagaggctgtctgatctgcctgagccacatcaagtgcacccctaagatgaagaagttcatccccggcagatgccacacctacgagggcgacaaagaatctgcccaaggcggaatcggagaggccatcgtggatatccctgagatccccggcttcaaggacctggaacctatggaacagtttatcgcccaggtggacctgtgcgtggactgtacaacaggctgcctgaaaggcctggccaacgtgcagtgtagcgacctgctgaagaagtggctgcctcagagatgcgccaccttcgcctctaagatccagggccaagtggacaagatcaaaggcgctggcggcgactaatagctaactagacaaaacaccaaacaaacaagctgcgagcctggggttagccctcgggcgaagctcttgatcgaagccccggtaaacggcggccgtaactataaattaaccgttgtagttacgtaaataaacttggctatatgctggaaactccgagtatcctccagtactcatctcaactaaaattgaggtagtaaaaatctgcgaggtgcggacaatcagcaggaaagactaatctttttgattagaatcctcagagactaatacgccgagcgtacttagaaaaaatccattctaagtgtgatgatagagtccgatctctatagcgatatagagggttttcaaaagaaacctgttaatcattatcccatgattaacataacgtcaataaacggtcctaaggtagcgaaattcctttcaacagtaagtctagatatcggatcccgggaggctaggtggaggctcagtgatgataagtctgcgatggtggatgcatgtgtcatggtcatagctgtttcctgtgtgaaattgttatccgctcagagggcacaatcctattccgcgctatccgacaatctccaagacattaggtggagttcagttcggcgtatggcatatgtcgctggaaagaacatgtgagcaaaaggccagcaaaaggccaggaaccgtaaaaaggccgcgttgctggcgtttttccataggctccgcccccctgacgagcatcacaaaaatcgacgctcaagtcagaggtggcgaaacccgacaggactataaagataccaggcgtttccccctggaagctccctcgtgcgctctcctgttccgaccctgccgcttaccggatacctgtccgcctttctcccttcgggaagcgtggcgctttctcatagctcacgctgtaggtatctcagttcggtgtaggtcgttcgctccaagctgggctgtgtgcacgaaccccccgttcagcccgaccgctgcgccttatccggtaactatcgtcttgagtccaacccggtaagacacgacttatcgccactggcagcagccactggtaacaggattagcagagcgaggtatgtaggcggtgctacagagttcttgaagtggtggcctaactacggctacactagaagaacagtatttggtatctgcgctctgctgaagccagttaccttcggaaaaagagttggtagctcttgatccggcaaacaaaccaccgctggtagcggtggtttttttgtttgcaagcagcagattacgcgcagaaaaaaaggatctcaagaagatcctttgatcttttctacggggtctgacgctctattcaacaaagccgccgtcccgtcaagtcagcgtaaatgggtagggggcttcaaatcgtcctcgtgataccaattcggagcctgcttttttgtacaaacttgttgataatggcaattcaaggatcttcacctagatccttttaaattaaaaatgaagttttaaatcaatctaaagtatatatgagtaaacttggtctgacagttaccaatgcttaatcagtgaggcacctatctcagcgatctgtctatttcgttcatccatagttgcctgactccccgtcgtgtagataactacgatacgggagggcttaccatctggccccagtgctgcaatgataccgcgagagccacgctcaccggctccagatttatcagcaataaaccagccagccggaagggccgagcgcagaagtggtcctgcaactttatccgcctccatccagtctattaattgttgccgggaagct

SEQ ID NO: 3641 - DNA, 3885 bp, synthetic construct
  source 1..3885: mol_type = other DNA; note = Coxiella Monotron, Exon GtoT
agagtaagtagttcgccagttaatagtttgcgcaacgttgttgccattgctacaggcatcgtggtgtcacgctcgtcgtttggtatggcttcattcagctccggttcccaacgatcaaggcgagttacatgatcccccatgttgtgcaaaaaagcggttagctccttcggtcctccgatcgttgtcagaagtaagttggccgcagtgttatcactcatggttatggcagcactgcataattctcttactgtcatgccatccgtaagatgcttttctgtgactggtgagtactcaaccaagtcattctgagaatagtgtatgcggcgaccgagttgctcttgcccggcgtcaatacgggataataccgcgccacatagcagaactttaaaagtgctcatcattggaaaacgttcttcggggcgaaaactctcaaggatcttaccgctgttgagatccagttcgatgtaacccactcgtgcacccaactgatcttcagcatcttttactttcaccagcgtttctgggtgagcaaaaacaggaaggcaaaatgccgcaaaaaagggaataagggcgacacggaaatgttgaatactcatactcttcctttttcaatattattgaagcatttatcagggttattgtctcatgagcggatacatatttgaatgtatttagaaaaataaacaaataggggttccgcgcacatttccccgaaaagtgccagatacctgaaacaaaacccatcgtacggccaaggaagtctccaataactgtgatccaccacaagcgccagggttttcccagtcacgacgttgtaaaacgacggccagtcatgcataatccgcacgcatctggaataaggaagtgccattccgcctgacctccaagctttaatacgactcactatagggagaccctcgaaaacaaaccacttcgggtaaaaaattgctgcgagccaaacaccaaacaaaacaaacacaaaccaacaaaaagtggccacgcccgggccaccgatacttcccttcactccttcgggactgttggggaggaacacaacagggctcccctgttttcccattccttcccccttttcccaaccccaaccgccgtatctggtggcggcaagacacacgggtctttccctctaaagcacaattgtgtgtgtgtcccaggtcctcctgcgtacggtgcgggagtgctcccacccaactgttgtaagcctgtccaacgcgtcgtcctggcaagactatgacgtcgcatgttccgctgcggatgccgaccgggtaaccggttccccagtgtgtgtagtgcgatcttccaggtcctcctggttggcgttgtccagaaactgcttcaggtaagtggggtgtgcccaatccctacaaaggttgattctttcaccaccttaggaatgctccggaggtaccccagcaacagctgggatctgaccggaggctaattgtctacgggtggtgtttcctttttcttttcacacaactctactgcgtacaactcactgactatccacttgctctgtcacgatgggagtgaaggtgctgttcgccctgatctgtattgccgtggccgaggccaagcctaccgagaacaacgaggacttcaacatcgtggccgtggcctccaatttcgccaccacagatctggacgccgacagaggaaagctgcccggcaagaagctgcctctggaagtgctgaaagagatggaagccaacgccagaaaggccggctgtaccagaggctgtctgatctgcctgagccacatcaagtgcacccctaagatgaagaagttcatccccggcagatgccacacctacgagggcgacaaagaatctgcccaaggcggaatcggagaggccatcgtggatatccctgagatccccggcttcaaggacctggaacctatggaacagtttatcgcccaggtggacctgtgcgtggactgtacaacaggctgcctgaaaggcctggccaacgtgcagtgtagcgacctgctgaagaagtggctgcctcagagatgcgccaccttcgcctctaagatccagggccaagtggacaagatcaaaggcgctggcggcgactaatagctaactagacaaaacaccaaacaaacaagctgcgagcctggggttagccctcgggcgaagctcttgatcgaagccccggtaaacggcggccgtaactataaattaaccgttgtagttacgtaaataaacttggctatatgctggaaactccgagtatcctccagtactcatctcaactaaaattgaggtagtaaaaatctgcgaggtgcggacaatcagcaggaaagactaatctttttgattagaatcctcagagactaatacgccgagcgtacttagaaaaaatccattctaagtgtgatgatagagtccgatctctatagcgatatagagggttttcaaaagaaacctgttaatcattatcccatgattaacataacgtcaataaacggtcctaaggtagcgaaattcctttcaacagtaagtctagatatcggatcccgggaggctaggtggaggctcagtgatgataagtctgcgatggtggatgcatgtgtcatggtcatagctgtttcctgtgtgaaattgttatccgctcagagggcacaatcctattccgcgctatccgacaatctccaagacattaggtggagttcagttcggcgtatggcatatgtcgctggaaagaacatgtgagcaaaaggccagcaaaaggccaggaaccgtaaaaaggccgcgttgctggcgtttttccataggctccgcccccctgacgagcatcacaaaaatcgacgctcaagtcagaggtggcgaaacccgacaggactataaagataccaggcgtttccccctggaagctccctcgtgcgctctcctgttccgaccctgccgcttaccggatacctgtccgcctttctcccttcgggaagcgtggcgctttctcatagctcacgctgtaggtatctcagttcggtgtaggtcgttcgctccaagctgggctgtgtgcacgaaccccccgttcagcccgaccgctgcgccttatccggtaactatcgtcttgagtccaacccggtaagacacgacttatcgccactggcagcagccactggtaacaggattagcagagcgaggtatgtaggcggtgctacagagttcttgaagtggtggcctaactacggctacactagaagaacagtatttggtatctgcgctctgctgaagccagttaccttcggaaaaagagttggtagctcttgatccggcaaacaaaccaccgctggtagcggtggtttttttgtttgcaagcagcagattacgcgcagaaaaaaaggatctcaagaagatcctttgatcttttctacggggtctgacgctctattcaacaaagccgccgtcccgtcaagtcagcgtaaatgggtagggggcttcaaatcgtcctcgtgataccaattcggagcctgcttttttgtacaaacttgttgataatggcaattcaaggatcttcacctagatccttttaaattaaaaatgaagttttaaatcaatctaaagtatatatgagtaaacttggtctgacagttaccaatgcttaatcagtgaggcacctatctcagcgatctgtctatttcgttcatccatagttgcctgactccccgtcgtgtagataactacgatacgggagggcttaccatctggccccagtgctgcaatgataccgcgagagccacgctcaccggctccagatttatcagcaataaaccagccagccggaagggccgagcgcagaagtggtcctgcaactttatccgcctccatccagtctattaattgttgccgggaagct

SEQ ID NO: 3642 - DNA, 3884 bp, synthetic construct
  source 1..3884: mol_type = other DNA; note = Coxiella Monotron, P1 exon min1
agagtaagtagttcgccagttaatagtttgcgcaacgttgttgccattgctacaggcatcgtggtgtcacgctcgtcgtttggtatggcttcattcagctccggttcccaacgatcaaggcgagttacatgatcccccatgttgtgcaaaaaagcggttagctccttcggtcctccgatcgttgtcagaagtaagttggccgcagtgttatcactcatggttatggcagcactgcataattctcttactgtcatgccatccgtaagatgcttttctgtgactggtgagtactcaaccaagtcattctgagaatagtgtatgcggcgaccgagttgctcttgcccggcgtcaatacgggataataccgcgccacatagcagaactttaaaagtgctcatcattggaaaacgttcttcggggcgaaaactctcaaggatcttaccgctgttgagatccagttcgatgtaacccactcgtgcacccaactgatcttcagcatcttttactttcaccagcgtttctgggtgagcaaaaacaggaaggcaaaatgccgcaaaaaagggaataagggcgacacggaaatgttgaatactcatactcttcctttttcaatattattgaagcatttatcagggttattgtctcatgagcggatacatatttgaatgtatttagaaaaataaacaaataggggttccgcgcacatttccccgaaaagtgccagatacctgaaacaaaacccatcgtacggccaaggaagtctccaataactgtgatccaccacaagcgccagggttttcccagtcacgacgttgtaaaacgacggccagtcatgcataatccgcacgcatctggaataaggaagtgccattccgcctgacctccaagctttaatacgactcactatagggagaccctcgaaaacaaaccactcgggtaaaaaattgctgcgagccaaacaccaaacaaaacaaacacaaaccaacaaaaagtggccacgcccgggccaccgatacttcccttcactccttcgggactgttggggaggaacacaacagggctcccctgttttcccattccttcccccttttcccaaccccaaccgccgtatctggtggcggcaagacacacgggtctttccctctaaagcacaattgtgtgtgtgtcccaggtcctcctgcgtacggtgcgggagtgctcccacccaactgttgtaagcctgtccaacgcgtcgtcctggcaagactatgacgtcgcatgttccgctgcggatgccgaccgggtaaccggttccccagtgtgtgtagtgcgatcttccaggtcctcctggttggcgttgtccagaaactgcttcaggtaagtggggtgtgcccaatccctacaaaggttgattctttcaccaccttaggaatgctccggaggtaccccagcaacagctgggatctgaccggaggctaattgtctacgggtggtgtttcctttttcttttcacacaactctactgcgtacaactcactgactatccacttgctctgtcacgatgggagtgaaggtgctgttcgccctgatctgtattgccgtggccgaggccaagcctaccgagaacaacgaggacttcaacatcgtggccgtggcctccaatttcgccaccacagatctggacgccgacagaggaaagctgcccggcaagaagctgcctctggaagtgctgaaagagatggaagccaacgccagaaaggccggctgtaccagaggctgtctgatctgcctgagccacatcaagtgcacccctaagatgaagaagttcatccccggcagatgccacacctacgagggcgacaaagaatctgcccaaggcggaatcggagaggccatcgtggatatccctgagatccccggcttcaaggacctggaacctatggaacagtttatcgcccaggtggacctgtgcgtggactgtacaacaggctgcctgaaaggcctggccaacgtgcagtgtagcgacctgctgaagaagtggctgcctcagagatgcgccaccttcgcctctaagatccagggccaagtggacaagatcaaaggcgctggcggcgactaatagctaactagacaaaacaccaaacaaacaagctgcgagcctggggttagccctcgggcgaagctcttgatcgaagccccggtaaacggcggccgtaactataaattaaccgttgtagttacgtaaataaacttggctatatgctggaaactccgagtatcctccagtactcatctcaactaaaattgaggtagtaaaaatctgcgaggtgcggacaatcagcaggaaagactaatctttttgattagaatcctcagagactaatacgccgagcgtacttagaaaaaatccattctaagtgtgatgatagagtccgatctctatagcgatatagagggttttcaaaagaaacctgttaatcattatcccatgattaacataacgtcaataaacggtcctaaggtagcgaaattcctttcaacagtaagtctagatatcggatcccgggaggctaggtggaggctcagtgatgataagtctgcgatggtggatgcatgtgtcatggtcatagctgtttcctgtgtgaaattgttatccgctcagagggcacaatcctattccgcgctatccgacaatctccaagacattaggtggagttcagttcggcgtatggcatatgtcgctggaaagaacatgtgagcaaaaggccagcaaaaggccaggaaccgtaaaaaggccgcgttgctggcgtttttccataggctccgcccccctgacgagcatcacaaaaatcgacgctcaagtcagaggtggcgaaacccgacaggactataaagataccaggcgtttccccctggaagctccctcgtgcgctctcctgttccgaccctgccgcttaccggatacctgtccgcctttctcccttcgggaagcgtggcgctttctcatagctcacgctgtaggtatctcagttcggtgtaggtcgttcgctccaagctgggctgtgtgcacgaaccccccgttcagcccgaccgctgcgccttatccggtaactatcgtcttgagtccaacccggtaagacacgacttatcgccactggcagcagccactggtaacaggattagcagagcgaggtatgtaggcggtgctacagagttcttgaagtggtggcctaactacggctacactagaagaacagtatttggtatctgcgctctgctgaagccagttaccttcggaaaaagagttggtagctcttgatccggcaaacaaaccaccgctggtagcggtggtttttttgtttgcaagcagcagattacgcgcagaaaaaaaggatctcaagaagatcctttgatcttttctacggggtctgacgctctattcaacaaagccgccgtcccgtcaagtcagcgtaaatgggtagggggcttcaaatcgtcctcgtgataccaattcggagcctgcttttttgtacaaacttgttgataatggcaattcaaggatcttcacctagatccttttaaattaaaaatgaagttttaaatcaatctaaagtatatatgagtaaacttggtctgacagttaccaatgcttaatcagtgaggcacctatctcagcgatctgtctatttcgttcatccatagttgcctgactccccgtcgtgtagataactacgatacgggagggcttaccatctggccccagtgctgcaatgataccgcgagagccacgctcaccggctccagatttatcagcaataaaccagccagccggaagggccgagcgcagaagtggtcctgcaactttatccgcctccatccagtctattaattgttgccgggaagct

SEQ ID NO: 3643 - DNA, 3883 bp, synthetic construct
  source 1..3883: mol_type = other DNA; note = Coxiella Monotron, P1 exon min2
agagtaagtagttcgccagttaatagtttgcgcaacgttgttgccattgctacaggcatcgtggtgtcacgctcgtcgtttggtatggcttcattcagctccggttcccaacgatcaaggcgagttacatgatcccccatgttgtgcaaaaaagcggttagctccttcggtcctccgatcgttgtcagaagtaagttggccgcagtgttatcactcatggttatggcagcactgcataattctcttactgtcatgccatccgtaagatgcttttctgtgactggtgagtactcaaccaagtcattctgagaatagtgtatgcggcgaccgagttgctcttgcccggcgtcaatacgggataataccgcgccacatagcagaactttaaaagtgctcatcattggaaaacgttcttcggggcgaaaactctcaaggatcttaccgctgttgagatccagttcgatgtaacccactcgtgcacccaactgatcttcagcatcttttactttcaccagcgtttctgggtgagcaaaaacaggaaggcaaaatgccgcaaaaaagggaataagggcgacacggaaatgttgaatactcatactcttcctttttcaatattattgaagcatttatcagggttattgtctcatgagcggatacatatttgaatgtatttagaaaaataaacaaataggggttccgcgcacatttccccgaaaagtgccagatacctgaaacaaaacccatcgtacggccaaggaagtctccaataactgtgatccaccacaagcgccagggttttcccagtcacgacgttgtaaaacgacggccagtcatgcataatccgcacgcatctggaataaggaagtgccattccgcctgacctccaagctttaatacgactcactatagggagaccctcgaaaacaaaccaccgggtaaaaaattgctgcgagccaaacaccaaacaaaacaaacacaaaccaacaaaaagtggccacgcccgggccaccgatacttcccttcactccttcgggactgttggggaggaacacaacagggctcccctgttttcccattccttcccccttttcccaaccccaaccgccgtatctggtggcggcaagacacacgggtctttccctctaaagcacaattgtgtgtgtgtcccaggtcctcctgcgtacggtgcgggagtgctcccacccaactgttgtaagcctgtccaacgcgtcgtcctggcaagactatgacgtcgcatgttccgctgcggatgccgaccgggtaaccggttccccagtgtgtgtagtgcgatcttccaggtcctcctggttggcgttgtccagaaactgcttcaggtaagtggggtgtgcccaatccctacaaaggttgattctttcaccaccttaggaatgctccggaggtaccccagcaacagctgggatctgaccggaggctaattgtctacgggtggtgtttcctttttcttttcacacaactctactgcgtacaactcactgactatccacttgctctgtcacgatgggagtgaaggtgctgttcgccctgatctgtattgccgtggccgaggccaagcctaccgagaacaacgaggacttcaacatcgtggccgtggcctccaatttcgccaccacagatctggacgccgacagaggaaagctgcccggcaagaagctgcctctggaagtgctgaaagagatggaagccaacgccagaaaggccggctgtaccagaggctgtctgatctgcctgagccacatcaagtgcacccctaagatgaagaagttcatccccggcagatgccacacctacgagggcgacaaagaatctgcccaaggcggaatcggagaggccatcgtggatatccctgagatccccggcttcaaggacctggaacctatggaacagtttatcgcccaggtggacctgtgcgtggactgtacaacaggctgcctgaaaggcctggccaacgtgcagtgtagcgacctgctgaagaagtggctgcctcagagatgcgccaccttcgcctctaagatccagggccaagtggacaagatcaaaggcgctggcggcgactaatagctaactagacaaaacaccaaacaaacaagctgcgagcctggggttagccctcgggcgaagctcttgatcgaagccccggtaaacggcggccgtaactataaattaaccgttgtagttacgtaaataaacttggctatatgctggaaactccgagtatcctccagtactcatctcaactaaaattgaggtagtaaaaatctgcgaggtgcggacaatcagcaggaaagactaatctttttgattagaatcctcagagactaatacgccgagcgtacttagaaaaaatccattctaagtgtgatgatagagtccgatctctatagcgatatagagggttttcaaaagaaacctgttaatcattatcccatgattaacataacgtcaataaacggtcctaaggtagcgaaattcctttcaacagtaagtctagatatcggatcccgggaggctaggtggaggctcagtgatgataagtctgcgatggtggatgcatgtgtcatggtcatagctgtttcctgtgtgaaattgttatccgctcagagggcacaatcctattccgcgctatccgacaatctccaagacattaggtggagttcagttcggcgtatggcatatgtcgctggaaagaacatgtgagcaaaaggccagcaaaaggccaggaaccgtaaaaaggccgcgttgctggcgtttttccataggctccgcccccctgacgagcatcacaaaaatcgacgctcaagtcagaggtggcgaaacccgacaggactataaagataccaggcgtttccccctggaagctccctcgtgcgctctcctgttccgaccctgccgcttaccggatacctgtccgcctttctcccttcgggaagcgtggcgctttctcatagctcacgctgtaggtatctcagttcggtgtaggtcgttcgctccaagctgggctgtgtgcacgaaccccccgttcagcccgaccgctgcgccttatccggtaactatcgtcttgagtccaacccggtaagacacgacttatcgccactggcagcagccactggtaacaggattagcagagcgaggtatgtaggcggtgctacagagttcttgaagtggtggcctaactacggctacactagaagaacagtatttggtatctgcgctctgctgaagccagttaccttcggaaaaagagttggtagctcttgatccggcaaacaaaccaccgctggtagcggtggtttttttgtttgcaagcagcagattacgcgcagaaaaaaaggatctcaagaagatcctttgatcttttctacggggtctgacgctctattcaacaaagccgccgtcccgtcaagtcagcgtaaatgggtagggggcttcaaatcgtcctcgtgataccaattcggagcctgcttttttgtacaaacttgttgataatggcaattcaaggatcttcacctagatccttttaaattaaaaatgaagttttaaatcaatctaaagtatatatgagtaaacttggtctgacagttaccaatgcttaatcagtgaggcacctatctcagcgatctgtctatttcgttcatccatagttgcctgactccccgtcgtgtagataactacgatacgggagggcttaccatctggccccagtgctgcaatgataccgcgagagccacgctcaccggctccagatttatcagcaataaaccagccagccggaagggccgagcgcagaagtggtcctgcaactttatccgcctccatccagtctattaattgttgccgggaagct

SEQ ID NO: 3644 - DNA, 3882 bp, synthetic construct
  source 1..3882: mol_type = other DNA; note = Coxiella Monotron, P1 exon min3
agagtaagtagttcgccagttaatagtttgcgcaacgttgttgccattgctacaggcatcgtggtgtcacgctcgtcgtttggtatggcttcattcagctccggttcccaacgatcaaggcgagttacatgatcccccatgttgtgcaaaaaagcggttagctccttcggtcctccgatcgttgtcagaagtaagttggccgcagtgttatcactcatggttatggcagcactgcataattctcttactgtcatgccatccgtaagatgcttttctgtgactggtgagtactcaaccaagtcattctgagaatagtgtatgcggcgaccgagttgctcttgcccggcgtcaatacgggataataccgcgccacatagcagaactttaaaagtgctcatcattggaaaacgttcttcggggcgaaaactctcaaggatcttaccgctgttgagatccagttcgatgtaacccactcgtgcacccaactgatcttcagcatcttttactttcaccagcgtttctgggtgagcaaaaacaggaaggcaaaatgccgcaaaaaagggaataagggcgacacggaaatgttgaatactcatactcttcctttttcaatattattgaagcatttatcagggttattgtctcatgagcggatacatatttgaatgtatttagaaaaataaacaaataggggttccgcgcacatttccccgaaaagtgccagatacctgaaacaaaacccatcgtacggccaaggaagtctccaataactgtgatccaccacaagcgccagggttttcccagtcacgacgttgtaaaacgacggccagtcatgcataatccgcacgcatctggaataaggaagtgccattccgcctgacctccaagctttaatacgactcactatagggagaccctcgaaaacaaaccacgggtaaaaaattgctgcgagccaaacaccaaacaaaacaaacacaaaccaacaaaaagtggccacgcccgggccaccgatacttcccttcactccttcgggactgttggggaggaacacaacagggctcccctgttttcccattccttcccccttttcccaaccccaaccgccgtatctggtggcggcaagacacacgggtctttccctctaaagcacaattgtgtgtgtgtcccaggtcctcctgcgtacggtgcgggagtgctcccacccaactgttgtaagcctgtccaacgcgtcgtcctggcaagactatgacgtcgcatgttccgctgcggatgccgaccgggtaaccggttccccagtgtgtgtagtgcgatcttccaggtcctcctggttggcgttgtccagaaactgcttcaggtaagtggggtgtgcccaatccctacaaaggttgattctttcaccaccttaggaatgctccggaggtaccccagcaacagctgggatctgaccggaggctaattgtctacgggtggtgtttcctttttcttttcacacaactctactgcgtacaactcactgactatccacttgctctgtcacgatgggagtgaaggtgctgttcgccctgatctgtattgccgtggccgaggccaagcctaccgagaacaacgaggacttcaacatcgtggccgtggcctccaatttcgccaccacagatctggacgccgacagaggaaagctgcccggcaagaagctgcctctggaagtgctgaaagagatggaagccaacgccagaaaggccggctgtaccagaggctgtctgatctgcctgagccacatcaagtgcacccctaagatgaagaagttcatccccggcagatgccacacctacgagggcgacaaagaatctgcccaaggcggaatcggagaggccatcgtggatatccctgagatccccggcttcaaggacctggaacctatggaacagtttatcgcccaggtggacctgtgcgtggactgtacaacaggctgcctgaaaggcctggccaacgtgcagtgtagcgacctgctgaagaagtggctgcctcagagatgcgccaccttcgcctctaagatccagggccaagtggacaagatcaaaggcgctggcggcgactaatagctaactagacaaaacaccaaacaaacaagctgcgagcctggggttagccctcgggcgaagctcttgatcgaagccccggtaaacggcggccgtaactataaattaaccgttgtagttacgtaaataaacttggctatatgctggaaactccgagtatcctccagtactcatctcaactaaaattgaggtagtaaaaatctgcgaggtgcggacaatcagcaggaaagactaatctttttgattagaatcctcagagactaatacgccgagcgtacttagaaaaaatccattctaagtgtgatgatagagtccgatctctatagcgatatagagggttttcaaaagaaacctgttaatcattatcccatgattaacataacgtcaataaacggtcctaaggtagcgaaattcctttcaacagtaagtctagatatcggatcccgggaggctaggtggaggctcagtgatgataagtctgcgatggtggatgcatgtgtcatggtcatagctgtttcctgtgtgaaattgttatccgctcagagggcacaatcctattccgcgctatccgacaatctccaagacattaggtggagttcagttcggcgtatggcatatgtcgctggaaagaacatgtgagcaaaaggccagcaaaaggccaggaaccgtaaaaaggccgcgttgctggcgtttttccataggctccgcccccctgacgagcatcacaaaaatcgacgctcaagtcagaggtggcgaaacccgacaggactataaagataccaggcgtttccccctggaagctccctcgtgcgctctcctgttccgaccctgccgcttaccggatacctgtccgcctttctcccttcgggaagcgtggcgctttctcatagctcacgctgtaggtatctcagttcggtgtaggtcgttcgctccaagctgggctgtgtgcacgaaccccccgttcagcccgaccgctgcgccttatccggtaactatcgtcttgagtccaacccggtaagacacgacttatcgccactggcagcagccactggtaacaggattagcagagcgaggtatgtaggcggtgctacagagttcttgaagtggtggcctaactacggctacactagaagaacagtatttggtatctgcgctctgctgaagccagttaccttcggaaaaagagttggtagctcttgatccggcaaacaaaccaccgctggtagcggtggtttttttgtttgcaagcagcagattacgcgcagaaaaaaaggatctcaagaagatcctttgatcttttctacggggtctgacgctctattcaacaaagccgccgtcccgtcaagtcagcgtaaatgggtagggggcttcaaatcgtcctcgtgataccaattcggagcctgcttttttgtacaaacttgttgataatggcaattcaaggatcttcacctagatccttttaaattaaaaatgaagttttaaatcaatctaaagtatatatgagtaaacttggtctgacagttaccaatgcttaatcagtgaggcacctatctcagcgatctgtctatttcgttcatccatagttgcctgactccccgtcgtgtagataactacgatacgggagggcttaccatctggccccagtgctgcaatgataccgcgagagccacgctcaccggctccagatttatcagcaataaaccagccagccggaagggccgagcgcagaagtggtcctgcaactttatccgcctccatccagtctattaattgttgccgggaagct

SEQ ID NO: 3645 - DNA, 3881 bp, synthetic construct
  source 1..3881: mol_type = other DNA; note = Coxiella Monotron, P1 exon min4
agagtaagtagttcgccagttaatagtttgcgcaacgttgttgccattgctacaggcatcgtggtgtcacgctcgtcgtttggtatggcttcattcagctccggttcccaacgatcaaggcgagttacatgatcccccatgttgtgcaaaaaagcggttagctccttcggtcctccgatcgttgtcagaagtaagttggccgcagtgttatcactcatggttatggcagcactgcataattctcttactgtcatgccatccgtaagatgcttttctgtgactggtgagtactcaaccaagtcattctgagaatagtgtatgcggcgaccgagttgctcttgcccggcgtcaatacgggataataccgcgccacatagcagaactttaaaagtgctcatcattggaaaacgttcttcggggcgaaaactctcaaggatcttaccgctgttgagatccagttcgatgtaacccactcgtgcacccaactgatcttcagcatcttttactttcaccagcgtttctgggtgagcaaaaacaggaaggcaaaatgccgcaaaaaagggaataagggcgacacggaaatgttgaatactcatactcttcctttttcaatattattgaagcatttatcagggttattgtctcatgagcggatacatatttgaatgtatttagaaaaataaacaaataggggttccgcgcacatttccccgaaaagtgccagatacctgaaacaaaacccatcgtacggccaaggaagtctccaataactgtgatccaccacaagcgccagggttttcccagtcacgacgttgtaaaacgacggccagtcatgcataatccgcacgcatctggaataaggaagtgccattccgcctgacctccaagctttaatacgactcactatagggagaccctcgaaaacaaaccacggtaaaaaattgctgcgagccaaacaccaaacaaaacaaacacaaaccaacaaaaagtggccacgcccgggccaccgatacttcccttcactccttcgggactgttggggaggaacacaacagggctcccctgttttcccattccttcccccttttcccaaccccaaccgccgtatctggtggcggcaagacacacgggtctttccctctaaagcacaattgtgtgtgtgtcccaggtcctcctgcgtacggtgcgggagtgctcccacccaactgttgtaagcctgtccaacgcgtcgtcctggcaagactatgacgtcgcatgttccgctgcggatgccgaccgggtaaccggttccccagtgtgtgtagtgcgatcttccaggtcctcctggttggcgttgtccagaaactgcttcaggtaagtggggtgtgcccaatccctacaaaggttgattctttcaccaccttaggaatgctccggaggtaccccagcaacagctgggatctgaccggaggctaattgtctacgggtggtgtttcctttttcttttcacacaactctactgcgtacaactcactgactatccacttgctctgtcacgatgggagtgaaggtgctgttcgccctgatctgtattgccgtggccgaggccaagcctaccgagaacaacgaggacttcaacatcgtggccgtggcctccaatttcgccaccacagatctggacgccgacagaggaaagctgcccggcaagaagctgcctctggaagtgctgaaagagatggaagccaacgccagaaaggccggctgtaccagaggctgtctgatctgcctgagccacatcaagtgcacccctaagatgaagaagttcatccccggcagatgccacacctacgagggcgacaaagaatctgcccaaggcggaatcggagaggccatcgtggatatccctgagatccccggcttcaaggacctggaacctatggaacagtttatcgcccaggtggacctgtgcgtggactgtacaacaggctgcctgaaaggcctggccaacgtgcagtgtagcgacctgctgaagaagtggctgcctcagagatgcgccaccttcgcctctaagatccagggccaagtggacaagatcaaaggcgctggcggcgactaatagctaactagacaaaacaccaaacaaacaagctgcgagcctggggttagccctcgggcgaagctcttgatcgaagccccggtaaacggcggccgtaactataaattaaccgttgtagttacgtaaataaacttggctatatgctggaaactccgagtatcctccagtactcatctcaactaaaattgaggtagtaaaaatctgcgaggtgcggacaatcagcaggaaagactaatctttttgattagaatcctcagagactaatacgccgagcgtacttagaaaaaatccattctaagtgtgatgatagagtccgatctctatagcgatatagagggttttcaaaagaaacctgttaatcattatcccatgattaacataacgtcaataaacggtcctaaggtagcgaaattcctttcaacagtaagtctagatatcggatcccgggaggctaggtggaggctcagtgatgataagtctgcgatggtggatgcatgtgtcatggtcatagctgtttcctgtgtgaaattgttatccgctcagagggcacaatcctattccgcgctatccgacaatctccaagacattaggtggagttcagttcggcgtatggcatatgtcgctggaaagaacatgtgagcaaaaggccagcaaaaggccaggaaccgtaaaaaggccgcgttgctggcgtttttccataggctccgcccccctgacgagcatcacaaaaatcgacgctcaagtcagaggtggcgaaacccgacaggactataaagataccaggcgtttccccctggaagctccctcgtgcgctctcctgttccgaccctgccgcttaccggatacctgtccgcctttctcccttcgggaagcgtggcgctttctcatagctcacgctgtaggtatctcagttcggtgtaggtcgttcgctccaagctgggctgtgtgcacgaaccccccgttcagcccgaccgctgcgccttatccggtaactatcgtcttgagtccaacccggtaagacacgacttatcgccactggcagcagccactggtaacaggattagcagagcgaggtatgtaggcggtgctacagagttcttgaagtggtggcctaactacggctacactagaagaacagtatttggtatctgcgctctgctgaagccagttaccttcggaaaaagagttggtagctcttgatccggcaaacaaaccaccgctggtagcggtggtttttttgtttgcaagcagcagattacgcgcagaaaaaaaggatctcaagaagatcctttgatcttttctacggggtctgacgctctattcaacaaagccgccgtcccgtcaagtcagcgtaaatgggtagggggcttcaaatcgtcctcgtgataccaattcggagcctgcttttttgtacaaacttgttgataatggcaattcaaggatcttcacctagatccttttaaattaaaaatgaagttttaaatcaatctaaagtatatatgagtaaacttggtctgacagttaccaatgcttaatcagtgaggcacctatctcagcgatctgtctatttcgttcatccatagttgcctgactccccgtcgtgtagataactacgatacgggagggcttaccatctggccccagtgctgcaatgataccgcgagagccacgctcaccggctccagatttatcagcaataaaccagccagccggaagggccgagcgcagaagtggtcctgcaactttatccgcctccatccagtctattaattgttgccgggaagct

SEQ ID NO: 3646 - DNA, 3880 bp, synthetic construct
  source 1..3880: mol_type = other DNA; note = Coxiella Monotron, P1 exon min5
agagtaagtagttcgccagttaatagtttgcgcaacgttgttgccattgctacaggcatcgtggtgtcacgctcgtcgtttggtatggcttcattcagctccggttcccaacgatcaaggcgagttacatgatcccccatgttgtgcaaaaaagcggttagctccttcggtcctccgatcgttgtcagaagtaagttggccgcagtgttatcactcatggttatggcagcactgcataattctcttactgtcatgccatccgtaagatgcttttctgtgactggtgagtactcaaccaagtcattctgagaatagtgtatgcggcgaccgagttgctcttgcccggcgtcaatacgggataataccgcgccacatagcagaactttaaaagtgctcatcattggaaaacgttcttcggggcgaaaactctcaaggatcttaccgctgttgagatccagttcgatgtaacccactcgtgcacccaactgatcttcagcatcttttactttcaccagcgtttctgggtgagcaaaaacaggaaggcaaaatgccgcaaaaaagggaataagggcgacacggaaatgttgaatactcatactcttcctttttcaatattattgaagcatttatcagggttattgtctcatgagcggatacatatttgaatgtatttagaaaaataaacaaataggggttccgcgcacatttccccgaaaagtgccagatacctgaaacaaaacccatcgtacggccaaggaagtctccaataactgtgatccaccacaagcgccagggttttcccagtcacgacgttgtaaaacgacggccagtcatgcataatccgcacgcatctggaataaggaagtgccattccgcctgacctccaagctttaatacgactcactatagggagaccctcgaaaacaaaccacgtaaaaaattgctgcgagccaaacaccaaacaaaacaaacacaaaccaacaaaaagtggccacgcccgggccaccgatacttcccttcactccttcgggactgttggggaggaacacaacagggctcccctgttttcccattccttcccccttttcccaaccccaaccgccgtatctggtggcggcaagacacacgggtctttccctctaaagcacaattgtgtgtgtgtcccaggtcctcctgcgtacggtgcgggagtgctcccacccaactgttgtaagcctgtccaacgcgtcgtcctggcaagactatgacgtcgcatgttccgctgcggatgccgaccgggtaaccggttccccagtgtgtgtagtgcgatcttccaggtcctcctggttggcgttgtccagaaactgcttcaggtaagtggggtgtgcccaatccctacaaaggttgattctttcaccaccttaggaatgctccggaggtaccccagcaacagctgggatctgaccggaggctaattgtctacgggtggtgtttcctttttcttttcacacaactctactgcgtacaactcactgactatccacttgctctgtcacgatgggagtgaaggtgctgttcgccctgatctgtattgccgtggccgaggccaagcctaccgagaacaacgaggacttcaacatcgtggccgtggcctccaatttcgccaccacagatctggacgccgacagaggaaagctgcccggcaagaagctgcctctggaagtgctgaaagagatggaagccaacgccagaaaggccggctgtaccagaggctgtctgatctgcctgagccacatcaagtgcacccctaagatgaagaagttcatccccggcagatgccacacctacgagggcgacaaagaatctgcccaaggcggaatcggagaggccatcgtggatatccctgagatccccggcttcaaggacctggaacctatggaacagtttatcgcccaggtggacctgtgcgtggactgtacaacaggctgcctgaaaggcctggccaacgtgcagtgtagcgacctgctgaagaagtggctgcctcagagatgcgccaccttcgcctctaagatccagggccaagtggacaagatcaaaggcgctggcggcgactaatagctaactagacaaaacaccaaacaaacaagctgcgagcctggggttagccctcgggcgaagctcttgatcgaagccccggtaaacggcggccgtaactataaattaaccgttgtagttacgtaaataaacttggctatatgctggaaactccgagtatcctccagtactcatctcaactaaaattgaggtagtaaaaatctgcgaggtgcggacaatcagcaggaaagactaatctttttgattagaatcctcagagactaatacgccgagcgtacttagaaaaaatccattctaagtgtgatgatagagtccgatctctatagcgatatagagggttttcaaaagaaacctgttaatcattatcccatgattaacataacgtcaataaacggtcctaaggtagcgaaattcctttcaacagtaagtctagatatcggatcccgggaggctaggtggaggctcagtgatgataagtctgcgatggtggatgcatgtgtcatggtcatagctgtttcctgtgtgaaattgttatccgctcagagggcacaatcctattccgcgctatccgacaatctccaagacattaggtggagttcagttcggcgtatggcatatgtcgctggaaagaacatgtgagcaaaaggccagcaaaaggccaggaaccgtaaaaaggccgcgttgctggcgtttttccataggctccgcccccctgacgagcatcacaaaaatcgacgctcaagtcagaggtggcgaaacccgacaggactataaagataccaggcgtttccccctggaagctccctcgtgcgctctcctgttccgaccctgccgcttaccggatacctgtccgcctttctcccttcgggaagcgtggcgctttctcatagctcacgctgtaggtatctcagttcggtgtaggtcgttcgctccaagctgggctgtgtgcacgaaccccccgttcagcccgaccgctgcgccttatccggtaactatcgtcttgagtccaacccggtaagacacgacttatcgccactggcagcagccactggtaacaggattagcagagcgaggtatgtaggcggtgctacagagttcttgaagtggtggcctaactacggctacactagaagaacagtatttggtatctgcgctctgctgaagccagttaccttcggaaaaagagttggtagctcttgatccggcaaacaaaccaccgctggtagcggtggtttttttgtttgcaagcagcagattacgcgcagaaaaaaaggatctcaagaagatcctttgatcttttctacggggtctgacgctctattcaacaaagccgccgtcccgtcaagtcagcgtaaatgggtagggggcttcaaatcgtcctcgtgataccaattcggagcctgcttttttgtacaaacttgttgataatggcaattcaaggatcttcacctagatccttttaaattaaaaatgaagttttaaatcaatctaaagtatatatgagtaaacttggtctgacagttaccaatgcttaatcagtgaggcacctatctcagcgatctgtctatttcgttcatccatagttgcctgactccccgtcgtgtagataactacgatacgggagggcttaccatctggccccagtgctgcaatgataccgcgagagccacgctcaccggctccagatttatcagcaataaaccagccagccggaagggccgagcgcagaagtggtcctgcaactttatccgcctccatccagtctattaattgttgccgggaagct

SEQ ID NO: 3647 - DNA, 3879 bp, synthetic construct
  source 1..3879: mol_type = other DNA; note = Coxiella Monotron, P1 exon min6
agagtaagtagttcgccagttaatagtttgcgcaacgttgttgccattgctacaggcatcgtggtgtcacgctcgtcgtttggtatggcttcattcagctccggttcccaacgatcaaggcgagttacatgatcccccatgttgtgcaaaaaagcggttagctccttcggtcctccgatcgttgtcagaagtaagttggccgcagtgttatcactcatggttatggcagcactgcataattctcttactgtcatgccatccgtaagatgcttttctgtgactggtgagtactcaaccaagtcattctgagaatagtgtatgcggcgaccgagttgctcttgcccggcgtcaatacgggataataccgcgccacatagcagaactttaaaagtgctcatcattggaaaacgttcttcggggcgaaaactctcaaggatcttaccgctgttgagatccagttcgatgtaacccactcgtgcacccaactgatcttcagcatcttttactttcaccagcgtttctgggtgagcaaaaacaggaaggcaaaatgccgcaaaaaagggaataagggcgacacggaaatgttgaatactcatactcttcctttttcaatattattgaagcatttatcagggttattgtctcatgagcggatacatatttgaatgtatttagaaaaataaacaaataggggttccgcgcacatttccccgaaaagtgccagatacctgaaacaaaacccatcgtacggccaaggaagtctccaataactgtgatccaccacaagcgccagggttttcccagtcacgacgttgtaaaacgacggccagtcatgcataatccgcacgcatctggaataaggaagtgccattccgcctgacctccaagctttaatacgactcactatagggagaccctcgaaaacaaaccactaaaaaattgctgcgagccaaacaccaaacaaaacaaacacaaaccaacaaaaagtggccacgcccgggccaccgatacttcccttcactccttcgggactgttggggaggaacacaacagggctcccctgttttcccattccttcccccttttcccaaccccaaccgccgtatctggtggcggcaagacacacgggtctttccctctaaagcacaattgtgtgtgtgtcccaggtcctcctgcgtacggtgcgggagtgctcccacccaactgttgtaagcctgtccaacgcgtcgtcctggcaagactatgacgtcgcatgttccgctgcggatgccgaccgggtaaccggttccccagtgtgtgtagtgcgatcttccaggtcctcctggttggcgttgtccagaaactgcttcaggtaagtggggtgtgcccaatccctacaaaggttgattctttcaccaccttaggaatgctccggaggtaccccagcaacagctgggatctgaccggaggctaattgtctacgggtggtgtttcctttttcttttcacacaactctactgcgtacaactcactgactatccacttgctctgtcacgatgggagtgaaggtgctgttcgccctgatctgtattgccgtggccgaggccaagcctaccgagaacaacgaggacttcaacatcgtggccgtggcctccaatttcgccaccacagatctggacgccgacagaggaaagctgcccggcaagaagctgcctctggaagtgctgaaagagatggaagccaacgccagaaaggccggctgtaccagaggctgtctgatctgcctgagccacatcaagtgcacccctaagatgaagaagttcatccccggcagatgccacacctacgagggcgacaaagaatctgcccaaggcggaatcggagaggccatcgtggatatccctgagatccccggcttcaaggacctggaacctatggaacagtttatcgcccaggtggacctgtgcgtggactgtacaacaggctgcctgaaaggcctggccaacgtgcagtgtagcgacctgctgaagaagtggctgcctcagagatgcgccaccttcgcctctaagatccagggccaagtggacaagatcaaaggcgctggcggcgactaatagctaactagacaaaacaccaaacaaacaagctgcgagcctggggttagccctcgggcgaagctcttgatcgaagccccggtaaacggcggccgtaactataaattaaccgttgtagttacgtaaataaacttggctatatgctggaaactccgagtatcctccagtactcatctcaactaaaattgaggtagtaaaaatctgcgaggtgcggacaatcagcaggaaagactaatctttttgattagaatcctcagagactaatacgccgagcgtacttagaaaaaatccattctaagtgtgatgatagagtccgatctctatagcgatatagagggttttcaaaagaaacctgttaatcattatcccatgattaacataacgtcaataaacggtcctaaggtagcgaaattcctttcaacagtaagtctagatatcggatcccgggaggctaggtggaggctcagtgatgataagtctgcgatggtggatgcatgtgtcatggtcatagctgtttcctgtgtgaaattgttatccgctcagagggcacaatcctattccgcgctatccgacaatctccaagacattaggtggagttcagttcggcgtatggcatatgtcgctggaaagaacatgtgagcaaaaggccagcaaaaggccaggaaccgtaaaaaggccgcgttgctggcgtttttccataggctccgcccccctgacgagcatcacaaaaatcgacgctcaagtcagaggtggcgaaacccgacaggactataaagataccaggcgtttccccctggaagctccctcgtgcgctctcctgttccgaccctgccgcttaccggatacctgtccgcctttctcccttcgggaagcgtggcgctttctcatagctcacgctgtaggtatctcagttcggtgtaggtcgttcgctccaagctgggctgtgtgcacgaaccccccgttcagcccgaccgctgcgccttatccggtaactatcgtcttgagtccaacccggtaagacacgacttatcgccactggcagcagccactggtaacaggattagcagagcgaggtatgtaggcggtgctacagagttcttgaagtggtggcctaactacggctacactagaagaacagtatttggtatctgcgctctgctgaagccagttaccttcggaaaaagagttggtagctcttgatccggcaaacaaaccaccgctggtagcggtggtttttttgtttgcaagcagcagattacgcgcagaaaaaaaggatctcaagaagatcctttgatcttttctacggggtctgacgctctattcaacaaagccgccgtcccgtcaagtcagcgtaaatgggtagggggcttcaaatcgtcctcgtgataccaattcggagcctgcttttttgtacaaacttgttgataatggcaattcaaggatcttcacctagatccttttaaattaaaaatgaagttttaaatcaatctaaagtatatatgagtaaacttggtctgacagttaccaatgcttaatcagtgaggcacctatctcagcgatctgtctatttcgttcatccatagttgcctgactccccgtcgtgtagataactacgatacgggagggcttaccatctggccccagtgctgcaatgataccgcgagagccacgctcaccggctccagatttatcagcaataaaccagccagccggaagggccgagcgcagaagtggtcctgcaactttatccgcctccatccagtctattaattgttgccgggaagct

SEQ ID NO: 3648 - DNA, 3878 bp, synthetic construct
  source 1..3878: mol_type = other DNA; note = Coxiella Monotron, P1 exon min7
agagtaagtagttcgccagttaatagtttgcgcaacgttgttgccattgctacaggcatcgtggtgtcacgctcgtcgtttggtatggcttcattcagctccggttcccaacgatcaaggcgagttacatgatcccccatgttgtgcaaaaaagcggttagctccttcggtcctccgatcgttgtcagaagtaagttggccgcagtgttatcactcatggttatggcagcactgcataattctcttactgtcatgccatccgtaagatgcttttctgtgactggtgagtactcaaccaagtcattctgagaatagtgtatgcggcgaccgagttgctcttgcccggcgtcaatacgggataataccgcgccacatagcagaactttaaaagtgctcatcattggaaaacgttcttcggggcgaaaactctcaaggatcttaccgctgttgagatccagttcgatgtaacccactcgtgcacccaactgatcttcagcatcttttactttcaccagcgtttctgggtgagcaaaaacaggaaggcaaaatgccgcaaaaaagggaataagggcgacacggaaatgttgaatactcatactcttcctttttcaatattattgaagcatttatcagggttattgtctcatgagcggatacatatttgaatgtatttagaaaaataaacaaataggggttccgcgcacatttccccgaaaagtgccagatacctgaaacaaaacccatcgtacggccaaggaagtctccaataactgtgatccaccacaagcgccagggttttcccagtcacgacgttgtaaaacgacggccagtcatgcataatccgcacgcatctggaataaggaagtgccattccgcctgacctccaagctttaatacgactcactatagggagaccctcgaaaacaaaccacaaaaaattgctgcgagccaaacaccaaacaaaacaaacacaaaccaacaaaaagtggccacgcccgggccaccgatacttcccttcactccttcgggactgttggggaggaacacaacagggctcccctgttttcccattccttcccccttttcccaaccccaaccgccgtatctggtggcggcaagacacacgggtctttccctctaaagcacaattgtgtgtgtgtcccaggtcctcctgcgtacggtgcgggagtgctcccacccaactgttgtaagcctgtccaacgcgtcgtcctggcaagactatgacgtcgcatgttccgctgcggatgccgaccgggtaaccggttccccagtgtgtgtagtgcgatcttccaggtcctcctggttggcgttgtccagaaactgcttcaggtaagtggggtgtgcccaatccctacaaaggttgattctttcaccaccttaggaatgctccggaggtaccccagcaacagctgggatctgaccggaggctaattgtctacgggtggtgtttcctttttcttttcacacaactctactgcgtacaactcactgactatccacttgctctgtcacgatgggagtgaaggtgctgttcgccctgatctgtattgccgtggccgaggccaagcctaccgagaacaacgaggacttcaacatcgtggccgtggcctccaatttcgccaccacagatctggacgccgacagaggaaagctgcccggcaagaagctgcctctggaagtgctgaaagagatggaagccaacgccagaaaggccggctgtaccagaggctgtctgatctgcctgagccacatcaagtgcacccctaagatgaagaagttcatccccggcagatgccacacctacgagggcgacaaagaatctgcccaaggcggaatcggagaggccatcgtggatatccctgagatccccggcttcaaggacctggaacctatggaacagtttatcgcccaggtggacctgtgcgtggactgtacaacaggctgcctgaaaggcctggccaacgtgcagtgtagcgacctgctgaagaagtggctgcctcagagatgcgccaccttcgcctctaagatccagggccaagtggacaagatcaaaggcgctggcggcgactaatagctaactagacaaaacaccaaacaaacaagctgcgagcctggggttagccctcgggcgaagctcttgatcgaagccccggtaaacggcggccgtaactataaattaaccgttgtagttacgtaaataaacttggctatatgctggaaactccgagtatcctccagtactcatctcaactaaaattgaggtagtaaaaatctgcgaggtgcggacaatcagcaggaaagactaatctttttgattagaatcctcagagactaatacgccgagcgtacttagaaaaaatccattctaagtgtgatgatagagtccgatctctatagcgatatagagggttttcaaaagaaacctgttaatcattatcccatgattaacataacgtcaataaacggtcctaaggtagcgaaattcctttcaacagtaagtctagatatcggatcccgggaggctaggtggaggctcagtgatgataagtctgcgatggtggatgcatgtgtcatggtcatagctgtttcctgtgtgaaattgttatccgctcagagggcacaatcctattccgcgctatccgacaatctccaagacattaggtggagttcagttcggcgtatggcatatgtcgctggaaagaacatgtgagcaaaaggccagcaaaaggccaggaaccgtaaaaaggccgcgttgctggcgtttttccataggctccgcccccctgacgagcatcacaaaaatcgacgctcaagtcagaggtggcgaaacccgacaggactataaagataccaggcgtttccccctggaagctccctcgtgcgctctcctgttccgaccctgccgcttaccggatacctgtccgcctttctcccttcgggaagcgtggcgctttctcatagctcacgctgtaggtatctcagttcggtgtaggtcgttcgctccaagctgggctgtgtgcacgaaccccccgttcagcccgaccgctgcgccttatccggtaactatcgtcttgagtccaacccggtaagacacgacttatcgccactggcagcagccactggtaacaggattagcagagcgaggtatgtaggcggtgctacagagttcttgaagtggtggcctaactacggctacactagaagaacagtatttggtatctgcgctctgctgaagccagttaccttcggaaaaagagttggtagctcttgatccggcaaacaaaccaccgctggtagcggtggtttttttgtttgcaagcagcagattacgcgcagaaaaaaaggatctcaagaagatcctttgatcttttctacggggtctgacgctctattcaacaaagccgccgtcccgtcaagtcagcgtaaatgggtagggggcttcaaatcgtcctcgtgataccaattcggagcctgcttttttgtacaaacttgttgataatggcaattcaaggatcttcacctagatccttttaaattaaaaatgaagttttaaatcaatctaaagtatatatgagtaaacttggtctgacagttaccaatgcttaatcagtgaggcacctatctcagcgatctgtctatttcgttcatccatagttgcctgactccccgtcgtgtagataactacgatacgggagggcttaccatctggccccagtgctgcaatgataccgcgagagccacgctcaccggctccagatttatcagcaataaaccagccagccggaagggccgagcgcagaagtggtcctgcaactttatccgcctccatccagtctattaattgttgccgggaagct

SEQ ID NO: 3649 - DNA, 3877 bp, synthetic construct
  source 1..3877: mol_type = other DNA; note = Coxiella Monotron, P1 exon min8
agagtaagtagttcgccagttaatagtttgcgcaacgttgttgccattgctacaggcatcgtggtgtcacgctcgtcgtttggtatggcttcattcagctccggttcccaacgatcaaggcgagttacatgatcccccatgttgtgcaaaaaagcggttagctccttcggtcctccgatcgttgtcagaagtaagttggccgcagtgttatcactcatggttatggcagcactgcataattctcttactgtcatgccatccgtaagatgcttttctgtgactggtgagtactcaaccaagtcattctgagaatagtgtatgcggcgaccgagttgctcttgcccggcgtcaatacgggataataccgcgccacatagcagaactttaaaagtgctcatcattggaaaacgttcttcggggcgaaaactctcaaggatcttaccgctgttgagatccagttcgatgtaacccactcgtgcacccaactgatcttcagcatcttttactttcaccagcgtttctgggtgagcaaaaacaggaaggcaaaatgccgcaaaaaagggaataagggcgacacggaaatgttgaatactcatactcttcctttttcaatattattgaagcatttatcagggttattgtctcatgagcggatacatatttgaatgtatttagaaaaataaacaaataggggttccgcgcacatttccccgaaaagtgccagatacctgaaacaaaacccatcgtacggccaaggaagtctccaataactgtgatccaccacaagcgccagggttttcccagtcacgacgttgtaaaacgacggccagtcatgcataatccgcacgcatctggaataaggaagtgccattccgcctgacctccaagctttaatacgactcactatagggagaccctcgaaaacaaaccacaaaaattgctgcgagccaaacaccaaacaaaacaaacacaaaccaacaaaaagtggccacgcccgggccaccgatacttcccttcactccttcgggactgttggggaggaacacaacagggctcccctgttttcccattccttcccccttttcccaaccccaaccgccgtatctggtggcggcaagacacacgggtctttccctctaaagcacaattgtgtgtgtgtcccaggtcctcctgcgtacggtgcgggagtgctcccacccaactgttgtaagcctgtccaacgcgtcgtcctggcaagactatgacgtcgcatgttccgctgcggatgccgaccgggtaaccggttccccagtgtgtgtagtgcgatcttccaggtcctcctggttggcgttgtccagaaactgcttcaggtaagtggggtgtgcccaatccctacaaaggttgattctttcaccaccttaggaatgctccggaggtaccccagcaacagctgggatctgaccggaggctaattgtctacgggtggtgtttcctttttcttttcacacaactctactgcgtacaactcactgactatccacttgctctgtcacgatgggagtgaaggtgctgttcgccctgatctgtattgccgtggccgaggccaagcctaccgagaacaacgaggacttcaacatcgtggccgtggcctccaatttcgccaccacagatctggacgccgacagaggaaagctgcccggcaagaagctgcctctggaagtgctgaaagagatggaagccaacgccagaaaggccggctgtaccagaggctgtctgatctgcctgagccacatcaagtgcacccctaagatgaagaagttcatccccggcagatgccacacctacgagggcgacaaagaatctgcccaaggcggaatcggagaggccatcgtggatatccctgagatccccggcttcaaggacctggaacctatggaacagtttatcgcccaggtggacctgtgcgtggactgtacaacaggctgcctgaaaggcctggccaacgtgcagtgtagcgacctgctgaagaagtggctgcctcagagatgcgccaccttcgcctctaagatccagggccaagtggacaagatcaaaggcgctggcggcgactaatagctaactagacaaaacaccaaacaaacaagctgcgagcctggggttagccctcgggcgaagctcttgatcgaagccccggtaaacggcggccgtaactataaattaaccgttgtagttacgtaaataaacttggctatatgctggaaactccgagtatcctccagtactcatctcaactaaaattgaggtagtaaaaatctgcgaggtgcggacaatcagcaggaaagactaatctttttgattagaatcctcagagactaatacgccgagcgtacttagaaaaaatccattctaagtgtgatgatagagtccgatctctatagcgatatagagggttttcaaaagaaacctgttaatcattatcccatgattaacataacgtcaataaacggtcctaaggtagcgaaattcctttcaacagtaagtctagatatcggatcccgggaggctaggtggaggctcagtgatgataagtctgcgatggtggatgcatgtgtcatggtcatagctgtttcctgtgtgaaattgttatccgctcagagggcacaatcctattccgcgctatccgacaatctccaagacattaggtggagttcagttcggcgtatggcatatgtcgctggaaagaacatgtgagcaaaaggccagcaaaaggccaggaaccgtaaaaaggccgcgttgctggcgtttttccataggctccgcccccctgacgagcatcacaaaaatcgacgctcaagtcagaggtggcgaaacccgacaggactataaagataccaggcgtttccccctggaagctccctcgtgcgctctcctgttccgaccctgccgcttaccggatacctgtccgcctttctcccttcgggaagcgtggcgctttctcatagctcacgctgtaggtatctcagttcggtgtaggtcgttcgctccaagctgggctgtgtgcacgaaccccccgttcagcccgaccgctgcgccttatccggtaactatcgtcttgagtccaacccggtaagacacgacttatcgccactggcagcagccactggtaacaggattagcagagcgaggtatgtaggcggtgctacagagttcttgaagtggtggcctaactacggctacactagaagaacagtatttggtatctgcgctctgctgaagccagttaccttcggaaaaagagttggtagctcttgatccggcaaacaaaccaccgctggtagcggtggtttttttgtttgcaagcagcagattacgcgcagaaaaaaaggatctcaagaagatcctttgatcttttctacggggtctgacgctctattcaacaaagccgccgtcccgtcaagtcagcgtaaatgggtagggggcttcaaatcgtcctcgtgataccaattcggagcctgcttttttgtacaaacttgttgataatggcaattcaaggatcttcacctagatccttttaaattaaaaatgaagttttaaatcaatctaaagtatatatgagtaaacttggtctgacagttaccaatgcttaatcagtgaggcacctatctcagcgatctgtctatttcgttcatccatagttgcctgactccccgtcgtgtagataactacgatacgggagggcttaccatctggccccagtgctgcaatgataccgcgagagccacgctcaccggctccagatttatcagcaataaaccagccagccggaagggccgagcgcagaagtggtcctgcaactttatccgcctccatccagtctattaattgttgccgggaagct

SEQ ID NO: 3650 - DNA, 3876 bp, synthetic construct
  source 1..3876: mol_type = other DNA; note = Coxiella Monotron, P1 exon min9
agagtaagtagttcgccagttaatagtttgcgcaacgttgttgccattgctacaggcatcgtggtgtcacgctcgtcgtttggtatggcttcattcagctccggttcccaacgatcaaggcgagttacatgatcccccatgttgtgcaaaaaagcggttagctccttcggtcctccgatcgttgtcagaagtaagttggccgcagtgttatcactcatggttatggcagcactgcataattctcttactgtcatgccatccgtaagatgcttttctgtgactggtgagtactcaaccaagtcattctgagaatagtgtatgcggcgaccgagttgctcttgcccggcgtcaatacgggataataccgcgccacatagcagaactttaaaagtgctcatcattggaaaacgttcttcggggcgaaaactctcaaggatcttaccgctgttgagatccagttcgatgtaacccactcgtgcacccaactgatcttcagcatcttttactttcaccagcgtttctgggtgagcaaaaacaggaaggcaaaatgccgcaaaaaagggaataagggcgacacggaaatgttgaatactcatactcttcctttttcaatattattgaagcatttatcagggttattgtctcatgagcggatacatatttgaatgtatttagaaaaataaacaaataggggttccgcgcacatttccccgaaaagtgccagatacctgaaacaaaacccatcgtacggccaaggaagtctccaataactgtgatccaccacaagcgccagggttttcccagtcacgacgttgtaaaacgacggccagtcatgcataatccgcacgcatctggaataaggaagtgccattccgcctgacctccaagctttaatacgactcactatagggagaccctcgaaaacaaaccacaaaattgctgcgagccaaacaccaaacaaaacaaacacaaaccaacaaaaagtggccacgcccgggccaccgatacttcccttcactccttcgggactgttggggaggaacacaacagggctcccctgttttcccattccttcccccttttcccaaccccaaccgccgtatctggtggcggcaagacacacgggtctttccctctaaagcacaattgtgtgtgtgtcccaggtcctcctgcgtacggtgcgggagtgctcccacccaactgttgtaagcctgtccaacgcgtcgtcctggcaagactatgacgtcgcatgttccgctgcggatgccgaccgggtaaccggttccccagtgtgtgtagtgcgatcttccaggtcctcctggttggcgttgtccagaaactgcttcaggtaagtggggtgtgcccaatccctacaaaggttgattctttcaccaccttaggaatgctccggaggtaccccagcaacagctgggatctgaccggaggctaattgtctacgggtggtgtttcctttttcttttcacacaactctactgcgtacaactcactgactatccacttgctctgtcacgatgggagtgaaggtgctgttcgccctgatctgtattgccgtggccgaggccaagcctaccgagaacaacgaggacttcaacatcgtggccgtggcctccaatttcgccaccacagatctggacgccgacagaggaaagctgcccggcaagaagctgcctctggaagtgctgaaagagatggaagccaacgccagaaaggccggctgtaccagaggctgtctgatctgcctgagccacatcaagtgcacccctaagatgaagaagttcatccccggcagatgccacacctacgagggcgacaaagaatctgcccaaggcggaatcggagaggccatcgtggatatccctgagatccccggcttcaaggacctggaacctatggaacagtttatcgcccaggtggacctgtgcgtggactgtacaacaggctgcctgaaaggcctggccaacgtgcagtgtagcgacctgctgaagaagtggctgcctcagagatgcgccaccttcgcctctaagatccagggccaagtggacaagatcaaaggcgctggcggcgactaatagctaactagacaaaacaccaaacaaacaagctgcgagcctggggttagccctcgggcgaagctcttgatcgaagccccggtaaacggcggccgtaactataaattaaccgttgtagttacgtaaataaacttggctatatgctggaaactccgagtatcctccagtactcatctcaactaaaattgaggtagtaaaaatctgcgaggtgcggacaatcagcaggaaagactaatctttttgattagaatcctcagagactaatacgccgagcgtacttagaaaaaatccattctaagtgtgatgatagagtccgatctctatagcgatatagagggttttcaaaagaaacctgttaatcattatcccatgattaacataacgtcaataaacggtcctaaggtagcgaaattcctttcaacagtaagtctagatatcggatcccgggaggctaggtggaggctcagtgatgataagtctgcgatggtggatgcatgtgtcatggtcatagctgtttcctgtgtgaaattgttatccgctcagagggcacaatcctattccgcgctatccgacaatctccaagacattaggtggagttcagttcggcgtatggcatatgtcgctggaaagaacatgtgagcaaaaggccagcaaaaggccaggaaccgtaaaaaggccgcgttgctggcgtttttccataggctccgcccccctgacgagcatcacaaaaatcgacgctcaagtcagaggtggcgaaacccgacaggactataaagataccaggcgtttccccctggaagctccctcgtgcgctctcctgttccgaccctgccgcttaccggatacctgtccgcctttctcccttcgggaagcgtggcgctttctcatagctcacgctgtaggtatctcagttcggtgtaggtcgttcgctccaagctgggctgtgtgcacgaaccccccgttcagcccgaccgctgcgccttatccggtaactatcgtcttgagtccaacccggtaagacacgacttatcgccactggcagcagccactggtaacaggattagcagagcgaggtatgtaggcggtgctacagagttcttgaagtggtggcctaactacggctacactagaagaacagtatttggtatctgcgctctgctgaagccagttaccttcggaaaaagagttggtagctcttgatccggcaaacaaaccaccgctggtagcggtggtttttttgtttgcaagcagcagattacgcgcagaaaaaaaggatctcaagaagatcctttgatcttttctacggggtctgacgctctattcaacaaagccgccgtcccgtcaagtcagcgtaaatgggtagggggcttcaaatcgtcctcgtgataccaattcggagcctgcttttttgtacaaacttgttgataatggcaattcaaggatcttcacctagatccttttaaattaaaaatgaagttttaaatcaatctaaagtatatatgagtaaacttggtctgacagttaccaatgcttaatcagtgaggcacctatctcagcgatctgtctatttcgttcatccatagttgcctgactccccgtcgtgtagataactacgatacgggagggcttaccatctggccccagtgctgcaatgataccgcgagagccacgctcaccggctccagatttatcagcaataaaccagccagccggaagggccgagcgcagaagtggtcctgcaactttatccgcctccatccagtctattaattgttgccgggaagct

SEQ ID NO: 3651 - DNA, 3874 bp, synthetic construct
  source 1..3874: mol_type = other DNA; note = Coxiella Monotron, P1 exon min11
agagtaagtagttcgccagttaatagtttgcgcaacgttgttgccattgctacaggcatcgtggtgtcacgctcgtcgtttggtatggcttcattcagctccggttcccaacgatcaaggcgagttacatgatcccccatgttgtgcaaaaaagcggttagctccttcggtcctccgatcgttgtcagaagtaagttggccgcagtgttatcactcatggttatggcagcactgcataattctcttactgtcatgccatccgtaagatgcttttctgtgactggtgagtactcaaccaagtcattctgagaatagtgtatgcggcgaccgagttgctcttgcccggcgtcaatacgggataataccgcgccacatagcagaactttaaaagtgctcatcattggaaaacgttcttcggggcgaaaactctcaaggatcttaccgctgttgagatccagttcgatgtaacccactcgtgcacccaactgatcttcagcatcttttactttcaccagcgtttctgggtgagcaaaaacaggaaggcaaaatgccgcaaaaaagggaataagggcgacacggaaatgttgaatactcatactcttcctttttcaatattattgaagcatttatcagggttattgtctcatgagcggatacatatttgaatgtatttagaaaaataaacaaataggggttccgcgcacatttccccgaaaagtgccagatacctgaaacaaaacccatcgtacggccaaggaagtctccaataactgtgatccaccacaagcgccagggttttcccagtcacgacgttgtaaaacgacggccagtcatgcataatccgcacgcatctggaataaggaagtgccattccgcctgacctccaagctttaatacgactcactatagggagaccctcgaaaacaaaccacaattgctgcgagccaaacaccaaacaaaacaaacacaaaccaacaaaaagtggccacgcccgggccaccgatacttcccttcactccttcgggactgttggggaggaacacaacagggctcccctgttttcccattccttcccccttttcccaaccccaaccgccgtatctggtggcggcaagacacacgggtctttccctctaaagcacaattgtgtgtgtgtcccaggtcctcctgcgtacggtgcgggagtgctcccacccaactgttgtaagcctgtccaacgcgtcgtcctggcaagactatgacgtcgcatgttccgctgcggatgccgaccgggtaaccggttccccagtgtgtgtagtgcgatcttccaggtcctcctggttggcgttgtccagaaactgcttcaggtaagtggggtgtgcccaatccctacaaaggttgattctttcaccaccttaggaatgctccggaggtaccccagcaacagctgggatctgaccggaggctaattgtctacgggtggtgtttcctttttcttttcacacaactctactgcgtacaactcactgactatccacttgctctgtcacgatgggagtgaaggtgctgttcgccctgatctgtattgccgtggccgaggccaagcctaccgagaacaacgaggacttcaacatcgtggccgtggcctccaatttcgccaccacagatctggacgccgacagaggaaagctgcccggcaagaagctgcctctggaagtgctgaaagagatggaagccaacgccagaaaggccggctgtaccagaggctgtctgatctgcctgagccacatcaagtgcacccctaagatgaagaagttcatccccggcagatgccacacctacgagggcgacaaagaatctgcccaaggcggaatcggagaggccatcgtggatatccctgagatccccggcttcaaggacctggaacctatggaacagtttatcgcccaggtggacctgtgcgtggactgtacaacaggctgcctgaaaggcctggccaacgtgcagtgtagcgacctgctgaagaagtggctgcctcagagatgcgccaccttcgcctctaagatccagggccaagtggacaagatcaaaggcgctggcggcgactaatagctaactagacaaaacaccaaacaaacaagctgcgagcctggggttagccctcgggcgaagctcttgatcgaagccccggtaaacggcggccgtaactataaattaaccgttgtagttacgtaaataaacttggctatatgctggaaactccgagtatcctccagtactcatctcaactaaaattgaggtagtaaaaatctgcgaggtgcggacaatcagcaggaaagactaatctttttgattagaatcctcagagactaatacgccgagcgtacttagaaaaaatccattctaagtgtgatgatagagtccgatctctatagcgatatagagggttttcaaaagaaacctgttaatcattatcccatgattaacataacgtcaataaacggtcctaaggtagcgaaattcctttcaacagtaagtctagatatcggatcccgggaggctaggtggaggctcagtgatgataagtctgcgatggtggatgcatgtgtcatggtcatagctgtttcctgtgtgaaattgttatccgctcagagggcacaatcctattccgcgctatccgacaatctccaagacattaggtggagttcagttcggcgtatggcatatgtcgctggaaagaacatgtgagcaaaaggccagcaaaaggccaggaaccgtaaaaaggccgcgttgctggcgtttttccataggctccgcccccctgacgagcatcacaaaaatcgacgctcaagtcagaggtggcgaaacccgacaggactataaagataccaggcgtttccccctggaagctccctcgtgcgctctcctgttccgaccctgccgcttaccggatacctgtccgcctttctcccttcgggaagcgtggcgctttctcatagctcacgctgtaggtatctcagttcggtgtaggtcgttcgctccaagctgggctgtgtgcacgaaccccccgttcagcccgaccgctgcgccttatccggtaactatcgtcttgagtccaacccggtaagacacgacttatcgccactggcagcagccactggtaacaggattagcagagcgaggtatgtaggcggtgctacagagttcttgaagtggtggcctaactacggctacactagaagaacagtatttggtatctgcgctctgctgaagccagttaccttcggaaaaagagttggtagctcttgatccggcaaacaaaccaccgctggtagcggtggtttttttgtttgcaagcagcagattacgcgcagaaaaaaaggatctcaagaagatcctttgatcttttctacggggtctgacgctctattcaacaaagccgccgtcccgtcaagtcagcgtaaatgggtagggggcttcaaatcgtcctcgtgataccaattcggagcctgcttttttgtacaaacttgttgataatggcaattcaaggatcttcacctagatccttttaaattaaaaatgaagttttaaatcaatctaaagtatatatgagtaaacttggtctgacagttaccaatgcttaatcagtgaggcacctatctcagcgatctgtctatttcgttcatccatagttgcctgactccccgtcgtgtagataactacgatacgggagggcttaccatctggccccagtgctgcaatgataccgcgagagccacgctcaccggctccagatttatcagcaataaaccagccagccggaagggccgagcgcagaagtggtcctgcaactttatccgcctccatccagtctattaattgttgccgggaagct

SEQ ID NO: 3652 - DNA, 3873 bp, synthetic construct
  source 1..3873: mol_type = other DNA; note = Coxiella Monotron, P1 exon min12
agagtaagtagttcgccagttaatagtttgcgcaacgttgttgccattgctacaggcatcgtggtgtcacgctcgtcgtttggtatggcttcattcagctccggttcccaacgatcaaggcgagttacatgatcccccatgttgtgcaaaaaagcggttagctccttcggtcctccgatcgttgtcagaagtaagttggccgcagtgttatcactcatggttatggcagcactgcataattctcttactgtcatgccatccgtaagatgcttttctgtgactggtgagtactcaaccaagtcattctgagaatagtgtatgcggcgaccgagttgctcttgcccggcgtcaatacgggataataccgcgccacatagcagaactttaaaagtgctcatcattggaaaacgttcttcggggcgaaaactctcaaggatcttaccgctgttgagatccagttcgatgtaacccactcgtgcacccaactgatcttcagcatcttttactttcaccagcgtttctgggtgagcaaaaacaggaaggcaaaatgccgcaaaaaagggaataagggcgacacggaaatgttgaatactcatactcttcctttttcaatattattgaagcatttatcagggttattgtctcatgagcggatacatatttgaatgtatttagaaaaataaacaaataggggttccgcgcacatttccccgaaaagtgccagatacctgaaacaaaacccatcgtacggccaaggaagtctccaataactgtgatccaccacaagcgccagggttttcccagtcacgacgttgtaaaacgacggccagtcatgcataatccgcacgcatctggaataaggaagtgccattccgcctgacctccaagctttaatacgactcactatagggagaccctcgaaaacaaaccacattgctgcgagccaaacaccaaacaaaacaaacacaaaccaacaaaaagtggccacgcccgggccaccgatacttcccttcactccttcgggactgttggggaggaacacaacagggctcccctgttttcccattccttcccccttttcccaaccccaaccgccgtatctggtggcggcaagacacacgggtctttccctctaaagcacaattgtgtgtgtgtcccaggtcctcctgcgtacggtgcgggagtgctcccacccaactgttgtaagcctgtccaacgcgtcgtcctggcaagactatgacgtcgcatgttccgctgcggatgccgaccgggtaaccggttccccagtgtgtgtagtgcgatcttccaggtcctcctggttggcgttgtccagaaactgcttcaggtaagtggggtgtgcccaatccctacaaaggttgattctttcaccaccttaggaatgctccggaggtaccccagcaacagctgggatctgaccggaggctaattgtctacgggtggtgtttcctttttcttttcacacaactctactgcgtacaactcactgactatccacttgctctgtcacgatgggagtgaaggtgctgttcgccctgatctgtattgccgtggccgaggccaagcctaccgagaacaacgaggacttcaacatcgtggccgtggcctccaatttcgccaccacagatctggacgccgacagaggaaagctgcccggcaagaagctgcctctggaagtgctgaaagagatggaagccaacgccagaaaggccggctgtaccagaggctgtctgatctgcctgagccacatcaagtgcacccctaagatgaagaagttcatccccggcagatgccacacctacgagggcgacaaagaatctgcccaaggcggaatcggagaggccatcgtggatatccctgagatccccggcttcaaggacctggaacctatggaacagtttatcgcccaggtggacctgtgcgtggactgtacaacaggctgcctgaaaggcctggccaacgtgcagtgtagcgacctgctgaagaagtggctgcctcagagatgcgccaccttcgcctctaagatccagggccaagtggacaagatcaaaggcgctggcggcgactaatagctaactagacaaaacaccaaacaaacaagctgcgagcctggggttagccctcgggcgaagctcttgatcgaagccccggtaaacggcggccgtaactataaattaaccgttgtagttacgtaaataaacttggctatatgctggaaactccgagtatcctccagtactcatctcaactaaaattgaggtagtaaaaatctgcgaggtgcggacaatcagcaggaaagactaatctttttgattagaatcctcagagactaatacgccgagcgtacttagaaaaaatccattctaagtgtgatgatagagtccgatctctatagcgatatagagggttttcaaaagaaacctgttaatcattatcccatgattaacataacgtcaataaacggtcctaaggtagcgaaattcctttcaacagtaagtctagatatcggatcccgggaggctaggtggaggctcagtgatgataagtctgcgatggtggatgcatgtgtcatggtcatagctgtttcctgtgtgaaattgttatccgctcagagggcacaatcctattccgcgctatccgacaatctccaagacattaggtggagttcagttcggcgtatggcatatgtcgctggaaagaacatgtgagcaaaaggccagcaaaaggccaggaaccgtaaaaaggccgcgttgctggcgtttttccataggctccgcccccctgacgagcatcacaaaaatcgacgctcaagtcagaggtggcgaaacccgacaggactataaagataccaggcgtttccccctggaagctccctcgtgcgctctcctgttccgaccctgccgcttaccggatacctgtccgcctttctcccttcgggaagcgtggcgctttctcatagctcacgctgtaggtatctcagttcggtgtaggtcgttcgctccaagctgggctgtgtgcacgaaccccccgttcagcccgaccgctgcgccttatccggtaactatcgtcttgagtccaacccggtaagacacgacttatcgccactggcagcagccactggtaacaggattagcagagcgaggtatgtaggcggtgctacagagttcttgaagtggtggcctaactacggctacactagaagaacagtatttggtatctgcgctctgctgaagccagttaccttcggaaaaagagttggtagctcttgatccggcaaacaaaccaccgctggtagcggtggtttttttgtttgcaagcagcagattacgcgcagaaaaaaaggatctcaagaagatcctttgatcttttctacggggtctgacgctctattcaacaaagccgccgtcccgtcaagtcagcgtaaatgggtagggggcttcaaatcgtcctcgtgataccaattcggagcctgcttttttgtacaaacttgttgataatggcaattcaaggatcttcacctagatccttttaaattaaaaatgaagttttaaatcaatctaaagtatatatgagtaaacttggtctgacagttaccaatgcttaatcagtgaggcacctatctcagcgatctgtctatttcgttcatccatagttgcctgactccccgtcgtgtagataactacgatacgggagggcttaccatctggccccagtgctgcaatgataccgcgagagccacgctcaccggctccagatttatcagcaataaaccagccagccggaagggccgagcgcagaagtggtcctgcaactttatccgcctccatccagtctattaattgttgccgggaagct

SEQ ID NO: 3653 - DNA, 3872 bp, synthetic construct
  source 1..3872: mol_type = other DNA; note = Coxiella Monotron, P1 exon min13
agagtaagtagttcgccagttaatagtttgcgcaacgttgttgccattgctacaggcatcgtggtgtcacgctcgtcgtttggtatggcttcattcagctccggttcccaacgatcaaggcgagttacatgatcccccatgttgtgcaaaaaagcggttagctccttcggtcctccgatcgttgtcagaagtaagttggccgcagtgttatcactcatggttatggcagcactgcataattctcttactgtcatgccatccgtaagatgcttttctgtgactggtgagtactcaaccaagtcattctgagaatagtgtatgcggcgaccgagttgctcttgcccggcgtcaatacgggataataccgcgccacatagcagaactttaaaagtgctcatcattggaaaacgttcttcggggcgaaaactctcaaggatcttaccgctgttgagatccagttcgatgtaacccactcgtgcacccaactgatcttcagcatcttttactttcaccagcgtttctgggtgagcaaaaacaggaaggcaaaatgccgcaaaaaagggaataagggcgacacggaaatgttgaatactcatactcttcctttttcaatattattgaagcatttatcagggttattgtctcatgagcggatacatatttgaatgtatttagaaaaataaacaaataggggttccgcgcacatttccccgaaaagtgccagatacctgaaacaaaacccatcgtacggccaaggaagtctccaataactgtgatccaccacaagcgccagggttttcccagtcacgacgttgtaaaacgacggccagtcatgcataatccgcacgcatctggaataaggaagtgccattccgcctgacctccaagctttaatacgactcactatagggagaccctcgaaaacaaaccacttgctgcgagccaaacaccaaacaaaacaaacacaaaccaacaaaaagtggccacgcccgggccaccgatacttcccttcactccttcgggactgttggggaggaacacaacagggctcccctgttttcccattccttcccccttttcccaaccccaaccgccgtatctggtggcggcaagacacacgggtctttccctctaaagcacaattgtgtgtgtgtcccaggtcctcctgcgtacggtgcgggagtgctcccacccaactgttgtaagcctgtccaacgcgtcgtcctggcaagactatgacgtcgcatgttccgctgcggatgccgaccgggtaaccggttccccagtgtgtgtagtgcgatcttccaggtcctcctggttggcgttgtccagaaactgcttcaggtaagtggggtgtgcccaatccctacaaaggttgattctttcaccaccttaggaatgctccggaggtaccccagcaacagctgggatctgaccggaggctaattgtctacgggtggtgtttcctttttcttttcacacaactctactgcgtacaactcactgactatccacttgctctgtcacgatgggagtgaaggtgctgttcgccctgatctgtattgccgtggccgaggccaagcctaccgagaacaacgaggacttcaacatcgtggccgtggcctccaatttcgccaccacagatctggacgccgacagaggaaagctgcccggcaagaagctgcctctggaagtgctgaaagagatggaagccaacgccagaaaggccggctgtaccagaggctgtctgatctgcctgagccacatcaagtgcacccctaagatgaagaagttcatccccggcagatgccacacctacgagggcgacaaagaatctgcccaaggcggaatcggagaggccatcgtggatatccctgagatccccggcttcaaggacctggaacctatggaacagtttatcgcccaggtggacctgtgcgtggactgtacaacaggctgcctgaaaggcctggccaacgtgcagtgtagcgacctgctgaagaagtggctgcctcagagatgcgccaccttcgcctctaagatccagggccaagtggacaagatcaaaggcgctggcggcgactaatagctaactagacaaaacaccaaacaaacaagctgcgagcctggggttagccctcgggcgaagctcttgatcgaagccccggtaaacggcggccgtaactataaattaaccgttgtagttacgtaaataaacttggctatatgctggaaactccgagtatcctccagtactcatctcaactaaaattgaggtagtaaaaatctgcgaggtgcggacaatcagcaggaaagactaatctttttgattagaatcctcagagactaatacgccgagcgtacttagaaaaaatccattctaagtgtgatgatagagtccgatctctatagcgatatagagggttttcaaaagaaacctgttaatcattatcccatgattaacataacgtcaataaacggtcctaaggtagcgaaattcctttcaacagtaagtctagatatcggatcccgggaggctaggtggaggctcagtgatgataagtctgcgatggtggatgcatgtgtcatggtcatagctgtttcctgtgtgaaattgttatccgctcagagggcacaatcctattccgcgctatccgacaatctccaagacattaggtggagttcagttcggcgtatggcatatgtcgctggaaagaacatgtgagcaaaaggccagcaaaaggccaggaaccgtaaaaaggccgcgttgctggcgtttttccataggctccgcccccctgacgagcatcacaaaaatcgacgctcaagtcagaggtggcgaaacccgacaggactataaagataccaggcgtttccccctggaagctccctcgtgcgctctcctgttccgaccctgccgcttaccggatacctgtccgcctttctcccttcgggaagcgtggcgctttctcatagctcacgctgtaggtatctcagttcggtgtaggtcgttcgctccaagctgggctgtgtgcacgaaccccccgttcagcccgaccgctgcgccttatccggtaactatcgtcttgagtccaacccggtaagacacgacttatcgccactggcagcagccactggtaacaggattagcagagcgaggtatgtaggcggtgctacagagttcttgaagtggtggcctaactacggctacactagaagaacagtatttggtatctgcgctctgctgaagccagttaccttcggaaaaagagttggtagctcttgatccggcaaacaaaccaccgctggtagcggtggtttttttgtttgcaagcagcagattacgcgcagaaaaaaaggatctcaagaagatcctttgatcttttctacggggtctgacgctctattcaacaaagccgccgtcccgtcaagtcagcgtaaatgggtagggggcttcaaatcgtcctcgtgataccaattcggagcctgcttttttgtacaaacttgttgataatggcaattcaaggatcttcacctagatccttttaaattaaaaatgaagttttaaatcaatctaaagtatatatgagtaaacttggtctgacagttaccaatgcttaatcagtgaggcacctatctcagcgatctgtctatttcgttcatccatagttgcctgactccccgtcgtgtagataactacgatacgggagggcttaccatctggccccagtgctgcaatgataccgcgagagccacgctcaccggctccagatttatcagcaataaaccagccagccggaagggccgagcgcagaagtggtcctgcaactttatccgcctccatccagtctattaattgttgccgggaagct

SEQ ID NO: 3654 - DNA, 3870 bp, synthetic construct
  source 1..3870: mol_type = other DNA; note = Coxiella Monotron, no P1 exon
agagtaagtagttcgccagttaatagtttgcgcaacgttgttgccattgctacaggcatcgtggtgtcacgctcgtcgtttggtatggcttcattcagctccggttcccaacgatcaaggcgagttacatgatcccccatgttgtgcaaaaaagcggttagctccttcggtcctccgatcgttgtcagaagtaagttggccgcagtgttatcactcatggttatggcagcactgcataattctcttactgtcatgccatccgtaagatgcttttctgtgactggtgagtactcaaccaagtcattctgagaatagtgtatgcggcgaccgagttgctcttgcccggcgtcaatacgggataataccgcgccacatagcagaactttaaaagtgctcatcattggaaaacgttcttcggggcgaaaactctcaaggatcttaccgctgttgagatccagttcgatgtaacccactcgtgcacccaactgatcttcagcatcttttactttcaccagcgtttctgggtgagcaaaaacaggaaggcaaaatgccgcaaaaaagggaataagggcgacacggaaatgttgaatactcatactcttcctttttcaatattattgaagcatttatcagggttattgtctcatgagcggatacatatttgaatgtatttagaaaaataaacaaataggggttccgcgcacatttccccgaaaagtgccagatacctgaaacaaaacccatcgtacggccaaggaagtctccaataactgtgatccaccacaagcgccagggttttcccagtcacgacgttgtaaaacgacggccagtcatgcataatccgcacgcatctggaataaggaagtgccattccgcctgacctccaagctttaatacgactcactatagggagaccctcgaaaacaaaccacgctgcgagccaaacaccaaacaaaacaaacacaaaccaacaaaaagtggccacgcccgggccaccgatacttcccttcactccttcgggactgttggggaggaacacaacagggctcccctgttttcccattccttcccccttttcccaaccccaaccgccgtatctggtggcggcaagacacacgggtctttccctctaaagcacaattgtgtgtgtgtcccaggtcctcctgcgtacggtgcgggagtgctcccacccaactgttgtaagcctgtccaacgcgtcgtcctggcaagactatgacgtcgcatgttccgctgcggatgccgaccgggtaaccggttccccagtgtgtgtagtgcgatcttccaggtcctcctggttggcgttgtccagaaactgcttcaggtaagtggggtgtgcccaatccctacaaaggttgattctttcaccaccttaggaatgctccggaggtaccccagcaacagctgggatctgaccggaggctaattgtctacgggtggtgtttcctttttcttttcacacaactctactgcgtacaactcactgactatccacttgctctgtcacgatgggagtgaaggtgctgttcgccctgatctgtattgccgtggccgaggccaagcctaccgagaacaacgaggacttcaacatcgtggccgtggcctccaatttcgccaccacagatctggacgccgacagaggaaagctgcccggcaagaagctgcctctggaagtgctgaaagagatggaagccaacgccagaaaggccggctgtaccagaggctgtctgatctgcctgagccacatcaagtgcacccctaagatgaagaagttcatccccggcagatgccacacctacgagggcgacaaagaatctgcccaaggcggaatcggagaggccatcgtggatatccctgagatccccggcttcaaggacctggaacctatggaacagtttatcgcccaggtggacctgtgcgtggactgtacaacaggctgcctgaaaggcctggccaacgtgcagtgtagcgacctgctgaagaagtggctgcctcagagatgcgccaccttcgcctctaagatccagggccaagtggacaagatcaaaggcgctggcggcgactaatagctaactagacaaaacaccaaacaaacaagctgcgagcctggggttagccctcgggcgaagctcttgatcgaagccccggtaaacggcggccgtaactataaattaaccgttgtagttacgtaaataaacttggctatatgctggaaactccgagtatcctccagtactcatctcaactaaaattgaggtagtaaaaatctgcgaggtgcggacaatcagcaggaaagactaatctttttgattagaatcctcagagactaatacgccgagcgtacttagaaaaaatccattctaagtgtgatgatagagtccgatctctatagcgatatagagggttttcaaaagaaacctgttaatcattatcccatgattaacataacgtcaataaacggtcctaaggtagcgaaattcctttcaacagtaagtctagatatcggatcccgggaggctaggtggaggctcagtgatgataagtctgcgatggtggatgcatgtgtcatggtcatagctgtttcctgtgtgaaattgttatccgctcagagggcacaatcctattccgcgctatccgacaatctccaagacattaggtggagttcagttcggcgtatggcatatgtcgctggaaagaacatgtgagcaaaaggccagcaaaaggccaggaaccgtaaaaaggccgcgttgctggcgtttttccataggctccgcccccctgacgagcatcacaaaaatcgacgctcaagtcagaggtggcgaaacccgacaggactataaagataccaggcgtttccccctggaagctccctcgtgcgctctcctgttccgaccctgccgcttaccggatacctgtccgcctttctcccttcgggaagcgtggcgctttctcatagctcacgctgtaggtatctcagttcggtgtaggtcgttcgctccaagctgggctgtgtgcacgaaccccccgttcagcccgaccgctgcgccttatccggtaactatcgtcttgagtccaacccggtaagacacgacttatcgccactggcagcagccactggtaacaggattagcagagcgaggtatgtaggcggtgctacagagttcttgaagtggtggcctaactacggctacactagaagaacagtatttggtatctgcgctctgctgaagccagttaccttcggaaaaagagttggtagctcttgatccggcaaacaaaccaccgctggtagcggtggtttttttgtttgcaagcagcagattacgcgcagaaaaaaaggatctcaagaagatcctttgatcttttctacggggtctgacgctctattcaacaaagccgccgtcccgtcaagtcagcgtaaatgggtagggggcttcaaatcgtcctcgtgataccaattcggagcctgcttttttgtacaaacttgttgataatggcaattcaaggatcttcacctagatccttttaaattaaaaatgaagttttaaatcaatctaaagtatatatgagtaaacttggtctgacagttaccaatgcttaatcagtgaggcacctatctcagcgatctgtctatttcgttcatccatagttgcctgactccccgtcgtgtagataactacgatacgggagggcttaccatctggccccagtgctgcaatgataccgcgagagccacgctcaccggctccagatttatcagcaataaaccagccagccggaagggccgagcgcagaagtggtcctgcaactttatccgcctccatccagtctattaattgttgccgggaagct

SEQ ID NO: 3655 - DNA, 3883 bp, synthetic construct
  source 1..3883: mol_type = other DNA; note = Coxiella Monotron, P1 exon min1, P2 exon min1
agagtaagtagttcgccagttaatagtttgcgcaacgttgttgccattgctacaggcatcgtggtgtcacgctcgtcgtttggtatggcttcattcagctccggttcccaacgatcaaggcgagttacatgatcccccatgttgtgcaaaaaagcggttagctccttcggtcctccgatcgttgtcagaagtaagttggccgcagtgttatcactcatggttatggcagcactgcataattctcttactgtcatgccatccgtaagatgcttttctgtgactggtgagtactcaaccaagtcattctgagaatagtgtatgcggcgaccgagttgctcttgcccggcgtcaatacgggataataccgcgccacatagcagaactttaaaagtgctcatcattggaaaacgttcttcggggcgaaaactctcaaggatcttaccgctgttgagatccagttcgatgtaacccactcgtgcacccaactgatcttcagcatcttttactttcaccagcgtttctgggtgagcaaaaacaggaaggcaaaatgccgcaaaaaagggaataagggcgacacggaaatgttgaatactcatactcttcctttttcaatattattgaagcatttatcagggttattgtctcatgagcggatacatatttgaatgtatttagaaaaataaacaaataggggttccgcgcacatttccccgaaaagtgccagatacctgaaacaaaacccatcgtacggccaaggaagtctccaataactgtgatccaccacaagcgccagggttttcccagtcacgacgttgtaaaacgacggccagtcatgcataatccgcacgcatctggaataaggaagtgccattccgcctgacctccaagctttaatacgactcactatagggagaccctcgaaaacaaaccactcgggtaaaaaattgctgcgagccaaacaccaaacaaaacaaacacaaaccaacaaaaagtggccacgcccgggccaccgatacttcccttcactccttcgggactgttggggaggaacacaacagggctcccctgttttcccattccttcccccttttcccaaccccaaccgccgtatctggtggcggcaagacacacgggtctttccctctaaagcacaattgtgtgtgtgtcccaggtcctcctgcgtacggtgcgggagtgctcccacccaactgttgtaagcctgtccaacgcgtcgtcctggcaagactatgacgtcgcatgttccgctgcggatgccgaccgggtaaccggttccccagtgtgtgtagtgcgatcttccaggtcctcctggttggcgttgtccagaaactgcttcaggtaagtggggtgtgcccaatccctacaaaggttgattctttcaccaccttaggaatgctccggaggtaccccagcaacagctgggatctgaccggaggctaattgtctacgggtggtgtttcctttttcttttcacacaactctactgcgtacaactcactgactatccacttgctctgtcacgatgggagtgaaggtgctgttcgccctgatctgtattgccgtggccgaggccaagcctaccgagaacaacgaggacttcaacatcgtggccgtggcctccaatttcgccaccacagatctggacgccgacagaggaaagctgcccggcaagaagctgcctctggaagtgctgaaagagatggaagccaacgccagaaaggccggctgtaccagaggctgtctgatctgcctgagccacatcaagtgcacccctaagatgaagaagttcatccccggcagatgccacacctacgagggcgacaaagaatctgcccaaggcggaatcggagaggccatcgtggatatccctgagatccccggcttcaaggacctggaacctatggaacagtttatcgcccaggtggacctgtgcgtggactgtacaacaggctgcctgaaaggcctggccaacgtgcagtgtagcgacctgctgaagaagtggctgcctcagagatgcgccaccttcgcctctaagatccagggccaagtggacaagatcaaaggcgctggcggcgactaatagctaactagacaaaacaccaaacaaacaagctgcgagcctggggttagccctcggcgaagctcttgatcgaagccccggtaaacggcggccgtaactataaattaaccgttgtagttacgtaaataaacttggctatatgctggaaactccgagtatcctccagtactcatctcaactaaaattgaggtagtaaaaatctgcgaggtgcggacaatcagcaggaaagactaatctttttgattagaatcctcagagactaatacgccgagcgtacttagaaaaaatccattctaagtgtgatgatagagtccgatctctatagcgatatagagggttttcaaaagaaacctgttaatcattatcccatgattaacataacgtcaataaacggtcctaaggtagcgaaattcctttcaacagtaagtctagatatcggatcccgggaggctaggtggaggctcagtgatgataagtctgcgatggtggatgcatgtgtcatggtcatagctgtttcctgtgtgaaattgttatccgctcagagggcacaatcctattccgcgctatccgacaatctccaagacattaggtggagttcagttcggcgtatggcatatgtcgctggaaagaacatgtgagcaaaaggccagcaaaaggccaggaaccgtaaaaaggccgcgttgctggcgtttttccataggctccgcccccctgacgagcatcacaaaaatcgacgctcaagtcagaggtggcgaaacccgacaggactataaagataccaggcgtttccccctggaagctccctcgtgcgctctcctgttccgaccctgccgcttaccggatacctgtccgcctttctcccttcgggaagcgtggcgctttctcatagctcacgctgtaggtatctcagttcggtgtaggtcgttcgctccaagctgggctgtgtgcacgaaccccccgttcagcccgaccgctgcgccttatccggtaactatcgtcttgagtccaacccggtaagacacgacttatcgccactggcagcagccactggtaacaggattagcagagcgaggtatgtaggcggtgctacagagttcttgaagtggtggcctaactacggctacactagaagaacagtatttggtatctgcgctctgctgaagccagttaccttcggaaaaagagttggtagctcttgatccggcaaacaaaccaccgctggtagcggtggtttttttgtttgcaagcagcagattacgcgcagaaaaaaaggatctcaagaagatcctttgatcttttctacggggtctgacgctctattcaacaaagccgccgtcccgtcaagtcagcgtaaatgggtagggggcttcaaatcgtcctcgtgataccaattcggagcctgcttttttgtacaaacttgttgataatggcaattcaaggatcttcacctagatccttttaaattaaaaatgaagttttaaatcaatctaaagtatatatgagtaaacttggtctgacagttaccaatgcttaatcagtgaggcacctatctcagcgatctgtctatttcgttcatccatagttgcctgactccccgtcgtgtagataactacgatacgggagggcttaccatctggccccagtgctgcaatgataccgcgagagccacgctcaccggctccagatttatcagcaataaaccagccagccggaagggccgagcgcagaagtggtcctgcaactttatccgcctccatccagtctattaattgttgccgggaagct

SEQ ID NO: 3656 - DNA, 3877 bp, synthetic construct
  source 1..3877: mol_type = other DNA; note = Coxiella Monotron, P1 exon min4, P2 exon min4
agagtaagtagttcgccagttaatagtttgcgcaacgttgttgccattgctacaggcatcgtggtgtcacgctcgtcgtttggtatggcttcattcagctccggttcccaacgatcaaggcgagttacatgatcccccatgttgtgcaaaaaagcggttagctccttcggtcctccgatcgttgtcagaagtaagttggccgcagtgttatcactcatggttatggcagcactgcataattctcttactgtcatgccatccgtaagatgcttttctgtgactggtgagtactcaaccaagtcattctgagaatagtgtatgcggcgaccgagttgctcttgcccggcgtcaatacgggataataccgcgccacatagcagaactttaaaagtgctcatcattggaaaacgttcttcggggcgaaaactctcaaggatcttaccgctgttgagatccagttcgatgtaacccactcgtgcacccaactgatcttcagcatcttttactttcaccagcgtttctgggtgagcaaaaacaggaaggcaaaatgccgcaaaaaagggaataagggcgacacggaaatgttgaatactcatactcttcctttttcaatattattgaagcatttatcagggttattgtctcatgagcggatacatatttgaatgtatttagaaaaataaacaaataggggttccgcgcacatttccccgaaaagtgccagatacctgaaacaaaacccatcgtacggccaaggaagtctccaataactgtgatccaccacaagcgccagggttttcccagtcacgacgttgtaaaacgacggccagtcatgcataatccgcacgcatctggaataaggaagtgccattccgcctgacctccaagctttaatacgactcactatagggagaccctcgaaaacaaaccacggtaaaaaattgctgcgagccaaacaccaaacaaaacaaacacaaaccaacaaaaagtggccacgcccgggccaccgatacttcccttcactccttcgggactgttggggaggaacacaacagggctcccctgttttcccattccttcccccttttcccaaccccaaccgccgtatctggtggcggcaagacacacgggtctttccctctaaagcacaattgtgtgtgtgtcccaggtcctcctgcgtacggtgcgggagtgctcccacccaactgttgtaagcctgtccaacgcgtcgtcctggcaagactatgacgtcgcatgttccgctgcggatgccgaccgggtaaccggttccccagtgtgtgtagtgcgatcttccaggtcctcctggttggcgttgtccagaaactgcttcaggtaagtggggtgtgcccaatccctacaaaggttgattctttcaccaccttaggaatgctccggaggtaccccagcaacagctgggatctgaccggaggctaattgtctacgggtggtgtttcctttttcttttcacacaactctactgcgtacaactcactgactatccacttgctctgtcacgatgggagtgaaggtgctgttcgccctgatctgtattgccgtggccgaggccaagcctaccgagaacaacgaggacttcaacatcgtggccgtggcctccaatttcgccaccacagatctggacgccgacagaggaaagctgcccggcaagaagctgcctctggaagtgctgaaagagatggaagccaacgccagaaaggccggctgtaccagaggctgtctgatctgcctgagccacatcaagtgcacccctaagatgaagaagttcatccccggcagatgccacacctacgagggcgacaaagaatctgcccaaggcggaatcggagaggccatcgtggatatccctgagatccccggcttcaaggacctggaacctatggaacagtttatcgcccaggtggacctgtgcgtggactgtacaacaggctgcctgaaaggcctggccaacgtgcagtgtagcgacctgctgaagaagtggctgcctcagagatgcgccaccttcgcctctaagatccagggccaagtggacaagatcaaaggcgctggcggcgactaatagctaactagacaaaacaccaaacaaacaagctgcgagcctggggttagccggcgaagctcttgatcgaagccccggtaaacggcggccgtaactataaattaaccgttgtagttacgtaaataaacttggctatatgctggaaactccgagtatcctccagtactcatctcaactaaaattgaggtagtaaaaatctgcgaggtgcggacaatcagcaggaaagactaatctttttgattagaatcctcagagactaatacgccgagcgtacttagaaaaaatccattctaagtgtgatgatagagtccgatctctatagcgatatagagggttttcaaaagaaacctgttaatcattatcccatgattaacataacgtcaataaacggtcctaaggtagcgaaattcctttcaacagtaagtctagatatcggatcccgggaggctaggtggaggctcagtgatgataagtctgcgatggtggatgcatgtgtcatggtcatagctgtttcctgtgtgaaattgttatccgctcagagggcacaatcctattccgcgctatccgacaatctccaagacattaggtggagttcagttcggcgtatggcatatgtcgctggaaagaacatgtgagcaaaaggccagcaaaaggccaggaaccgtaaaaaggccgcgttgctggcgtttttccataggctccgcccccctgacgagcatcacaaaaatcgacgctcaagtcagaggtggcgaaacccgacaggactataaagataccaggcgtttccccctggaagctccctcgtgcgctctcctgttccgaccctgccgcttaccggatacctgtccgcctttctcccttcgggaagcgtggcgctttctcatagctcacgctgtaggtatctcagttcggtgtaggtcgttcgctccaagctgggctgtgtgcacgaaccccccgttcagcccgaccgctgcgccttatccggtaactatcgtcttgagtccaacccggtaagacacgacttatcgccactggcagcagccactggtaacaggattagcagagcgaggtatgtaggcggtgctacagagttcttgaagtggtggcctaactacggctacactagaagaacagtatttggtatctgcgctctgctgaagccagttaccttcggaaaaagagttggtagctcttgatccggcaaacaaaccaccgctggtagcggtggtttttttgtttgcaagcagcagattacgcgcagaaaaaaaggatctcaagaagatcctttgatcttttctacggggtctgacgctctattcaacaaagccgccgtcccgtcaagtcagcgtaaatgggtagggggcttcaaatcgtcctcgtgataccaattcggagcctgcttttttgtacaaacttgttgataatggcaattcaaggatcttcacctagatccttttaaattaaaaatgaagttttaaatcaatctaaagtatatatgagtaaacttggtctgacagttaccaatgcttaatcagtgaggcacctatctcagcgatctgtctatttcgttcatccatagttgcctgactccccgtcgtgtagataactacgatacgggagggcttaccatctggccccagtgctgcaatgataccgcgagagccacgctcaccggctccagatttatcagcaataaaccagccagccggaagggccgagcgcagaagtggtcctgcaactttatccgcctccatccagtctattaattgttgccgggaagct

SEQ ID NO: 3657 - DNA, 3875 bp, synthetic construct
  source 1..3875: mol_type = other DNA; note = Coxiella Monotron, P1 exon min5, P2 exon min5
agagtaagtagttcgccagttaatagtttgcgcaacgttgttgccattgctacaggcatcgtggtgtcacgctcgtcgtttggtatggcttcattcagctccggttcccaacgatcaaggcgagttacatgatcccccatgttgtgcaaaaaagcggttagctccttcggtcctccgatcgttgtcagaagtaagttggccgcagtgttatcactcatggttatggcagcactgcataattctcttactgtcatgccatccgtaagatgcttttctgtgactggtgagtactcaaccaagtcattctgagaatagtgtatgcggcgaccgagttgctcttgcccggcgtcaatacgggataataccgcgccacatagcagaactttaaaagtgctcatcattggaaaacgttcttcggggcgaaaactctcaaggatcttaccgctgttgagatccagttcgatgtaacccactcgtgcacccaactgatcttcagcatcttttactttcaccagcgtttctgggtgagcaaaaacaggaaggcaaaatgccgcaaaaaagggaataagggcgacacggaaatgttgaatactcatactcttcctttttcaatattattgaagcatttatcagggttattgtctcatgagcggatacatatttgaatgtatttagaaaaataaacaaataggggttccgcgcacatttccccgaaaagtgccagatacctgaaacaaaacccatcgtacggccaaggaagtctccaataactgtgatccaccacaagcgccagggttttcccagtcacgacgttgtaaaacgacggccagtcatgcataatccgcacgcatctggaataaggaagtgccattccgcctgacctccaagctttaatacgactcactatagggagaccctcgaaaacaaaccacgtaaaaaattgctgcgagccaaacaccaaacaaaacaaacacaaaccaacaaaaagtggccacgcccgggccaccgatacttcccttcactccttcgggactgttggggaggaacacaacagggctcccctgttttcccattccttcccccttttcccaaccccaaccgccgtatctggtggcggcaagacacacgggtctttccctctaaagcacaattgtgtgtgtgtcccaggtcctcctgcgtacggtgcgggagtgctcccacccaactgttgtaagcctgtccaacgcgtcgtcctggcaagactatgacgtcgcatgttccgctgcggatgccgaccgggtaaccggttccccagtgtgtgtagtgcgatcttccaggtcctcctggttggcgttgtccagaaactgcttcaggtaagtggggtgtgcccaatccctacaaaggttgattctttcaccaccttaggaatgctccggaggtaccccagcaacagctgggatctgaccggaggctaattgtctacgggtggtgtttcctttttcttttcacacaactctactgcgtacaactcactgactatccacttgctctgtcacgatgggagtgaaggtgctgttcgccctgatctgtattgccgtggccgaggccaagcctaccgagaacaacgaggacttcaacatcgtggccgtggcctccaatttcgccaccacagatctggacgccgacagaggaaagctgcccggcaagaagctgcctctggaagtgctgaaagagatggaagccaacgccagaaaggccggctgtaccagaggctgtctgatctgcctgagccacatcaagtgcacccctaagatgaagaagttcatccccggcagatgccacacctacgagggcgacaaagaatctgcccaaggcggaatcggagaggccatcgtggatatccctgagatccccggcttcaaggacctggaacctatggaacagtttatcgcccaggtggacctgtgcgtggactgtacaacaggctgcctgaaaggcctggccaacgtgcagtgtagcgacctgctgaagaagtggctgcctcagagatgcgccaccttcgcctctaagatccagggccaagtggacaagatcaaaggcgctggcggcgactaatagctaactagacaaaacaccaaacaaacaagctgcgagcctggggttagcggcgaagctcttgatcgaagccccggtaaacggcggccgtaactataaattaaccgttgtagttacgtaaataaacttggctatatgctggaaactccgagtatcctccagtactcatctcaactaaaattgaggtagtaaaaatctgcgaggtgcggacaatcagcaggaaagactaatctttttgattagaatcctcagagactaatacgccgagcgtacttagaaaaaatccattctaagtgtgatgatagagtccgatctctatagcgatatagagggttttcaaaagaaacctgttaatcattatcccatgattaacataacgtcaataaacggtcctaaggtagcgaaattcctttcaacagtaagtctagatatcggatcccgggaggctaggtggaggctcagtgatgataagtctgcgatggtggatgcatgtgtcatggtcatagctgtttcctgtgtgaaattgttatccgctcagagggcacaatcctattccgcgctatccgacaatctccaagacattaggtggagttcagttcggcgtatggcatatgtcgctggaaagaacatgtgagcaaaaggccagcaaaaggccaggaaccgtaaaaaggccgcgttgctggcgtttttccataggctccgcccccctgacgagcatcacaaaaatcgacgctcaagtcagaggtggcgaaacccgacaggactataaagataccaggcgtttccccctggaagctccctcgtgcgctctcctgttccgaccctgccgcttaccggatacctgtccgcctttctcccttcgggaagcgtggcgctttctcatagctcacgctgtaggtatctcagttcggtgtaggtcgttcgctccaagctgggctgtgtgcacgaaccccccgttcagcccgaccgctgcgccttatccggtaactatcgtcttgagtccaacccggtaagacacgacttatcgccactggcagcagccactggtaacaggattagcagagcgaggtatgtaggcggtgctacagagttcttgaagtggtggcctaactacggctacactagaagaacagtatttggtatctgcgctctgctgaagccagttaccttcggaaaaagagttggtagctcttgatccggcaaacaaaccaccgctggtagcggtggtttttttgtttgcaagcagcagattacgcgcagaaaaaaaggatctcaagaagatcctttgatcttttctacggggtctgacgctctattcaacaaagccgccgtcccgtcaagtcagcgtaaatgggtagggggcttcaaatcgtcctcgtgataccaattcggagcctgcttttttgtacaaacttgttgataatggcaattcaaggatcttcacctagatccttttaaattaaaaatgaagttttaaatcaatctaaagtatatatgagtaaacttggtctgacagttaccaatgcttaatcagtgaggcacctatctcagcgatctgtctatttcgttcatccatagttgcctgactccccgtcgtgtagataactacgatacgggagggcttaccatctggccccagtgctgcaatgataccgcgagagccacgctcaccggctccagatttatcagcaataaaccagccagccggaagggccgagcgcagaagtggtcctgcaactttatccgcctccatccagtctattaattgttgccgggaagct

SEQ ID NO: 3658 - DNA, 3873 bp, synthetic construct
  source 1..3873: mol_type = other DNA; note = Coxiella Monotron, P1 exon min6, P2 exon min6
agagtaagtagttcgccagttaatagtttgcgcaacgttgttgccattgctacaggcatcgtggtgtcacgctcgtcgtttggtatggcttcattcagctccggttcccaacgatcaaggcgagttacatgatcccccatgttgtgcaaaaaagcggttagctccttcggtcctccgatcgttgtcagaagtaagttggccgcagtgttatcactcatggttatggcagcactgcataattctcttactgtcatgccatccgtaagatgcttttctgtgactggtgagtactcaaccaagtcattctgagaatagtgtatgcggcgaccgagttgctcttgcccggcgtcaatacgggataataccgcgccacatagcagaactttaaaagtgctcatcattggaaaacgttcttcggggcgaaaactctcaaggatcttaccgctgttgagatccagttcgatgtaacccactcgtgcacccaactgatcttcagcatcttttactttcaccagcgtttctgggtgagcaaaaacaggaaggcaaaatgccgcaaaaaagggaataagggcgacacggaaatgttgaatactcatactcttcctttttcaatattattgaagcatttatcagggttattgtctcatgagcggatacatatttgaatgtatttagaaaaataaacaaataggggttccgcgcacatttccccgaaaagtgccagatacctgaaacaaaacccatcgtacggccaaggaagtctccaataactgtgatccaccacaagcgccagggttttcccagtcacgacgttgtaaaacgacggccagtcatgcataatccgcacgcatctggaataaggaagtgccattccgcctgacctccaagctttaatacgactcactatagggagaccctcgaaaacaaaccactaaaaaattgctgcgagccaaacaccaaacaaaacaaacacaaaccaacaaaaagtggccacgcccgggccaccgatacttcccttcactccttcgggactgttggggaggaacacaacagggctcccctgttttcccattccttcccccttttcccaaccccaaccgccgtatctggtggcggcaagacacacgggtctttccctctaaagcacaattgtgtgtgtgtcccaggtcctcctgcgtacggtgcgggagtgctcccacccaactgttgtaagcctgtccaacgcgtcgtcctggcaagactatgacgtcgcatgttccgctgcggatgccgaccgggtaaccggttccccagtgtgtgtagtgcgatcttccaggtcctcctggttggcgttgtccagaaactgcttcaggtaagtggggtgtgcccaatccctacaaaggttgattctttcaccaccttaggaatgctccggaggtaccccagcaacagctgggatctgaccggaggctaattgtctacgggtggtgtttcctttttcttttcacacaactctactgcgtacaactcactgactatccacttgctctgtcacgatgggagtgaaggtgctgttcgccctgatctgtattgccgtggccgaggccaagcctaccgagaacaacgaggacttcaacatcgtggccgtggcctccaatttcgccaccacagatctggacgccgacagaggaaagctgcccggcaagaagctgcctctggaagtgctgaaagagatggaagccaacgccagaaaggccggctgtaccagaggctgtctgatctgcctgagccacatcaagtgcacccctaagatgaagaagttcatccccggcagatgccacacctacgagggcgacaaagaatctgcccaaggcggaatcggagaggccatcgtggatatccctgagatccccggcttcaaggacctggaacctatggaacagtttatcgcccaggtggacctgtgcgtggactgtacaacaggctgcctgaaaggcctggccaacgtgcagtgtagcgacctgctgaagaagtggctgcctcagagatgcgccaccttcgcctctaagatccagggccaagtggacaagatcaaaggcgctggcggcgactaatagctaactagacaaaacaccaaacaaacaagctgcgagcctggggttagggcgaagctcttgatcgaagccccggtaaacggcggccgtaactataaattaaccgttgtagttacgtaaataaacttggctatatgctggaaactccgagtatcctccagtactcatctcaactaaaattgaggtagtaaaaatctgcgaggtgcggacaatcagcaggaaagactaatctttttgattagaatcctcagagactaatacgccgagcgtacttagaaaaaatccattctaagtgtgatgatagagtccgatctctatagcgatatagagggttttcaaaagaaacctgttaatcattatcccatgattaacataacgtcaataaacggtcctaaggtagcgaaattcctttcaacagtaagtctagatatcggatcccgggaggctaggtggaggctcagtgatgataagtctgcgatggtggatgcatgtgtcatggtcatagctgtttcctgtgtgaaattgttatccgctcagagggcacaatcctattccgcgctatccgacaatctccaagacattaggtggagttcagttcggcgtatggcatatgtcgctggaaagaacatgtgagcaaaaggccagcaaaaggccaggaaccgtaaaaaggccgcgttgctggcgtttttccataggctccgcccccctgacgagcatcacaaaaatcgacgctcaagtcagaggtggcgaaacccgacaggactataaagataccaggcgtttccccctggaagctccctcgtgcgctctcctgttccgaccctgccgcttaccggatacctgtccgcctttctcccttcgggaagcgtggcgctttctcatagctcacgctgtaggtatctcagttcggtgtaggtcgttcgctccaagctgggctgtgtgcacgaaccccccgttcagcccgaccgctgcgccttatccggtaactatcgtcttgagtccaacccggtaagacacgacttatcgccactggcagcagccactggtaacaggattagcagagcgaggtatgtaggcggtgctacagagttcttgaagtggtggcctaactacggctacactagaagaacagtatttggtatctgcgctctgctgaagccagttaccttcggaaaaagagttggtagctcttgatccggcaaacaaaccaccgctggtagcggtggtttttttgtttgcaagcagcagattacgcgcagaaaaaaaggatctcaagaagatcctttgatcttttctacggggtctgacgctctattcaacaaagccgccgtcccgtcaagtcagcgtaaatgggtagggggcttcaaatcgtcctcgtgataccaattcggagcctgcttttttgtacaaacttgttgataatggcaattcaaggatcttcacctagatccttttaaattaaaaatgaagttttaaatcaatctaaagtatatatgagtaaacttggtctgacagttaccaatgcttaatcagtgaggcacctatctcagcgatctgtctatttcgttcatccatagttgcctgactccccgtcgtgtagataactacgatacgggagggcttaccatctggccccagtgctgcaatgataccgcgagagccacgctcaccggctccagatttatcagcaataaaccagccagccggaagggccgagcgcagaagtggtcctgcaactttatccgcctccatccagtctattaattgttgccgggaagct

SEQ ID NO: 3659 - DNA, 3869 bp, synthetic construct
  source 1..3869: mol_type = other DNA; note = Coxiella Monotron, P1 exon min8, P2 exon min8
agagtaagtagttcgccagttaatagtttgcgcaacgttgttgccattgctacaggcatcgtggtgtcacgctcgtcgtttggtatggcttcattcagctccggttcccaacgatcaaggcgagttacatgatcccccatgttgtgcaaaaaagcggttagctccttcggtcctccgatcgttgtcagaagtaagttggccgcagtgttatcactcatggttatggcagcactgcataattctcttactgtcatgccatccgtaagatgcttttctgtgactggtgagtactcaaccaagtcattctgagaatagtgtatgcggcgaccgagttgctcttgcccggcgtcaatacgggataataccgcgccacatagcagaactttaaaagtgctcatcattggaaaacgttcttcggggcgaaaactctcaaggatcttaccgctgttgagatccagttcgatgtaacccactcgtgcacccaactgatcttcagcatcttttactttcaccagcgtttctgggtgagcaaaaacaggaaggcaaaatgccgcaaaaaagggaataagggcgacacggaaatgttgaatactcatactcttcctttttcaatattattgaagcatttatcagggttattgtctcatgagcggatacatatttgaatgtatttagaaaaataaacaaataggggttccgcgcacatttccccgaaaagtgccagatacctgaaacaaaacccatcgtacggccaaggaagtctccaataactgtgatccaccacaagcgccagggttttcccagtcacgacgttgtaaaacgacggccagtcatgcataatccgcacgcatctggaataaggaagtgccattccgcctgacctccaagctttaatacgactcactatagggagaccctcgaaaacaaaccacaaaaattgctgcgagccaaacaccaaacaaaacaaacacaaaccaacaaaaagtggccacgcccgggccaccgatacttcccttcactccttcgggactgttggggaggaacacaacagggctcccctgttttcccattccttcccccttttcccaaccccaaccgccgtatctggtggcggcaagacacacgggtctttccctctaaagcacaattgtgtgtgtgtcccaggtcctcctgcgtacggtgcgggagtgctcccacccaactgttgtaagcctgtccaacgcgtcgtcctggcaagactatgacgtcgcatgttccgctgcggatgccgaccgggtaaccggttccccagtgtgtgtagtgcgatcttccaggtcctcctggttggcgttgtccagaaactgcttcaggtaagtggggtgtgcccaatccctacaaaggttgattctttcaccaccttaggaatgctccggaggtaccccagcaacagctgggatctgaccggaggctaattgtctacgggtggtgtttcctttttcttttcacacaactctactgcgtacaactcactgactatccacttgctctgtcacgatgggagtgaaggtgctgttcgccctgatctgtattgccgtggccgaggccaagcctaccgagaacaacgaggacttcaacatcgtggccgtggcctccaatttcgccaccacagatctggacgccgacagaggaaagctgcccggcaagaagctgcctctggaagtgctgaaagagatggaagccaacgccagaaaggccggctgtaccagaggctgtctgatctgcctgagccacatcaagtgcacccctaagatgaagaagttcatccccggcagatgccacacctacgagggcgacaaagaatctgcccaaggcggaatcggagaggccatcgtggatatccctgagatccccggcttcaaggacctggaacctatggaacagtttatcgcccaggtggacctgtgcgtggactgtacaacaggctgcctgaaaggcctggccaacgtgcagtgtagcgacctgctgaagaagtggctgcctcagagatgcgccaccttcgcctctaagatccagggccaagtggacaagatcaaaggcgctggcggcgactaatagctaactagacaaaacaccaaacaaacaagctgcgagcctggggttggcgaagctcttgatcgaagccccggtaaacggcggccgtaactataaattaaccgttgtagttacgtaaataaacttggctatatgctggaaactccgagtatcctccagtactcatctcaactaaaattgaggtagtaaaaatctgcgaggtgcggacaatcagcaggaaagactaatctttttgattagaatcctcagagactaatacgccgagcgtacttagaaaaaatccattctaagtgtgatgatagagtccgatctctatagcgatatagagggttttcaaaagaaacctgttaatcattatcccatgattaacataacgtcaataaacggtcctaaggtagcgaaattcctttcaacagtaagtctagatatcggatcccgggaggctaggtggaggctcagtgatgataagtctgcgatggtggatgcatgtgtcatggtcatagctgtttcctgtgtgaaattgttatccgctcagagggcacaatcctattccgcgctatccgacaatctccaagacattaggtggagttcagttcggcgtatggcatatgtcgctggaaagaacatgtgagcaaaaggccagcaaaaggccaggaaccgtaaaaaggccgcgttgctggcgtttttccataggctccgcccccctgacgagcatcacaaaaatcgacgctcaagtcagaggtggcgaaacccgacaggactataaagataccaggcgtttccccctggaagctccctcgtgcgctctcctgttccgaccctgccgcttaccggatacctgtccgcctttctcccttcgggaagcgtggcgctttctcatagctcacgctgtaggtatctcagttcggtgtaggtcgttcgctccaagctgggctgtgtgcacgaaccccccgttcagcccgaccgctgcgccttatccggtaactatcgtcttgagtccaacccggtaagacacgacttatcgccactggcagcagccactggtaacaggattagcagagcgaggtatgtaggcggtgctacagagttcttgaagtggtggcctaactacggctacactagaagaacagtatttggtatctgcgctctgctgaagccagttaccttcggaaaaagagttggtagctcttgatccggcaaacaaaccaccgctggtagcggtggtttttttgtttgcaagcagcagattacgcgcagaaaaaaaggatctcaagaagatcctttgatcttttctacggggtctgacgctctattcaacaaagccgccgtcccgtcaagtcagcgtaaatgggtagggggcttcaaatcgtcctcgtgataccaattcggagcctgcttttttgtacaaacttgttgataatggcaattcaaggatcttcacctagatccttttaaattaaaaatgaagttttaaatcaatctaaagtatatatgagtaaacttggtctgacagttaccaatgcttaatcagtgaggcacctatctcagcgatctgtctatttcgttcatccatagttgcctgactccccgtcgtgtagataactacgatacgggagggcttaccatctggccccagtgctgcaatgataccgcgagagccacgctcaccggctccagatttatcagcaataaaccagccagccggaagggccgagcgcagaagtggtcctgcaactttatccgcctccatccagtctattaattgttgccgggaagct

SEQ ID NO: 3660 - DNA, 3865 bp, synthetic construct
  source 1..3865: mol_type = other DNA; note = Coxiella Monotron, P1 exon min10, P2 exon min10
agagtaagtagttcgccagttaatagtttgcgcaacgttgttgccattgctacaggcatcgtggtgtcacgctcgtcgtttggtatggcttcattcagctccggttcccaacgatcaaggcgagttacatgatcccccatgttgtgcaaaaaagcggttagctccttcggtcctccgatcgttgtcagaagtaagttggccgcagtgttatcactcatggttatggcagcactgcataattctcttactgtcatgccatccgtaagatgcttttctgtgactggtgagtactcaaccaagtcattctgagaatagtgtatgcggcgaccgagttgctcttgcccggcgtcaatacgggataataccgcgccacatagcagaactttaaaagtgctcatcattggaaaacgttcttcggggcgaaaactctcaaggatcttaccgctgttgagatccagttcgatgtaacccactcgtgcacccaactgatcttcagcatcttttactttcaccagcgtttctgggtgagcaaaaacaggaaggcaaaatgccgcaaaaaagggaataagggcgacacggaaatgttgaatactcatactcttcctttttcaatattattgaagcatttatcagggttattgtctcatgagcggatacatatttgaatgtatttagaaaaataaacaaataggggttccgcgcacatttccccgaaaagtgccagatacctgaaacaaaacccatcgtacggccaaggaagtctccaataactgtgatccaccacaagcgccagggttttcccagtcacgacgttgtaaaacgacggccagtcatgcataatccgcacgcatctggaataaggaagtgccattccgcctgacctccaagctttaatacgactcactatagggagaccctcgaaaacaaaccacaaattgctgcgagccaaacaccaaacaaaacaaacacaaaccaacaaaaagtggccacgcccgggccaccgatacttcccttcactccttcgggactgttggggaggaacacaacagggctcccctgttttcccattccttcccccttttcccaaccccaaccgccgtatctggtggcggcaagacacacgggtctttccctctaaagcacaattgtgtgtgtgtcccaggtcctcctgcgtacggtgcgggagtgctcccacccaactgttgtaagcctgtccaacgcgtcgtcctggcaagactatgacgtcgcatgttccgctgcggatgccgaccgggtaaccggttccccagtgtgtgtagtgcgatcttccaggtcctcctggttggcgttgtccagaaactgcttcaggtaagtggggtgtgcccaatccctacaaaggttgattctttcaccaccttaggaatgctccggaggtaccccagcaacagctgggatctgaccggaggctaattgtctacgggtggtgtttcctttttcttttcacacaactctactgcgtacaactcactgactatccacttgctctgtcacgatgggagtgaaggtgctgttcgccctgatctgtattgccgtggccgaggccaagcctaccgagaacaacgaggacttcaacatcgtggccgtggcctccaatttcgccaccacagatctggacgccgacagaggaaagctgcccggcaagaagctgcctctggaagtgctgaaagagatggaagccaacgccagaaaggccggctgtaccagaggctgtctgatctgcctgagccacatcaagtgcacccctaagatgaagaagttcatccccggcagatgccacacctacgagggcgacaaagaatctgcccaaggcggaatcggagaggccatcgtggatatccctgagatccccggcttcaaggacctggaacctatggaacagtttatcgcccaggtggacctgtgcgtggactgtacaacaggctgcctgaaaggcctggccaacgtgcagtgtagcgacctgctgaagaagtggctgcctcagagatgcgccaccttcgcctctaagatccagggccaagtggacaagatcaaaggcgctggcggcgactaatagctaactagacaaaacaccaaacaaacaagctgcgagcctggggggcgaagctcttgatcgaagccccggtaaacggcggccgtaactataaattaaccgttgtagttacgtaaataaacttggctatatgctggaaactccgagtatcctccagtactcatctcaactaaaattgaggtagtaaaaatctgcgaggtgcggacaatcagcaggaaagactaatctttttgattagaatcctcagagactaatacgccgagcgtacttagaaaaaatccattctaagtgtgatgatagagtccgatctctatagcgatatagagggttttcaaaagaaacctgttaatcattatcccatgattaacataacgtcaataaacggtcctaaggtagcgaaattcctttcaacagtaagtctagatatcggatcccgggaggctaggtggaggctcagtgatgataagtctgcgatggtggatgcatgtgtcatggtcatagctgtttcctgtgtgaaattgttatccgctcagagggcacaatcctattccgcgctatccgacaatctccaagacattaggtggagttcagttcggcgtatggcatatgtcgctggaaagaacatgtgagcaaaaggccagcaaaaggccaggaaccgtaaaaaggccgcgttgctggcgtttttccataggctccgcccccctgacgagcatcacaaaaatcgacgctcaagtcagaggtggcgaaacccgacaggactataaagataccaggcgtttccccctggaagctccctcgtgcgctctcctgttccgaccctgccgcttaccggatacctgtccgcctttctcccttcgggaagcgtggcgctttctcatagctcacgctgtaggtatctcagttcggtgtaggtcgttcgctccaagctgggctgtgtgcacgaaccccccgttcagcccgaccgctgcgccttatccggtaactatcgtcttgagtccaacccggtaagacacgacttatcgccactggcagcagccactggtaacaggattagcagagcgaggtatgtaggcggtgctacagagttcttgaagtggtggcctaactacggctacactagaagaacagtatttggtatctgcgctctgctgaagccagttaccttcggaaaaagagttggtagctcttgatccggcaaacaaaccaccgctggtagcggtggtttttttgtttgcaagcagcagattacgcgcagaaaaaaaggatctcaagaagatcctttgatcttttctacggggtctgacgctctattcaacaaagccgccgtcccgtcaagtcagcgtaaatgggtagggggcttcaaatcgtcctcgtgataccaattcggagcctgcttttttgtacaaacttgttgataatggcaattcaaggatcttcacctagatccttttaaattaaaaatgaagttttaaatcaatctaaagtatatatgagtaaacttggtctgacagttaccaatgcttaatcagtgaggcacctatctcagcgatctgtctatttcgttcatccatagttgcctgactccccgtcgtgtagataactacgatacgggagggcttaccatctggccccagtgctgcaatgataccgcgagagccacgctcaccggctccagatttatcagcaataaaccagccagccggaagggccgagcgcagaagtggtcctgcaactttatccgcctccatccagtctattaattgttgccgggaagct

SEQ ID NO: 3661 - DNA, 3863 bp, synthetic construct
  source 1..3863: mol_type = other DNA; note = Coxiella Monotron, P1 exon min11, P2 exon min11
agagtaagtagttcgccagttaatagtttgcgcaacgttgttgccattgctacaggcatcgtggtgtcacgctcgtcgtttggtatggcttcattcagctccggttcccaacgatcaaggcgagttacatgatcccccatgttgtgcaaaaaagcggttagctccttcggtcctccgatcgttgtcagaagtaagttggccgcagtgttatcactcatggttatggcagcactgcataattctcttactgtcatgccatccgtaagatgcttttctgtgactggtgagtactcaaccaagtcattctgagaatagtgtatgcggcgaccgagttgctcttgcccggcgtcaatacgggataataccgcgccacatagcagaactttaaaagtgctcatcattggaaaacgttcttcggggcgaaaactctcaaggatcttaccgctgttgagatccagttcgatgtaacccactcgtgcacccaactgatcttcagcatcttttactttcaccagcgtttctgggtgagcaaaaacaggaaggcaaaatgccgcaaaaaagggaataagggcgacacggaaatgttgaatactcatactcttcctttttcaatattattgaagcatttatcagggttattgtctcatgagcggatacatatttgaatgtatttagaaaaataaacaaataggggttccgcgcacatttccccgaaaagtgccagatacctgaaacaaaacccatcgtacggccaaggaagtctccaataactgtgatccaccacaagcgccagggttttcccagtcacgacgttgtaaaacgacggccagtcatgcataatccgcacgcatctggaataaggaagtgccattccgcctgacctccaagctttaatacgactcactatagggagaccctcgaaaacaaaccacaattgctgcgagccaaacaccaaacaaaacaaacacaaaccaacaaaaagtggccacgcccgggccaccgatacttcccttcactccttcgggactgttggggaggaacacaacagggctcccctgttttcccattccttcccccttttcccaaccccaaccgccgtatctggtggcggcaagacacacgggtctttccctctaaagcacaattgtgtgtgtgtcccaggtcctcctgcgtacggtgcgggagtgctcccacccaactgttgtaagcctgtccaacgcgtcgtcctggcaagactatgacgtcgcatgttccgctgcggatgccgaccgggtaaccggttccccagtgtgtgtagtgcgatcttccaggtcctcctggttggcgttgtccagaaactgcttcaggtaagtggggtgtgcccaatccctacaaaggttgattctttcaccaccttaggaatgctccggaggtaccccagcaacagctgggatctgaccggaggctaattgtctacgggtggtgtttcctttttcttttcacacaactctactgcgtacaactcactgactatccacttgctctgtcacgatgggagtgaaggtgctgttcgccctgatctgtattgccgtggccgaggccaagcctaccgagaacaacgaggacttcaacatcgtggccgtggcctccaatttcgccaccacagatctggacgccgacagaggaaagctgcccggcaagaagctgcctctggaagtgctgaaagagatggaagccaacgccagaaaggccggctgtaccagaggctgtctgatctgcctgagccacatcaagtgcacccctaagatgaagaagttcatccccggcagatgccacacctacgagggcgacaaagaatctgcccaaggcggaatcggagaggccatcgtggatatccctgagatccccggcttcaaggacctggaacctatggaacagtttatcgcccaggtggacctgtgcgtggactgtacaacaggctgcctgaaaggcctggccaacgtgcagtgtagcgacctgctgaagaagtggctgcctcagagatgcgccaccttcgcctctaagatccagggccaagtggacaagatcaaaggcgctggcggcgactaatagctaactagacaaaacaccaaacaaacaagctgcgagcctgggggcgaagctcttgatcgaagccccggtaaacggcggccgtaactataaattaaccgttgtagttacgtaaataaacttggctatatgctggaaactccgagtatcctccagtactcatctcaactaaaattgaggtagtaaaaatctgcgaggtgcggacaatcagcaggaaagactaatctttttgattagaatcctcagagactaatacgccgagcgtacttagaaaaaatccattctaagtgtgatgatagagtccgatctctatagcgatatagagggttttcaaaagaaacctgttaatcattatcccatgattaacataacgtcaataaacggtcctaaggtagcgaaattcctttcaacagtaagtctagatatcggatcccgggaggctaggtggaggctcagtgatgataagtctgcgatggtggatgcatgtgtcatggtcatagctgtttcctgtgtgaaattgttatccgctcagagggcacaatcctattccgcgctatccgacaatctccaagacattaggtggagttcagttcggcgtatggcatatgtcgctggaaagaacatgtgagcaaaaggccagcaaaaggccaggaaccgtaaaaaggccgcgttgctggcgtttttccataggctccgcccccctgacgagcatcacaaaaatcgacgctcaagtcagaggtggcgaaacccgacaggactataaagataccaggcgtttccccctggaagctccctcgtgcgctctcctgttccgaccctgccgcttaccggatacctgtccgcctttctcccttcgggaagcgtggcgctttctcatagctcacgctgtaggtatctcagttcggtgtaggtcgttcgctccaagctgggctgtgtgcacgaaccccccgttcagcccgaccgctgcgccttatccggtaactatcgtcttgagtccaacccggtaagacacgacttatcgccactggcagcagccactggtaacaggattagcagagcgaggtatgtaggcggtgctacagagttcttgaagtggtggcctaactacggctacactagaagaacagtatttggtatctgcgctctgctgaagccagttaccttcggaaaaagagttggtagctcttgatccggcaaacaaaccaccgctggtagcggtggtttttttgtttgcaagcagcagattacgcgcagaaaaaaaggatctcaagaagatcctttgatcttttctacggggtctgacgctctattcaacaaagccgccgtcccgtcaagtcagcgtaaatgggtagggggcttcaaatcgtcctcgtgataccaattcggagcctgcttttttgtacaaacttgttgataatggcaattcaaggatcttcacctagatccttttaaattaaaaatgaagttttaaatcaatctaaagtatatatgagtaaacttggtctgacagttaccaatgcttaatcagtgaggcacctatctcagcgatctgtctatttcgttcatccatagttgcctgactccccgtcgtgtagataactacgatacgggagggcttaccatctggccccagtgctgcaatgataccgcgagagccacgctcaccggctccagatttatcagcaataaaccagccagccggaagggccgagcgcagaagtggtcctgcaactttatccgcctccatccagtctattaattgttgccgggaagct

SEQ ID NO: 3662 - DNA, 3859 bp, synthetic construct
  source 1..3859: mol_type = other DNA; note = Coxiella Monotron, P1 exon min13, P2 exon min13
agagtaagtagttcgccagttaatagtttgcgcaacgttgttgccattgctacaggcatcgtggtgtcacgctcgtcgtttggtatggcttcattcagctccggttcccaacgatcaaggcgagttacatgatcccccatgttgtgcaaaaaagcggttagctccttcggtcctccgatcgttgtcagaagtaagttggccgcagtgttatcactcatggttatggcagcactgcataattctcttactgtcatgccatccgtaagatgcttttctgtgactggtgagtactcaaccaagtcattctgagaatagtgtatgcggcgaccgagttgctcttgcccggcgtcaatacgggataataccgcgccacatagcagaactttaaaagtgctcatcattggaaaacgttcttcggggcgaaaactctcaaggatcttaccgctgttgagatccagttcgatgtaacccactcgtgcacccaactgatcttcagcatcttttactttcaccagcgtttctgggtgagcaaaaacaggaaggcaaaatgccgcaaaaaagggaataagggcgacacggaaatgttgaatactcatactcttcctttttcaatattattgaagcatttatcagggttattgtctcatgagcggatacatatttgaatgtatttagaaaaataaacaaataggggttccgcgcacatttccccgaaaagtgccagatacctgaaacaaaacccatcgtacggccaaggaagtctccaataactgtgatccaccacaagcgccagggttttcccagtcacgacgttgtaaaacgacggccagtcatgcataatccgcacgcatctggaataaggaagtgccattccgcctgacctccaagctttaatacgactcactatagggagaccctcgaaaacaaaccacttgctgcgagccaaacaccaaacaaaacaaacacaaaccaacaaaaagtggccacgcccgggccaccgatacttcccttcactccttcgggactgttggggaggaacacaacagggctcccctgttttcccattccttcccccttttcccaaccccaaccgccgtatctggtggcggcaagacacacgggtctttccctctaaagcacaattgtgtgtgtgtcccaggtcctcctgcgtacggtgcgggagtgctcccacccaactgttgtaagcctgtccaacgcgtcgtcctggcaagactatgacgtcgcatgttccgctgcggatgccgaccgggtaaccggttccccagtgtgtgtagtgcgatcttccaggtcctcctggttggcgttgtccagaaactgcttcaggtaagtggggtgtgcccaatccctacaaaggttgattctttcaccaccttaggaatgctccggaggtaccccagcaacagctgggatctgaccggaggctaattgtctacgggtggtgtttcctttttcttttcacacaactctactgcgtacaactcactgactatccacttgctctgtcacgatgggagtgaaggtgctgttcgccctgatctgtattgccgtggccgaggccaagcctaccgagaacaacgaggacttcaacatcgtggccgtggcctccaatttcgccaccacagatctggacgccgacagaggaaagctgcccggcaagaagctgcctctggaagtgctgaaagagatggaagccaacgccagaaaggccggctgtaccagaggctgtctgatctgcctgagccacatcaagtgcacccctaagatgaagaagttcatccccggcagatgccacacctacgagggcgacaaagaatctgcccaaggcggaatcggagaggccatcgtggatatccctgagatccccggcttcaaggacctggaacctatggaacagtttatcgcccaggtggacctgtgcgtggactgtacaacaggctgcctgaaaggcctggccaacgtgcagtgtagcgacctgctgaagaagtggctgcctcagagatgcgccaccttcgcctctaagatccagggccaagtggacaagatcaaaggcgctggcggcgactaatagctaactagacaaaacaccaaacaaacaagctgcgagcctgggcgaagctcttgatcgaagccccggtaaacggcggccgtaactataaattaaccgttgtagttacgtaaataaacttggctatatgctggaaactccgagtatcctccagtactcatctcaactaaaattgaggtagtaaaaatctgcgaggtgcggacaatcagcaggaaagactaatctttttgattagaatcctcagagactaatacgccgagcgtacttagaaaaaatccattctaagtgtgatgatagagtccgatctctatagcgatatagagggttttcaaaagaaacctgttaatcattatcccatgattaacataacgtcaataaacggtcctaaggtagcgaaattcctttcaacagtaagtctagatatcggatcccgggaggctaggtggaggctcagtgatgataagtctgcgatggtggatgcatgtgtcatggtcatagctgtttcctgtgtgaaattgttatccgctcagagggcacaatcctattccgcgctatccgacaatctccaagacattaggtggagttcagttcggcgtatggcatatgtcgctggaaagaacatgtgagcaaaaggccagcaaaaggccaggaaccgtaaaaaggccgcgttgctggcgtttttccataggctccgcccccctgacgagcatcacaaaaatcgacgctcaagtcagaggtggcgaaacccgacaggactataaagataccaggcgtttccccctggaagctccctcgtgcgctctcctgttccgaccctgccgcttaccggatacctgtccgcctttctcccttcgggaagcgtggcgctttctcatagctcacgctgtaggtatctcagttcggtgtaggtcgttcgctccaagctgggctgtgtgcacgaaccccccgttcagcccgaccgctgcgccttatccggtaactatcgtcttgagtccaacccggtaagacacgacttatcgccactggcagcagccactggtaacaggattagcagagcgaggtatgtaggcggtgctacagagttcttgaagtggtggcctaactacggctacactagaagaacagtatttggtatctgcgctctgctgaagccagttaccttcggaaaaagagttggtagctcttgatccggcaaacaaaccaccgctggtagcggtggtttttttgtttgcaagcagcagattacgcgcagaaaaaaaggatctcaagaagatcctttgatcttttctacggggtctgacgctctattcaacaaagccgccgtcccgtcaagtcagcgtaaatgggtagggggcttcaaatcgtcctcgtgataccaattcggagcctgcttttttgtacaaacttgttgataatggcaattcaaggatcttcacctagatccttttaaattaaaaatgaagttttaaatcaatctaaagtatatatgagtaaacttggtctgacagttaccaatgcttaatcagtgaggcacctatctcagcgatctgtctatttcgttcatccatagttgcctgactccccgtcgtgtagataactacgatacgggagggcttaccatctggccccagtgctgcaatgataccgcgagagccacgctcaccggctccagatttatcagcaataaaccagccagccggaagggccgagcgcagaagtggtcctgcaactttatccgcctccatccagtctattaattgttgccgggaagct

SEQ ID NO: 3663 - DNA, 3857 bp, synthetic construct
  source 1..3857: mol_type = other DNA; note = Coxiella Monotron, P1 exon min14, P2 exon min14
agagtaagtagttcgccagttaatagtttgcgcaacgttgttgccattgctacaggcatcgtggtgtcacgctcgtcgtttggtatggcttcattcagctccggttcccaacgatcaaggcgagttacatgatcccccatgttgtgcaaaaaagcggttagctccttcggtcctccgatcgttgtcagaagtaagttggccgcagtgttatcactcatggttatggcagcactgcataattctcttactgtcatgccatccgtaagatgcttttctgtgactggtgagtactcaaccaagtcattctgagaatagtgtatgcggcgaccgagttgctcttgcccggcgtcaatacgggataataccgcgccacatagcagaactttaaaagtgctcatcattggaaaacgttcttcggggcgaaaactctcaaggatcttaccgctgttgagatccagttcgatgtaacccactcgtgcacccaactgatcttcagcatcttttactttcaccagcgtttctgggtgagcaaaaacaggaaggcaaaatgccgcaaaaaagggaataagggcgacacggaaatgttgaatactcatactcttcctttttcaatattattgaagcatttatcagggttattgtctcatgagcggatacatatttgaatgtatttagaaaaataaacaaataggggttccgcgcacatttccccgaaaagtgccagatacctgaaacaaaacccatcgtacggccaaggaagtctccaataactgtgatccaccacaagcgccagggttttcccagtcacgacgttgtaaaacgacggccagtcatgcataatccgcacgcatctggaataaggaagtgccattccgcctgacctccaagctttaatacgactcactatagggagaccctcgaaaacaaaccactgctgcgagccaaacaccaaacaaaacaaacacaaaccaacaaaaagtggccacgcccgggccaccgatacttcccttcactccttcgggactgttggggaggaacacaacagggctcccctgttttcccattccttcccccttttcccaaccccaaccgccgtatctggtggcggcaagacacacgggtctttccctctaaagcacaattgtgtgtgtgtcccaggtcctcctgcgtacggtgcgggagtgctcccacccaactgttgtaagcctgtccaacgcgtcgtcctggcaagactatgacgtcgcatgttccgctgcggatgccgaccgggtaaccggttccccagtgtgtgtagtgcgatcttccaggtcctcctggttggcgttgtccagaaactgcttcaggtaagtggggtgtgcccaatccctacaaaggttgattctttcaccaccttaggaatgctccggaggtaccccagcaacagctgggatctgaccggaggctaattgtctacgggtggtgtttcctttttcttttcacacaactctactgcgtacaactcactgactatccacttgctctgtcacgatgggagtgaaggtgctgttcgccctgatctgtattgccgtggccgaggccaagcctaccgagaacaacgaggacttcaacatcgtggccgtggcctccaatttcgccaccacagatctggacgccgacagaggaaagctgcccggcaagaagctgcctctggaagtgctgaaagagatggaagccaacgccagaaaggccggctgtaccagaggctgtctgatctgcctgagccacatcaagtgcacccctaagatgaagaagttcatccccggcagatgccacacctacgagggcgacaaagaatctgcccaaggcggaatcggagaggccatcgtggatatccctgagatccccggcttcaaggacctggaacctatggaacagtttatcgcccaggtggacctgtgcgtggactgtacaacaggctgcctgaaaggcctggccaacgtgcagtgtagcgacctgctgaagaagtggctgcctcagagatgcgccaccttcgcctctaagatccagggccaagtggacaagatcaaaggcgctggcggcgactaatagctaactagacaaaacaccaaacaaacaagctgcgagcctggcgaagctcttgatcgaagccccggtaaacggcggccgtaactataaattaaccgttgtagttacgtaaataaacttggctatatgctggaaactccgagtatcctccagtactcatctcaactaaaattgaggtagtaaaaatctgcgaggtgcggacaatcagcaggaaagactaatctttttgattagaatcctcagagactaatacgccgagcgtacttagaaaaaatccattctaagtgtgatgatagagtccgatctctatagcgatatagagggttttcaaaagaaacctgttaatcattatcccatgattaacataacgtcaataaacggtcctaaggtagcgaaattcctttcaacagtaagtctagatatcggatcccgggaggctaggtggaggctcagtgatgataagtctgcgatggtggatgcatgtgtcatggtcatagctgtttcctgtgtgaaattgttatccgctcagagggcacaatcctattccgcgctatccgacaatctccaagacattaggtggagttcagttcggcgtatggcatatgtcgctggaaagaacatgtgagcaaaaggccagcaaaaggccaggaaccgtaaaaaggccgcgttgctggcgtttttccataggctccgcccccctgacgagcatcacaaaaatcgacgctcaagtcagaggtggcgaaacccgacaggactataaagataccaggcgtttccccctggaagctccctcgtgcgctctcctgttccgaccctgccgcttaccggatacctgtccgcctttctcccttcgggaagcgtggcgctttctcatagctcacgctgtaggtatctcagttcggtgtaggtcgttcgctccaagctgggctgtgtgcacgaaccccccgttcagcccgaccgctgcgccttatccggtaactatcgtcttgagtccaacccggtaagacacgacttatcgccactggcagcagccactggtaacaggattagcagagcgaggtatgtaggcggtgctacagagttcttgaagtggtggcctaactacggctacactagaagaacagtatttggtatctgcgctctgctgaagccagttaccttcggaaaaagagttggtagctcttgatccggcaaacaaaccaccgctggtagcggtggtttttttgtttgcaagcagcagattacgcgcagaaaaaaaggatctcaagaagatcctttgatcttttctacggggtctgacgctctattcaacaaagccgccgtcccgtcaagtcagcgtaaatgggtagggggcttcaaatcgtcctcgtgataccaattcggagcctgcttttttgtacaaacttgttgataatggcaattcaaggatcttcacctagatccttttaaattaaaaatgaagttttaaatcaatctaaagtatatatgagtaaacttggtctgacagttaccaatgcttaatcagtgaggcacctatctcagcgatctgtctatttcgttcatccatagttgcctgactccccgtcgtgtagataactacgatacgggagggcttaccatctggccccagtgctgcaatgataccgcgagagccacgctcaccggctccagatttatcagcaataaaccagccagccggaagggccgagcgcagaagtggtcctgcaactttatccgcctccatccagtctattaattgttgccgggaagct

SEQ ID NO: 3664 - DNA, 3855 bp, synthetic construct
  source 1..3855: mol_type = other DNA; note = Coxiella Monotron, no P1 exon, no P2 exon
agagtaagtagttcgccagttaatagtttgcgcaacgttgttgccattgctacaggcatcgtggtgtcacgctcgtcgtttggtatggcttcattcagctccggttcccaacgatcaaggcgagttacatgatcccccatgttgtgcaaaaaagcggttagctccttcggtcctccgatcgttgtcagaagtaagttggccgcagtgttatcactcatggttatggcagcactgcataattctcttactgtcatgccatccgtaagatgcttttctgtgactggtgagtactcaaccaagtcattctgagaatagtgtatgcggcgaccgagttgctcttgcccggcgtcaatacgggataataccgcgccacatagcagaactttaaaagtgctcatcattggaaaacgttcttcggggcgaaaactctcaaggatcttaccgctgttgagatccagttcgatgtaacccactcgtgcacccaactgatcttcagcatcttttactttcaccagcgtttctgggtgagcaaaaacaggaaggcaaaatgccgcaaaaaagggaataagggcgacacggaaatgttgaatactcatactcttcctttttcaatattattgaagcatttatcagggttattgtctcatgagcggatacatatttgaatgtatttagaaaaataaacaaataggggttccgcgcacatttccccgaaaagtgccagatacctgaaacaaaacccatcgtacggccaaggaagtctccaataactgtgatccaccacaagcgccagggttttcccagtcacgacgttgtaaaacgacggccagtcatgcataatccgcacgcatctggaataaggaagtgccattccgcctgacctccaagctttaatacgactcactatagggagaccctcgaaaacaaaccacgctgcgagccaaacaccaaacaaaacaaacacaaaccaacaaaaagtggccacgcccgggccaccgatacttcccttcactccttcgggactgttggggaggaacacaacagggctcccctgttttcccattccttcccccttttcccaaccccaaccgccgtatctggtggcggcaagacacacgggtctttccctctaaagcacaattgtgtgtgtgtcccaggtcctcctgcgtacggtgcgggagtgctcccacccaactgttgtaagcctgtccaacgcgtcgtcctggcaagactatgacgtcgcatgttccgctgcggatgccgaccgggtaaccggttccccagtgtgtgtagtgcgatcttccaggtcctcctggttggcgttgtccagaaactgcttcaggtaagtggggtgtgcccaatccctacaaaggttgattctttcaccaccttaggaatgctccggaggtaccccagcaacagctgggatctgaccggaggctaattgtctacgggtggtgtttcctttttcttttcacacaactctactgcgtacaactcactgactatccacttgctctgtcacgatgggagtgaaggtgctgttcgccctgatctgtattgccgtggccgaggccaagcctaccgagaacaacgaggacttcaacatcgtggccgtggcctccaatttcgccaccacagatctggacgccgacagaggaaagctgcccggcaagaagctgcctctggaagtgctgaaagagatggaagccaacgccagaaaggccggctgtaccagaggctgtctgatctgcctgagccacatcaagtgcacccctaagatgaagaagttcatccccggcagatgccacacctacgagggcgacaaagaatctgcccaaggcggaatcggagaggccatcgtggatatccctgagatccccggcttcaaggacctggaacctatggaacagtttatcgcccaggtggacctgtgcgtggactgtacaacaggctgcctgaaaggcctggccaacgtgcagtgtagcgacctgctgaagaagtggctgcctcagagatgcgccaccttcgcctctaagatccagggccaagtggacaagatcaaaggcgctggcggcgactaatagctaactagacaaaacaccaaacaaacaagctgcgagccggcgaagctcttgatcgaagccccggtaaacggcggccgtaactataaattaaccgttgtagttacgtaaataaacttggctatatgctggaaactccgagtatcctccagtactcatctcaactaaaattgaggtagtaaaaatctgcgaggtgcggacaatcagcaggaaagactaatctttttgattagaatcctcagagactaatacgccgagcgtacttagaaaaaatccattctaagtgtgatgatagagtccgatctctatagcgatatagagggttttcaaaagaaacctgttaatcattatcccatgattaacataacgtcaataaacggtcctaaggtagcgaaattcctttcaacagtaagtctagatatcggatcccgggaggctaggtggaggctcagtgatgataagtctgcgatggtggatgcatgtgtcatggtcatagctgtttcctgtgtgaaattgttatccgctcagagggcacaatcctattccgcgctatccgacaatctccaagacattaggtggagttcagttcggcgtatggcatatgtcgctggaaagaacatgtgagcaaaaggccagcaaaaggccaggaaccgtaaaaaggccgcgttgctggcgtttttccataggctccgcccccctgacgagcatcacaaaaatcgacgctcaagtcagaggtggcgaaacccgacaggactataaagataccaggcgtttccccctggaagctccctcgtgcgctctcctgttccgaccctgccgcttaccggatacctgtccgcctttctcccttcgggaagcgtggcgctttctcatagctcacgctgtaggtatctcagttcggtgtaggtcgttcgctccaagctgggctgtgtgcacgaaccccccgttcagcccgaccgctgcgccttatccggtaactatcgtcttgagtccaacccggtaagacacgacttatcgccactggcagcagccactggtaacaggattagcagagcgaggtatgtaggcggtgctacagagttcttgaagtggtggcctaactacggctacactagaagaacagtatttggtatctgcgctctgctgaagccagttaccttcggaaaaagagttggtagctcttgatccggcaaacaaaccaccgctggtagcggtggtttttttgtttgcaagcagcagattacgcgcagaaaaaaaggatctcaagaagatcctttgatcttttctacggggtctgacgctctattcaacaaagccgccgtcccgtcaagtcagcgtaaatgggtagggggcttcaaatcgtcctcgtgataccaattcggagcctgcttttttgtacaaacttgttgataatggcaattcaaggatcttcacctagatccttttaaattaaaaatgaagttttaaatcaatctaaagtatatatgagtaaacttggtctgacagttaccaatgcttaatcagtgaggcacctatctcagcgatctgtctatttcgttcatccatagttgcctgactccccgtcgtgtagataactacgatacgggagggcttaccatctggccccagtgctgcaatgataccgcgagagccacgctcaccggctccagatttatcagcaataaaccagccagccggaagggccgagcgcagaagtggtcctgcaactttatccgcctccatccagtctattaattgttgccgggaagct

SEQ ID NO: 3665 - DNA, 3885 bp, synthetic construct
  source 1..3885: mol_type = other DNA; note = Coxiella Monotron, exons complement
agagtaagtagttcgccagttaatagtttgcgcaacgttgttgccattgctacaggcatcgtggtgtcacgctcgtcgtttggtatggcttcattcagctccggttcccaacgatcaaggcgagttacatgatcccccatgttgtgcaaaaaagcggttagctccttcggtcctccgatcgttgtcagaagtaagttggccgcagtgttatcactcatggttatggcagcactgcataattctcttactgtcatgccatccgtaagatgcttttctgtgactggtgagtactcaaccaagtcattctgagaatagtgtatgcggcgaccgagttgctcttgcccggcgtcaatacgggataataccgcgccacatagcagaactttaaaagtgctcatcattggaaaacgttcttcggggcgaaaactctcaaggatcttaccgctgttgagatccagttcgatgtaacccactcgtgcacccaactgatcttcagcatcttttactttcaccagcgtttctgggtgagcaaaaacaggaaggcaaaatgccgcaaaaaagggaataagggcgacacggaaatgttgaatactcatactcttcctttttcaatattattgaagcatttatcagggttattgtctcatgagcggatacatatttgaatgtatttagaaaaataaacaaataggggttccgcgcacatttccccgaaaagtgccagatacctgaaacaaaacccatcgtacggccaaggaagtctccaataactgtgatccaccacaagcgccagggttttcccagtcacgacgttgtaaaacgacggccagtcatgcataatccgcacgcatctggaataaggaagtgccattccgcctgacctccaagctttaatacgactcactatagggagaccctcgaaaacaaaccacgtcgggtaaaaaattgctgcgagccaaacaccaaacaaaacaaacacaaaccaacaaaaagtggccacgcccgggccaccgatacttcccttcactccttcgggactgttggggaggaacacaacagggctcccctgttttcccattccttcccccttttcccaaccccaaccgccgtatctggtggcggcaagacacacgggtctttccctctaaagcacaattgtgtgtgtgtcccaggtcctcctgcgtacggtgcgggagtgctcccacccaactgttgtaagcctgtccaacgcgtcgtcctggcaagactatgacgtcgcatgttccgctgcggatgccgaccgggtaaccggttccccagtgtgtgtagtgcgatcttccaggtcctcctggttggcgttgtccagaaactgcttcaggtaagtggggtgtgcccaatccctacaaaggttgattctttcaccaccttaggaatgctccggaggtaccccagcaacagctgggatctgaccggaggctaattgtctacgggtggtgtttcctttttcttttcacacaactctactgcgtacaactcactgactatccacttgctctgtcacgatgggagtgaaggtgctgttcgccctgatctgtattgccgtggccgaggccaagcctaccgagaacaacgaggacttcaacatcgtggccgtggcctccaatttcgccaccacagatctggacgccgacagaggaaagctgcccggcaagaagctgcctctggaagtgctgaaagagatggaagccaacgccagaaaggccggctgtaccagaggctgtctgatctgcctgagccacatcaagtgcacccctaagatgaagaagttcatccccggcagatgccacacctacgagggcgacaaagaatctgcccaaggcggaatcggagaggccatcgtggatatccctgagatccccggcttcaaggacctggaacctatggaacagtttatcgcccaggtggacctgtgcgtggactgtacaacaggctgcctgaaaggcctggccaacgtgcagtgtagcgacctgctgaagaagtggctgcctcagagatgcgccaccttcgcctctaagatccagggccaagtggacaagatcaaaggcgctggcggcgactaatagctaactagacaaaacaccaaacaaacaagctgcgagccaattttttacccgacggcgaagctcttgatcgaagccccggtaaacggcggccgtaactataaattaaccgttgtagttacgtaaataaacttggctatatgctggaaactccgagtatcctccagtactcatctcaactaaaattgaggtagtaaaaatctgcgaggtgcggacaatcagcaggaaagactaatctttttgattagaatcctcagagactaatacgccgagcgtacttagaaaaaatccattctaagtgtgatgatagagtccgatctctatagcgatatagagggttttcaaaagaaacctgttaatcattatcccatgattaacataacgtcaataaacggtcctaaggtagcgaaattcctttcaacagtaagtctagatatcggatcccgggaggctaggtggaggctcagtgatgataagtctgcgatggtggatgcatgtgtcatggtcatagctgtttcctgtgtgaaattgttatccgctcagagggcacaatcctattccgcgctatccgacaatctccaagacattaggtggagttcagttcggcgtatggcatatgtcgctggaaagaacatgtgagcaaaaggccagcaaaaggccaggaaccgtaaaaaggccgcgttgctggcgtttttccataggctccgcccccctgacgagcatcacaaaaatcgacgctcaagtcagaggtggcgaaacccgacaggactataaagataccaggcgtttccccctggaagctccctcgtgcgctctcctgttccgaccctgccgcttaccggatacctgtccgcctttctcccttcgggaagcgtggcgctttctcatagctcacgctgtaggtatctcagttcggtgtaggtcgttcgctccaagctgggctgtgtgcacgaaccccccgttcagcccgaccgctgcgccttatccggtaactatcgtcttgagtccaacccggtaagacacgacttatcgccactggcagcagccactggtaacaggattagcagagcgaggtatgtaggcggtgctacagagttcttgaagtggtggcctaactacggctacactagaagaacagtatttggtatctgcgctctgctgaagccagttaccttcggaaaaagagttggtagctcttgatccggcaaacaaaccaccgctggtagcggtggtttttttgtttgcaagcagcagattacgcgcagaaaaaaaggatctcaagaagatcctttgatcttttctacggggtctgacgctctattcaacaaagccgccgtcccgtcaagtcagcgtaaatgggtagggggcttcaaatcgtcctcgtgataccaattcggagcctgcttttttgtacaaacttgttgataatggcaattcaaggatcttcacctagatccttttaaattaaaaatgaagttttaaatcaatctaaagtatatatgagtaaacttggtctgacagttaccaatgcttaatcagtgaggcacctatctcagcgatctgtctatttcgttcatccatagttgcctgactccccgtcgtgtagataactacgatacgggagggcttaccatctggccccagtgctgcaatgataccgcgagagccacgctcaccggctccagatttatcagcaataaaccagccagccggaagggccgagcgcagaagtggtcctgcaactttatccgcctccatccagtctattaattgttgccgggaagct

SEQ ID NO: 3666 - DNA, 3885 bp, synthetic construct
  source 1..3885: mol_type = other DNA; note = Coxiella Monotron, P1 exon scramble1, P2 exon reverse compl
agagtaagtagttcgccagttaatagtttgcgcaacgttgttgccattgctacaggcatcgtggtgtcacgctcgtcgtttggtatggcttcattcagctccggttcccaacgatcaaggcgagttacatgatcccccatgttgtgcaaaaaagcggttagctccttcggtcctccgatcgttgtcagaagtaagttggccgcagtgttatcactcatggttatggcagcactgcataattctcttactgtcatgccatccgtaagatgcttttctgtgactggtgagtactcaaccaagtcattctgagaatagtgtatgcggcgaccgagttgctcttgcccggcgtcaatacgggataataccgcgccacatagcagaactttaaaagtgctcatcattggaaaacgttcttcggggcgaaaactctcaaggatcttaccgctgttgagatccagttcgatgtaacccactcgtgcacccaactgatcttcagcatcttttactttcaccagcgtttctgggtgagcaaaaacaggaaggcaaaatgccgcaaaaaagggaataagggcgacacggaaatgttgaatactcatactcttcctttttcaatattattgaagcatttatcagggttattgtctcatgagcggatacatatttgaatgtatttagaaaaataaacaaataggggttccgcgcacatttccccgaaaagtgccagatacctgaaacaaaacccatcgtacggccaaggaagtctccaataactgtgatccaccacaagcgccagggttttcccagtcacgacgttgtaaaacgacggccagtcatgcataatccgcacgcatctggaataaggaagtgccattccgcctgacctccaagctttaatacgactcactatagggagaccctcgaaaacaaaccacgtcgtaagtataagagctgcgagccaaacaccaaacaaaacaaacacaaaccaacaaaaagtggccacgcccgggccaccgatacttcccttcactccttcgggactgttggggaggaacacaacagggctcccctgttttcccattccttcccccttttcccaaccccaaccgccgtatctggtggcggcaagacacacgggtctttccctctaaagcacaattgtgtgtgtgtcccaggtcctcctgcgtacggtgcgggagtgctcccacccaactgttgtaagcctgtccaacgcgtcgtcctggcaagactatgacgtcgcatgttccgctgcggatgccgaccgggtaaccggttccccagtgtgtgtagtgcgatcttccaggtcctcctggttggcgttgtccagaaactgcttcaggtaagtggggtgtgcccaatccctacaaaggttgattctttcaccaccttaggaatgctccggaggtaccccagcaacagctgggatctgaccggaggctaattgtctacgggtggtgtttcctttttcttttcacacaactctactgcgtacaactcactgactatccacttgctctgtcacgatgggagtgaaggtgctgttcgccctgatctgtattgccgtggccgaggccaagcctaccgagaacaacgaggacttcaacatcgtggccgtggcctccaatttcgccaccacagatctggacgccgacagaggaaagctgcccggcaagaagctgcctctggaagtgctgaaagagatggaagccaacgccagaaaggccggctgtaccagaggctgtctgatctgcctgagccacatcaagtgcacccctaagatgaagaagttcatccccggcagatgccacacctacgagggcgacaaagaatctgcccaaggcggaatcggagaggccatcgtggatatccctgagatccccggcttcaaggacctggaacctatggaacagtttatcgcccaggtggacctgtgcgtggactgtacaacaggctgcctgaaaggcctggccaacgtgcagtgtagcgacctgctgaagaagtggctgcctcagagatgcgccaccttcgcctctaagatccagggccaagtggacaagatcaaaggcgctggcggcgactaatagctaactagacaaaacaccaaacaaacaagctgcgagcctcttatacttacgacggcgaagctcttgatcgaagccccggtaaacggcggccgtaactataaattaaccgttgtagttacgtaaataaacttggctatatgctggaaactccgagtatcctccagtactcatctcaactaaaattgaggtagtaaaaatctgcgaggtgcggacaatcagcaggaaagactaatctttttgattagaatcctcagagactaatacgccgagcgtacttagaaaaaatccattctaagtgtgatgatagagtccgatctctatagcgatatagagggttttcaaaagaaacctgttaatcattatcccatgattaacataacgtcaataaacggtcctaaggtagcgaaattcctttcaacagtaagtctagatatcggatcccgggaggctaggtggaggctcagtgatgataagtctgcgatggtggatgcatgtgtcatggtcatagctgtttcctgtgtgaaattgttatccgctcagagggcacaatcctattccgcgctatccgacaatctccaagacattaggtggagttcagttcggcgtatggcatatgtcgctggaaagaacatgtgagcaaaaggccagcaaaaggccaggaaccgtaaaaaggccgcgttgctggcgtttttccataggctccgcccccctgacgagcatcacaaaaatcgacgctcaagtcagaggtggcgaaacccgacaggactataaagataccaggcgtttccccctggaagctccctcgtgcgctctcctgttccgaccctgccgcttaccggatacctgtccgcctttctcccttcgggaagcgtggcgctttctcatagctcacgctgtaggtatctcagttcggtgtaggtcgttcgctccaagctgggctgtgtgcacgaaccccccgttcagcccgaccgctgcgccttatccggtaactatcgtcttgagtccaacccggtaagacacgacttatcgccactggcagcagccactggtaacaggattagcagagcgaggtatgtaggcggtgctacagagttcttgaagtggtggcctaactacggctacactagaagaacagtatttggtatctgcgctctgctgaagccagttaccttcggaaaaagagttggtagctcttgatccggcaaacaaaccaccgctggtagcggtggtttttttgtttgcaagcagcagattacgcgcagaaaaaaaggatctcaagaagatcctttgatcttttctacggggtctgacgctctattcaacaaagccgccgtcccgtcaagtcagcgtaaatgggtagggggcttcaaatcgtcctcgtgataccaattcggagcctgcttttttgtacaaacttgttgataatggcaattcaaggatcttcacctagatccttttaaattaaaaatgaagttttaaatcaatctaaagtatatatgagtaaacttggtctgacagttaccaatgcttaatcagtgaggcacctatctcagcgatctgtctatttcgttcatccatagttgcctgactccccgtcgtgtagataactacgatacgggagggcttaccatctggccccagtgctgcaatgataccgcgagagccacgctcaccggctccagatttatcagcaataaaccagccagccggaagggccgagcgcagaagtggtcctgcaactttatccgcctccatccagtctattaattgttgccgggaagct

SEQ ID NO: 3667 - DNA, 3875 bp, synthetic construct
  source 1..3875: mol_type = other DNA; note = Coxiella Monotron, P1 exon scramble1, P2 exon scramble1
agagtaagtagttcgccagttaatagtttgcgcaacgttgttgccattgctacaggcatcgtggtgtcacgctcgtcgtttggtatggcttcattcagctccggttcccaacgatcaaggcgagttacatgatcccccatgttgtgcaaaaaagcggttagctccttcggtcctccgatcgttgtcagaagtaagttggccgcagtgttatcactcatggttatggcagcactgcataattctcttactgtcatgccatccgtaagatgcttttctgtgactggtgagtactcaaccaagtcattctgagaatagtgtatgcggcgaccgagttgctcttgcccggcgtcaatacgggataataccgcgccacatagcagaactttaaaagtgctcatcattggaaaacgttcttcggggcgaaaactctcaaggatcttaccgctgttgagatccagttcgatgtaacccactcgtgcacccaactgatcttcagcatcttttactttcaccagcgtttctgggtgagcaaaaacaggaaggcaaaatgccgcaaaaaagggaataagggcgacacggaaatgttgaatactcatactcttcctttttcaatattattgaagcatttatcagggttattgtctcatgagcggatacatatttgaatgtatttagaaaaataaacaaataggggttccgcgcacatttccccgaaaagtgccagatacctgaaacaaaacccatcgtacggccaaggaagtctccaataactgtgatccaccacaagcgccagggttttcccagtcacgacgttgtaaaacgacggccagtcatgcataatccgcacgcatctggaataaggaagtgccattccgcctgacctccaagctttaatacgactcactatagggagaccctcgaaaacaaaccacgtcgtaagtataagaaaacaccaaacaaaacaaacacaaaccaacaaaaagtggccacgcccgggccaccgatacttcccttcactccttcgggactgttggggaggaacacaacagggctcccctgttttcccattccttcccccttttcccaaccccaaccgccgtatctggtggcggcaagacacacgggtctttccctctaaagcacaattgtgtgtgtgtcccaggtcctcctgcgtacggtgcgggagtgctcccacccaactgttgtaagcctgtccaacgcgtcgtcctggcaagactatgacgtcgcatgttccgctgcggatgccgaccgggtaaccggttccccagtgtgtgtagtgcgatcttccaggtcctcctggttggcgttgtccagaaactgcttcaggtaagtggggtgtgcccaatccctacaaaggttgattctttcaccaccttaggaatgctccggaggtaccccagcaacagctgggatctgaccggaggctaattgtctacgggtggtgtttcctttttcttttcacacaactctactgcgtacaactcactgactatccacttgctctgtcacgatgggagtgaaggtgctgttcgccctgatctgtattgccgtggccgaggccaagcctaccgagaacaacgaggacttcaacatcgtggccgtggcctccaatttcgccaccacagatctggacgccgacagaggaaagctgcccggcaagaagctgcctctggaagtgctgaaagagatggaagccaacgccagaaaggccggctgtaccagaggctgtctgatctgcctgagccacatcaagtgcacccctaagatgaagaagttcatccccggcagatgccacacctacgagggcgacaaagaatctgcccaaggcggaatcggagaggccatcgtggatatccctgagatccccggcttcaaggacctggaacctatggaacagtttatcgcccaggtggacctgtgcgtggactgtacaacaggctgcctgaaaggcctggccaacgtgcagtgtagcgacctgctgaagaagtggctgcctcagagatgcgccaccttcgcctctaagatccagggccaagtggacaagatcaaaggcgctggcggcgactaatagctaactagacaaaacaccaaacaaacaagctgcgagcctgggcctgtcaggtcggcgaagctcttgatcgaagccccggtaaacggcggccgtaactataaattaaccgttgtagttacgtaaataaacttggctatatgctggaaactccgagtatcctccagtactcatctcaactaaaattgaggtagtaaaaatctgcgaggtgcggacaatcagcaggaaagactaatctttttgattagaatcctcagagactaatacgccgagcgtacttagaaaaaatccattctaagtgtgatgatagagtccgatctctatagcgatatagagggttttcaaaagaaacctgttaatcattatcccatgattaacataacgtcaataaacggtcctaaggtagcgaaattcctttcaacagtaagtctagatatcggatcccgggaggctaggtggaggctcagtgatgataagtctgcgatggtggatgcatgtgtcatggtcatagctgtttcctgtgtgaaattgttatccgctcagagggcacaatcctattccgcgctatccgacaatctccaagacattaggtggagttcagttcggcgtatggcatatgtcgctggaaagaacatgtgagcaaaaggccagcaaaaggccaggaaccgtaaaaaggccgcgttgctggcgtttttccataggctccgcccccctgacgagcatcacaaaaatcgacgctcaagtcagaggtggcgaaacccgacaggactataaagataccaggcgtttccccctggaagctccctcgtgcgctctcctgttccgaccctgccgcttaccggatacctgtccgcctttctcccttcgggaagcgtggcgctttctcatagctcacgctgtaggtatctcagttcggtgtaggtcgttcgctccaagctgggctgtgtgcacgaaccccccgttcagcccgaccgctgcgccttatccggtaactatcgtcttgagtccaacccggtaagacacgacttatcgccactggcagcagccactggtaacaggattagcagagcgaggtatgtaggcggtgctacagagttcttgaagtggtggcctaactacggctacactagaagaacagtatttggtatctgcgctctgctgaagccagttaccttcggaaaaagagttggtagctcttgatccggcaaacaaaccaccgctggtagcggtggtttttttgtttgcaagcagcagattacgcgcagaaaaaaaggatctcaagaagatcctttgatcttttctacggggtctgacgctctattcaacaaagccgccgtcccgtcaagtcagcgtaaatgggtagggggcttcaaatcgtcctcgtgataccaattcggagcctgcttttttgtacaaacttgttgataatggcaattcaaggatcttcacctagatccttttaaattaaaaatgaagttttaaatcaatctaaagtatatatgagtaaacttggtctgacagttaccaatgcttaatcagtgaggcacctatctcagcgatctgtctatttcgttcatccatagttgcctgactccccgtcgtgtagataactacgatacgggagggcttaccatctggccccagtgctgcaatgataccgcgagagccacgctcaccggctccagatttatcagcaataaaccagccagccggaagggccgagcgcagaagtggtcctgcaactttatccgcctccatccagtctattaattgttgccgggaagct

SEQ ID NO: 3668 - DNA, 3885 bp, synthetic construct
  source 1..3885: mol_type = other DNA; note = Coxiella Monotron, P1 exon scramble2, P2 exon reverse compl
agagtaagtagttcgccagttaatagtttgcgcaacgttgttgccattgctacaggcatcgtggtgtcacgctcgtcgtttggtatggcttcattcagctccggttcccaacgatcaaggcgagttacatgatcccccatgttgtgcaaaaaagcggttagctccttcggtcctccgatcgttgtcagaagtaagttggccgcagtgttatcactcatggttatggcagcactgcataattctcttactgtcatgccatccgtaagatgcttttctgtgactggtgagtactcaaccaagtcattctgagaatagtgtatgcggcgaccgagttgctcttgcccggcgtcaatacgggataataccgcgccacatagcagaactttaaaagtgctcatcattggaaaacgttcttcggggcgaaaactctcaaggatcttaccgctgttgagatccagttcgatgtaacccactcgtgcacccaactgatcttcagcatcttttactttcaccagcgtttctgggtgagcaaaaacaggaaggcaaaatgccgcaaaaaagggaataagggcgacacggaaatgttgaatactcatactcttcctttttcaatattattgaagcatttatcagggttattgtctcatgagcggatacatatttgaatgtatttagaaaaataaacaaataggggttccgcgcacatttccccgaaaagtgccagatacctgaaacaaaacccatcgtacggccaaggaagtctccaataactgtgatccaccacaagcgccagggttttcccagtcacgacgttgtaaaacgacggccagtcatgcataatccgcacgcatctggaataaggaagtgccattccgcctgacctccaagctttaatacgactcactatagggagaccctcgaaaacaaaccacctaggtaattaggaaggctcgcagcaaacaccaaacaaaacaaacacaaaccaacaaaaagtggccacgcccgggccaccgatacttcccttcactccttcgggactgttggggaggaacacaacagggctcccctgttttcccattccttcccccttttcccaaccccaaccgccgtatctggtggcggcaagacacacgggtctttccctctaaagcacaattgtgtgtgtgtcccaggtcctcctgcgtacggtgcgggagtgctcccacccaactgttgtaagcctgtccaacgcgtcgtcctggcaagactatgacgtcgcatgttccgctgcggatgccgaccgggtaaccggttccccagtgtgtgtagtgcgatcttccaggtcctcctggttggcgttgtccagaaactgcttcaggtaagtggggtgtgcccaatccctacaaaggttgattctttcaccaccttaggaatgctccggaggtaccccagcaacagctgggatctgaccggaggctaattgtctacgggtggtgtttcctttttcttttcacacaactctactgcgtacaactcactgactatccacttgctctgtcacgatgggagtgaaggtgctgttcgccctgatctgtattgccgtggccgaggccaagcctaccgagaacaacgaggacttcaacatcgtggccgtggcctccaatttcgccaccacagatctggacgccgacagaggaaagctgcccggcaagaagctgcctctggaagtgctgaaagagatggaagccaacgccagaaaggccggctgtaccagaggctgtctgatctgcctgagccacatcaagtgcacccctaagatgaagaagttcatccccggcagatgccacacctacgagggcgacaaagaatctgcccaaggcggaatcggagaggccatcgtggatatccctgagatccccggcttcaaggacctggaacctatggaacagtttatcgcccaggtggacctgtgcgtggactgtacaacaggctgcctgaaaggcctggccaacgtgcagtgtagcgacctgctgaagaagtggctgcctcagagatgcgccaccttcgcctctaagatccagggccaagtggacaagatcaaaggcgctggcggcgactaatagctaactagacaaaacaccaaacaaacaagctgcgagccttcctaattacctagggcgaagctcttgatcgaagccccggtaaacggcggccgtaactataaattaaccgttgtagttacgtaaataaacttggctatatgctggaaactccgagtatcctccagtactcatctcaactaaaattgaggtagtaaaaatctgcgaggtgcggacaatcagcaggaaagactaatctttttgattagaatcctcagagactaatacgccgagcgtacttagaaaaaatccattctaagtgtgatgatagagtccgatctctatagcgatatagagggttttcaaaagaaacctgttaatcattatcccatgattaacataacgtcaataaacggtcctaaggtagcgaaattcctttcaacagtaagtctagatatcggatcccgggaggctaggtggaggctcagtgatgataagtctgcgatggtggatgcatgtgtcatggtcatagctgtttcctgtgtgaaattgttatccgctcagagggcacaatcctattccgcgctatccgacaatctccaagacattaggtggagttcagttcggcgtatggcatatgtcgctggaaagaacatgtgagcaaaaggccagcaaaaggccaggaaccgtaaaaaggccgcgttgctggcgtttttccataggctccgcccccctgacgagcatcacaaaaatcgacgctcaagtcagaggtggcgaaacccgacaggactataaagataccaggcgtttccccctggaagctccctcgtgcgctctcctgttccgaccctgccgcttaccggatacctgtccgcctttctcccttcgggaagcgtggcgctttctcatagctcacgctgtaggtatctcagttcggtgtaggtcgttcgctccaagctgggctgtgtgcacgaaccccccgttcagcccgaccgctgcgccttatccggtaactatcgtcttgagtccaacccggtaagacacgacttatcgccactggcagcagccactggtaacaggattagcagagcgaggtatgtaggcggtgctacagagttcttgaagtggtggcctaactacggctacactagaagaacagtatttggtatctgcgctctgctgaagccagttaccttcggaaaaagagttggtagctcttgatccggcaaacaaaccaccgctggtagcggtggtttttttgtttgcaagcagcagattacgcgcagaaaaaaaggatctcaagaagatcctttgatcttttctacggggtctgacgctctattcaacaaagccgccgtcccgtcaagtcagcgtaaatgggtagggggcttcaaatcgtcctcgtgataccaattcggagcctgcttttttgtacaaacttgttgataatggcaattcaaggatcttcacctagatccttttaaattaaaaatgaagttttaaatcaatctaaagtatatatgagtaaacttggtctgacagttaccaatgcttaatcagtgaggcacctatctcagcgatctgtctatttcgttcatccatagttgcctgactccccgtcgtgtagataactacgatacgggagggcttaccatctggccccagtgctgcaatgataccgcgagagccacgctcaccggctccagatttatcagcaataaaccagccagccggaagggccgagcgcagaagtggtcctgcaactttatccgcctccatccagtctattaattgttgccgggaagct

SEQ ID NO: 3669-3999 - skipped (331 entries)

SEQ ID NO: 4000 - DNA, 747 bp, synthetic construct; identical to SEQ ID NO: 1168
  source 1..747: mol_type = other DNA

SEQ ID NO: 4001 - DNA, 612 bp, synthetic construct; identical to SEQ ID NO: 680
  source 1..612: mol_type = other DNA

SEQ ID NO: 4002 - DNA, 439 bp, synthetic construct; identical to SEQ ID NO: 482
  source 1..439: mol_type = other DNA

SEQ ID NO: 4003 - DNA, 627 bp, synthetic construct; identical to SEQ ID NO: 751
  source 1..627: mol_type = other DNA

SEQ ID NO: 4004 - DNA, 737 bp, synthetic construct; identical to SEQ ID NO: 959
  source 1..737: mol_type = other DNA

SEQ ID NO: 4005 - DNA, 821 bp, synthetic construct; identical to SEQ ID NO: 1275
  source 1..821: mol_type = other DNA

SEQ ID NO: 4006 - DNA, 822 bp, synthetic construct; identical to SEQ ID NO: 1279
  source 1..822: mol_type = other DNA

SEQ ID NO: 4007 - DNA, 830 bp, synthetic construct; identical to SEQ ID NO: 1284
  source 1..830: mol_type = other DNA

SEQ ID NO: 4008 - DNA, 1000 bp, synthetic construct; identical to SEQ ID NO: 1463
  source 1..1000: mol_type = other DNA

SEQ ID NO: 4009 - DNA, 1000 bp, synthetic construct; identical to SEQ ID NO: 1474
  source 1..1000: mol_type = other DNA

SEQ ID NO: 4010 - DNA, 1000 bp, synthetic construct; identical to SEQ ID NO: 1475
  source 1..1000: mol_type = other DNA

SEQ ID NO: 4011 - DNA, 415 bp, synthetic construct; identical to SEQ ID NO: 2667
  source 1..415: mol_type = other DNA

SEQ ID NO: 4012 - DNA, 659 bp, synthetic construct
  source 1..659: mol_type = other DNA
ttctcgcctgagtcaacaaagcgagaaacctgcccctccagcgccagacgagcggcataaaacttgaacttctggcatgctccaccacccttttccccattccaacccccattgcgctctcaaggtcgcgctttttcgagactagctcggattcaaaagttcctggcaccctttgccccttcaggcccttaaggtaggaactgaccttgtgctgtgccctcggtgcggaagtgctactgcgtagcgattgtaagatccctttgtggttctgccctggcaaggttatagagtactgtgatccgctgcggatgccatcctggtaacaggacccccagtgtgcgcaacagtatgttcacggtcttccgtgtccaccacattcggaacactgctctcgtgaaacagtgtgtgtccaatccctgcaatcagtatcaactacaccacctaggaatgctaggaaggtaccccggtccgccgggatctgatcctaggctaattgtctacggtggtgctcctttttattttccacttcaattcattggttacaactgctcgatccctgtgtttgctgcccttctctgctctcatcgccattctcaagtgttcacactgtccaagttcctttggttgttcgcttccacttgccactgtcaactcttgtc

SEQ ID NO: 4013 - DNA, 711 bp, synthetic construct; identical to SEQ ID NO: 1346
  source 1..711: mol_type = other DNA

SEQ ID NO: 4014 - DNA, 650 bp, synthetic construct; identical to SEQ ID NO: 1364
  source 1..650: mol_type = other DNA

SEQ ID NO: 4015 - DNA, 625 bp, synthetic construct; identical to SEQ ID NO: 2985
  source 1..625: mol_type = other DNA

SEQ ID NO: 4016 - DNA, 549 bp, synthetic construct
  source 1..549: mol_type = other DNA
gtggccacgcccgggccaccgatacttcccttcactccttcgggactgttggggaggaacacaacagggctcccctgttttcccattccttcccccttttcccaaccccaaccgccgtatctggtggcggcaagacacacgggtctttccctctaaagcacaattgtgtgtgtgtcccaggtcctcctgcgtacggtgcgggagtgctcccacccaactgttgtaagcctgtccaacgcgtcgtcctggcaagactatgacgtcgcatgttccgctgcggatgccgaccgggtaaccggttccccagtgtgtgtagtgcgatcttccaggtcctcctggttggcgttgtccagaaactgcttcaggtaagtggggtgtgcccaatccctacaaaggttgattctttcaccaccttaggaatgctccggaggtaccccagcaacagctgggatctgaccggaggctaattgtctacgggtggtgtttcctttttcttttcacacaactctactgctgacaactcactgactatccacttgctctgtcacg

SEQ ID NO: 4017 - DNA, 675 bp, synthetic construct
  source 1..675: mol_type = other DNA
tttgctcagcgtaacttctccgggttacgtggagaccaaaaggctacggagactcgggctacggccctggagcacctaggtgctcctaaagacgttagaagttgtacaaactcgcccaatagggccccccaaccaggggggtagcgggcaagcacttctgtttccccggtatgatctcataggctgtacccacggctgaaagagagattatcgttacccgcctcactacttcgagaagcccagtaatggttcatgaagttgatctcgttgacccggtgtttcccccacaccagaaacctgtgatgggggtggtcatcccggtcatggcgacatgacggacctccccgcgccggcacagggcctcttcggaggacgagtgacatggattcaaccgtgaagagcctattgagctagtgttgattcctccgcccccgtgaatgcggctaatcccaactccggagcaggcgggcccaaaccagggtctggcctgtcgtaacgcgaaagtctggagcggaaccgactactttcgggaaggcgtgtttccttttgttccttttatcaagttttatggtgacaactcctggtagacgttttattgcgtttattgagagatttccaacaattgaacagactagaaccacttgttttatcaaaccctcacagaataagataaca

SEQ ID NO: 4018 - DNA, 23 bp, synthetic construct
  source 1..23: mol_type = other DNA
caaacaccattgtcacactccaa

SEQ ID NO: 4019 - protein, 378 aa, synthetic construct
MLLLVTSLLLCELPHPAFLLIPDIQMTQTTSSLSASLGDRVTISCRASQDISKYLNWYQQKPDGTVKLLIYHTSRLHSGVPSRFSGSGSGTDYSLTISNLEQEDIATYFCQQGNTLPYTFGGGTKLEITGSTSGSGKPGSGEGSTKGEVKLQESGPGLVAPSQSLSVTCTVSGVSLPDYGVSWIRQPPRKGLEWLGVIWGSETTYYNSALKSRLTIIKDNSKSQVFLKMNSLQTDDTAIYYCAKHYYYGGSYAMDYWGQGTSVTVSSAAAIEVMYPPPYLDNEKSNGTIIHVKGKHLCPSPLFPGPSKPFWVLVVVGGVLACYSLLVTVAFIIFWVKRGRKKLLYIFKQPFMRPVQTTQEEDGCSCRFPEEEEGGCEL

SEQ ID NO: 4020 - protein, 377 aa, synthetic construct
MLLLVTSLLLCELPHPAFLLIPDIQMTQTTSSLSASLGDRVTISCRASQDISKYLNWYQQKPDGTVKLLIYHTSRLHSGVPSRFSGSGSGTDYSLTISNLEQEDIATYFCQQGNTLPYTFGGGTKLEITGSTSGSGKPGSGEGSTKGEVKLQESGPGLVAPSQSLSVTCTVSGVSLPDYGVSWIRQPPRKGLEWLGVIWGSETTYYNSALKSRLTIIKDNSKSQVFLKMNSLQTDDTAIYYCAKHYYYGGSYAMDYWGQGTSVTVSSAAAIEVMYPPPYLDNEKSNGTIIHVKGKHLCPSPLFPGPSKPFWVLVVVGGVLACYSLLVTVAFIIFWVRSKRSRLLHSDYMNMTPRRPGPTRKHYQPYAPPRDFAAYRS

SEQ ID NO: 4021 - protein, 489 aa, synthetic construct
MLLLVTSLLLCELPHPAFLLIPDIQMTQTTSSLSASLGDRVTISCRASQDISKYLNWYQQKPDGTVKLLIYHTSRLHSGVPSRFSGSGSGTDYSLTISNLEQEDIATYFCQQGNTLPYTFGGGTKLEITGSTSGSGKPGSGEGSTKGEVKLQESGPGLVAPSQSLSVTCTVSGVSLPDYGVSWIRQPPRKGLEWLGVIWGSETTYYNSALKSRLTIIKDNSKSQVFLKMNSLQTDDTAIYYCAKHYYYGGSYAMDYWGQGTSVTVSSAAAIEVMYPPPYLDNEKSNGTIIHVKGKHLCPSPLFPGPSKPFWVLVVVGGVLACYSLLVTVAFIIFWVRSKRSRLLHSDYMNMTPRRPGPTRKHYQPYAPPRDFAAYRSRVKFSRSADAPAYQQGQNQLYNELNLGRREEYDVLDKRRGRDPEMGGKPRRKNPQEGLYNELQKDKMAEAYSEIGMKGERRRGKGHDGLYQGLSTATKDTYDALHMQALPPR

SEQ ID NO: 4022 - protein, 448 aa, synthetic construct
MLLLVTSLLLCELPHPAFLLIPDIQMTQTTSSLSASLGDRVTISCRASQDISKYLNWYQQKPDGTVKLLIYHTSRLHSGVPSRFSGSGSGTDYSLTISNLEQEDIATYFCQQGNTLPYTFGGGTKLEITGSTSGSGKPGSGEGSTKGEVKLQESGPGLVAPSQSLSVTCTVSGVSLPDYGVSWIRQPPRKGLEWLGVIWGSETTYYNSALKSRLTIIKDNSKSQVFLKMNSLQTDDTAIYYCAKHYYYGGSYAMDYWGQGTSVTVSSAAAIEVMYPPPYLDNEKSNGTIIHVKGKHLCPSPLFPGPSKPFWVLVVVGGVLACYSLLVTVAFIIFWVRVKFSRSADAPAYQQGQNQLYNELNLGRREEYDVLDKRRGRDPEMGGKPRRKNPQEGLYNELQKDKMAEAYSEIGMKGERRRGKGHDGLYQGLSTATKDTYDALHMQALPPR

SEQ ID NO: 4023 - protein, 486 aa, synthetic construct
MALPVTALLLPLALLLHAARPDIQMTQTTSSLSASLGDRVTISCRASQDISKYLNWYQQKPDGTVKLLIYHTSRLHSGVPSRFSGSGSGTDYSLTISNLEQEDIATYFCQQGNTLPYTFGGGTKLEITGGGGSGGGGSGGGGSEVKLQESGPGLVAPSQSLSVTCTVSGVSLPDYGVSWIRQPPRKGLEWLGVIWGSETTYYNSALKSRLTIIKDNSKSQVFLKMNSLQTDDTAIYYCAKHYYYGGSYAMDYWGQGTSVTVSSTTTPAPRPPTPAPTIASQPLSLRPEACRPAAGGAVHTRGLDFACDIYIWAPLAGTCGVLLLSLVITLYCKRGRKKLLYIFKQPFMRPVQTTQEEDGCSCRFPEEEEGGCELRVKFSRSADAPAYQQGQNQLYNELNLGRREEYDVLDKRRGRDPEMGGKPRRKNPQEGLYNELQKDKMAEAYSEIGMKGERRRGKGHDGLYQGLSTATKDTYDALHMQALPPR

SEQ ID NO: 4024 - protein, 486 aa, synthetic construct
MALPVTALLLPLALLLHAARPDIQMTQTTSSLSASLGDRVTISCRASQDISKYLNWYQQKPDGTVKLLIYHTSRLHSGVPSRFSGSGSGTDYSLTISNLEQEDIATYFCQQGNTLPYTFGGGTKLEITGGGGSGGGGSGGGGSEVKLQESGPGLVAPSQSLSVTCTVSGVSLPDYGVSWIRQPPRKGLEWLGVIWGSETTYYNSALKSRLTIIKDNSKSQVFLKMNSLQTDDTAIYYCAKHYYYGGSYAMDYWGQGTSVTVSSTTTPAPRPPTPAPTIASQPLSLRPEACRPAAGGAVHTRGLDFACDIYIWAPLAGTCGVLLLSLVITLYCKRGRKKLLYIFKQPFMRPVQTTQEEDGCSCRFPEEEEGGCELRVKFSRSADAPAYKQGQNQLYNELNLGRREEYDVLDKRRGRDPEMGGKPRRKNPQEGLYNELQKDKMAEAYSEIGMKGERRRGKGHDGLYQGLSTATKDTYDALHMQALPPR

SEQ ID NO: 4025 - protein, 483 aa, synthetic construct
MLLLVTSLLLCELPHPAFLLIPQVQLQQSGPGLVKPSQTLSLTCAISGDSVSSNSAAWNWIRQSPSRGLEWLGRTYYRSKWYNDYAVSVKSRITINPDTSKNQFSLQLNSVTPEDTAVYYCAREVTGDLEDAFDIWGQGTMVTVSSGGGGSDIQMTQSPSSLSASVGDRVTITCRASQTIWSYLNWYQQRPGKAPNLLIYAASSLQSGVPSRFSGRGSGTDFTLTISSLQAEDFATYYCQQSYSIPQTFGQGTKLEIKSGTTTPAPRPPTPAPTIASQPLSLRPEACRPAAGGAVHTRGLDFACDIYIWAPLAGTCGVLLLSLVITLYCKRGRKKLLYIFKQPFMRPVQTTQEEDGCSCRFPEEEEGGCELRVKFSRSADAPAYKQGQNQLYNELNLGRREEYDVLDKRRGRDPEMGGKPRRKNPQEGLYNELQKDKMAEAYSEIGMKGERRRGKGHDGLYQGLSTATKDTYDALHMQALPPR

SEQ ID NO: 4026 - protein, 246 aa, synthetic construct
QVQLQQSGPGMVKPSQTLSLTCAISGDSVSSNSVAWNWIRQSPSRGLEWLGRTYYRSTWYNDYAVSMKSRITINPDTNKNQFSLQLNSVTPEDTAVYYCAREVTGDLEDAFDIWGQGTMVTVSSGGGGSGGGGSGGGGSDIQMIQSPSSLSASVGDRVTITCRASQTIWSYLNWYRQRPGEAPNLLIYAASSLQSGVPSRFSGRGSGTDFTLTISSLQAEDFATYYCQQSYSIPQTFGQGTKLEIK

SEQ ID NO: 4027 - protein, 480 aa, synthetic construct
METDTLLLWVLLLWVPGSTGEIVLTQSPATLSLSPGERATMTCRASSSVNYMDWYQQKPGQAPRPWIYATSNLASGVPARFSGSGSGTDFTLTISSLEPEDFAVYYCQQWSFNPPTFGGGTKVEIKGSTSGGGSGGGSGGGGSSQVQLVQSGAEVKKPGASVKVSCKASGYTFTSYNMHWVRQAPGQGLEWIGAIYPGNGDTSYNQKFKGKATLTRDTSTSTVYMELSSLRSEDTAVYYCARSNYYGSSYWFFDVWGQGTTVTVSSTTTPAPRPPTPAPTIASQPLSLRPEACRPAAGGAVHTRGLDFACDFWLPIGCAAFVVVCILGCILICWLTKKKYSSSVHDPNGEYMFMRAVNTAKKSRLTDVTLRVKFSRSADAPAYKQGQNQLYNELNLGRREEYDVLDKRRGRDPEMGGKPRRKNPQEGLYNELQKDKMAEAYSEIGMKGERRRGKGHDGLYQGLSTATKDTYDALHMQALP

SEQ ID NO: 4028 - protein, 493 aa, synthetic construct
MALPVTALLLPLALLLHAARPDIVLTQSPASLAVSLGERATINCRASESVSVIGAHLIHWYQQKPGQPPKLLIYLASNLETGVPARFSGSGSGTDFTLTISSLQAEDAAIYYCLQSRIFPRTFGQGTKLEIKGSTSGSGKPGSGEGSTKGQVQLVQSGSELKKPGASVKVSCKASGYTFTDYSINWVRQAPGQGLEWMGWINTETREPAYAYDFRGRFVFSLDTSVSTAYLQISSLKAEDTAVYYCARDYSYAMDYWGQGTLVTVSSAAATTTPAPRPPTPAPTIASQPLSLRPEACRPAAGGAVHTRGLDFACDIYIWAPLAGTCGVLLLSLVITLYCKRGRKKLLYIFKQPFMRPVQTTQEEDGCSCRFPEEEEGGCELRVKFSRSADAPAYQQGQNQLYNELNLGRREEYDVLDKRRGRDPEMGGKPRRKNPQEGLYNELQKDKMAEAYSEIGMKGERRRGKGHDGLYQGLSTATKDTYDALHMQALPPR

SEQ ID NO: 4029 - protein, 207 aa, synthetic construct
KNQVEQSPQSLIILEGKNCTLQCNYTVSPFSNLRWYKQDTGRGPVSLTIMTFSENTKSNGRYTATLDADTKQSSLHITASQLSDSASYICVVNHSGGSYIPTFGRGTSLIVHPYIQKPDPAVYQLRDSKSSDKSVCLFTDFDSQTNVSQSKDSDVYITDKTVLDMRSMDFKSNSAVAWSNKSDFACANAFNNSIIPEDTFFPSPESS

SEQ ID NO: 4030 - protein, 246 aa, synthetic construct
DVKVTQSSRYLVKRTGEKVFLECVQDMDHENMFWYRQDPGLGLRLIYFSYDVKMKEKGDIPEGYSVSREKKERFSLILESASTNQTSMYLCASSFLMTSGDPYEQYFGPGTRLTVTEDLKNVFPPEVAVFEPSEAEISHTQKATLVCLATGFYPDHVELSWWVNGKEVHSGVSTDPQPLKEQPALNDSRYCLSSRLRVSATFWQNPRNHFRCQVQFYGLSENDEWTQDRAKPVTQIVSAEAWGRAD

SEQ ID NO: 4031 - protein, 115 aa, synthetic construct
MQEVTQIPAALSVPEGENLVLNCSFTDSAIYNLQWFRQDPGKGLTSLLLIQSSQREQTSGRLNASLDKSSGRSTLYIAASQPGDSATYLCAVRPTSGGSYIPTFGRGTSLIVHPY

SEQ ID NO: 4032 - protein, 112 aa, synthetic construct
MGVTQTPKFQVLKTGQSMTLQCAQDMNHEYMSWYRQDPGMGLRLIHYSVGAGITDQGEVPNGYNVSRSTTEDFPLRLLSAAPSQTSVYFCASSYVGNTGELFFGEGSRLTVL

SEQ ID NO: 4033 - protein, 166 aa, synthetic construct
APPRLICDSRVLERYLLEAKEAENITTGCAEHCSLNENITVPDTKVNFYAWKRMEVGQQAVEVWQGLALLSEAVLRGQALLVNSSQPWEPLQLHVDKAVSGLRSLTTLLRALGAQKEAISPPDAASAAPLRTITADTFRKLFRVYSNFLRGKLKLYTGEACRTGDR

SEQ ID NO: 4034 - protein, 452 aa, synthetic construct
MSTAVLENPGLGRKLSDFGQETSYIEDNCNQNGAISLIFSLKEEVGALAKVLRLFEENDVNLTHIESRPSRLKKDEYEFFTHLDKRSLPALTNIIKILRHDIGATVHELSRDKKKDTVPWFPRTIQELDRFANQILSYGAELDADHPGFKDPVYRARRKQFADIAYNYRHGQPIPRVEYMEEEKKTWGTVFKTLKSLYKTHACYEYNHIFPLLEKYCGFHEDNIPQLEDVSQFLQTCTGFRLRPVAGLLSSRDFLGGLAFRVFHCTQYIRHGSKPMYTPEPDICHELLGHVPLFSDRSFAQFSQEIGLASLGAPDEYIEKLATIYWFTVEFGLCKQGDSIKAYGAGLLSSFGELQYCLSEKPKLLPLELEKTAIQNYTVTEFQPLYYVAESFNDAKEKVRNFAATIPRPFSVRYDPYTQRIEVLDNTQQLKILADSINSEIGILCSALQKIK

SEQ ID NO: 4035 - protein, 1462 aa, synthetic construct
LSVKAQTAHIVLEDGTKMKGYSFGHPSSVAGEVVFNTGLGGYPEAITDPAYKGQILTMANPIIGNGGAPDTTALDELGLSKYLESNGIKVSGLLVLDYSKDYNHWLATKSLGQWLQEEKVPAIYGVDTRMLTKIIRDKGTMLGKIEFEGQPVDFVDPNKQNLIAEVSTKDVKVYGKGNPTKVVAVDCGIKNNVIRLLVKRGAEVHLVPWNHDFTKMEYDGILIAGGPGNPALAEPLIQNVRKILESDRKEPLFGISTGNLITGLAAGAKTYKMSMANRGQNQPVLNITNKQAFITAQNHGYALDNTLPAGWKPLFVNVNDQTNEGIMHESKPFFAVQFHPEVTPGPIDTEYLFDSFFSLIKKGKATTITSVLPKPALVASRVEVSKVLILGSGGLSIGQAGEFDYSGSQAVKAMKEENVKTVLMNPNIASVQTNEVGLKQADTVYFLPITPQFVTEVIKAEQPDGLILGMGGQTALNCGVELFKRGVLKEYGVKVLGTSVESIMATEDRQLFSDKLNEINEKIAPSFAVESIEDALKAADTIGYPVMIRSAYALGGLGSGICPNRETLMDLSTKAFAMTNQILVEKSVTGWKEIEYEVVRDADDNCVTVCNMENVDAMGVHTGDSVVVAPAQTLSNAEFQMLRRTSINVVRHLGIVGECNIQFALHPTSMEYCIIEVNARLSRSSALASKATGYPLAFIAAKIALGIPLPEIKNVVSGKTSACFEPSLDYMVTKIPRWDLDRFHGTSSRIGSSMKSVGEVMAIGRTFEESFQKALRMCHPSIEGFTPRLPMNKEWPSNLDLRKELSEPSSTRIYAIAKAIDDNMSLDEIEKLTYIDKWFLYKMRDILNMEKTLKGLNSESMTEETLKRAKEIGFSDKQISKCLGLTEAQTRELRLKKNIHPWVKQIDTLAAEYPSVTNYLYVTYNGQEHDVNFDDHGMMVLGCGPYHIGSSVEFDWCAVSSIRTLRQLGKKTVVVNCNPETVSTDFDECDKLYFEELSLERILDIYHQEACGGCIISVGGQIPNNLAVPLYKNGVKIMGTSPLQIDRAEDRSIFSAVLDELKVAQAPWKAVNTLNEALEFAKSVDYPCLLRPSYVLSGSAMNVVFSEDEMKKFLEEATRVSQEHPVVLTKFVEGAREVEMDAVGKDGRVISHAISEHVEDAGVHSGDATLMLPTQTISQGAIEKVKDATRKIAKAFAISGPFNVQFLVKGNDVLVIECNLRASRSFPFVSKTLGVDFIDVATKVMIGENVDEKHLPTLDHPIIPADYVAIKAPMFSWPRLRDADPILRCEMASTGEVACFGEGIHTAFLKAMLSTGFKIPQKGILIGIQQSFRPRFLGVAEQLHNEGFKLFATEATSDWLNANNVPATPVAWPSQEGQNPSLSSIRKLIRDGSIDLVINLPNNNTKFVHDNYVIRRTAVDSGIPLLTNFQVTKLFAEAVQKSRKVDSKSLFHYRQYSAGKAA

SEQ ID NO: 4036 - protein, 1053 aa, synthetic construct
MKRNYILGLDIGITSVGYGIIDYETRDVIDAGVRLFKEANVENNEGRRSKRGARRLKRRRRHRIQRVKKLLFDYNLLTDHSELSGINPYEARVKGLSQKLSEEEFSAALLHLAKRRGVHNVNEVEEDTGNELSTKEQISRNSKALEEKYVAELQLERLKKDGEVRGSINRFKTSDYVKEAKQLLKVQKAYHQLDQSFIDTYIDLLETRRTYYEGPGEGSPFGWKDIKEWYEMLMGHCTYFPEELRSVKYAYNADLYNALNDLNNLVITRDENEKLEYYEKFQIIENVFKQKKKPTLKQIAKEILVNEEDIKGYRVTSTGKPEFTNLKVYHDIKDITARKEIIENAELLDQIAKILTIYQSSEDIQEELTNLNSELTQEEIEQISNLKGYTGTHNLSLKAINLILDELWHTNDNQIAIFNRLKLVPKKVDLSQQKEIPTTLVDDFILSPVVKRSFIQSIKVINAIIKKYGLPNDIIIELAREKNSKDAQKMINEMQKRNRQTNERIEEIIRTTGKENAKYLIEKIKLHDMQEGKCLYSLEAIPLEDLLNNPFNYEVDHIIPRSVSFDNSFNNKVLVKQEENSKKGNRTPFQYLSSSDSKISYETFKKHILNLAKGKGRISKTKKEYLLEERDINRFSVQKDFINRNLVDTRYATRGLMNLLRSYFRVNNLDVKVKSINGGFTSFLRRKWKFKKERNKGYKHHAEDALIIANADFIFKEWKKLDKAKKVMENQMFEEKQAESMPEIETEQEYKEIFITPHQIKHIKDFKDYKYSHRVDKKPNRELINDTLYSTRKDDKGNTLIVNNLNGLYDKDNDKLKKLINKSPEKLLMYHHDPQTYQKLKLIMEQYGDEKNPLYKYYEETGNYLTKYSKKDNGPVIKKIKYYGNKLNAHLDITDDYPNSRNKVVKLSLKPYRFDVYLDNGVYKFVTVKNLDVIKKENYYEVNSKCYEEAKKLKKISNQAEFIASFYNNDLIKINGELYRVIGVNNDLLNRIEVNMIDITYREYLENMNDKRPPRIIKTIASKTQSIKKYSTDILGNLYEVKSKKHPQIIKKG

SEQ ID NO: 4037 - protein, 1353 aa, synthetic construct
AAGGILHLELLVAVGPDVFQAHQEDTERYVLTNLNIGAELLRDPSLGAQFRVHLVKMVILTEPEGAPNITANLTSSLLSVCGWSQTINPEDDTDPGHADLVLYITRFDLELPDGNRQVRGVTQLGGACSPTWSCLITEDTGFDLGVTIAHEIGHSFGLEHDGAPGSGCGPSGHVMASDGAAPRAGLAWSPCSRRQLLSLLSAGRARCVWDPPRPQPGSAGHPPDAQPGLYYSANEQCRVAFGPKAVACTFAREHLDMCQALSCHTDPLDQSSCSRLLVPLLDGTECGVEKWCSKGRCRSLVELTPIAAVHGRWSSWGPRSPCSRSCGGGVVTRRRQCNNPRPAFGGRACVGADLQAEMCNTQACEKTQLEFMSQQCARTDGQPLRSSPGGASFYHWGAAVPHSQGDALCRHMCRAIGESFIMKRGDSFLDGTRCMPSGPREDGTLSLCVSGSCRTFGCDGRMDSQQVWDRCQVCGGDNSTCSPRKGSFTAGRAREYVTFLTVTPNLTSVYIANHRPLFTHLAVRIGGRYVVAGKMSISPNTTYPSLLEDGRVEYRVALTEDRLPRLEEIRIWGPLQEDADIQVYRRYGEEYGNLTRPDITFTYFQPKPRQAWVWAAVRGPCSVSCGAGLRWVNYSCLDQARKELVETVQCQGSQQPPAWPEACVLEPCPPYWAVGDFGPCSASCGGGLRERPVRCVEAQGSLLKTLPPARCRAGAQQPAVALETCNPQPCPARWEVSEPSSCTSAGGAGLALENETCVPGADGLEAPVTEGPGSVDEKLPAPEPCVGMSCPPGWGHLDATSAGEKAPSPWGSIRTGAQAAHVWTPAAGSCSVSCGRGLMELRFLCMDSALRVPVQEELCGLASKPGSRREVCQAVPCPARWQYKLAACSVSCGRGVVRRILYCARAHGEDDGEEILLDTQCQGLPRPEPQEACSLEPCPPRWKVMSLGPCSASCGLGTARRSVACVQLDQGQDVEVDEAACAALVRPEASVPCLIADCTYRWHVGTWMECSVSCGDGIQRRRDTCLGPQAQAPVPADFCQHLPKPVTVRGCWAGPCVGQGTPSLVPHEEAAAPGRTTATPAGASLEWSQARGLLFSPAPQPRRLLPGPQENSVQSSACGRQHLEPTGTIDMRGPGQADCAVAIGRPLGEVVTLRVLESSLNCSAGDMLLLWGRLTWRKMCRKLLDMTFSSKTNTLVVRQRCGRPGGGVLLRYGSQLAPETFYRECDMQLFGPWGEIVSPSLSPATSNAGGCRLFINVAPHARIAIHALATNMGAGTEGANASYILIRDTHSLRTTAFHGQQVLYWESESSQAEMEFSEGFLKAQASLRGQYWTLQSWVPEMQDPQSWKGKEGT

SEQ ID NO: 4038 - protein, 431 aa, synthetic construct
MPNPRPGKPSAPSLALGPSPGASPSWRAAPKASDLLGARGPGGTFQGRDLRGGAHASSSSLNPMPPSQLQLPTLPLVMVAPSGARLGPLPHLQALLQDRPHFMHQLSTVDAHARTPVLQVHPLESPAMISLTPPTTATGVFSLKARPGLPPGINVASLEWVSREPALLCTFPNPSAPRKDSTLSAVPQSSYPLLANGVCKWPGCEKVFEEPEDFLKHCQADHLLDEKGRAQCLLQREMVQSLEQQLVLEKEKLSAMQAHLAGKMALTKASSVASSDKGSCCIVAAGSQGPVVPAWSGPREAPDSLFAVRRHLWGSHGNSTFPEFLHNMDYFKFHNMRPPFTYATLIRWAILEAPEKQRTLNEIYHWFTRMFAFFRNHPATWKNAIRHNLSLHKCFVRVESEKGAVWTVDELEFRKKRSQRPSRCSNPTPGP

SEQ ID NO: 4039 - protein, 160 aa, synthetic construct
SPGQGTQSENSCTHFPGNLPNMLRDLRDAFSRVKTFFQMKDQLDNLLLKESLLEDFKGYLGCQALSEMIQFYLEEVMPQAENQDPDIKAHVNSLGENLKTLRLRLRRCHRFLPCENKSKAVEQVKNAFNKLQEKGIYKAMSEFDIFINYIEAYMTMKIRN

SEQ ID NO: 4040 - protein, 133 aa, synthetic construct [sequence omitted]

SEQ ID NO: 4041 - protein, 42 aa, synthetic construct
KRGRKKLLYIFKQPFMRPVQTTQEEDGCSCRFPEEEEGGCEL

SEQ ID NO: 4042 - protein, 241 aa, synthetic construct
QVQLVQSGAEVEKPGASVKVSCKASGYTFTDYYMHWVRQAPGQGLEWMGWINPNSGGTNYAQKFQGRVTMTRDTSISTAYMELSRLRSDDTAVYYCASGWDFDYWGQGTLVTVSSGGGGSGGGGSGGGGSGGGGSDIVMTQSPSSLSASVGDRVTITCRASQSIRYYLSWYQQKPGKAPKLLIYTASILQNGVPSRFSGSGSGTDFTLTISSLQPEDFATYYCLQTYTTPDFGPGTKVEIK

SEQ ID NO: 4043 - protein, 112 aa, synthetic construct
RVKFSRSADAPAYKQGQNQLYNELNLGRREEYDVLDKRRGRDPEMGGKPRRKNPQEGLYNELQKDKMAEAYSEIGMKGERRRGKGHDGLYQGLSTATKDTYDALHMQALPPR

SEQ ID NO: 4044 - DNA, 549 bp, unidentified; identical to SEQ ID NO: 4016
  source 1..549: mol_type = unassigned DNA; note = CK-151 control IRES

SEQ ID NO: 4045 - DNA, 20 bp, synthetic construct
  source 1..20: mol_type = other DNA
taggcgtcgatgccgatccc

SEQ ID NO: 4046 - DNA, 20 bp, synthetic construct
  source 1..20: mol_type = other DNA
ggatgataaccgatactcga

SEQ ID NO: 4047 - DNA, 20 bp, synthetic construct
  source 1..20: mol_type = other DNA
ccgtcacgaccggctgaaat

SEQ ID NO: 4048 - DNA, 20 bp, synthetic construct
  source 1..20: mol_type = other DNA
caacatcagtattcccaggc

SEQ ID NO: 4049 - DNA, 20 bp, synthetic construct
  source 1..20: mol_type = other DNA
gagtgtgtggttagtacgca

SEQ ID NO: 4050 - DNA, 20 bp, synthetic construct
  source 1..20: mol_type = other DNA
aaacttcggcggtaggatcc

SEQ ID NO: 4051 - DNA, 20 bp, synthetic construct
  source 1..20: mol_type = other DNA
cgtcacaagtgacatccggc

SEQ ID NO: 4052 - DNA, 20 bp, synthetic construct
  source 1..20: mol_type = other DNA
aactacgctttagatgagtt

SEQ ID NO: 4053 - DNA, 20 bp, synthetic construct
  source 1..20: mol_type = other DNA
tgcagatgcgatgcgcacga

SEQ ID NO: 4054 - DNA, 20 bp, synthetic construct
  source 1..20: mol_type = other DNA
aggtttatatcatcagcgct

SEQ ID NO: 4055 - DNA, 20 bp, synthetic construct
  source 1..20: mol_type = other DNA
gtagctagttcggcttatgc

SEQ ID NO: 4056 - DNA, 20 bp, synthetic construct
  source 1..20: mol_type = other DNA
gtgctgaccaatcgaccaag

SEQ ID NO: 4057 - DNA, 20 bp, synthetic construct
  source 1..20: mol_type = other DNA
gaaccacaactttaccctag

SEQ ID NO: 4058 - DNA, 20 bp, synthetic construct
  source 1..20: mol_type = other DNA
gccgggagtctaactcaaat

SEQ ID NO: 4059 - DNA, 20 bp, synthetic construct
  source 1..20: mol_type = other DNA
atatggcccatcgcagtgcg

SEQ ID NO: 4060 - DNA, 20 bp, synthetic construct
  source 1..20: mol_type = other DNA
ctctctgctatgatgagaca

SEQ ID NO: 4061 - DNA, 20 bp, synthetic construct
  source 1..20: mol_type = other DNA
gtccgtacactcactacttg

SEQ ID NO: 4062 - DNA, 20 bp, synthetic construct
  source 1..20: mol_type = other DNA
tggttggtaccttagggtgg

SEQ ID NO: 4063 - DNA, 20 bp, synthetic construct
  source 1..20: mol_type = other DNA
acacgacagtccgggtccta

SEQ ID NO: 4064 - DNA, 20 bp, synthetic construct
  source 1..20: mol_type = other DNA
ctcatcctgcgaaccaagtg

SEQ ID NO: 4065 - DNA, 20 bp, synthetic construct
  source 1..20: mol_type = other DNA
ctatctcaccgaagcgctag

SEQ ID NO: 4066 - DNA, 20 bp, synthetic construct
  source 1..20: mol_type = other DNA
aacgcctctgctgcgctttg

SEQ ID NO: 4067 - DNA, 20 bp, synthetic construct
  source 1..20: mol_type = other DNA
ctcaggtagtgtaggcaagc

SEQ ID NO: 4068 - DNA, 20 bp, synthetic construct
  source 1..20: mol_type = other DNA
tatagtataacacgacccat

SEQ ID NO: 4069 - DNA, 20 bp, synthetic construct
  source 1..20: mol_type = other DNA
tgaaggtagacggaggattt

SEQ ID NO: 4070 - DNA, 20 bp, synthetic construct
  source 1..20: mol_type = other DNA
aatgagtagtagagactagg

SEQ ID NO: 4071 - DNA, 20 bp, synthetic construct
  source 1..20: mol_type = other DNA
gatcatgcaacgtattgaaa

SEQ ID NO: 4072 - DNA, 20 bp, synthetic construct
  source 1..20: mol_type = other DNA
accacccggacatgatcgtc

SEQ ID NO: 4073 - DNA, 20 bp, synthetic construct
  source 1..20: mol_type = other DNA
ttgtctggttaagagggctt

SEQ ID NO: 4074 - DNA, 20 bp, synthetic construct
  source 1..20: mol_type = other DNA
atgaattacgcgcgctcaga

SEQ ID NO: 4075 - DNA, 20 bp, synthetic construct
  source 1..20: mol_type = other DNA
ccaacggaaagtctgttgtc

SEQ ID NO: 4076 - DNA, 20 bp, synthetic construct
  source 1..20: mol_type = other DNA
ttgttaagggactttcaagt

SEQ ID NO: 4077 - DNA, 20 bp, synthetic construct
  source 1..20: mol_type = other DNA
cgtgatagactagcgcaagg

SEQ ID NO: 4078 - DNA, 20 bp, synthetic construct
  source 1..20: mol_type = other DNA
aggccgtcggcataaacgtg

SEQ ID NO: 4079 - DNA, 20 bp, synthetic construct
  source 1..20: mol_type = other DNA
attcccgacgttaacagtac

SEQ ID NO: 4080 - DNA, 20 bp, synthetic construct
  source 1..20: mol_type = other DNA
acataggagacaattcaata

SEQ ID NO: 4081 - DNA, 20 bp, synthetic construct
  source 1..20: mol_type = other DNA
gcatgtatagcgactcatgg

SEQ ID NO: 4082 - DNA, 20 bp, synthetic construct
  source 1..20: mol_type = other DNA
tggcaccggaccgtctgaaa

SEQ ID NO: 4083 - DNA, 20 bp, synthetic construct
  source 1..20: mol_type = other DNA
ttgtgtaggcgcgtctacgc

SEQ ID NO: 4084 - DNA, 20 bp, synthetic construct
  source 1..20: mol_type = other DNA
ctagacgctgtagttctgta

SEQ ID NO: 4085 - DNA, 20 bp, synthetic construct
  source 1..20: mol_type = other DNA
agcagatcaacctccggcaa

SEQ ID NO: 4086 - DNA, 20 bp, synthetic construct
  source 1..20: mol_type = other DNA
ctgtccatgcttgcctgtga

SEQ ID NO: 4087 - DNA, 20 bp, synthetic construct
  source 1..20: mol_type = other DNA
tagagattccgagagcgaga

SEQ ID NO: 4088 - DNA, 20 bp, synthetic construct
  source 1..20: mol_type = other DNA
tgataagtaaattgctctgc

SEQ ID NO: 4089 - DNA, 20 bp, synthetic construct
  source 1..20: mol_type = other DNA
ctagtaaatggagcgggcca

SEQ ID NO: 4090 - DNA, 20 bp, synthetic construct
  source 1..20: mol_type = other DNA
ttagcgtcgcagatagcaga

SEQ ID NO: 4091 - DNA, 20 bp, synthetic construct
  source 1..20: mol_type = other DNA
cataacttggatagaagtgc

SEQ ID NO: 4092 - DNA, 20 bp, synthetic construct
  source 1..20: mol_type = other DNA
gtgccgtacttcctctgaca

SEQ ID NO: 4093 - DNA, 20 bp, synthetic construct
  source 1..20: mol_type = other DNA
ggtagttcgacgtgccctga

SEQ ID NO: 4094 - DNA, 20 bp, synthetic construct
  source 1..20: mol_type = other DNA
ctaacggaaccgagagagaa

SEQ ID NO: 4095 - DNA, 20 bp, synthetic construct
  source 1..20: mol_type = other DNA
tagtattggcgggactcatc

SEQ ID NO: 4096 - DNA, 20 bp, synthetic construct
  source 1..20: mol_type = other DNA
tgtttacgcaaacagcacac

SEQ ID NO: 4097 - DNA, 20 bp, synthetic construct
  source 1..20: mol_type = other DNA
taattgtacctcttcccgga

SEQ ID NO: 4098 - DNA, 20 bp, synthetic construct
  source 1..20: mol_type = other DNA
agtgaggaggcatgctctta

SEQ ID NO: 4099 - DNA, 20 bp, synthetic construct
  source 1..20: mol_type = other DNA
cactgcatttgcttccctgc

SEQ ID NO: 4100 - DNA, 20 bp, synthetic construct
  source 1..20: mol_type = other DNA
acaaagtgccctcaacggat

SEQ ID NO: 4101 - DNA, 20 bp, synthetic construct
  source 1..20: mol_type = other DNA
caagaccttagtttgatctg

SEQ ID NO: 4102 - DNA, 20 bp, synthetic construct
  source 1..20: mol_type = other DNA
aaatacttgactcagcatga

SEQ ID NO: 4103 - DNA, 20 bp, synthetic construct
  source 1..20: mol_type = other DNA
ccgttgataatgtgcgatgg

SEQ ID NO: 4104 - DNA, 20 bp, synthetic construct
  source 1..20: mol_type = other DNA
acagctgagagagcatagac

SEQ ID NO: 4105 - DNA, 20 bp, synthetic construct
  source 1..20: mol_type = other DNA
aaggtcgcgtgttcagtata

SEQ ID NO: 4106 - DNA, 20 bp, synthetic construct
  source 1..20: mol_type = other DNA
gctgcaggttaagatgttca

SEQ ID NO: 4107 - DNA, 20 bp, synthetic construct
  source 1..20: mol_type = other DNA
agggatcacacttcgttacg

SEQ ID NO: 4108 - DNA, 20 bp, synthetic construct
  source 1..20: mol_type = other DNA
atcctcggttatatgtatag

SEQ ID NO: 4109 - DNA, 20 bp, synthetic construct
  source 1..20: mol_type = other DNA
ctaacacggtactactcatc

SEQ ID NO: 4110 - DNA, 20 bp, synthetic construct
  source 1..20: mol_type = other DNA
gcgctgcatcaccgcgcaaa

SEQ ID NO: 4111 - DNA, 20 bp, synthetic construct
  source 1..20: mol_type = other DNA
tttcaacacttctggtggat

SEQ ID NO: 4112 - DNA, 20 bp, synthetic construct
  source 1..20: mol_type = other DNA
gttagtactttcacgggagg

SEQ ID NO: 4113 - DNA, 20 bp, synthetic construct
  source 1..20: mol_type = other DNA
gaagctacgtaaaccgggac

SEQ ID NO: 4114 - DNA, 20 bp, synthetic construct
  source 1..20: mol_type = other DNA
cgtgtaggctctaaactaga

SEQ ID NO: 4115 - DNA, 20 bp, synthetic construct
  source 1..20: mol_type = other DNA
gacacgagtagtgtgccgtg

SEQ ID NO: 4116 - DNA, 20 bp, synthetic construct
  source 1..20: mol_type = other DNA
ctagataggagaccaccaga

SEQ ID NO: 4117 - DNA, 20 bp, synthetic construct
  source 1..20: mol_type = other DNA
ccctcttcttggacccgtga

SEQ ID NO: 4118 - DNA, 20 bp, synthetic construct
  source 1..20: mol_type = other DNA
cgggatcaggcataatgtgc

SEQ ID NO: 4119 - DNA, 20 bp, synthetic construct
  source 1..20: mol_type = other DNA
accgtcagtcgctgcacgtg

SEQ ID NO: 4120 - DNA, 20 bp, synthetic construct
  source 1..20: mol_type = other DNA
cgttcgcagcctcggagctg

SEQ ID NO: 4121 - DNA, 20 bp, synthetic construct
  source 1..20: mol_type = other DNA
attgcaaacgctggcgtaag

SEQ ID NO: 4122 - DNA, 20 bp, synthetic construct
  source 1..20: mol_type = other DNA
ttaaagttgtgtacgtaacg

SEQ ID NO: 4123 - DNA, 20 bp, synthetic construct
  source 1..20: mol_type = other DNA
atcagttcaactacctacat

SEQ ID NO: 4124 - DNA, 20 bp, synthetic construct
  source 1..20: mol_type = other DNA
ttgactaactgcgccgttcg

SEQ ID NO: 4125 - DNA, 20 bp, synthetic construct
  source 1..20: mol_type = other DNA
tgcagagaccaatgccgact

SEQ ID NO: 4126 - DNA, 20 bp, synthetic construct
  source 1..20: mol_type = other DNA
gattgcgtagcgcggtccgt

SEQ ID NO: 4127 - DNA, 20 bp, synthetic construct
  source 1..20: mol_type = other DNA
gtcactctgtgatccttgtt

SEQ ID NO: 4128 - DNA, 20 bp, synthetic construct
  source 1..20: mol_type = other DNA
cagaacgccaggttgggttc

SEQ ID NO: 4129 - DNA, 20 bp, synthetic construct
  source 1..20: mol_type = other DNA
ctaaaggctgagtctttaca

SEQ ID NO: 4130 - DNA, 20 bp, synthetic construct
  source 1..20: mol_type = other DNA
cgggtttcataaagtacaca

SEQ ID NO: 4131 - DNA, 20 bp, synthetic construct
  source 1..20: mol_type = other DNA
ttcggcacgcttggctgtgt

SEQ ID NO: 4132 - DNA, 20 bp, synthetic construct
  source 1..20: mol_type = other DNA
gacctacgggcaccagagtt

SEQ ID NO: 4133 - DNA, 20 bp, synthetic construct
  source 1..20: mol_type = other DNA
tagcgttgggtgtttaaatc

SEQ ID NO: 4134 - DNA, 20 bp, synthetic construct
  source 1..20: mol_type = other DNA
ttgttcttctgaggacatgg

SEQ ID NO: 4135 - DNA, 20 bp, synthetic construct
  source 1..20: mol_type = other DNA
aggccagcttctgattaaag

SEQ ID NO: 4136 - DNA, 20 bp, synthetic construct
  source 1..20: mol_type = other DNA
taactcacaggctgctgatg

SEQ ID NO: 4137 - DNA, 20 bp, synthetic construct
  source 1..20: mol_type = other DNA
gtctgcaactcaagagtacc

SEQ ID NO: 4138 - DNA, 20 bp, synthetic construct
  source 1..20: mol_type = other DNA
tacgtgtggtgcggcataat

SEQ ID NO: 4139 - DNA, 20 bp, synthetic construct
  source 1..20: mol_type = other DNA
cattatgcgttgcttgccat

SEQ ID NO: 4140 - DNA, 20 bp, synthetic construct
  source 1..20: mol_type = other DNA
taggagagcgccgcgtatgt

SEQ ID NO: 4141 - DNA, 20 bp, synthetic construct
  source 1..20: mol_type = other DNA
cgcgattctcagatccgttt

SEQ ID NO: 4142 - DNA, 20 bp, synthetic construct
  source 1..20: mol_type = other DNA
ttaggccagccgtcttgtta

SEQ ID NO: 4143 - DNA, 20 bp, synthetic construct
  source 1..20: mol_type = other DNA
cagcctggcgaggtccaaca

SEQ ID NO: 4144 - DNA, 20 bp, synthetic construct
  source 1..20: mol_type = other DNA
ccgctggtgcatccgacaag

SEQ ID NO: 4145 - DNA, 20 bp, synthetic construct
  source 1..20: mol_type = other DNA
tgtgcctcgattaccatatg

SEQ ID NO: 4146 - DNA, 20 bp, synthetic construct
  source 1..20: mol_type = other DNA
cctgaacccacggagtccgt

SEQ ID NO: 4147 - DNA, 20 bp, synthetic construct
  source 1..20: mol_type = other DNA
tacaagcattggttacgctg

SEQ ID NO: 4148 - DNA, 20 bp, synthetic construct
  source 1..20: mol_type = other DNA
ggatcatgcggtggttaaca

SEQ ID NO: 4149 - DNA, 20 bp, synthetic construct
  source 1..20: mol_type = other DNA
acttcaggctacttacccat

SEQ ID NO: 4150 - DNA, 20 bp, synthetic construct
  source 1..20: mol_type = other DNA
cttcctattcaggatactgg

SEQ ID NO: 4151 - DNA, 20 bp, synthetic construct
  source 1..20: mol_type = other DNA
gtcctattgacggttgcagt

SEQ ID NO: 4152 - DNA, 20 bp, synthetic construct
  source 1..20: mol_type = other DNA
ttgatgcgcttggcgatcac

SEQ ID NO: 4153 - DNA, 20 bp, synthetic construct
  source 1..20: mol_type = other DNA
tgggacttgctgtaccaaat

SEQ ID NO: 4154 - DNA, 20 bp, synthetic construct
  source 1..20: mol_type = other DNA
tgaggaggctggcgagggaa

SEQ ID NO: 4155 - DNA, 20 bp, synthetic construct
  source 1..20: mol_type = other DNA
tagaaggacctcgcgtagga

SEQ ID NO: 4156 - DNA, 20 bp, synthetic construct
  source 1..20: mol_type = other DNA
tgaggtgtgctggtgcatcc

SEQ ID NO: 4157 - DNA, 20 bp, synthetic construct
  source 1..20: mol_type = other DNA
gagaccgctcagagttcgta

SEQ ID NO: 4158 - DNA, 20 bp, synthetic construct
  source 1..20: mol_type = other DNA
tcactaccagagctgagtac

SEQ ID NO: 4159 - DNA, 20 bp, synthetic construct
  source 1..20: mol_type = other DNA
acgaagttacaatactgatt

SEQ ID NO: 4160 - DNA, 20 bp, synthetic construct
  source 1..20: mol_type = other DNA
cataaccgttgctaggtcaa

SEQ ID NO: 4161 - DNA, 20 bp, synthetic construct
  source 1..20: mol_type = other DNA
tgtaatccagtttcagaatg

SEQ ID NO: 4162 - DNA, 20 bp, synthetic construct
  source 1..20: mol_type = other DNA
gtacgctcattcgccgatcc

SEQ ID NO: 4163 - DNA, 20 bp, synthetic construct
  source 1..20: mol_type = other DNA
taggaccaagaaatagagtc

SEQ ID NO: 4164 - DNA, 20 bp, synthetic construct
  source 1..20: mol_type = other DNA
tgtcaagtggttgcccgagg

SEQ ID NO: 4165 - DNA, 20 bp, synthetic construct
  source 1..20: mol_type = other DNA
gtagagcacaaatatggcat

SEQ ID NO: 4166 - DNA, 20 bp, synthetic construct
  source 1..20: mol_type = other DNA
tgcacccgcaaacaacgtcg

SEQ ID NO: 4167 - DNA, 20 bp, synthetic construct
  source 1..20: mol_type = other DNA
gacatctctaggtacgcagt

SEQ ID NO: 4168 - DNA, 20 bp, synthetic construct
  source 1..20: mol_type = other DNA
cacggctgcggatgcgttaa

SEQ ID NO: 4169 - DNA, 20 bp, synthetic construct
  source 1..20: mol_type = other DNA
atttgtgtacagtgctcgga

SEQ ID NO: 4170 - DNA, 20 bp, synthetic construct
  source 1..20: mol_type = other DNA
aataactggttcaccgactc

SEQ ID NO: 4171 - DNA, 20 bp, synthetic construct
  source 1..20: mol_type = other DNA
gatagccattatgcactagg

SEQ ID NO: 4172 - DNA, 20 bp, synthetic construct
  source 1..20: mol_type = other DNA
cgggttcaggtcagaggcac

SEQ ID NO: 4173 - DNA, 20 bp, synthetic construct
  source 1..20: mol_type = other DNA
agcattatttccacgaatca

SEQ ID NO: 4174 - DNA, 20 bp, synthetic construct
  source 1..20: mol_type = other DNA
aatacctttacacaggctag

SEQ ID NO: 4175 - DNA, 20 bp, synthetic construct
  source 1..20: mol_type = other DNA
ctcatccacttgcgcgatat

SEQ ID NO: 4176 - DNA, 20 bp, synthetic construct
  source 1..20: mol_type = other DNA
tacccaccctttcgtacagg

SEQ ID NO: 4177 - DNA, 20 bp, synthetic construct
  source 1..20: mol_type = other DNA
ttaactgtgcgctcgtagta

SEQ ID NO: 4178 - DNA, 20 bp, synthetic construct
  source 1..20: mol_type = other DNA
agcacggtcggaaacgtctc

SEQ ID NO: 4179 - DNA, 20 bp, synthetic construct
  source 1..20: mol_type = other DNA
gtttggaatcaggatcaccc

SEQ ID NO: 4180 - DNA, 20 bp, synthetic construct
  source 1..20: mol_type = other DNA
taactcactcactggtacaa

SEQ ID NO: 4181 - DNA, 20 bp, synthetic construct
  source 1..20: mol_type = other DNA
agcttcgagtgatgcgaccc

SEQ ID NO: 4182 - DNA, 20 bp, synthetic construct
  source 1..20: mol_type = other DNA
tgtccgctaacggaacaatg

SEQ ID NO: 4183 - DNA, 20 bp, synthetic construct
  source 1..20: mol_type = other DNA
ttcgaaccggctcttactga

SEQ ID NO: 4184 - DNA, 20 bp, synthetic construct
  source 1..20: mol_type = other DNA
ccagctatcacctcagcggt

SEQ ID NO: 4185 - DNA, 20 bp, synthetic construct
  source 1..20: mol_type = other DNA
tcctcgaatgttcgacaagt

SEQ ID NO: 4186 - DNA, 20 bp, synthetic construct
  source 1..20: mol_type = other DNA
cagtcgaatgttctacaacg

SEQ ID NO: 4187 - DNA, 20 bp, synthetic construct
  source 1..20: mol_type = other DNA
tagatggcggcaaatcccgg

SEQ ID NO: 4188 - DNA, 20 bp, synthetic construct
  source 1..20: mol_type = other DNA
gggtgaactttctcttagtc

SEQ ID NO: 4189 - DNA, 20 bp, synthetic construct
  source 1..20: mol_type = other DNA
cgtacagcgatagcacggac

SEQ ID NO: 4190 - DNA, 20 bp, synthetic construct
  source 1..20: mol_type = other DNA
ggccctggtcgcacaatcgc

SEQ ID NO: 4191 - DNA, 20 bp, synthetic construct
  source 1..20: mol_type = other DNA
gtgatgttaaaccgtcccgc

SEQ ID NO: 4192 - DNA, 20 bp, synthetic construct
  source 1..20: mol_type = other DNA
cctacattcctcattagcgg

SEQ ID NO: 4193 - DNA, 20 bp, synthetic construct
  source 1..20: mol_type = other DNA
gacaaattgttccaattggg

SEQ ID NO: 4194 - DNA, 20 bp, synthetic construct
  source 1..20: mol_type = other DNA
ttgttatagcgtatattagg

SEQ ID NO: 4195 - DNA, 20 bp, synthetic construct
  source 1..20: mol_type = other DNA
ggtctacacaaatccactgg

SEQ ID NO: 4196 - DNA, 20 bp, synthetic construct
  source 1..20: mol_type = other DNA
tgccctgcttgaacgatatg

SEQ ID NO: 4197 - DNA, 20 bp, synthetic construct
  source 1..20: mol_type = other DNA
ggcgctatagagagcgttgt

SEQ ID NO: 4198 - DNA, 20 bp, synthetic construct
  source 1..20: mol_type = other DNA
ctgcaggaccgcaaatggcc

SEQ ID NO: 4199 - DNA, 20 bp, synthetic construct
  source 1..20: mol_type = other DNA
gaacgtgcctcgacgtgaaa

SEQ ID NO: 4200 - DNA, 20 bp, synthetic construct
  source 1..20: mol_type = other DNA
tttagggaggtcaaagagga

SEQ ID NO: 4201 - DNA, 20 bp, synthetic construct
  source 1..20: mol_type = other DNA
actgcctttcgacccgttag

SEQ ID NO: 4202 - DNA, 20 bp, synthetic construct
  source 1..20: mol_type = other DNA
gaggttacgagactgcgaat

SEQ ID NO: 4203 - DNA, 20 bp, synthetic construct
  source 1..20: mol_type = other DNA
gactaaattcgcgtcacact

SEQ ID NO: 4204 - DNA, 20 bp, synthetic construct
  source 1..20: mol_type = other DNA
cgatcgcgagtcgtgatagt

SEQ ID NO: 4205 - DNA, 20 bp, synthetic construct
  source 1..20: mol_type = other DNA
atgcgaaggagacacaaatt

SEQ ID NO: 4206 - DNA, 20 bp, synthetic construct
  source 1..20: mol_type = other DNA
catgctccattcgtattgct

SEQ ID NO: 4207 - DNA, 20 bp, synthetic construct
  source 1..20: mol_type = other DNA
gcatcagcagagtctacttg

SEQ ID NO: 4208 - DNA, 20 bp, synthetic construct
  source 1..20: mol_type = other DNA
gaacgggagcggagtaatgt

SEQ ID NO: 4209 - DNA, 20 bp, synthetic construct
  source 1..20: mol_type = other DNA
gcatctcaaatctttgatgg

SEQ ID NO: 4210 - DNA, 20 bp, synthetic construct
  source 1..20: mol_type = other DNA
acctatacagaggcatactg

SEQ ID NO: 4211 - DNA, 20 bp, synthetic construct
  source 1..20: mol_type = other DNA
tctcgcattagtaggcggtc

SEQ ID NO: 4212 - DNA, 20 bp, synthetic construct
  source 1..20: mol_type = other DNA
aacggaccatccaagcacgt

SEQ ID NO: 4213 - DNA, 20 bp, synthetic construct
  source 1..20: mol_type = other DNA
acctagtaaggaggcgttta

SEQ ID NO: 4214 - DNA, 20 bp, synthetic construct
  source 1..20: mol_type = other DNA
aagacaaacggttgggatta

SEQ ID NO: 4215 - DNA, 20 bp, synthetic construct
  source 1..20: mol_type = other DNA
ctgtgtggcttaggctacag

SEQ ID NO: 4216 - DNA, 20 bp, synthetic construct
  source 1..20: mol_type = other DNA
acggtaccaatatattggtg

SEQ ID NO: 4217 - DNA, 20 bp, synthetic construct
  source 1..20: mol_type = other DNA
tgagggcagcccgattacct

SEQ ID NO: 4218 - DNA, 20 bp, synthetic construct
  source 1..20: mol_type = other DNA
ttcgcacacgccgtaaggat

SEQ ID NO: 4219 - DNA, 20 bp, synthetic construct
  source 1..20: mol_type = other DNA
cggaccgccgacgtcaatta

SEQ ID NO: 4220 - DNA, 20 bp, synthetic construct
  source 1..20: mol_type = other DNA
agtcacctaccctcggtgag

SEQ ID NO: 4221 - DNA, 20 bp, synthetic construct
  source 1..20: mol_type = other DNA
acatcttcacatacctttct

SEQ ID NO: 4222 - DNA, 20 bp, synthetic construct
  source 1..20: mol_type = other DNA
cctcacaacctttcgccaag

SEQ ID NO: 4223 - DNA, 20 bp, synthetic construct
  source 1..20: mol_type = other DNA
tttccgtacaaccggtcgcg

SEQ ID NO: 4224 - DNA, 20 bp, synthetic construct
  source 1..20: mol_type = other DNA
actgacgaagtttcggtctc

SEQ ID NO: 4225 - DNA, 20 bp, synthetic construct
  source 1..20: mol_type = other DNA
atgttgcgtcctaagatcca

SEQ ID NO: 4226 - DNA, 20 bp, synthetic construct
  source 1..20: mol_type = other DNA
tccctacattacgcacttgt

SEQ ID NO: 4227 - DNA, 20 bp, synthetic construct
  source 1..20: mol_type = other DNA
tactataagggtgcacaaag

SEQ ID NO: 4228 - DNA, 20 bp, synthetic construct
  source 1..20: mol_type = other DNA
ttgtctcgccgcttcttgca

SEQ ID NO: 4229 - DNA, 20 bp, synthetic construct
  source 1..20: mol_type = other DNA
taggtcaatctagcacgatc

SEQ ID NO: 4230 - DNA, 20 bp, synthetic construct
  source 1..20: mol_type = other DNA
aatctgggtgtccaaacaag

SEQ ID NO: 4231 - DNA, 20 bp, synthetic construct
  source 1..20: mol_type = other DNA
cccagtgttcagctgagttt

SEQ ID NO: 4232 - DNA, 20 bp, synthetic construct
  source 1..20: mol_type = other DNA
gggtgtgctcatgcgctcat

SEQ ID NO: 4233 - DNA, 20 bp, synthetic construct
  source 1..20: mol_type = other DNA
tgcgtccaacgtagcctaag

SEQ ID NO: 4234 - DNA, 20 bp, synthetic construct
  source 1..20: mol_type = other DNA
ataataggcatcgcacgcca

SEQ ID NO: 4235 - DNA, 20 bp, synthetic construct
  source 1..20: mol_type = other DNA
ccacgtaataataagcggta

SEQ ID NO: 4236 - DNA, 20 bp, synthetic construct
  source 1..20: mol_type = other DNA
agcctggatggtacttatgc

SEQ ID NO: 4237 - DNA, 20 bp, synthetic construct
  source 1..20: mol_type = other DNA
ctcagactcatcttgcgaag

SEQ ID NO: 4238 - DNA, 20 bp, synthetic construct
  source 1..20: mol_type = other DNA
agcatcaccatggtttggct

SEQ ID NO: 4239 - DNA, 20 bp, synthetic construct
  source 1..20: mol_type = other DNA
tgatcccaggacttcagcga

SEQ ID NO: 4240 - DNA, 20 bp, synthetic construct
  source 1..20: mol_type = other DNA
aggcgtagacagcatcccgc

SEQ ID NO: 4241 - DNA, 20 bp, synthetic construct
  source 1..20: mol_type = other DNA
tgtccattattgggtgccta

SEQ ID NO: 4242 - DNA, 20 bp, synthetic construct
  source 1..20: mol_type = other DNA
atccgaccattagtacttgg

SEQ ID NO: 4243 - DNA, 20 bp, synthetic construct
  source 1..20: mol_type = other DNA
tactccaagtggacgcaaac

SEQ ID NO: 4244 - DNA, 20 bp, synthetic construct
  source 1..20: mol_type = other DNA
ccgaggtataagatagcagg

SEQ ID NO: 4245 - DNA, 20 bp, synthetic construct
  source 1..20: mol_type = other DNA
actatggtggttgtccagat

SEQ ID NO: 4246 - DNA, 20 bp, synthetic construct
  source 1..20: mol_type = other DNA
gcggatagtgcactgatgag

SEQ ID NO: 4247 - DNA, 20 bp, synthetic construct
  source 1..20: mol_type = other DNA
ttgggacgccaatccatccg

SEQ ID NO: 4248 - DNA, 20 bp, synthetic construct
  source 1..20: mol_type = other DNA
acgaccactcgacgtgccaa

SEQ ID NO: 4249 - DNA, 20 bp, synthetic construct
  source 1..20: mol_type = other DNA
aatgtgggtcacgacagtga

SEQ ID NO: 4250 - DNA, 20 bp, synthetic construct
  source 1..20: mol_type = other DNA
tctgcgcacaaaccagcgaa

SEQ ID NO: 4251 - DNA, 20 bp, synthetic construct
  source 1..20: mol_type = other DNA
aacttgttaagccgctagca

SEQ ID NO: 4252 - DNA, 20 bp, synthetic construct
  source 1..20: mol_type = other DNA
ggacgagcgtgcaaagagtt

SEQ ID NO: 4253 - DNA, 20 bp, synthetic construct
  source 1..20: mol_type = other DNA
tatagcgccgtccttgcaac

SEQ ID NO: 4254 - DNA, 20 bp, synthetic construct
  source 1..20: mol_type = other DNA
agaaaccagtgggaagagaa

SEQ ID NO: 4255 - DNA, 20 bp, synthetic construct
  source 1..20: mol_type = other DNA
ccttcaacgtcgagagcctg

SEQ ID NO: 4256 - DNA, 20 bp, synthetic construct
  source 1..20: mol_type = other DNA
tttctgtgtatgtcggctaa

SEQ ID NO: 4257 - DNA, 20 bp, synthetic construct
  source 1..20: mol_type = other DNA
caacacatactttgaggttt

SEQ ID NO: 4258 - DNA, 20 bp, synthetic construct
  source 1..20: mol_type = other DNA
tagatatatgagttaccaca

SEQ ID NO: 4259 - DNA, 20 bp, synthetic construct
  source 1..20: mol_type = other DNA
tttcgccctttgaaggatgt

SEQ ID NO: 4260 - DNA, 20 bp, synthetic construct
  source 1..20: mol_type = other DNA
gaaggatcgataagcaggat

SEQ ID NO: 4261 - DNA, 20 bp, synthetic construct
  source 1..20: mol_type = other DNA
gttcgaactagcttctggcc

SEQ ID NO: 4262 - DNA, 20 bp, synthetic construct
  source 1..20: mol_type = other DNA
cagacctcatcggacgacca

SEQ ID NO: 4263 - DNA, 20 bp, synthetic construct
  source 1..20: mol_type = other DNA
actacaccgtttatgactag

SEQ ID NO: 4264 - DNA, 20 bp, synthetic construct
  source 1..20: mol_type = other DNA
ggcctaacgagacggaaact

SEQ ID NO: 4265 - DNA, 20 bp, synthetic construct
  source 1..20: mol_type = other DNA
gcacgtctccacgaagttgt

SEQ ID NO: 4266 - DNA, 20 bp, synthetic construct
  source 1..20: mol_type = other DNA
cttcagtctgctacgctcta

SEQ ID NO: 4267 - DNA, 20 bp, synthetic construct
  source 1..20: mol_type = other DNA
taccaggcatggtgccggaa

SEQ ID NO: 4268 - DNA, 20 bp, synthetic construct
  source 1..20: mol_type = other DNA
gttcgtaatgggactcgctt

SEQ ID NO: 4269 - DNA, 20 bp, synthetic construct
  source 1..20: mol_type = other DNA
attgcagtgctacttattcg

SEQ ID NO: 4270 - DNA, 20 bp, synthetic construct
  source 1..20: mol_type = other DNA
ggtgctgatggtcaatttag

SEQ ID NO: 4271 - DNA, 20 bp, synthetic construct
  source 1..20: mol_type = other DNA
gggatcgtatgaggcgactc

SEQ ID NO: 4272 - DNA, 20 bp, synthetic construct
  source 1..20: mol_type = other DNA
gctacgcattagtataatcg

SEQ ID NO: 4273 - DNA, 20 bp, synthetic construct
  source 1..20: mol_type = other DNA
aacacctagcgagccttcag

SEQ ID NO: 4274 - DNA, 20 bp, synthetic construct
  source 1..20: mol_type = other DNA
catatctaactctctcggtc

SEQ ID NO: 4275 - DNA, 20 bp, synthetic construct
  source 1..20: mol_type = other DNA
accacgataaccagcctccc

SEQ ID NO: 4276 - DNA, 20 bp, synthetic construct
  source 1..20: mol_type = other DNA
tgcgacatgccgtacagctg

SEQ ID NO: 4277 - DNA, 20 bp, synthetic construct
  source 1..20: mol_type = other DNA
tgcccttcaatgatctacga

SEQ ID NO: 4278 - DNA, 20 bp, synthetic construct
  source 1..20: mol_type = other DNA
catgcttacgttccgctcac

SEQ ID NO: 4279 - DNA, 20 bp, synthetic construct
  source 1..20: mol_type = other DNA
gaggctgttctgcggttgcg

SEQ ID NO: 4280 - DNA, 20 bp, synthetic construct
  source 1..20: mol_type = other DNA
ggagctccatggatatgcaa

SEQ ID NO: 4281 - DNA, 20 bp, synthetic construct
  source 1..20: mol_type = other DNA
gggccacttgtacatagaag

SEQ ID NO: 4282 - DNA, 20 bp, synthetic construct
  source 1..20: mol_type = other DNA
caaactatgttgggcaagct

SEQ ID NO: 4283 - DNA, 20 bp, synthetic construct
  source 1..20: mol_type = other DNA
ttacatattgcgaaacaggc

SEQ ID NO: 4284 - DNA, 20 bp, synthetic construct
  source 1..20: mol_type = other DNA
tacctggacctagtttatgg

SEQ ID NO: 4285 - DNA, 20 bp, synthetic construct
  source 1..20: mol_type = other DNA
gactgaggagttcttcagcc

SEQ ID NO: 4286 - DNA, 20 bp, synthetic construct
  source 1..20: mol_type = other DNA
gcgagttgaacctaagatcg

SEQ ID NO: 4287 - DNA, 20 bp, synthetic construct
  source 1..20: mol_type = other DNA
gatgcttggatcgtctagct

SEQ ID NO: 4288 - DNA, 20 bp, synthetic construct
  source 1..20: mol_type = other DNA
cccgagagcggtatgggcat

SEQ ID NO: 4289 - DNA, 20 bp, synthetic construct
  source 1..20: mol_type = other DNA
aacaggtcctatcgatgcac

SEQ ID NO: 4290 - DNA, 20 bp, synthetic construct
  source 1..20: mol_type = other DNA
gatccatctccgtaaactga

SEQ ID NO: 4291 - DNA, 20 bp, synthetic construct
  source 1..20: mol_type = other DNA
ctaggcccaagcctcaaaga

SEQ ID NO: 4292 - DNA, 20 bp, synthetic construct
  source 1..20: mol_type = other DNA
cgactgggttgacgtagatt

SEQ ID NO: 4293 - DNA, 20 bp, synthetic construct
  source 1..20: mol_type = other DNA
cactaagcattagctaccgc

SEQ ID NO: 4294 - DNA, 20 bp, synthetic construct
  source 1..20: mol_type = other DNA
tgctctgagagggcaatgtg

SEQ ID NO: 4295 - DNA, 20 bp, synthetic construct
  source 1..20: mol_type = other DNA
gtccgacccaataaatactg

SEQ ID NO: 4296 - DNA, 20 bp, synthetic construct
  source 1..20: mol_type = other DNA
ccctgtttatgcaccagctg

SEQ ID NO: 4297 - DNA, 20 bp, synthetic construct
  source 1..20: mol_type = other DNA
tgacatctctgacgagctta

SEQ ID NO: 4298 - DNA, 20 bp, synthetic construct
  source 1..20: mol_type = other DNA
caagatgttgagggaccgtg

SEQ ID NO: 4299 - DNA, 20 bp, synthetic construct
  source 1..20: mol_type = other DNA
cacgtccagctattgccgcg

SEQ ID NO: 4300 - DNA, 20 bp, synthetic construct
  source 1..20: mol_type = other DNA
gcgcacaatctttgctgaag

SEQ ID NO: 4301 - DNA, 20 bp, synthetic construct
  source 1..20: mol_type = other DNA
ggtaggaacatatgtagttc

SEQ ID NO: 4302 - DNA, 20 bp, synthetic construct
  source 1..20: mol_type = other DNA
gggtagaatagagtcccgtt

SEQ ID NO: 4303 - DNA, 20 bp, synthetic construct
  source 1..20: mol_type = other DNA
agtcgttggccagttgtaaa

SEQ ID NO: 4304 - DNA, 20 bp, synthetic construct
  source 1..20: mol_type = other DNA
ctcacgaggaacgactgtta

SEQ ID NO: 4305 - DNA, 20 bp, synthetic construct
  source 1..20: mol_type = other DNA
aacgtggagcatggtacata

SEQ ID NO: 4306 - DNA, 20 bp, synthetic construct
  source 1..20: mol_type = other DNA
catatcgatccaaccgttag

SEQ ID NO: 4307 - DNA, 20 bp, synthetic construct
  source 1..20: mol_type = other DNA
gtaatagggacgtgaggatc

SEQ ID NO: 4308 - DNA, 20 bp, synthetic construct
  source 1..20: mol_type = other DNA
ggctcatgatgtcgggcgct

SEQ ID NO: 4309 - DNA, 20 bp, synthetic construct
  source 1..20: mol_type = other DNA
acgagggtggcgtataaacc

SEQ ID NO: 4310 - DNA, 20 bp, synthetic construct
  source 1..20: mol_type = other DNA
tctgtctgaccacgtcctct

SEQ ID NO: 4311 - DNA, 20 bp, synthetic construct
  source 1..20: mol_type = other DNA
atactaaagaacggcaaaga

SEQ ID NO: 4312 - DNA, 20 bp, synthetic construct
  source 1..20: mol_type = other DNA
actgaatgatactaagacta

SEQ ID NO: 4313 - DNA, 20 bp, synthetic construct
  source 1..20: mol_type = other DNA
agccgctttcctggacaaag

SEQ ID NO: 4314 - DNA, 20 bp, synthetic construct
  source 1..20: mol_type = other DNA
attctttgaaggcgcgatca

SEQ ID NO: 4315 - DNA, 20 bp, synthetic construct
  source 1..20: mol_type = other DNA
tattcgcatccgagtatatg

SEQ ID NO: 4316 - DNA, 20 bp, synthetic construct
  source 1..20: mol_type = other DNA
atttcgtgtacgaaatgggc

SEQ ID NO: 4317 - DNA, 20 bp, synthetic construct
  source 1..20: mol_type = other DNA
ctgcttcacaaattatactt

SEQ ID NO: 4318 - DNA, 20 bp, synthetic construct
  source 1..20: mol_type = other DNA
gagggttgtcagtgcaattc

SEQ ID NO: 4319 - DNA, 20 bp, synthetic construct
  source 1..20: mol_type = other DNA
gcaatggaatgtcccgaaag

SEQ ID NO: 4320 - DNA, 20 bp, synthetic construct
  source 1..20: mol_type = other DNA
tgcttccttgcgagggtatt

SEQ ID NO: 4321 - DNA, 20 bp, synthetic construct
  source 1..20: mol_type = other DNA
aggtataatgtggtattgcg

SEQ ID NO: 4322 - DNA, 20 bp, synthetic construct
  source 1..20: mol_type = other DNA
gctccctaccttgcactatg

SEQ ID NO: 4323 - DNA, 20 bp, synthetic construct
  source 1..20: mol_type = other DNA
aggcaacacagacctccacg

SEQ ID NO: 4324 - DNA, 20 bp, synthetic construct
  source 1..20: mol_type = other DNA
aaggtccctgcgttatagga

SEQ ID NO: 4325 - DNA, 20 bp, synthetic construct
  source 1..20: mol_type = other DNA
tcgactggtgcatagagact

SEQ ID NO: 4326 - DNA, 20 bp, synthetic construct
  source 1..20: mol_type = other DNA
ggaaagattcaccgcgactt

SEQ ID NO: 4327 - DNA, 20 bp, synthetic construct
  source 1..20: mol_type = other DNA
gaataatgggtggtttcgag

SEQ ID NO: 4328 - DNA, 20 bp, synthetic construct
  source 1..20: mol_type = other DNA
gaaggtattcgacatcgatg

SEQ ID NO: 4329 - DNA, 20 bp, synthetic construct
  source 1..20: mol_type = other DNA
ctcaaacaagggttagcacg

SEQ ID NO: 4330 - DNA, 20 bp, synthetic construct
  source 1..20: mol_type = other DNA
cttcggcgctaacccatatc

SEQ ID NO: 4331 - DNA, 20 bp, synthetic construct
  source 1..20: mol_type = other DNA
atttgggtacaggaactggg

SEQ ID NO: 4332 - DNA, 20 bp, synthetic construct
  source 1..20: mol_type = other DNA
accagatgtcgaactgttcc

SEQ ID NO: 4333 - DNA, 20 bp, synthetic construct
  source 1..20: mol_type = other DNA
acactttgggccactttact

SEQ ID NO: 4334 - DNA, 20 bp, synthetic construct
  source 1..20: mol_type = other DNA
gtatcgatccatctacgatt

SEQ ID NO: 4335 - DNA, 20 bp, synthetic construct
  source 1..20: mol_type = other DNA
cgtgagtggctaaaccgcct

SEQ ID NO: 4336 - DNA, 20 bp, synthetic construct
  source 1..20: mol_type = other DNA
ccctttcaaccaatcgcgcc

SEQ ID NO: 4337 - DNA, 20 bp, synthetic construct
  source 1..20: mol_type = other DNA
tgtgagcgatatgcttcgtg

SEQ ID NO: 4338 - DNA, 20 bp, synthetic construct
  source 1..20: mol_type = other DNA
ctgcgcgacccttgcatttg

SEQ ID NO: 4339 - DNA, 20 bp, synthetic construct
  source 1..20: mol_type = other DNA
ataacaacctagcgttgcag

SEQ ID NO: 4340 - DNA, 20 bp, synthetic construct
  source 1..20: mol_type = other DNA
ttatccgcccgtctcctagt

SEQ ID NO: 4341 - DNA, 20 bp, synthetic construct
  source 1..20: mol_type = other DNA
agaaggcactgacgttaaac

SEQ ID NO: 4342 - DNA, 20 bp, synthetic construct
  source 1..20: mol_type = other DNA
agaagcacttggatacatgg

SEQ ID NO: 4343 - DNA, 20 bp, synthetic construct
  source 1..20: mol_type = other DNA
gcccaactacaactggtctc

SEQ ID NO: 4344 - DNA, 20 bp, synthetic construct
  source 1..20: mol_type = other DNA
ggcgtcttgagcacatgtta

SEQ ID NO: 4345 - DNA, 20 bp, synthetic construct
  source 1..20: mol_type = other DNA
tggagggtagtggcgcatgg

SEQ ID NO: 4346 - DNA, 20 bp, synthetic construct
  source 1..20: mol_type = other DNA
gcatccttctctattctcag

SEQ ID NO: 4347 - DNA, 20 bp, synthetic construct
  source 1..20: mol_type = other DNA
agaggagaggaccaggatta

SEQ ID NO: 4348 - DNA, 20 bp, synthetic construct
  source 1..20: mol_type = other DNA
agttaggcctcagctttctg

SEQ ID NO: 4349 - DNA, 20 bp, synthetic construct
  source 1..20: mol_type = other DNA
ggctacctgctactgagtga

SEQ ID NO: 4350 - DNA, 20 bp, synthetic construct
  source 1..20: mol_type = other DNA
gacattggtgtctaacatct

SEQ ID NO: 4351 - DNA, 20 bp, synthetic construct
  source 1..20: mol_type = other DNA
ggcgatcgggatcgcctatc

SEQ ID NO: 4352 - DNA, 20 bp, synthetic construct
  source 1..20: mol_type = other DNA
gcactaaatgcagctagact

SEQ ID NO: 4353 - DNA, 20 bp, synthetic construct
  source 1..20: mol_type = other DNA
gtcaacttgacactcacact

SEQ ID NO: 4354 - DNA, 20 bp, synthetic construct
  source 1..20: mol_type = other DNA
gcacacgaccgaacgtctcc

SEQ ID NO: 4355 - DNA, 20 bp, synthetic construct
  source 1..20: mol_type = other DNA
actgagcacgggtgcgagta

SEQ ID NO: 4356 - DNA, 20 bp, synthetic construct
  source 1..20: mol_type = other DNA
aatccaccgctcggcgttgc

SEQ ID NO: 4357 - DNA, 20 bp, synthetic construct
  source 1..20: mol_type = other DNA
attaggtaccgggtatcatc

SEQ ID NO: 4358 - DNA, 20 bp, synthetic construct
  source 1..20: mol_type = other DNA
tactattggtacttagtccc

SEQ ID NO: 4359 - DNA, 20 bp, synthetic construct
  source 1..20: mol_type = other DNA
agcctaagatacgattgcac

SEQ ID NO: 4360 - DNA, 20 bp, synthetic construct
  source 1..20: mol_type = other DNA
gcgtgttgtgtgtaaccgct

SEQ ID NO: 4361 - DNA, 20 bp, synthetic construct
  source 1..20: mol_type = other DNA
tatgttgagcctatacgatg

SEQ ID NO: 4362 - DNA, 20 bp, synthetic construct
  source 1..20: mol_type = other DNA
aagagctaaccagtaatcct

SEQ ID NO: 4363 - DNA, 20 bp, synthetic construct
  source 1..20: mol_type = other DNA
cggatggatgtcgtgcgtct

SEQ ID NO: 4364 - DNA, 20 bp, synthetic construct
  source 1..20: mol_type = other DNA
tcatccattgatataatcct

SEQ ID NO: 4365 - DNA, 20 bp, synthetic construct
  source 1..20: mol_type = other DNA
tggctttatcgagcggatca

SEQ ID NO: 4366 - DNA, 20 bp, synthetic construct
  source 1..20: mol_type = other DNA
tcgggttaagttaagacgca

SEQ ID NO: 4367 - DNA, 20 bp, synthetic construct
  source 1..20: mol_type = other DNA
gtcggaactcactttcaaca

SEQ ID NO: 4368 - DNA, 20 bp, synthetic construct
  source 1..20: mol_type = other DNA
gcgcgaaatgtgccaggacg

SEQ ID NO: 4369 - DNA, 20 bp, synthetic construct
  source 1..20: mol_type = other DNA
tgccaagtagctaactttac

SEQ ID NO: 4370 - DNA, 20 bp, synthetic construct
  source 1..20: mol_type = other DNA
tgagacagtccgcaattagg

SEQ ID NO: 4371 - DNA, 20 bp, synthetic construct
  source 1..20: mol_type = other DNA
ctgacacctaccggttccgt

SEQ ID NO: 4372 - DNA, 20 bp, synthetic construct
  source 1..20: mol_type = other DNA
taaggagttccgaccgtggg

SEQ ID NO: 4373 - DNA, 20 bp, synthetic construct
  source 1..20: mol_type = other DNA
ggattatttcggcgcgtgtc

SEQ ID NO: 4374 - DNA, 20 bp, synthetic construct
  source 1..20: mol_type = other DNA
caaacaacgcgggatagtcc

SEQ ID NO: 4375 - DNA, 20 bp, synthetic construct
  source 1..20: mol_type = other DNA
ggaaggcttaggtgatcgat

SEQ ID NO: 4376 - DNA, 20 bp, synthetic construct
  source 1..20: mol_type = other DNA
agctgtgaagcggctcaaat

SEQ ID NO: 4377 - DNA, 20 bp, synthetic construct
  source 1..20: mol_type = other DNA
tcagcgatcaccacggttct

SEQ ID NO: 4378 - DNA, 20 bp, synthetic construct
  source 1..20: mol_type = other DNA
tggccgtatacggcccatca

SEQ ID NO: 4379 - DNA, 20 bp, synthetic construct
  source 1..20: mol_type = other DNA
ttagttggtggtgccgtaaa

SEQ ID NO: 4380 - DNA, 20 bp, synthetic construct
  source 1..20: mol_type = other DNA
gtaggcttctgcagaagcat

SEQ ID NO: 4381 - DNA, 20 bp, synthetic construct
  source 1..20: mol_type = other DNA
cggtaatccctaacggaccc

SEQ ID NO: 4382 - DNA, 20 bp, synthetic construct
  source 1..20: mol_type = other DNA
tttgccttctcccgaatccg

SEQ ID NO: 4383 - DNA, 20 bp, synthetic construct
  source 1..20: mol_type = other DNA
cgatgtgaaggactcagtac

SEQ ID NO: 4384 - DNA, 20 bp, synthetic construct
  source 1..20: mol_type = other DNA
aagtttcaacctacatcgtt

SEQ ID NO: 4385 - DNA, 20 bp, synthetic construct
  source 1..20: mol_type = other DNA
gactataacaagagaaagat

SEQ ID NO: 4386 - DNA, 20 bp, synthetic construct
  source 1..20: mol_type = other DNA
ggaccaggctattacgttaa

SEQ ID NO: 4387 - DNA, 20 bp, synthetic construct
  source 1..20: mol_type = other DNA
aacacgggtggcaagggcag

SEQ ID NO: 4388 - DNA, 20 bp, synthetic construct
  source 1..20: mol_type = other DNA
ggccgaataagattctgttt

SEQ ID NO: 4389 - DNA, 20 bp, synthetic construct
  source 1..20: mol_type = other DNA
ccaaatccatcgtagcaaag

SEQ ID NO: 4390 - DNA, 20 bp, synthetic construct
  source 1..20: mol_type = other DNA
gagtgggtacgaccgaccac

SEQ ID NO: 4391 - DNA, 20 bp, synthetic construct
  source 1..20: mol_type = other DNA
acgctcagagactttctaag

SEQ ID NO: 4392 - DNA, 20 bp, synthetic construct
  source 1..20: mol_type = other DNA
ggatctacggtgcccttcct

SEQ ID NO: 4393 - DNA, 20 bp, synthetic construct
  source 1..20: mol_type = other DNA
gttactagccacggttcgaa

SEQ ID NO: 4394 - DNA, 20 bp, synthetic construct
  source 1..20: mol_type = other DNA
ctcggacttccagttctgca

SEQ ID NO: 4395 - DNA, 20 bp, synthetic construct
  source 1..20: mol_type = other DNA
gacaggcgaagagcccacat

SEQ ID NO: 4396 - DNA, 20 bp, synthetic construct
  source 1..20: mol_type = other DNA
gaaagggccgatcgacctca

SEQ ID NO: 4397 - DNA, 20 bp, synthetic construct
  source 1..20: mol_type = other DNA
tattaatgccatagaacggc

SEQ ID NO: 4398 - DNA, 20 bp, synthetic construct
  source 1..20: mol_type = other DNA
tagacgaagtaataggtagc

SEQ ID NO: 4399 - DNA, 20 bp, synthetic construct
  source 1..20: mol_type = other DNA
cacgtaagtgcccgccgacc

SEQ ID NO: 4400 - DNA, 20 bp, synthetic construct
  source 1..20: mol_type = other DNA
tggtaatacacaacacagcc

SEQ ID NO: 4401 - DNA, 20 bp, synthetic construct
  source 1..20: mol_type = other DNA
cagcaatgtcgtccaccagg

SEQ ID NO: 4402 - DNA, 20 bp, synthetic construct
  source 1..20: mol_type = other DNA
ctggcgtcgctaatctgcca

SEQ ID NO: 4403 - DNA, 20 bp, synthetic construct
  source 1..20: mol_type = other DNA
ctaactctcgatgtttccgc

SEQ ID NO: 4404 - DNA, 20 bp, synthetic construct
  source 1..20: mol_type = other DNA
gtctatggctgaatagcacc

SEQ ID NO: 4405 - DNA, 20 bp, synthetic construct
  source 1..20: mol_type = other DNA
ttgcgaatcgacaagcgagt

SEQ ID NO: 4406 - DNA, 20 bp, synthetic construct
  source 1..20: mol_type = other DNA
ggatcttcaatgcaggcctt

SEQ ID NO: 4407 - DNA, 20 bp, synthetic construct
  source 1..20: mol_type = other DNA
aggcaacgagaccggcgacc

SEQ ID NO: 4408 - DNA, 20 bp, synthetic construct
  source 1..20: mol_type = other DNA
acaatagggtaatgtattgc

SEQ ID NO: 4409 - DNA, 20 bp, synthetic construct
  source 1..20: mol_type = other DNA
gtgtactttagatccatgca

SEQ ID NO: 4410 - DNA, 20 bp, synthetic construct
  source 1..20: mol_type = other DNA
aacagcgtaggagtctcgcc

SEQ ID NO: 4411 - DNA, 20 bp, synthetic construct
  source 1..20: mol_type = other DNA
ccagcacgaagatgctggta

SEQ ID NO: 4412 - DNA, 20 bp, synthetic construct
  source 1..20: mol_type = other DNA
aatagtcgggtggacccaga

SEQ ID NO: 4413 - DNA, 20 bp, synthetic construct
  source 1..20: mol_type = other DNA
cggagtcccgactgtgtaca

SEQ ID NO: 4414 - DNA, 20 bp, synthetic construct
  source 1..20: mol_type = other DNA
cctagactctactgtcgtcc

SEQ ID NO: 4415 - DNA, 20 bp, synthetic construct
  source 1..20: mol_type = other DNA
agtttatgaaacgccactcc

SEQ ID NO: 4416 - DNA, 20 bp, synthetic construct
  source 1..20: mol_type = other DNA
agtcgttgggactagcagca

SEQ ID NO: 4417 - DNA, 20 bp, synthetic construct
  source 1..20: mol_type = other DNA
cactcgcaatcttggaagcg

SEQ ID NO: 4418 - DNA, 20 bp, synthetic construct
  source 1..20: mol_type = other DNA
aacgcaggaatgctagttct

SEQ ID NO: 4419 - DNA, 20 bp, synthetic construct
  source 1..20: mol_type = other DNA
gaaaccagcaaggccaacga

SEQ ID NO: 4420 - DNA, 20 bp, synthetic construct
  source 1..20: mol_type = other DNA
ctagggaccattaaccacag

SEQ ID NO: 4421 - DNA, 20 bp, synthetic construct
  source 1..20: mol_type = other DNA
ctacctacagcggacacctc

SEQ ID NO: 4422 - DNA, 20 bp, synthetic construct
  source 1..20: mol_type = other DNA
gcgtccttgtctccacgctg

SEQ ID NO: 4423 - DNA, 20 bp, synthetic construct
  source 1..20: mol_type = other DNA
tccaagtaagagggcattac

SEQ ID NO: 4424 - DNA, 20 bp, synthetic construct
  source 1..20: mol_type = other DNA
taggtgaggaatgtgggttt

SEQ ID NO: 4425 - DNA, 20 bp, synthetic construct
  source 1..20: mol_type = other DNA
tagtggccggcctacagttc

SEQ ID NO: 4426 - DNA, 20 bp, synthetic construct
  source 1..20: mol_type = other DNA
cgaacccagtgagcgctaaa

SEQ ID NO: 4427 - DNA, 20 bp, synthetic construct
  source 1..20: mol_type = other DNA
ttgctagatcgctggataaa

SEQ ID NO: 4428 - DNA, 20 bp, synthetic construct
  source 1..20: mol_type = other DNA
tttagatgcccagagaccgg

SEQ ID NO: 4429 - DNA, 20 bp, synthetic construct
  source 1..20: mol_type = other DNA
tcgaacgactaggttatatg

SEQ ID NO: 4430 - DNA, 20 bp, synthetic construct
  source 1..20: mol_type = other DNA
caaagcagtatatcaaccta

SEQ ID NO: 4431 - DNA, 20 bp, synthetic construct
  source 1..20: mol_type = other DNA
cctatccctatataccgcaa

SEQ ID NO: 4432 - DNA, 20 bp, synthetic construct
  source 1..20: mol_type = other DNA
ttgtgtggactgtacgcttt

SEQ ID NO: 4433 - DNA, 20 bp, synthetic construct
  source 1..20: mol_type = other DNA
gtagggttccatgggtccgg

SEQ ID NO: 4434 - DNA, 20 bp, synthetic construct
  source 1..20: mol_type = other DNA
ggtccgggcacgtaatgtgt

SEQ ID NO: 4435 - DNA, 20 bp, synthetic construct
  source 1..20: mol_type = other DNA
ttcttactcgcgcctgaccc

SEQ ID NO: 4436 - DNA, 20 bp, synthetic construct
  source 1..20: mol_type = other DNA
gcgtcactcccaaccgttat

SEQ ID NO: 4437 - DNA, 20 bp, synthetic construct
  source 1..20: mol_type = other DNA
ctgtcgttcgggtgtttcgt

SEQ ID NO: 4438 - DNA, 20 bp, synthetic construct
  source 1..20: mol_type = other DNA
atgttcaagtaccgcaacac

SEQ ID NO: 4439 - DNA, 20 bp, synthetic construct
  source 1..20: mol_type = other DNA
cgactcgtgcacttaagttg

SEQ ID NO: 4440 - DNA, 20 bp, synthetic construct
  source 1..20: mol_type = other DNA
aatggctttcaggcttgcgt

SEQ ID NO: 4441 - DNA, 20 bp, synthetic construct
  source 1..20: mol_type = other DNA
gatccagtccgtactgcact

SEQ ID NO: 4442 - DNA, 20 bp, synthetic construct
  source 1..20: mol_type = other DNA
gcgctgaggtgcgatgtacg

SEQ ID NO: 4443 - DNA, 20 bp, synthetic construct
  source 1..20: mol_type = other DNA
aagtgcgtaaagtctggctg

SEQ ID NO: 4444 - DNA, 20 bp, synthetic construct
  source 1..20: mol_type = other DNA
tggattgtaagataccagat

SEQ ID NO: 4445 - DNA, 20 bp, synthetic construct
  source 1..20: mol_type = other DNA
ggtgtacatgttccgggtag

SEQ ID NO: 4446 - DNA, 20 bp, synthetic construct
  source 1..20: mol_type = other DNA
ctagcttgtataccagaagg

SEQ ID NO: 4447 - DNA, 20 bp, synthetic construct
  source 1..20: mol_type = other DNA
cacgagctggcctgaacaaa

SEQ ID NO: 4448 - DNA, 20 bp, synthetic construct
  source 1..20: mol_type = other DNA
tagcctacgcagacatcata

SEQ ID NO: 4449 - DNA, 20 bp, synthetic construct
  source 1..20: mol_type = other DNA
atcttaacgtgccgagtaga

SEQ ID NO: 4450 - DNA, 20 bp, synthetic construct
  source 1..20: mol_type = other DNA
atcacactgtcgtgtaaatt

SEQ ID NO: 4451 - DNA, 20 bp, synthetic construct
  source 1..20: mol_type = other DNA
gactccaccgcacgtcctat

SEQ ID NO: 4452 - DNA, 20 bp, synthetic construct
  source 1..20: mol_type = other DNA
agtccacttcgtactccggc

SEQ ID NO: 4453 - DNA, 20 bp, synthetic construct
  source 1..20: mol_type = other DNA
atgtgttaaatctcgtacca

SEQ ID NO: 4454 - DNA, 20 bp, synthetic construct
  source 1..20: mol_type = other DNA
gtaaagagttaaatgctcgc

SEQ ID NO: 4455 - DNA, 20 bp, synthetic construct
  source 1..20: mol_type = other DNA
cctgggatgccaaggtttgg

SEQ ID NO: 4456 - DNA, 20 bp, synthetic construct
  source 1..20: mol_type = other DNA
cccagactgctttacttgag

SEQ ID NO: 4457 - DNA, 20 bp, synthetic construct
  source 1..20: mol_type = other DNA
cctcagctaagtgactgctg

SEQ ID NO: 4458 - DNA, 20 bp, synthetic construct
  source 1..20: mol_type = other DNA
ctacttagccaacacgaaac

SEQ ID NO: 4459 - DNA, 20 bp, synthetic construct
  source 1..20: mol_type = other DNA
cagcattcgggtatgattca

SEQ ID NO: 4460 - DNA, 20 bp, synthetic construct
  source 1..20: mol_type = other DNA
gcgttcgccaacgcagggac

SEQ ID NO: 4461 - DNA, 20 bp, synthetic construct
  source 1..20: mol_type = other DNA
catggatcccataattgtag

SEQ ID NO: 4462 - DNA, 20 bp, synthetic construct
  source 1..20: mol_type = other DNA
atatgtaagtcgcatgggtc

SEQ ID NO: 4463 - DNA, 20 bp, synthetic construct
  source 1..20: mol_type = other DNA
agccgtctttcggattcggc

SEQ ID NO: 4464 - DNA, 20 bp, synthetic construct
  source 1..20: mol_type = other DNA
tacttcgtcttgcggtaggg

SEQ ID NO: 4465 - DNA, 20 bp, synthetic construct
  source 1..20: mol_type = other DNA
gtgcgtcaatatgtttcttc

SEQ ID NO: 4466 - DNA, 20 bp, synthetic construct
  source 1..20: mol_type = other DNA
tctcactccacgttacaggc

SEQ ID NO: 4467 - DNA, 20 bp, synthetic construct
  source 1..20: mol_type = other DNA
ccgttaagtgattcgggtat

SEQ ID NO: 4468 - DNA, 20 bp, synthetic construct
  source 1..20: mol_type = other DNA
ttcagctcttcgtttgtgat

SEQ ID NO: 4469 - DNA, 20 bp, synthetic construct
  source 1..20: mol_type = other DNA
ctcccacctacagatccaga

SEQ ID NO: 4470 - DNA, 20 bp, synthetic construct
  source 1..20: mol_type = other DNA
gaatagaacgcggttatacg

SEQ ID NO: 4471 - DNA, 20 bp, synthetic construct
  source 1..20: mol_type = other DNA
acaagcctgccggagtactt

SEQ ID NO: 4472 - DNA, 20 bp, synthetic construct
  source 1..20: mol_type = other DNA
cttcgattgcgatggaggtc

SEQ ID NO: 4473 - DNA, 20 bp, synthetic construct
  source 1..20: mol_type = other DNA
catgctacaatctccgagag

SEQ ID NO: 4474 - DNA, 20 bp, synthetic construct
  source 1..20: mol_type = other DNA
gcgcgctaggcgctatctag

SEQ ID NO: 4475 - DNA, 20 bp, synthetic construct
  source 1..20: mol_type = other DNA
tcttgctctcctggaccacg

SEQ ID NO: 4476 - DNA, 20 bp, synthetic construct
  source 1..20: mol_type = other DNA
gcaacctgaactcggaagct

SEQ ID NO: 4477 - DNA, 20 bp, synthetic construct
  source 1..20: mol_type = other DNA
cttgggctgcgtacatatct

SEQ ID NO: 4478 - DNA, 20 bp, synthetic construct
  source 1..20: mol_type = other DNA
ctcagtactgctgttccctg

SEQ ID NO: 4479 - DNA, 20 bp, synthetic construct
  source 1..20: mol_type = other DNA
tcactcccatagttatactt

SEQ ID NO: 4480 - DNA, 20 bp, synthetic construct
  source 1..20: mol_type = other DNA
ggacgtacgactgcaccctc

SEQ ID NO: 4481 - DNA, 20 bp, synthetic construct
  source 1..20: mol_type = other DNA
ggcggacgcttattcacaat

SEQ ID NO: 4482 - DNA, 20 bp, synthetic construct
  source 1..20: mol_type = other DNA
cggcctcgtgggaaacctgt

SEQ ID NO: 4483 - DNA, 20 bp, synthetic construct
  source 1..20: mol_type = other DNA
ggctcggcatctctgtgcat

SEQ ID NO: 4484 - DNA, 20 bp, synthetic construct
  source 1..20: mol_type = other DNA
acattgcccttacgattctc

SEQ ID NO: 4485 - DNA, 20 bp, synthetic construct
  source 1..20: mol_type = other DNA
cgcttattaagggctcaacc

SEQ ID NO: 4486 - DNA, 20 bp, synthetic construct
  source 1..20: mol_type = other DNA
gatcgatggtcctgccgata

SEQ ID NO: 4487 - DNA, 20 bp, synthetic construct
  source 1..20: mol_type = other DNA
caatgggagcgctccgtgac

SEQ ID NO: 4488 - DNA, 20 bp, synthetic construct
  source 1..20: mol_type = other DNA
ataacttgtaggtcacacca

SEQ ID NO: 4489 - DNA, 20 bp, synthetic construct
  source 1..20: mol_type = other DNA
tggtttcgtgacgaggtcgc

SEQ ID NO: 4490 - DNA, 20 bp, synthetic construct
  source 1..20: mol_type = other DNA
actgaaatgttgggcctacc

SEQ ID NO: 4491 - DNA, 20 bp, synthetic construct
  source 1..20: mol_type = other DNA
gtttgtaatagcttccttca

SEQ ID NO: 4492 - DNA, 20 bp, synthetic construct
  source 1..20: mol_type = other DNA
tctcccggatccaaataaac

SEQ ID NO: 4493 - DNA, 20 bp, synthetic construct
  source 1..20: mol_type = other DNA
attatcaatgaccctgttcg

SEQ ID NO: 4494 - DNA, 20 bp, synthetic construct
  source 1..20: mol_type = other DNA
tccgtattcccatacggaaa

SEQ ID NO: 4495 - DNA, 20 bp, synthetic construct
  source 1..20: mol_type = other DNA
atgcgtgacataccacttag

SEQ ID NO: 4496 - DNA, 20 bp, synthetic construct
  source 1..20: mol_type = other DNA
cctgttggtggctgcatgac

SEQ ID NO: 4497 - DNA, 20 bp, synthetic construct
  source 1..20: mol_type = other DNA
atctgtttcgtcactttgac

SEQ ID NO: 4498 - DNA, 20 bp, synthetic construct
  source 1..20: mol_type = other DNA
gtgagtcagtcatcagagtg

SEQ ID NO: 4499 - DNA, 20 bp, synthetic construct
  source 1..20: mol_type = other DNA
gcagtccaaagtctaccgag

SEQ ID NO: 4500 - DNA, 20 bp, synthetic construct
  source 1..20: mol_type = other DNA
ttgcgatccctaaatcaaca

SEQ ID NO: 4501 - DNA, 20 bp, synthetic construct
  source 1..20: mol_type = other DNA
accgccaagtcgtttatgtg

SEQ ID NO: 4502 - DNA, 20 bp, synthetic construct
  source 1..20: mol_type = other DNA
ctgggcgggttaacctttcg

SEQ ID NO: 4503 - DNA, 20 bp, synthetic construct
  source 1..20: mol_type = other DNA
ataacctgaatagggcttgc

SEQ ID NO: 4504 - DNA, 20 bp, synthetic construct
  source 1..20: mol_type = other DNA
tcatggtgttggacaaactg

SEQ ID NO: 4505 - DNA, 20 bp, synthetic construct
  source 1..20: mol_type = other DNA
ccctgcagttgcaacctcgc

SEQ ID NO: 4506 - DNA, 20 bp, synthetic construct
  source 1..20: mol_type = other DNA
tcggtattcaacgtatcata

SEQ ID NO: 4507 - DNA, 20 bp, synthetic construct
  source 1..20: mol_type = other DNA
atctataagaggcatttctc

SEQ ID NO: 4508 - DNA, 20 bp, synthetic construct
  source 1..20: mol_type = other DNA
atcctatgggttaaccaggc

SEQ ID NO: 4509 - DNA, 20 bp, synthetic construct
  source 1..20: mol_type = other DNA
ttgttgagacctcgctttgc

SEQ ID NO: 4510 - DNA, 20 bp, synthetic construct
  source 1..20: mol_type = other DNA
tacgggaccctcgtgtagtt

SEQ ID NO: 4511 - DNA, 20 bp, synthetic construct
  source 1..20: mol_type = other DNA
aaatcgagtagcctttctac

SEQ ID NO: 4512 - DNA, 20 bp, synthetic construct
  source 1..20: mol_type = other DNA
ggagccgagttgagcgaata

SEQ ID NO: 4513 - DNA, 20 bp, synthetic construct
  source 1..20: mol_type = other DNA
cctccgtgctatatagtgtt

SEQ ID NO: 4514 - DNA, 20 bp, synthetic construct
  source 1..20: mol_type = other DNA
cctacttagatgaacgggtc

SEQ ID NO: 4515 - DNA, 20 bp, synthetic construct
  source 1..20: mol_type = other DNA
tcagcgtatcagtaacgttc

SEQ ID NO: 4516 - DNA, 20 bp, synthetic construct
  source 1..20: mol_type = other DNA
cgctggacgctaatctagcc

SEQ ID NO: 4517 - DNA, 20 bp, synthetic construct
  source 1..20: mol_type = other DNA
gataacgcaaatagttgctt

SEQ ID NO: 4518 - DNA, 20 bp, synthetic construct
  source 1..20: mol_type = other DNA
ggatgttcgcggtcgcctac

SEQ ID NO: 4519 - DNA, 20 bp, synthetic construct
  source 1..20: mol_type = other DNA
gggtaatgctgaattgtgag

SEQ ID NO: 4520 - DNA, 20 bp, synthetic construct
  source 1..20: mol_type = other DNA
aaggcacgctgtttgacgtt

SEQ ID NO: 4521 - DNA, 20 bp, synthetic construct
  source 1..20: mol_type = other DNA
cctcggtactcataatcata

SEQ ID NO: 4522 - DNA, 20 bp, synthetic construct
  source 1..20: mol_type = other DNA
tcgtcgtaatagcactacgg

SEQ ID NO: 4523 - DNA, 20 bp, synthetic construct
  source 1..20: mol_type = other DNA
tcgctgccgcacttaggaac

SEQ ID NO: 4524 - DNA, 20 bp, synthetic construct
  source 1..20: mol_type = other DNA
tgcatgtgtccggaatcgtg

SEQ ID NO: 4525 - DNA, 20 bp, synthetic construct
  source 1..20: mol_type = other DNA
gctggtcaggtctatatacc

SEQ ID NO: 4526 - DNA, 20 bp, synthetic construct
  source 1..20: mol_type = other DNA
gcatcacatgctgcaacagg

SEQ ID NO: 4527 - DNA, 20 bp, synthetic construct
  source 1..20: mol_type = other DNA
gctggtaagtacgtttggta

SEQ ID NO: 4528 - DNA, 20 bp, synthetic construct
  source 1..20: mol_type = other DNA
atgagcaccgtctgccacgc

SEQ ID NO: 4529 - DNA, 20 bp, synthetic construct
  source 1..20: mol_type = other DNA
gggctgccgctaccgtagaa

SEQ ID NO: 4530 - DNA, 20 bp, synthetic construct
  source 1..20: mol_type = other DNA
gttcatgttggcgtcgtcca

SEQ ID NO: 4531 - DNA, 20 bp, synthetic construct
  source 1..20: mol_type = other DNA
tgtgcgaatcatcttctcta

SEQ ID NO: 4532 - DNA, 20 bp, synthetic construct
  source 1..20: mol_type = other DNA
tctcaagtctcacgttggga

SEQ ID NO: 4533 - DNA, 20 bp, synthetic construct
  source 1..20: mol_type = other DNA
tctctagtgttccatatacg

SEQ ID NO: 4534 - DNA, 20 bp, synthetic construct
  source 1..20: mol_type = other DNA
ggatctatgcgcttatctga

SEQ ID NO: 4535 - DNA, 20 bp, synthetic construct
  source 1..20: mol_type = other DNA
cagtatcggttcgtccgaga

SEQ ID NO: 4536 - DNA, 20 bp, synthetic construct
  source 1..20: mol_type = other DNA
agttagtctcgttgtgtaga

SEQ ID NO: 4537 - DNA, 20 bp, synthetic construct
  source 1..20: mol_type = other DNA
ggaacaccgtgccatagctc

SEQ ID NO: 4538 - DNA, 20 bp, synthetic construct
  source 1..20: mol_type = other DNA
cccttacacctctactcgcg

SEQ ID NO: 4539 - DNA, 20 bp, synthetic construct
  source 1..20: mol_type = other DNA
ggatcaagttgtggagttta

SEQ ID NO: 4540 - DNA, 20 bp, synthetic construct
  source 1..20: mol_type = other DNA
ttgaaggcttgatccgcacg

SEQ ID NO: 4541 - DNA, 20 bp, synthetic construct
  source 1..20: mol_type = other DNA
ggagaaactgtaccggtgat

SEQ ID NO: 4542 - DNA, 20 bp, synthetic construct
  source 1..20: mol_type = other DNA
tcttgagcggcccgcttaat

SEQ ID NO: 4543 - DNA, 20 bp, synthetic construct
  source 1..20: mol_type = other DNA
atcacgctacactagagcgt

SEQ ID NO: 4544 - DNA, 20 bp, synthetic construct
  source 1..20: mol_type = other DNA
ggtactgaaaggtcggccta

SEQ ID NO: 4545 - DNA, 20 bp, synthetic construct
  source 1..20: mol_type = other DNA
acgttccatatcacagccaa

SEQ ID NO: 4546 - DNA, 20 bp, synthetic construct
  source 1..20: mol_type = other DNA
aattagggacgccattgtgc

SEQ ID NO: 4547 - DNA, 20 bp, synthetic construct
  source 1..20: mol_type = other DNA
atattactacaaggcccaga

SEQ ID NO: 4548 - DNA, 20 bp, synthetic construct
  source 1..20: mol_type = other DNA
gcagtctatttgccaactcg

SEQ ID NO: 4549 - DNA, 20 bp, synthetic construct
  source 1..20: mol_type = other DNA
gacgggatcgcacgggaaat

SEQ ID NO: 4550 - DNA, 20 bp, synthetic construct
  source 1..20: mol_type = other DNA
gaaatcctgacacccgcctc

SEQ ID NO: 4551 - DNA, 20 bp, synthetic construct
  source 1..20: mol_type = other DNA
gccacctgggatcagtcttc

SEQ ID NO: 4552 - DNA, 20 bp, synthetic construct
  source 1..20: mol_type = other DNA
cggtgttcctggctatcact

SEQ ID NO: 4553 - DNA, 20 bp, synthetic construct
  source 1..20: mol_type = other DNA
ggcggaggatgcgtccaact

SEQ ID NO: 4554 - DNA, 20 bp, synthetic construct
  source 1..20: mol_type = other DNA
cagcctaccctccgaacaaa

SEQ ID NO: 4555 - DNA, 20 bp, synthetic construct
  source 1..20: mol_type = other DNA
cccacaacactcatccagca

SEQ ID NO: 4556 - DNA, 20 bp, synthetic construct
  source 1..20: mol_type = other DNA
cagcgcagagagaagtaaga

SEQ ID NO: 4557 - DNA, 20 bp, synthetic construct
  source 1..20: mol_type = other DNA
tcatcgatatggagccagct

SEQ ID NO: 4558 - DNA, 20 bp, synthetic construct
  source 1..20: mol_type = other DNA
acacagggcagtctcagaga

SEQ ID NO: 4559 - DNA, 20 bp, synthetic construct
  source 1..20: mol_type = other DNA
taattctctataggcgcgtc

SEQ ID NO: 4560 - DNA, 20 bp, synthetic construct
  source 1..20: mol_type = other DNA
accatgtatctctacgggaa

SEQ ID NO: 4561 - DNA, 20 bp, synthetic construct
  source 1..20: mol_type = other DNA
cctgccgcgattatccctat

SEQ ID NO: 4562 - DNA, 20 bp, synthetic construct
  source 1..20: mol_type = other DNA
tcagctttagttggtcggtg

SEQ ID NO: 4563 - DNA, 20 bp, synthetic construct
  source 1..20: mol_type = other DNA
ggtggataaacggtctaggc

SEQ ID NO: 4564 - DNA, 20 bp, synthetic construct
  source 1..20: mol_type = other DNA
ccctcgaagtccgcttgcga

SEQ ID NO: 4565 - DNA, 20 bp, synthetic construct
  source 1..20: mol_type = other DNA
aacataaaccgtgcgaagcc

SEQ ID NO: 4566 - DNA, 20 bp, synthetic construct
  source 1..20: mol_type = other DNA
tgtttggcgctctgtaagat

SEQ ID NO: 4567 - DNA, 20 bp, synthetic construct
  source 1..20: mol_type = other DNA
gtatgctttagtccacagtt

SEQ ID NO: 4568 - DNA, 20 bp, synthetic construct
  source 1..20: mol_type = other DNA
caacttacggtcattaagcg

SEQ ID NO: 4569 - DNA, 20 bp, synthetic construct
  source 1..20: mol_type = other DNA
cctaaacgcgtcgtgcaatg

SEQ ID NO: 4570 - DNA, 20 bp, synthetic construct
  source 1..20: mol_type = other DNA
ggtaaggcactgtaacgggc

SEQ ID NO: 4571 - DNA, 20 bp, synthetic construct
  source 1..20: mol_type = other DNA
agataattattgccctcatg

SEQ ID NO: 4572 - DNA, 20 bp, synthetic construct
  source 1..20: mol_type = other DNA
agaatggtacaaccatagaa

SEQ ID NO: 4573 - DNA, 20 bp, synthetic construct
  source 1..20: mol_type = other DNA
gtacaaagaattggtcgcga

SEQ ID NO: 4574 - DNA, 20 bp, synthetic construct
  source 1..20: mol_type = other DNA
aaagtccgctttcgtctatc

SEQ ID NO: 4575 - DNA, 20 bp, synthetic construct
  source 1..20: mol_type = other DNA
agtggacgaatcttgtatga

SEQ ID NO: 4576 - DNA, 20 bp, synthetic construct
  source 1..20: mol_type = other DNA
cacgagccctctctggagta

SEQ ID NO: 4577 - DNA, 20 bp, synthetic construct
  source 1..20: mol_type = other DNA
atcagcactcgcctcatcgt

SEQ ID NO: 4578 - DNA, 20 bp, synthetic construct
  source 1..20: mol_type = other DNA
tatcgcaggcaaattcagcc

SEQ ID NO: 4579 - DNA, 20 bp, synthetic construct
  source 1..20: mol_type = other DNA
ggagacgaagtaatacttgt

SEQ ID NO: 4580 - DNA, 20 bp, synthetic construct
  source 1..20: mol_type = other DNA
ccaccttataccgacgtatt

SEQ ID NO: 4581 - DNA, 20 bp, synthetic construct
  source 1..20: mol_type = other DNA
ggcactcgtgaatctaaatc

SEQ ID NO: 4582 - DNA, 20 bp, synthetic construct
  source 1..20: mol_type = other DNA
aaatgaggatgcaacctcgt

SEQ ID NO: 4583 - DNA, 20 bp, synthetic construct
  source 1..20: mol_type = other DNA
agtgtaaacccagacggtcc

SEQ ID NO: 4584 - DNA, 20 bp, synthetic construct
  source 1..20: mol_type = other DNA
ttcacacatcgagtgtatcc

SEQ ID NO: 4585 - DNA, 20 bp, synthetic construct
  source 1..20: mol_type = other DNA
agtgtatgcgcggccagata

SEQ ID NO: 4586 - DNA, 20 bp, synthetic construct
  source 1..20: mol_type = other DNA
catgtgataggcgggcactg

SEQ ID NO: 4587 - DNA, 20 bp, synthetic construct
  source 1..20: mol_type = other DNA
ggaccactgggtcggtcctt

SEQ ID NO: 4588 - DNA, 20 bp, synthetic construct
  source 1..20: mol_type = other DNA
agtgcctatcccaacccata

SEQ ID NO: 4589 - DNA, 20 bp, synthetic construct
  source 1..20: mol_type = other DNA
tgtgttaccaattctcaaac

SEQ ID NO: 4590 - DNA, 20 bp, synthetic construct
  source 1..20: mol_type = other DNA
gagctctcaaccggaacagg

SEQ ID NO: 4591 - DNA, 20 bp, synthetic construct
  source 1..20: mol_type = other DNA
tagagttgccatggattaga

SEQ ID NO: 4592 - DNA, 20 bp, synthetic construct
  source 1..20: mol_type = other DNA
ccgtgtttaccctgaaactc

SEQ ID NO: 4593 - DNA, 20 bp, synthetic construct
  source 1..20: mol_type = other DNA
agtgatctgtgacgtacgag

SEQ ID NO: 4594 - DNA, 20 bp, synthetic construct
  source 1..20: mol_type = other DNA
tcgtttgcgtggttccgcat

SEQ ID NO: 4595 - DNA, 20 bp, synthetic construct
  source 1..20: mol_type = other DNA
aagtcgattcacatttcctt

SEQ ID NO: 4596 - DNA, 20 bp, synthetic construct
  source 1..20: mol_type = other DNA
ggcttatgacggttagtttc

SEQ ID NO: 4597 - DNA, 20 bp, synthetic construct
  source 1..20: mol_type = other DNA
cgactctcagattgcatgtt

SEQ ID NO: 4598 - DNA, 20 bp, synthetic construct
  source 1..20: mol_type = other DNA
ttcaacaccgtcaatggagt

SEQ ID NO: 4599 - DNA, 20 bp, synthetic construct
  source 1..20: mol_type = other DNA
gcgcagaccttccaccggga

SEQ ID NO: 4600 - DNA, 20 bp, synthetic construct
  source 1..20: mol_type = other DNA
gtcaagtagccattctagcg

SEQ ID NO: 4601 - DNA, 20 bp, synthetic construct
  source 1..20: mol_type = other DNA
ctcgatttattcctgctctt

SEQ ID NO: 4602 - DNA, 20 bp, synthetic construct
  source 1..20: mol_type = other DNA
acgctaggacaaagctaatg

SEQ ID NO: 4603 - DNA, 20 bp, synthetic construct
  source 1..20: mol_type = other DNA
ctgcgatcgatttggaacca

SEQ ID NO: 4604 - DNA, 20 bp, synthetic construct
  source 1..20: mol_type = other DNA
gtcttctatcctcaaccttg

SEQ ID NO: 4605 - DNA, 20 bp, synthetic construct
  source 1..20: mol_type = other DNA
gagttgactttaacgcggta

SEQ ID NO: 4606 - DNA, 20 bp, synthetic construct
  source 1..20: mol_type = other DNA
tttgtgacggtctgatgggc

SEQ ID NO: 4607 - DNA, 20 bp, synthetic construct
  source 1..20: mol_type = other DNA
attgctatctccgccgaatg

SEQ ID NO: 4608 - DNA, 20 bp, synthetic construct
  source 1..20: mol_type = other DNA
cacctagcgatacaattagt

SEQ ID NO: 4609 - DNA, 20 bp, synthetic construct
  source 1..20: mol_type = other DNA
ccggacgcatgtgacttgtt

SEQ ID NO: 4610 - DNA, 20 bp, synthetic construct
  source 1..20: mol_type = other DNA
ctccaactctgcgagcctgt

SEQ ID NO: 4611 - DNA, 20 bp, synthetic construct
  source 1..20: mol_type = other DNA
tgctctacgcttaacctaat

SEQ ID NO: 4612 - DNA, 20 bp, synthetic construct
  source 1..20: mol_type = other DNA
gaggtagacgagctcggatt

SEQ ID NO: 4613 - DNA, 20 bp, synthetic construct
  source 1..20: mol_type = other DNA
accgtaaagctccactcaga

SEQ ID NO: 4614 - DNA, 20 bp, synthetic construct
  source 1..20: mol_type = other DNA
tgctcggattcttgggcgtc

SEQ ID NO: 4615 - DNA, 20 bp, synthetic construct
  source 1..20: mol_type = other DNA
aacgtatttgttgctcttct

SEQ ID NO: 4616 - DNA, 20 bp, synthetic construct
  source 1..20: mol_type = other DNA
gtctgcaccagtcactctca

SEQ ID NO: 4617 - DNA, 20 bp, synthetic construct
  source 1..20: mol_type = other DNA
caccgtgccgataggattgt

SEQ ID NO: 4618 - DNA, 20 bp, synthetic construct
  source 1..20: mol_type = other DNA
ccgttaagagcatggcatcg

SEQ ID NO: 4619 - DNA, 20 bp, synthetic construct
  source 1..20: mol_type = other DNA
atagagtgtgatcagtcgtg

SEQ ID NO: 4620 - DNA, 20 bp, synthetic construct
  source 1..20: mol_type = other DNA
tacgcagagagcagttgtgc

SEQ ID NO: 4621 - DNA, 20 bp, synthetic construct
  source 1..20: mol_type = other DNA
tccatattcagtgcggtata

SEQ ID NO: 4622 - DNA, 20 bp, synthetic construct
  source 1..20: mol_type = other DNA
caaccctgagttgatccgga

SEQ ID NO: 4623 - DNA, 20 bp, synthetic construct
  source 1..20: mol_type = other DNA
ctacaagtggcggctcgcac

SEQ ID NO: 4624 - DNA, 20 bp, synthetic construct
  source 1..20: mol_type = other DNA
ataggtgctgcggttgccca

SEQ ID NO: 4625 - DNA, 20 bp, synthetic construct
  source 1..20: mol_type = other DNA
cttcaactcgtcaagtgatc

SEQ ID NO: 4626 - DNA, 20 bp, synthetic construct
  source 1..20: mol_type = other DNA
caatattccgatatgcggac

SEQ ID NO: 4627 - DNA, 20 bp, synthetic construct
  source 1..20: mol_type = other DNA
agctaagttcaaattggagg

SEQ ID NO: 4628 - DNA, 20 bp, synthetic construct
  source 1..20: mol_type = other DNA
tgtatataacgtaagttcca

SEQ ID NO: 4629 - DNA, 20 bp, synthetic construct
  source 1..20: mol_type = other DNA
ggacgggtggcaatcaacaa

SEQ ID NO: 4630 - DNA, 20 bp, synthetic construct
  source 1..20: mol_type = other DNA
tgcgggcacgtggatccttg

SEQ ID NO: 4631 - DNA, 20 bp, synthetic construct
  source 1..20: mol_type = other DNA
agcattagagtccgttaatt

SEQ ID NO: 4632 - DNA, 20 bp, synthetic construct
  source 1..20: mol_type = other DNA
gtgtgatacgggtacacttg

SEQ ID NO: 4633 - DNA, 20 bp, synthetic construct
  source 1..20: mol_type = other DNA
taaaggtcaaggtattagta

SEQ ID NO: 4634 - DNA, 20 bp, synthetic construct
  source 1..20: mol_type = other DNA
tccatcctatttgtttcaat

SEQ ID NO: 4635 - DNA, 20 bp, synthetic construct
  source 1..20: mol_type = other DNA
tcgcgacgtaaatcgtattc

SEQ ID NO: 4636 - DNA, 20 bp, synthetic construct
  source 1..20: mol_type = other DNA
taccacaatccacgcggcat

SEQ ID NO: 4637 - DNA, 20 bp, synthetic construct
  source 1..20: mol_type = other DNA
cgacactatcgagcatttcc

SEQ ID NO: 4638 - DNA, 20 bp, synthetic construct
  source 1..20: mol_type = other DNA
ttaatgttacgactgccacc

SEQ ID NO: 4639 - DNA, 20 bp, synthetic construct
  source 1..20: mol_type = other DNA
tgctttataccgttaataac

SEQ ID NO: 4640 - DNA, 20 bp, synthetic construct
  source 1..20: mol_type = other DNA
acatccgccgaaccgatata

SEQ ID NO: 4641 - DNA, 20 bp, synthetic construct
  source 1..20: mol_type = other DNA
ctgtggaaggccttgtgcgg

SEQ ID NO: 4642 - DNA, 20 bp, synthetic construct
  source 1..20: mol_type = other DNA
gttacagcgatttactaagt

SEQ ID NO: 4643 - DNA, 20 bp, synthetic construct
  source 1..20: mol_type = other DNA
ttacaatagtacgaagccgg

SEQ ID NO: 4644 - DNA, 20 bp, synthetic construct
  source 1..20: mol_type = other DNA
aaatccatcttagccctcag

SEQ ID NO: 4645 - DNA, 20 bp, synthetic construct
  source 1..20: mol_type = other DNA
ctcctaccaggtgtgctgac

SEQ ID NO: 4646 - DNA, 20 bp, synthetic construct
  source 1..20: mol_type = other DNA
gggtatcaagctcctgacga

SEQ ID NO: 4647 - DNA, 20 bp, synthetic construct
  source 1..20: mol_type = other DNA
tcagcaaggaggcacgagca

SEQ ID NO: 4648 - DNA, 20 bp, synthetic construct
  source 1..20: mol_type = other DNA
tacaagaaggaaatcctcgg

SEQ ID NO: 4649 - DNA, 20 bp, synthetic construct
  source 1..20: mol_type = other DNA
gacagtaagcggcgggtaag

SEQ ID NO: 4650 - DNA, 20 bp, synthetic construct
  source 1..20: mol_type = other DNA
tctttacaatgtgttcggtt

SEQ ID NO: 4651 - DNA, 20 bp, synthetic construct
  source 1..20: mol_type = other DNA
gggagttaggctttctacac

SEQ ID NO: 4652 - DNA, 20 bp, synthetic construct
  source 1..20: mol_type = other DNA
ggctcgtcatatgtcaaaca

SEQ ID NO: 4653 - DNA, 20 bp, synthetic construct
  source 1..20: mol_type = other DNA
ctgtacgtccttgcgtacgg

SEQ ID NO: 4654 - DNA, 20 bp, synthetic construct
  source 1..20: mol_type = other DNA
ccacggttgctacgtcgctg

SEQ ID NO: 4655 - DNA, 20 bp, synthetic construct
  source 1..20: mol_type = other DNA
cttcctgcatgtgtcactaa

SEQ ID NO: 4656 - DNA, 20 bp, synthetic construct
  source 1..20: mol_type = other DNA
acgtctgatgtccatttcgt

SEQ ID NO: 4657 - DNA, 20 bp, synthetic construct
  source 1..20: mol_type = other DNA
cttcccgacaatgaattacc

SEQ ID NO: 4658 - DNA, 20 bp, synthetic construct
  source 1..20: mol_type = other DNA
cagcaacataggaccgtggg

SEQ ID NO: 4659 - DNA, 20 bp, synthetic construct
  source 1..20: mol_type = other DNA
gcaaatttgtactacccgtc

SEQ ID NO: 4660 - DNA, 20 bp, synthetic construct
  source 1..20: mol_type = other DNA
gctaatggattcgtacgccc

SEQ ID NO: 4661 - DNA, 20 bp, synthetic construct
  source 1..20: mol_type = other DNA
acattctatgagctcccaat

SEQ ID NO: 4662 - DNA, 20 bp, synthetic construct
  source 1..20: mol_type = other DNA
cgtactactttcgaagaata

SEQ ID NO: 4663 - DNA, 20 bp, synthetic construct
  source 1..20: mol_type = other DNA
agtctatgttctttcgatcg

SEQ ID NO: 4664 - DNA, 20 bp, synthetic construct
  source 1..20: mol_type = other DNA
gaaggagaaagaagggcggt

SEQ ID NO: 4665 - DNA, 20 bp, synthetic construct
  source 1..20: mol_type = other DNA
cacacgcccaagattacgtc

SEQ ID NO: 4666 - DNA, 20 bp, synthetic construct
  source 1..20: mol_type = other DNA
gacagctcaattccatccgt

SEQ ID NO: 4667 - DNA, 20 bp, synthetic construct
  source 1..20: mol_type = other DNA
cgaacgtagtagtctaccta

SEQ ID NO: 4668 - DNA, 20 bp, synthetic construct
  source 1..20: mol_type = other DNA
aaggcaaactgtgtcgggca

SEQ ID NO: 4669 - DNA, 20 bp, synthetic construct
  source 1..20: mol_type = other DNA
tatctttacgagcaatatgg

SEQ ID NO: 4670 - DNA, 20 bp, synthetic construct
  source 1..20: mol_type = other DNA
aattcggtggacgagacatt

SEQ ID NO: 4671 - DNA, 20 bp, synthetic construct
  source 1..20: mol_type = other DNA
gagttctggtatcttggaaa

SEQ ID NO: 4672 - DNA, 20 bp, synthetic construct
  source 1..20: mol_type = other DNA
cgcttacggacggagtcaag

SEQ ID NO: 4673 - DNA, 20 bp, synthetic construct
  source 1..20: mol_type = other DNA
ccgctgtgcatctcgacgtc

SEQ ID NO: 4674 - DNA, 20 bp, synthetic construct
  source 1..20: mol_type = other DNA
acaacaagtctcaacatatc

SEQ ID NO: 4675 - DNA, 20 bp, synthetic construct
  source 1..20: mol_type = other DNA
tggacagtactaatccactt

SEQ ID NO: 4676 - DNA, 20 bp, synthetic construct
  source 1..20: mol_type = other DNA
tgcagtgttctatgatcaca

SEQ ID NO: 4677 - DNA, 20 bp, synthetic construct
  source 1..20: mol_type = other DNA
gatgcctaattggaaggcgg

SEQ ID NO: 4678 - DNA, 20 bp, synthetic construct
  source 1..20: mol_type = other DNA
tctatcctagcttcacgtta

SEQ ID NO: 4679 - DNA, 20 bp, synthetic construct
  source 1..20: mol_type = other DNA
gtaagcatgttgatgtggaa

SEQ ID NO: 4680 - DNA, 20 bp, synthetic construct
  source 1..20: mol_type = other DNA
actatcttcggcggaggtag

SEQ ID NO: 4681 - DNA, 20 bp, synthetic construct
  source 1..20: mol_type = other DNA
gattcggtcattgtctaacg

SEQ ID NO: 4682 - DNA, 20 bp, synthetic construct
  source 1..20: mol_type = other DNA
gaaacgccataaccacgtaa

SEQ ID NO: 4683 - DNA, 20 bp, synthetic construct
  source 1..20: mol_type = other DNA
taagatccaatgaaccaggg

SEQ ID NO: 4684 - DNA, 20 bp, synthetic construct
  source 1..20: mol_type = other DNA
atcgatgagatgcgtcgaaa

SEQ ID NO: 4685 - DNA, 20 bp, synthetic construct
  source 1..20: mol_type = other DNA
taaatcttggccgaagttat

SEQ ID NO: 4686 - DNA, 20 bp, synthetic construct
  source 1..20: mol_type = other DNA
gacacttgcgatgtcttgga

SEQ ID NO: 4687 - DNA, 20 bp, synthetic construct
  source 1..20: mol_type = other DNA
ctatgggcatccggctattg

SEQ ID NO: 4688 - DNA, 20 bp, synthetic construct
  source 1..20: mol_type = other DNA
tttccttgatccgcgtacgc

SEQ ID NO: 4689 - DNA, 20 bp, synthetic construct
  source 1..20: mol_type = other DNA
cgccagtacatggagcatgc

SEQ ID NO: 4690 - DNA, 20 bp, synthetic construct
  source 1..20: mol_type = other DNA
caagtgcgagtctgatagat

SEQ ID NO: 4691 - DNA, 20 bp, synthetic construct
  source 1..20: mol_type = other DNA
aaggatagtccgttgcgcat

SEQ ID NO: 4692 - DNA, 20 bp, synthetic construct
  source 1..20: mol_type = other DNA
cacatgcgaaacttcttggc

SEQ ID NO: 4693 - DNA, 20 bp, synthetic construct
  source 1..20: mol_type = other DNA
ggcgaactcggtgtgtcaat

SEQ ID NO: 4694 - DNA, 20 bp, synthetic construct
  source 1..20: mol_type = other DNA
atgacttaactcgtaatctt

SEQ ID NO: 4695 - DNA, 20 bp, synthetic construct
  source 1..20: mol_type = other DNA
ctacgcttggtgttctggtg

SEQ ID NO: 4696 - DNA, 20 bp, synthetic construct
  source 1..20: mol_type = other DNA
ctctgagagtaccattattc

SEQ ID NO: 4697 - DNA, 20 bp, synthetic construct
  source 1..20: mol_type = other DNA
tacccaaaggatcacggctc

SEQ ID NO: 4698 - DNA, 20 bp, synthetic construct
  source 1..20: mol_type = other DNA
cgaggcttatgatcgagttg

SEQ ID NO: 4699 - DNA, 20 bp, synthetic construct
  source 1..20: mol_type = other DNA
agattcgagtacaaccggtc

SEQ ID NO: 4700 - DNA, 20 bp, synthetic construct
  source 1..20: mol_type = other DNA
attggagtaacctcaaggac

SEQ ID NO: 4701 - DNA, 20 bp, synthetic construct
  source 1..20: mol_type = other DNA
cgtaatcgttaggtgttcat

SEQ ID NO: 4702 - DNA, 20 bp, synthetic construct
  source 1..20: mol_type = other DNA
cctaacaggagtggacgaac

SEQ ID NO: 4703 - DNA, 20 bp, synthetic construct
  source 1..20: mol_type = other DNA
gcggtgttcgttggcttgtc

SEQ ID NO: 4704 - DNA, 20 bp, synthetic construct
  source 1..20: mol_type = other DNA
acaactgattgcttacacta

SEQ ID NO: 4705 - DNA, 20 bp, synthetic construct
  source 1..20: mol_type = other DNA
tgtagtagcattgatgactg

SEQ ID NO: 4706 - DNA, 20 bp, synthetic construct
  source 1..20: mol_type = other DNA
cccgccactgaagtgaatac

SEQ ID NO: 4707 - DNA, 20 bp, synthetic construct
  source 1..20: mol_type = other DNA
gacaatgattcctacgcgat

SEQ ID NO: 4708 - DNA, 20 bp, synthetic construct
  source 1..20: mol_type = other DNA
gagagtggcttgattagcaa

SEQ ID NO: 4709 - DNA, 20 bp, synthetic construct
  source 1..20: mol_type = other DNA
cgggtcgttctaaggttgtc

SEQ ID NO: 4710 - DNA, 20 bp, synthetic construct
  source 1..20: mol_type = other DNA
agcctataaagcatgtgcgg

SEQ ID NO: 4711 - DNA, 20 bp, synthetic construct
  source 1..20: mol_type = other DNA
gcttgtgtgcggaacagtga

SEQ ID NO: 4712 - DNA, 20 bp, synthetic construct
  source 1..20: mol_type = other DNA
acaggcgagctcgctgaacg

SEQ ID NO: 4713 - DNA, 20 bp, synthetic construct
  source 1..20: mol_type = other DNA
gcgggttacttgagagtcat

SEQ ID NO: 4714 - DNA, 20 bp, synthetic construct
  source 1..20: mol_type = other DNA
gagaaggtatcttgttccca

SEQ ID NO: 4715 - DNA, 20 bp, synthetic construct
  source 1..20: mol_type = other DNA
acttcgaggtcatatgcatc

SEQ ID NO: 4716 - DNA, 20 bp, synthetic construct
  source 1..20: mol_type = other DNA
atgcgatagtaatggcacag

SEQ ID NO: 4717 - DNA, 20 bp, synthetic construct
  source 1..20: mol_type = other DNA
tggacccggtctataacttg

SEQ ID NO: 4718 - DNA, 20 bp, synthetic construct
  source 1..20: mol_type = other DNA
accaggcctttaggtagcca

SEQ ID NO: 4719 - DNA, 20 bp, synthetic construct
  source 1..20: mol_type = other DNA
agggttatgcctcagactat

SEQ ID NO: 4720 - DNA, 20 bp, synthetic construct
  source 1..20: mol_type = other DNA
acgaccatgacctggatatg

SEQ ID NO: 4721 - DNA, 20 bp, synthetic construct
  source 1..20: mol_type = other DNA
tccctgtacaatgctccctt

SEQ ID NO: 4722 - DNA, 20 bp, synthetic construct
  source 1..20: mol_type = other DNA
ttgtggagggagtagcctcc

SEQ ID NO: 4723 - DNA, 20 bp, synthetic construct
  source 1..20: mol_type = other DNA
gaccaccgagtcaactaggc

SEQ ID NO: 4724 - DNA, 20 bp, synthetic construct
  source 1..20: mol_type = other DNA
tgcgataattactcgacgga

SEQ ID NO: 4725 - DNA, 20 bp, synthetic construct
  source 1..20: mol_type = other DNA
aacgacccgtaaggccgtct

SEQ ID NO: 4726 - DNA, 20 bp, synthetic construct
  source 1..20: mol_type = other DNA
gcgcgcaccgattcctgata

SEQ ID NO: 4727 - DNA, 20 bp, synthetic construct
  source 1..20: mol_type = other DNA
tcatcatatacggttgtgca

SEQ ID NO: 4728 - DNA, 20 bp, synthetic construct
  source 1..20: mol_type = other DNA
tgctctaaggcgacgtgtat

SEQ ID NO: 4729 - DNA, 20 bp, synthetic construct
  source 1..20: mol_type = other DNA
agccctatccgttgccgcgt

SEQ ID NO: 4730 - DNA, 20 bp, synthetic construct
  source 1..20: mol_type = other DNA
tagactcgtctccttcgctt

SEQ ID NO: 4731 - DNA, 20 bp, synthetic construct
  source 1..20: mol_type = other DNA
agtaccgtgtgccagaagaa

SEQ ID NO: 4732 - DNA, 20 bp, synthetic construct
  source 1..20: mol_type = other DNA
ttgtaatacgaacgtctctc

SEQ ID NO: 4733 - DNA, 20 bp, synthetic construct
  source 1..20: mol_type = other DNA
cctgaccatagcctaccaca

SEQ ID NO: 4734 - DNA, 20 bp, synthetic construct
  source 1..20: mol_type = other DNA
cgtctgtagaacactgtatc

SEQ ID NO: 4735 - DNA, 20 bp, synthetic construct
  source 1..20: mol_type = other DNA
ctagagagctacaaccactg

SEQ ID NO: 4736 - DNA, 20 bp, synthetic construct
  source 1..20: mol_type = other DNA
accactaccatgtctctccc

SEQ ID NO: 4737 - DNA, 20 bp, synthetic construct
  source 1..20: mol_type = other DNA
aggaaaggaatgtcgtgcca

SEQ ID NO: 4738 - DNA, 20 bp, synthetic construct
  source 1..20: mol_type = other DNA
atgcacagatcccgattcgt

SEQ ID NO: 4739 - DNA, 20 bp, synthetic construct
  source 1..20: mol_type = other DNA
gaccgacgcgagcgttcttt

SEQ ID NO: 4740 - DNA, 20 bp, synthetic construct
  source 1..20: mol_type = other DNA
aactagagggtcatgggcca

SEQ ID NO: 4741 - DNA, 20 bp, synthetic construct
  source 1..20: mol_type = other DNA
ctctcaaacgcggtttccgc

SEQ ID NO: 4742 - DNA, 20 bp, synthetic construct
  source 1..20: mol_type = other DNA
aggctgtccgaaactaccaa

SEQ ID NO: 4743 - DNA, 20 bp, synthetic construct
  source 1..20: mol_type = other DNA
ggctctgtcttcacatgaac

SEQ ID NO: 4744 - DNA, 20 bp, synthetic construct
  source 1..20: mol_type = other DNA
gctccaactgcaatagagtc

SEQ ID NO: 4745 - DNA, 20 bp, synthetic construct
  source 1..20: mol_type = other DNA
ctccgatcctgctcaatatg

SEQ ID NO: 4746 - DNA, 20 bp, synthetic construct
  source 1..20: mol_type = other DNA
agagcagcggatcccagttg

SEQ ID NO: 4747 - DNA, 20 bp, synthetic construct
  source 1..20: mol_type = other DNA
cgacagtaagcattaggtca

SEQ ID NO: 4748 - DNA, 20 bp, synthetic construct
  source 1..20: mol_type = other DNA
ttcaggtccgttaaccgtac

SEQ ID NO: 4749 - DNA, 20 bp, synthetic construct
  source 1..20: mol_type = other DNA
gaagattatatacacaggcc

SEQ ID NO: 4750 - DNA, 20 bp, synthetic construct
  source 1..20: mol_type = other DNA
ggcatgggattgccggtttg

SEQ ID NO: 4751 - DNA, 20 bp, synthetic construct
  source 1..20: mol_type = other DNA
cgcgtcgctgattagctatt

SEQ ID NO: 4752 - DNA, 20 bp, synthetic construct
  source 1..20: mol_type = other DNA
tttcatttgcattactggct

SEQ ID NO: 4753 - DNA, 20 bp, synthetic construct
  source 1..20: mol_type = other DNA
ccgttcagggtgccgtcagt

SEQ ID NO: 4754 - DNA, 20 bp, synthetic construct
  source 1..20: mol_type = other DNA
tactttggcgcttacaatca

SEQ ID NO: 4755 - DNA, 20 bp, synthetic construct
  source 1..20: mol_type = other DNA
tcaagtaacactcctggccc

SEQ ID NO: 4756 - DNA, 20 bp, synthetic construct
  source 1..20: mol_type = other DNA
agagattccgcgagcgtgct

SEQ ID NO: 4757 - DNA, 20 bp, synthetic construct
  source 1..20: mol_type = other DNA
gccaacttacctgtatctgc

SEQ ID NO: 4758 - DNA, 20 bp, synthetic construct
  source 1..20: mol_type = other DNA
tgggtgttctagtacgctga

SEQ ID NO: 4759 - DNA, 20 bp, synthetic construct
  source 1..20: mol_type = other DNA
gtcgggccatctctttacac

SEQ ID NO: 4760 - DNA, 20 bp, synthetic construct
  source 1..20: mol_type = other DNA
ctcagccaattgagtagaaa

SEQ ID NO: 4761 - DNA, 20 bp, synthetic construct
  source 1..20: mol_type = other DNA
gtccggttctcaagccgata

SEQ ID NO: 4762 - DNA, 20 bp, synthetic construct
  source 1..20: mol_type = other DNA
gagagattgtgaaacatcga

SEQ ID NO: 4763 - DNA, 20 bp, synthetic construct
  source 1..20: mol_type = other DNA
agcctaacattcagcgagcg

SEQ ID NO: 4764 - DNA, 20 bp, synthetic construct
  source 1..20: mol_type = other DNA
ctatctgggacattgatttc

SEQ ID NO: 4765 - DNA, 20 bp, synthetic construct
  source 1..20: mol_type = other DNA
cacaatttcggcattgccga

SEQ ID NO: 4766 - DNA, 20 bp, synthetic construct
  source 1..20: mol_type = other DNA
gttcgaactactggttattc

SEQ ID NO: 4767 - DNA, 20 bp, synthetic construct
  source 1..20: mol_type = other DNA
tgtagcagcgcggcttcagt

SEQ ID NO: 4768 - DNA, 20 bp, synthetic construct
  source 1..20: mol_type = other DNA
ggcagtacctagacgcacag

SEQ ID NO: 4769 - DNA, 20 bp, synthetic construct
  source 1..20: mol_type = other DNA
ggatctggctctaagtgttc

SEQ ID NO: 4770 - DNA, 20 bp, synthetic construct
  source 1..20: mol_type = other DNA
ctttatggagtaggtcgtcc

SEQ ID NO: 4771 - DNA, 20 bp, synthetic construct
  source 1..20: mol_type = other DNA
gcagtaaactccatgtgcga

SEQ ID NO: 4772 - DNA, 20 bp, synthetic construct
  source 1..20: mol_type = other DNA
ctgctgacaatcaataccga

SEQ ID NO: 4773 - DNA, 20 bp, synthetic construct
  source 1..20: mol_type = other DNA
acctagcccattacgcatta

SEQ ID NO: 4774 - DNA, 20 bp, synthetic construct
  source 1..20: mol_type = other DNA
ccaatctcggtacattacat

SEQ ID NO: 4775 - DNA, 20 bp, synthetic construct
  source 1..20: mol_type = other DNA
ggagcctacgaaccttcgct

SEQ ID NO: 4776 - DNA, 20 bp, synthetic construct
  source 1..20: mol_type = other DNA
cgtacttgggtgcgactgtt

SEQ ID NO: 4777 - DNA, 20 bp, synthetic construct
  source 1..20: mol_type = other DNA
caatgcatatcgttatgtca

SEQ ID NO: 4778 - DNA, 20 bp, synthetic construct
  source 1..20: mol_type = other DNA
ggatcgagccactctatgtt

SEQ ID NO: 4779 - DNA, 20 bp, synthetic construct
  source 1..20: mol_type = other DNA
cttgggttctcgaagcagaa

SEQ ID NO: 4780 - DNA, 20 bp, synthetic construct
  source 1..20: mol_type = other DNA
caaattagtgacgccattgc

SEQ ID NO: 4781 - DNA, 20 bp, synthetic construct
  source 1..20: mol_type = other DNA
gacgattggtctcgaatcgt

SEQ ID NO: 4782 - DNA, 20 bp, synthetic construct
  source 1..20: mol_type = other DNA
gcatgctgaaggctcgacct

SEQ ID NO: 4783 - DNA, 20 bp, synthetic construct
  source 1..20: mol_type = other DNA
tcatgtgatcgtacgagaag

SEQ ID NO: 4784 - DNA, 20 bp, synthetic construct
  source 1..20: mol_type = other DNA
ctgtaacgctgtaggaagct

SEQ ID NO: 4785 - DNA, 20 bp, synthetic construct
  source 1..20: mol_type = other DNA
tgcactgcggactagtttgt

SEQ ID NO: 4786 - DNA, 20 bp, synthetic construct
  source 1..20: mol_type = other DNA
gcagcagacgctgacattca

SEQ ID NO: 4787 - DNA, 20 bp, synthetic construct
  source 1..20: mol_type = other DNA
taaagggaggacttacttat

SEQ ID NO: 4788 - DNA, 20 bp, synthetic construct
  source 1..20: mol_type = other DNA
tacacgggtgtttaagaggg

SEQ ID NO: 4789 - DNA, 20 bp, synthetic construct
  source 1..20: mol_type = other DNA
ttacaagacctcatggtgat

SEQ ID NO: 4790 - DNA, 20 bp, synthetic construct
  source 1..20: mol_type = other DNA
ctgtgcgtgactcgtctatt

SEQ ID NO: 4791 - DNA, 20 bp, synthetic construct
  source 1..20: mol_type = other DNA
ctgttggaacacatgctatc

SEQ ID NO: 4792 - DNA, 20 bp, synthetic construct
  source 1..20: mol_type = other DNA
acgtgatgctgactggccag

SEQ ID NO: 4793 - DNA, 20 bp, synthetic construct
  source 1..20: mol_type = other DNA
gtgcaagaagcaacgagttc

SEQ ID NO: 4794 - DNA, 20 bp, synthetic construct
  source 1..20: mol_type = other DNA
gattaggtgagacattctag

SEQ ID NO: 4795 - DNA, 20 bp, synthetic construct
  source 1..20: mol_type = other DNA
tagaacgatggtcaccagtc

SEQ ID NO: 4796 - DNA, 20 bp, synthetic construct
  source 1..20: mol_type = other DNA
ggtgttatctccatcacttc

SEQ ID NO: 4797 - DNA, 20 bp, synthetic construct
  source 1..20: mol_type = other DNA
gccggctcaggcctcttata

SEQ ID NO: 4798 - DNA, 20 bp, synthetic construct
  source 1..20: mol_type = other DNA
cgacggtgattgatagtcct

SEQ ID NO: 4799 - DNA, 20 bp, synthetic construct
  source 1..20: mol_type = other DNA
atacatctgactctgagtct

SEQ ID NO: 4800 - DNA, 20 bp, synthetic construct
  source 1..20: mol_type = other DNA
tatctatcttgcttcgtacc

SEQ ID NO: 4801 - DNA, 20 bp, synthetic construct
  source 1..20: mol_type = other DNA
tctctcctctcacgcgagta

SEQ ID NO: 4802 - DNA, 20 bp, synthetic construct
  source 1..20: mol_type = other DNA
gccgaatagaattaactcgg

SEQ ID NO: 4803 - DNA, 20 bp, synthetic construct
  source 1..20: mol_type = other DNA
gcaagcacacacacttctaa

SEQ ID NO: 4804 - DNA, 20 bp, synthetic construct
  source 1..20: mol_type = other DNA
aggctctattagagagtttc

SEQ ID NO: 4805 - DNA, 20 bp, synthetic construct
  source 1..20: mol_type = other DNA
gtgtattgtatatgcagtcg

SEQ ID NO: 4806 - DNA, 20 bp, synthetic construct
  source 1..20: mol_type = other DNA
aggtcgcgttaccaacccga

SEQ ID NO: 4807 - DNA, 20 bp, synthetic construct
  source 1..20: mol_type = other DNA
gagaatactggtcgtctggg

SEQ ID NO: 4808 - DNA, 20 bp, synthetic construct
  source 1..20: mol_type = other DNA
gggcacccatacctactcgt

SEQ ID NO: 4809 - DNA, 20 bp, synthetic construct
  source 1..20: mol_type = other DNA
gggtatagatactcaaacga

SEQ ID NO: 4810 - DNA, 20 bp, synthetic construct
  source 1..20: mol_type = other DNA
taaagtagcggccaggttta

SEQ ID NO: 4811 - DNA, 20 bp, synthetic construct
  source 1..20: mol_type = other DNA
agcaaccacaccgtgacgga

SEQ ID NO: 4812 - DNA, 20 bp, synthetic construct
  source 1..20: mol_type = other DNA
gtccggaacgcgatttgctg

SEQ ID NO: 4813 - DNA, 20 bp, synthetic construct
  source 1..20: mol_type = other DNA
gtatctctcccgtcggcagt

SEQ ID NO: 4814 - DNA, 20 bp, synthetic construct
  source 1..20: mol_type = other DNA
agcaccttggcatgcgtcaa

SEQ ID NO: 4815 - DNA, 20 bp, synthetic construct
  source 1..20: mol_type = other DNA
ggctggcgcatttgaacttt

SEQ ID NO: 4816 - DNA, 20 bp, synthetic construct
  source 1..20: mol_type = other DNA
attgctcactacagatcacc

SEQ ID NO: 4817 - DNA, 20 bp, synthetic construct
  source 1..20: mol_type = other DNA
cgcacggtggataattcgca

SEQ ID NO: 4818 - DNA, 20 bp, synthetic construct
  source 1..20: mol_type = other DNA
gccgcagtgaaccttaccgt

SEQ ID NO: 4819 - DNA, 20 bp, synthetic construct
  source 1..20: mol_type = other DNA
tcatctgcgcctatctttag

SEQ ID NO: 4820 - DNA, 20 bp, synthetic construct
  source 1..20: mol_type = other DNA
aagcagtgccgtagggcctc

SEQ ID NO: 4821 - DNA, 20 bp, synthetic construct
  source 1..20: mol_type = other DNA
agatgacgcgtaggataagc

SEQ ID NO: 4822 - DNA, 20 bp, synthetic construct
  source 1..20: mol_type = other DNA
tagagaagccggaagcgtgt

SEQ ID NO: 4823 - DNA, 20 bp, synthetic construct
  source 1..20: mol_type = other DNA
aatttgactgcaggttagag

SEQ ID NO: 4824 - DNA, 20 bp, synthetic construct
  source 1..20: mol_type = other DNA
cgatgccgcctatcataacc

SEQ ID NO: 4825 - DNA, 20 bp, synthetic construct
  source 1..20: mol_type = other DNA
gcggtgtctcctctcgtacc

SEQ ID NO: 4826 - DNA, 20 bp, synthetic construct
  source 1..20: mol_type = other DNA
tgggactcagaacgaagggc

SEQ ID NO: 4827 - DNA, 20 bp, synthetic construct
  source 1..20: mol_type = other DNA
tcgatggagcaacttcagaa

SEQ ID NO: 4828 - DNA, 20 bp, synthetic construct
  source 1..20: mol_type = other DNA
gcgtctccttcattccttac

SEQ ID NO: 4829 - DNA, 20 bp, synthetic construct
  source 1..20: mol_type = other DNA
aggaaagcacaagatccatt

SEQ ID NO: 4830 - DNA, 20 bp, synthetic construct
  source 1..20: mol_type = other DNA
tcccgttaagtatatatcga

SEQ ID NO: 4831 - DNA, 20 bp, synthetic construct
  source 1..20: mol_type = other DNA
agaacacagtatcctgcttc

SEQ ID NO: 4832 - DNA, 20 bp, synthetic construct
  source 1..20: mol_type = other DNA
cgctggttaagcacccataa

SEQ ID NO: 4833 - DNA, 20 bp, synthetic construct
  source 1..20: mol_type = other DNA
acttatcgtcctgcaacgag

SEQ ID NO: 4834 - DNA, 20 bp, synthetic construct
  source 1..20: mol_type = other DNA
ccgttgtgcatgctacgtcg

SEQ ID NO: 4835 - DNA, 20 bp, synthetic construct
  source 1..20: mol_type = other DNA
agctgttgcagatctacagt

SEQ ID NO: 4836 - DNA, 20 bp, synthetic construct
  source 1..20: mol_type = other DNA
ctcctcagtataagtcgtat

SEQ ID NO: 4837 - DNA, 20 bp, synthetic construct
  source 1..20: mol_type = other DNA
agcgtcctcgttagttgggt

SEQ ID NO: 4838 - DNA, 20 bp, synthetic construct
  source 1..20: mol_type = other DNA
gtgcagaatgtaagtattac

SEQ ID NO: 4839 - DNA, 20 bp, synthetic construct
  source 1..20: mol_type = other DNA
gcatcagcaacaaggtatct

SEQ ID NO: 4840 - DNA, 20 bp, synthetic construct
  source 1..20: mol_type = other DNA
ataaccctaatttacacctg

SEQ ID NO: 4841 - DNA, 20 bp, synthetic construct
  source 1..20: mol_type = other DNA
cagcttccagccgtcttgtg

SEQ ID NO: 4842 - DNA, 20 bp, synthetic construct
  source 1..20: mol_type = other DNA
tccggtaacttccagataac

SEQ ID NO: 4843 - DNA, 20 bp, synthetic construct
  source 1..20: mol_type = other DNA
ccgaactgctattccgccga

SEQ ID NO: 4844 - DNA, 20 bp, synthetic construct
  source 1..20: mol_type = other DNA
gcgcagatcaatgaccaagc

SEQ ID NO: 4845 - DNA, 20 bp, synthetic construct
  source 1..20: mol_type = other DNA
tatatatgtgtgcccttcag

SEQ ID NO: 4846 - DNA, 20 bp, synthetic construct
  source 1..20: mol_type = other DNA
agacgaatgaacggctgtgc

SEQ ID NO: 4847 - DNA, 20 bp, synthetic construct
  source 1..20: mol_type = other DNA
tatcaccgtgttcccaaagt

SEQ ID NO: 4848 - DNA, 20 bp, synthetic construct
  source 1..20: mol_type = other DNA
ccgtagggactccattaacc

SEQ ID NO: 4849 - DNA, 20 bp, synthetic construct
  source 1..20: mol_type = other DNA
gcgcggtggtgtggtatggt

SEQ ID NO: 4850 - DNA, 20 bp, synthetic construct
  source 1..20: mol_type = other DNA
ccaattctctatttccgagg

SEQ ID NO: 4851 - DNA, 20 bp, synthetic construct
  source 1..20: mol_type = other DNA
tatcttacagtgatgttgcc

SEQ ID NO: 4852 - DNA, 20 bp, synthetic construct
  source 1..20: mol_type = other DNA
gtgactcaggactttcaacc

SEQ ID NO: 4853 - DNA, 20 bp, synthetic construct
  source 1..20: mol_type = other DNA
cctgcggtagaatttatgtg

SEQ ID NO: 4854 - DNA, 20 bp, synthetic construct
  source 1..20: mol_type = other DNA
atcagaaacaggttcgtaga

SEQ ID NO: 4855 - DNA, 20 bp, synthetic construct
  source 1..20: mol_type = other DNA
aaagacatccctcgataact

SEQ ID NO: 4856 - DNA, 20 bp, synthetic construct
  source 1..20: mol_type = other DNA
cgccgccgcagctaacaact

SEQ ID NO: 4857 - DNA, 20 bp, synthetic construct
  source 1..20: mol_type = other DNA
gttgagttgaaccctaaaca

SEQ ID NO: 4858 - DNA, 20 bp, synthetic construct
  source 1..20: mol_type = other DNA
tacgacctagagattcgatc

SEQ ID NO: 4859 - DNA, 20 bp, synthetic construct
  source 1..20: mol_type = other DNA
ccacccatctactagctgat

SEQ ID NO: 4860 - DNA, 20 bp, synthetic construct
  source 1..20: mol_type = other DNA
gccatctactggatcatttg

SEQ ID NO: 4861 - DNA, 20 bp, synthetic construct
  source 1..20: mol_type = other DNA
gcaggtggcgagaggaactg

SEQ ID NO: 4862 - DNA, 20 bp, synthetic construct
  source 1..20: mol_type = other DNA
ggacgtttaagcaagggccc

SEQ ID NO: 4863 - DNA, 20 bp, synthetic construct
  source 1..20: mol_type = other DNA
gtaccaaattaactcgggag

SEQ ID NO: 4864 - DNA, 20 bp, synthetic construct
  source 1..20: mol_type = other DNA
tctagttgttaagcggatgc

SEQ ID NO: 4865 - DNA, 20 bp, synthetic construct
  source 1..20: mol_type = other DNA
cctttctaaccctgcggtct

SEQ ID NO: 4866 - DNA, 20 bp, synthetic construct
  source 1..20: mol_type = other DNA
gagcgttcattctcatgatg

SEQ ID NO: 4867 - DNA, 20 bp, synthetic construct
  source 1..20: mol_type = other DNA
gtaacctttatggctttgga

SEQ ID NO: 4868 - DNA, 20 bp, synthetic construct
  source 1..20: mol_type = other DNA
ccatctctttcaggccatca

SEQ ID NO: 4869 - DNA, 20 bp, synthetic construct
  source 1..20: mol_type = other DNA
ggagatctactttgggagcg

SEQ ID NO: 4870 - DNA, 20 bp, synthetic construct
  source 1..20: mol_type = other DNA
tgtaatgtcaagttggtggg

SEQ ID NO: 4871 - DNA, 20 bp, synthetic construct
  source 1..20: mol_type = other DNA
gataggcgatagggaggtta

SEQ ID NO: 4872 - DNA, 20 bp, synthetic construct
  source 1..20: mol_type = other DNA
ctacccggaactgactacgc

SEQ ID NO: 4873 - DNA, 20 bp, synthetic construct
  source 1..20: mol_type = other DNA
acctaagccgtcccgctgct

SEQ ID NO: 4874 - DNA, 20 bp, synthetic construct
  source 1..20: mol_type = other DNA
ccgatgctcaggtcctgctt

SEQ ID NO: 4875 - DNA, 20 bp, synthetic construct
  source 1..20: mol_type = other DNA
ccaagtgaaccgactacacg

SEQ ID NO: 4876 - DNA, 20 bp, synthetic construct
  source 1..20: mol_type = other DNA
ctagactgcagttctcacca

SEQ ID NO: 4877 - DNA, 20 bp, synthetic construct
  source 1..20: mol_type = other DNA
aagtaccgataatggacatg

SEQ ID NO: 4878 - DNA, 20 bp, synthetic construct
  source 1..20: mol_type = other DNA
aagtagggtgatgagcggcg

SEQ ID NO: 4879 - DNA, 20 bp, synthetic construct
  source 1..20: mol_type = other DNA
agcctctgtcattccttctt

SEQ ID NO: 4880 - DNA, 20 bp, synthetic construct
  source 1..20: mol_type = other DNA
acaccagggacgcgtcctct

SEQ ID NO: 4881 - DNA, 20 bp, synthetic construct
  source 1..20: mol_type = other DNA
tgactgttgcttgggtgctt

SEQ ID NO: 4882 - DNA, 20 bp, synthetic construct
  source 1..20: mol_type = other DNA
agatcccaagcctatgcgaa

SEQ ID NO: 4883 - DNA, 20 bp, synthetic construct
  source 1..20: mol_type = other DNA
ggctctcacctccggttgtc

SEQ ID NO: 4884 - DNA, 20 bp, synthetic construct
  source 1..20: mol_type = other DNA
tatcaggcatagctcaatgc

SEQ ID NO: 4885 - DNA, 20 bp, synthetic construct
  source 1..20: mol_type = other DNA
gaggaatagggaaatagagc

SEQ ID NO: 4886 - DNA, 20 bp, synthetic construct
  source 1..20: mol_type = other DNA
aattgataccaatttgcgcc

SEQ ID NO: 4887 - DNA, 20 bp, synthetic construct
  source 1..20: mol_type = other DNA
cccgccatgcggcattatca

SEQ ID NO: 4888 - DNA, 20 bp, synthetic construct
  source 1..20: mol_type = other DNA
ccgcgacgttcgtatttgtt

SEQ ID NO: 4889 - DNA, 20 bp, synthetic construct
  source 1..20: mol_type = other DNA
gagggcctgtcgataagtga

SEQ ID NO: 4890 - DNA, 20 bp, synthetic construct
  source 1..20: mol_type = other DNA
tttggagttatcagttcgca

SEQ ID NO: 4891 - DNA, 20 bp, synthetic construct
  source 1..20: mol_type = other DNA
ttcccgtcgcgaatcgtaca

SEQ ID NO: 4892 - DNA, 20 bp, synthetic construct
  source 1..20: mol_type = other DNA
acgtttcacttaacactacg

SEQ ID NO: 4893 - DNA, 20 bp, synthetic construct
  source 1..20: mol_type = other DNA
ggatcgccagtctctggtat

SEQ ID NO: 4894 - DNA, 20 bp, synthetic construct
  source 1..20: mol_type = other DNA
tactctaatggagcgccgga

SEQ ID NO: 4895 - DNA, 20 bp, synthetic construct
  source 1..20: mol_type = other DNA
tccaactcctgaagtacttg

SEQ ID NO: 4896 - DNA, 20 bp, synthetic construct
  source 1..20: mol_type = other DNA
gtggacagtaatgcagttgg

SEQ ID NO: 4897 - DNA, 20 bp, synthetic construct
  source 1..20: mol_type = other DNA
gacataataatgaacccacc

SEQ ID NO: 4898 - DNA, 20 bp, synthetic construct
  source 1..20: mol_type = other DNA
gcctacataggtgtgttatg

SEQ ID NO: 4899 - DNA, 20 bp, synthetic construct
  source 1..20: mol_type = other DNA
cgctaagccacgagactacg

SEQ ID NO: 4900 - DNA, 20 bp, synthetic construct
  source 1..20: mol_type = other DNA
tggagtgaacagtcccaggc

SEQ ID NO: 4901 - DNA, 20 bp, synthetic construct
  source 1..20: mol_type = other DNA
ttggttagcaacggtgcttg

SEQ ID NO: 4902 - DNA, 20 bp, synthetic construct
  source 1..20: mol_type = other DNA
gtgaacgtcagctttaaact

SEQ ID NO: 4903 - DNA, 20 bp, synthetic construct
  source 1..20: mol_type = other DNA
aggcagccgcccttaccaca

SEQ ID NO: 4904 - DNA, 20 bp, synthetic construct
  source 1..20: mol_type = other DNA
acttcccgatcgtttgattc

SEQ ID NO: 4905 - DNA, 20 bp, synthetic construct
  source 1..20: mol_type = other DNA
atccagagtaattgccctta

SEQ ID NO: 4906 - DNA, 20 bp, synthetic construct
  source 1..20: mol_type = other DNA
ctggaagggattacacctga

SEQ ID NO: 4907 - DNA, 20 bp, synthetic construct
  source 1..20: mol_type = other DNA
agttgccaattggtacagcg

SEQ ID NO: 4908 - DNA, 20 bp, synthetic construct
  source 1..20: mol_type = other DNA
gctatttcgtcgcatttaca

SEQ ID NO: 4909 - DNA, 20 bp, synthetic construct
  source 1..20: mol_type = other DNA
cgagttcccgtgacgtagat

SEQ ID NO: 4910 - DNA, 20 bp, synthetic construct
  source 1..20: mol_type = other DNA
gacaacacattcaaccagaa

SEQ ID NO: 4911 - DNA, 20 bp, synthetic construct
  source 1..20: mol_type = other DNA
aaatgtacgcgttatgcgaa

SEQ ID NO: 4912 - DNA, 20 bp, synthetic construct
  source 1..20: mol_type = other DNA
atgctttgtgactcctgctg

SEQ ID NO: 4913 - DNA, 20 bp, synthetic construct
  source 1..20: mol_type = other DNA
ggaatccatcctgtgtgact

SEQ ID NO: 4914 - DNA, 20 bp, synthetic construct
  source 1..20: mol_type = other DNA
tcacttacaccgataagggc

SEQ ID NO: 4915 - DNA, 20 bp, synthetic construct
  source 1..20: mol_type = other DNA
ctctgagaacgggcatacag

SEQ ID NO: 4916 - DNA, 20 bp, synthetic construct
  source 1..20: mol_type = other DNA
ctgctcagtgcatgactgcg

SEQ ID NO: 4917 - DNA, 20 bp, synthetic construct
  source 1..20: mol_type = other DNA
ttggtcgtgaatggtaggta

SEQ ID NO: 4918 - DNA, 20 bp, synthetic construct
  source 1..20: mol_type = other DNA
tcgaaggcgaacggcagaat

SEQ ID NO: 4919 - DNA, 20 bp, synthetic construct
  source 1..20: mol_type = other DNA
atccaaactctcatcacagg

SEQ ID NO: 4920 - DNA, 20 bp, synthetic construct
  source 1..20: mol_type = other DNA
gcaactgccaccgacacatc

SEQ ID NO: 4921 - DNA, 20 bp, synthetic construct
  source 1..20: mol_type = other DNA
gatggccgaaacaacaatcc

SEQ ID NO: 4922 - DNA, 20 bp, synthetic construct
  source 1..20: mol_type = other DNA
ccaggatttgagagcgatca

SEQ ID NO: 4923 - DNA, 20 bp, synthetic construct
  source 1..20: mol_type = other DNA
cgacgtccgtatgagggtcc

SEQ ID NO: 4924 - DNA, 20 bp, synthetic construct
  source 1..20: mol_type = other DNA
agtccgatctccatgcacat

SEQ ID NO: 4925 - DNA, 20 bp, synthetic construct
  source 1..20: mol_type = other DNA
ggtgggtacatcgtcttggg

SEQ ID NO: 4926 - DNA, 20 bp, synthetic construct
  source 1..20: mol_type = other DNA
atatggcgcatccatttata

SEQ ID NO: 4927 - DNA, 20 bp, synthetic construct
  source 1..20: mol_type = other DNA
gattgaacttacccaggcga

SEQ ID NO: 4928 - DNA, 20 bp, synthetic construct
  source 1..20: mol_type = other DNA
tcgcttgtggaacgttgatc

SEQ ID NO: 4929 - DNA, 20 bp, synthetic construct
  source 1..20: mol_type = other DNA
cgaattgctgtacgtagttg

SEQ ID NO: 4930 - DNA, 20 bp, synthetic construct
  source 1..20: mol_type = other DNA
ccagtagccatctgcttctg

SEQ ID NO: 4931 - DNA, 20 bp, synthetic construct
  source 1..20: mol_type = other DNA
ttaggtggatgtaggtcgtc

SEQ ID NO: 4932 - DNA, 20 bp, synthetic construct
  source 1..20: mol_type = other DNA
actaccatctgccgaaagtg

SEQ ID NO: 4933 - DNA, 20 bp, synthetic construct
  source 1..20: mol_type = other DNA
agcttaccaagtgaagatcc

SEQ ID NO: 4934 - DNA, 20 bp, synthetic construct
  source 1..20: mol_type = other DNA
tgtcgtagccggcgtaggaa

SEQ ID NO: 4935 - DNA, 20 bp, synthetic construct
  source 1..20: mol_type = other DNA
agttcgggcagcttcgagac

SEQ ID NO: 4936 - DNA, 20 bp, synthetic construct
  source 1..20: mol_type = other DNA
cgccgccttaagtaagtgct

SEQ ID NO: 4937 - DNA, 20 bp, synthetic construct
  source 1..20: mol_type = other DNA
ctccatgaagtgtggagtta

SEQ ID NO: 4938 - DNA, 20 bp, synthetic construct
  source 1..20: mol_type = other DNA
agtctcatacaagtatcgag

SEQ ID NO: 4939 - DNA, 20 bp, synthetic construct
  source 1..20: mol_type = other DNA
ggtcacaattgtgggttact

SEQ ID NO: 4940 - DNA, 20 bp, synthetic construct
  source 1..20: mol_type = other DNA
aatctccatgtcggacatgc

SEQ ID NO: 4941 - DNA, 20 bp, synthetic construct
  source 1..20: mol_type = other DNA
tctcttagacgtgtgtgcaa

SEQ ID NO: 4942 - DNA, 20 bp, synthetic construct
  source 1..20: mol_type = other DNA
cttgattagtacggtgcgct

SEQ ID NO: 4943 - DNA, 20 bp, synthetic construct
  source 1..20: mol_type = other DNA
acgggtgactgtacggtgca

SEQ ID NO: 4944 - DNA, 20 bp, synthetic construct
  source 1..20: mol_type = other DNA
agccggcctactttattcag

SEQ ID NO: 4945 - DNA, 20 bp, synthetic construct
  source 1..20: mol_type = other DNA
tagtaaagagcgagtggcgc

SEQ ID NO: 4946 - DNA, 20 bp, synthetic construct
  source 1..20: mol_type = other DNA
gccgattggacttacttaaa

SEQ ID NO: 4947 - DNA, 20 bp, synthetic construct
  source 1..20: mol_type = other DNA
ggactctgaccgtctatagc

SEQ ID NO: 4948 - DNA, 20 bp, synthetic construct
  source 1..20: mol_type = other DNA
agtacgcctgggtagggcag

SEQ ID NO: 4949 - DNA, 20 bp, synthetic construct
  source 1..20: mol_type = other DNA
agccttaggtatcggtttga

SEQ ID NO: 4950 - DNA, 20 bp, synthetic construct
  source 1..20: mol_type = other DNA
gtggagtcttgtctgagaag

SEQ ID NO: 4951 - DNA, 20 bp, synthetic construct
  source 1..20: mol_type = other DNA
ataaccttgcttatttcgca

SEQ ID NO: 4952 - DNA, 20 bp, synthetic construct
  source 1..20: mol_type = other DNA
gttactcgaatcttccatga

SEQ ID NO: 4953 - DNA, 20 bp, synthetic construct
  source 1..20: mol_type = other DNA
gtgttggcgaatcacaagtg

SEQ ID NO: 4954 - DNA, 20 bp, synthetic construct
  source 1..20: mol_type = other DNA
caacataggctgggctttga

SEQ ID NO: 4955 - DNA, 20 bp, synthetic construct
  source 1..20: mol_type = other DNA
tgtaagcggcacgtgggacg

SEQ ID NO: 4956 - DNA, 20 bp, synthetic construct
  source 1..20: mol_type = other DNA
ctattgcacacggtacgtct

SEQ ID NO: 4957 - DNA, 20 bp, synthetic construct
  source 1..20: mol_type = other DNA
gctacttgatagtatcgtgg

SEQ ID NO: 4958 - DNA, 20 bp, synthetic construct
  source 1..20: mol_type = other DNA
cgacaccatggcagcctgca

SEQ ID NO: 4959 - DNA, 20 bp, synthetic construct
  source 1..20: mol_type = other DNA
atacacgtcgcgggcaataa

SEQ ID NO: 4960 - DNA, 20 bp, synthetic construct
  source 1..20: mol_type = other DNA
tcttccgttagtcctgatcc

SEQ ID NO: 4961 - DNA, 20 bp, synthetic construct
  source 1..20: mol_type = other DNA
agcggaaggtagtgaggccc

SEQ ID NO: 4962 - DNA, 20 bp, synthetic construct
  source 1..20: mol_type = other DNA
tattagtagaaacgcaggat

SEQ ID NO: 4963 - DNA, 20 bp, synthetic construct
  source 1..20: mol_type = other DNA
gttcattacaatctcgcttc

SEQ ID NO: 4964 - DNA, 20 bp, synthetic construct
  source 1..20: mol_type = other DNA
aataaataccctgccgaacg

SEQ ID NO: 4965 - DNA, 20 bp, synthetic construct
  source 1..20: mol_type = other DNA
ttacacttcttaaagcactg

SEQ ID NO: 4966 - DNA, 20 bp, synthetic construct
  source 1..20: mol_type = other DNA
atgaaattaaagcgctcgaa

SEQ ID NO: 4967 - DNA, 20 bp, synthetic construct
  source 1..20: mol_type = other DNA
gggccattgtcagccttggt

SEQ ID NO: 4968 - DNA, 20 bp, synthetic construct
  source 1..20: mol_type = other DNA
ccactatagtatggccagtt

SEQ ID NO: 4969 - DNA, 20 bp, synthetic construct
  source 1..20: mol_type = other DNA
taacgtgcgtgtaagctcgg

SEQ ID NO: 4970 - DNA, 20 bp, synthetic construct
  source 1..20: mol_type = other DNA
gactattgacccacgtatta

SEQ ID NO: 4971 - DNA, 20 bp, synthetic construct
  source 1..20: mol_type = other DNA
tgtcccgtcagtgtggatgc

SEQ ID NO: 4972 - DNA, 20 bp, synthetic construct
  source 1..20: mol_type = other DNA
aaagacgaatacgaatctgg

SEQ ID NO: 4973 - DNA, 20 bp, synthetic construct
  source 1..20: mol_type = other DNA
agaagcactaaggtaagtga

SEQ ID NO: 4974 - DNA, 20 bp, synthetic construct
  source 1..20: mol_type = other DNA
cggtcattgtcctttggcag

SEQ ID NO: 4975 - DNA, 20 bp, synthetic construct
  source 1..20: mol_type = other DNA
ttgggatttatcctgtactt

SEQ ID NO: 4976 - DNA, 20 bp, synthetic construct
  source 1..20: mol_type = other DNA
atatcgaatctagggcattc

SEQ ID NO: 4977 - DNA, 20 bp, synthetic construct
  source 1..20: mol_type = other DNA
aagactgatcattgggctga

SEQ ID NO: 4978 - DNA, 20 bp, synthetic construct
  source 1..20: mol_type = other DNA
ggtatttgaggacctcgttg

SEQ ID NO: 4979 - DNA, 20 bp, synthetic construct
  source 1..20: mol_type = other DNA
cctgatggactataacgtac

SEQ ID NO: 4980 - DNA, 20 bp, synthetic construct
  source 1..20: mol_type = other DNA
ggagtatgagtttatgatcc

SEQ ID NO: 4981 - DNA, 20 bp, synthetic construct
  source 1..20: mol_type = other DNA
agtagaggccctaaccttcg

SEQ ID NO: 4982 - DNA, 20 bp, synthetic construct
  source 1..20: mol_type = other DNA
atccatggcctccaagttct

SEQ ID NO: 4983 - DNA, 20 bp, synthetic construct
  source 1..20: mol_type = other DNA
taacttccgaccataacata

SEQ ID NO: 4984 - DNA, 20 bp, synthetic construct
  source 1..20: mol_type = other DNA
gtgactgcgagaggacctgc

SEQ ID NO: 4985 - DNA, 20 bp, synthetic construct
  source 1..20: mol_type = other DNA
acgactctccagacaacacg

SEQ ID NO: 4986 - DNA, 20 bp, synthetic construct
  source 1..20: mol_type = other DNA
accacctccagcgccaactc

SEQ ID NO: 4987 - DNA, 20 bp, synthetic construct
  source 1..20: mol_type = other DNA
aacggtgtaactatgggtca

SEQ ID NO: 4988 - DNA, 20 bp, synthetic construct
  source 1..20: mol_type = other DNA
tcgtcggttgacgcgcaggt

SEQ ID NO: 4989 - DNA, 20 bp, synthetic construct
  source 1..20: mol_type = other DNA
acaaagaagggcagagaccg

SEQ ID NO: 4990 - DNA, 20 bp, synthetic construct
  source 1..20: mol_type = other DNA
agggacagttaacacataac

SEQ ID NO: 4991 - DNA, 20 bp, synthetic construct
  source 1..20: mol_type = other DNA
tgagtggatcacgtagttta

SEQ ID NO: 4992 - DNA, 20 bp, synthetic construct
  source 1..20: mol_type = other DNA
tctcgcaatttcgggcctcc

SEQ ID NO: 4993 - DNA, 20 bp, synthetic construct
  source 1..20: mol_type = other DNA
aggataaatggttgttaccc

SEQ ID NO: 4994 - DNA, 20 bp, synthetic construct
  source 1..20: mol_type = other DNA
ccgggattcgttacacggcc

SEQ ID NO: 4995 - DNA, 20 bp, synthetic construct
  source 1..20: mol_type = other DNA
tgcttgctgggaatgtgggt

SEQ ID NO: 4996 - DNA, 20 bp, synthetic construct
  source 1..20: mol_type = other DNA
acgaggacctcttaatagtc

SEQ ID NO: 4997 - DNA, 20 bp, synthetic construct
  source 1..20: mol_type = other DNA
gaaccaagaggattgaccac

SEQ ID NO: 4998 - DNA, 20 bp, synthetic construct
  source 1..20: mol_type = other DNA
tgttggatcgatataatggt

SEQ ID NO: 4999 - DNA, 20 bp, synthetic construct
  source 1..20: mol_type = other DNA
ccactgatatagtcatcgac

SEQ ID NO: 5000 - DNA, 20 bp, synthetic construct
  source 1..20: mol_type = other DNA
cgttacatgggtatgatgta

SEQ ID NO: 5001 - DNA, 20 bp, synthetic construct
  source 1..20: mol_type = other DNA
tgttgctggactcaattctt

SEQ ID NO: 5002 - DNA, 20 bp, synthetic construct
  source 1..20: mol_type = other DNA
atacataacgtaacaatccc

SEQ ID NO: 5003 - DNA, 20 bp, synthetic construct
  source 1..20: mol_type = other DNA
gtcttggctatgtcccggac

SEQ ID NO: 5004 - DNA, 20 bp, synthetic construct
  source 1..20: mol_type = other DNA
cgctaagtatagctacttat

SEQ ID NO: 5005 - DNA, 20 bp, synthetic construct
  source 1..20: mol_type = other DNA
tcactccgcgggttaaggtg

SEQ ID NO: 5006 - DNA, 20 bp, synthetic construct
  source 1..20: mol_type = other DNA
gcagtcagcacatgcactaa

SEQ ID NO: 5007 - DNA, 20 bp, synthetic construct
  source 1..20: mol_type = other DNA
gtccagagtccggatggtac

SEQ ID NO: 5008 - DNA, 20 bp, synthetic construct
  source 1..20: mol_type = other DNA
tcgagcaacaacgtgaagtc

SEQ ID NO: 5009 - DNA, 20 bp, synthetic construct
  source 1..20: mol_type = other DNA
gttcctgggcaggattgatt

SEQ ID NO: 5010 - DNA, 20 bp, synthetic construct
  source 1..20: mol_type = other DNA
cgatgcacggtgttcatatc

SEQ ID NO: 5011 - DNA, 20 bp, synthetic construct
  source 1..20: mol_type = other DNA
cagagacccagcccacattc

SEQ ID NO: 5012 - DNA, 20 bp, synthetic construct
  source 1..20: mol_type = other DNA
gagaaacccttgctccgaag

SEQ ID NO: 5013 - DNA, 20 bp, synthetic construct
  source 1..20: mol_type = other DNA
tgaatattacggccataact

SEQ ID NO: 5014 - DNA, 20 bp, synthetic construct
  source 1..20: mol_type = other DNA
cgctatgcacggtgaatcga

SEQ ID NO: 5015 - DNA, 20 bp, synthetic construct
  source 1..20: mol_type = other DNA
tctgccactccgagacagga

SEQ ID NO: 5016 - DNA, 20 bp, synthetic construct
  source 1..20: mol_type = other DNA
tatgccaaatgcgccacaaa

SEQ ID NO: 5017 - DNA, 20 bp, synthetic construct
  source 1..20: mol_type = other DNA
actgtaaagtattcgcggag

SEQ ID NO: 5018 - DNA, 20 bp, synthetic construct
  source 1..20: mol_type = other DNA
gtgcgttaagtctctggact

SEQ ID NO: 5019 - DNA, 20 bp, synthetic construct
  source 1..20: mol_type = other DNA
cgaaccctagcatagttaat

SEQ ID NO: 5020 - DNA, 20 bp, synthetic construct
  source 1..20: mol_type = other DNA
actcccatacgcatatatgc

SEQ ID NO: 5021 - DNA, 20 bp, synthetic construct
  source 1..20: mol_type = other DNA
cgacagatttgacctgagat

SEQ ID NO: 5022 - DNA, 20 bp, synthetic construct
  source 1..20: mol_type = other DNA
tctataacactattgtggct

SEQ ID NO: 5023 - DNA, 20 bp, synthetic construct
  source 1..20: mol_type = other DNA
ccactataccagccctctct

SEQ ID NO: 5024 - DNA, 20 bp, synthetic construct
  source 1..20: mol_type = other DNA
agggagcaactagacgtggg

SEQ ID NO: 5025 - DNA, 20 bp, synthetic construct
  source 1..20: mol_type = other DNA
tattagaagcatcggtcgcg

SEQ ID NO: 5026 - DNA, 20 bp, synthetic construct
  source 1..20: mol_type = other DNA
gtgaaacagggaattgctaa

SEQ ID NO: 5027 - DNA, 20 bp, synthetic construct
  source 1..20: mol_type = other DNA
ctttaatcagctcgcacagt

SEQ ID NO: 5028 - DNA, 20 bp, synthetic construct
  source 1..20: mol_type = other DNA
gtaagataagctacagcaga

SEQ ID NO: 5029 - DNA, 20 bp, synthetic construct
  source 1..20: mol_type = other DNA
cgacatgcccgcaaccttga

SEQ ID NO: 5030 - DNA, 20 bp, synthetic construct
  source 1..20: mol_type = other DNA
gaagtcatgacctctacatg

SEQ ID NO: 5031 - DNA, 20 bp, synthetic construct
  source 1..20: mol_type = other DNA
gttagatcgcaatgttgtag

SEQ ID NO: 5032 - DNA, 20 bp, synthetic construct
  source 1..20: mol_type = other DNA
tgacggagtataccgcatgg

SEQ ID NO: 5033 - DNA, 20 bp, synthetic construct
  source 1..20: mol_type = other DNA
aacagaggccttgatattca

SEQ ID NO: 5034 - DNA, 20 bp, synthetic construct
  source 1..20: mol_type = other DNA
attacgtctatcttcaaggg

SEQ ID NO: 5035 - DNA, 20 bp, synthetic construct
  source 1..20: mol_type = other DNA
tattagggtctttaaagctg

SEQ ID NO: 5036 - DNA, 20 bp, synthetic construct
  source 1..20: mol_type = other DNA
ggaggcccacaccacttcat

SEQ ID NO: 5037 - DNA, 20 bp, synthetic construct
  source 1..20: mol_type = other DNA
gtaccggtctcctatctgtg

SEQ ID NO: 5038 - DNA, 20 bp, synthetic construct
  source 1..20: mol_type = other DNA
gattagcttaggcccgcctc

SEQ ID NO: 5039 - DNA, 20 bp, synthetic construct
  source 1..20: mol_type = other DNA
cgccgcggtccgaaagatag

SEQ ID NO: 5040 - DNA, 20 bp, synthetic construct
  source 1..20: mol_type = other DNA
caataattcagagactagtg

SEQ ID NO: 5041 - DNA, 20 bp, synthetic construct
  source 1..20: mol_type = other DNA
ttgcaatgcgaatcaacaga

SEQ ID NO: 5042 - DNA, 20 bp, synthetic construct
  source 1..20: mol_type = other DNA
atttgaccggagcgcaaata

SEQ ID NO: 5043 - DNA, 20 bp, synthetic construct
  source 1..20: mol_type = other DNA
gaagtgccgagattggcaat

SEQ ID NO: 5044 - DNA, 20 bp, synthetic construct
  source 1..20: mol_type = other DNA
gagtaatgtagagccacata

SEQ ID NO: 5045 - DNA, 20 bp, synthetic construct
  source 1..20: mol_type = other DNA
cgccttgaaccagcccaacc

SEQ ID NO: 5046 - DNA, 20 bp, synthetic construct
  source 1..20: mol_type = other DNA
gcgcttactctacgtgcaca

SEQ ID NO: 5047 - DNA, 20 bp, synthetic construct
  source 1..20: mol_type = other DNA
cctcaggatgctaagagccc

SEQ ID NO: 5048 - DNA, 20 bp, synthetic construct
  source 1..20: mol_type = other DNA
atgcgctgcgcacggtaaat

SEQ ID NO: 5049 - DNA, 20 bp, synthetic construct
  source 1..20: mol_type = other DNA
tatatcgcatgattgcggga

SEQ ID NO: 5050 - DNA, 20 bp, synthetic construct
  source 1..20: mol_type = other DNA
ctactggtacgtgatcgtga

SEQ ID NO: 5051 - DNA, 20 bp, synthetic construct
  source 1..20: mol_type = other DNA
ccaactagggcctacatcga

SEQ ID NO: 5052 - DNA, 20 bp, synthetic construct
  source 1..20: mol_type = other DNA
cagcccgacgctagcctcga

SEQ ID NO: 5053 - DNA, 20 bp, synthetic construct
  source 1..20: mol_type = other DNA
acgacaagatactcagctgc

SEQ ID NO: 5054 - DNA, 20 bp, synthetic construct
  source 1..20: mol_type = other DNA
gctttcggtaagctacggag

SEQ ID NO: 5055 - DNA, 20 bp, synthetic construct
  source 1..20: mol_type = other DNA
gagccctgcaaagcacctat

SEQ ID NO: 5056 - DNA, 20 bp, synthetic construct
  source 1..20: mol_type = other DNA
taatagggccctgctttacc

SEQ ID NO: 5057 - DNA, 20 bp, synthetic construct
  source 1..20: mol_type = other DNA
ccactccaagcagagtatcc

SEQ ID NO: 5058 - DNA, 20 bp, synthetic construct
  source 1..20: mol_type = other DNA
ttatggtcagatgcgagaaa

SEQ ID NO: 5059 - DNA, 20 bp, synthetic construct
  source 1..20: mol_type = other DNA
gaattgtgcatgccaggcag

SEQ ID NO: 5060 - DNA, 20 bp, synthetic construct
  source 1..20: mol_type = other DNA
ctgacattctgcctaatgat

SEQ ID NO: 5061 - DNA, 20 bp, synthetic construct
  source 1..20: mol_type = other DNA
cattgccgcgctcttcacta

SEQ ID NO: 5062 - DNA, 20 bp, synthetic construct
  source 1..20: mol_type = other DNA
catcttggccgacacatagc

SEQ ID NO: 5063 - DNA, 20 bp, synthetic construct
  source 1..20: mol_type = other DNA
tccctcctactgtcagccac

SEQ ID NO: 5064 - DNA, 20 bp, synthetic construct
  source 1..20: mol_type = other DNA
agtagccgcacctggttagg

SEQ ID NO: 5065 - DNA, 20 bp, synthetic construct
  source 1..20: mol_type = other DNA
gacccgtgggctggtgaaga

SEQ ID NO: 5066 - DNA, 20 bp, synthetic construct
  source 1..20: mol_type = other DNA
attgccacaacgcttccctg

SEQ ID NO: 5067 - DNA, 20 bp, synthetic construct
  source 1..20: mol_type = other DNA
cgtaggtttcgggaattgaa

SEQ ID NO: 5068 - DNA, 20 bp, synthetic construct
  source 1..20: mol_type = other DNA
gaggttggtacatgactaag

SEQ ID NO: 5069 - DNA, 20 bp, synthetic construct
  source 1..20: mol_type = other DNA
cttcgcgacccacatgtcag

SEQ ID NO: 5070 - DNA, 20 bp, synthetic construct
  source 1..20: mol_type = other DNA
cggactgttccaggtttaga

SEQ ID NO: 5071 - DNA, 20 bp, synthetic construct
  source 1..20: mol_type = other DNA
cgccctgatcgtacatagaa

SEQ ID NO: 5072 - DNA, 20 bp, synthetic construct
  source 1..20: mol_type = other DNA
taggaatttctggaacggga

SEQ ID NO: 5073 - DNA, 20 bp, synthetic construct
  source 1..20: mol_type = other DNA
tgtggtcatagggcgagtcc

SEQ ID NO: 5074 - DNA, 20 bp, synthetic construct
  source 1..20: mol_type = other DNA
ccaatcttacgtctaacatc

SEQ ID NO: 5075 - DNA, 20 bp, synthetic construct
  source 1..20: mol_type = other DNA
ttcatggtcaatcgtagctc

SEQ ID NO: 5076 - DNA, 20 bp, synthetic construct
  source 1..20: mol_type = other DNA
gcttcgatggtcgctcccaa

SEQ ID NO: 5077 - DNA, 20 bp, synthetic construct
  source 1..20: mol_type = other DNA
ctcatgcactttcggtctct

SEQ ID NO: 5078 - DNA, 20 bp, synthetic construct
  source 1..20: mol_type = other DNA
tttgactagatccgccagtt

SEQ ID NO: 5079 - DNA, 20 bp, synthetic construct
  source 1..20: mol_type = other DNA
cactctcgcatacgtcatta

SEQ ID NO: 5080 - DNA, 20 bp, synthetic construct
  source 1..20: mol_type = other DNA
ccgagaattatcatctgacg

SEQ ID NO: 5081 - DNA, 20 bp, synthetic construct
  source 1..20: mol_type = other DNA
tagttgcctggtgctcgcaa

SEQ ID NO: 5082 - DNA, 20 bp, synthetic construct
  source 1..20: mol_type = other DNA
agcaagcggccatacgggat

SEQ ID NO: 5083 - DNA, 20 bp, synthetic construct
  source 1..20: mol_type = other DNA
gcaggtccttcgtgggagag

SEQ ID NO: 5084 - DNA, 20 bp, synthetic construct
  source 1..20: mol_type = other DNA
aaacagcgtgtgtgcttcag

SEQ ID NO: 5085 - DNA, 20 bp, synthetic construct
  source 1..20: mol_type = other DNA
tcagagcctcggccaaacct

SEQ ID NO: 5086 - DNA, 20 bp, synthetic construct
  source 1..20: mol_type = other DNA
gcattgcgcgcgaaggttca

SEQ ID NO: 5087 - DNA, 20 bp, synthetic construct
  source 1..20: mol_type = other DNA
gcggcgttggtcttcatatc

SEQ ID NO: 5088 - DNA, 20 bp, synthetic construct
  source 1..20: mol_type = other DNA
agtggaacttcaataagctc

SEQ ID NO: 5089 - DNA, 20 bp, synthetic construct
  source 1..20: mol_type = other DNA
aggcaggaggaaagtaaagg

SEQ ID NO: 5090 - DNA, 20 bp, synthetic construct
  source 1..20: mol_type = other DNA
tcttaacaccgctggttata

SEQ ID NO: 5091 - DNA, 20 bp, synthetic construct
  source 1..20: mol_type = other DNA
tccgtccttaagagtacagc

SEQ ID NO: 5092 - DNA, 20 bp, synthetic construct
  source 1..20: mol_type = other DNA
gtgatttactaaaggtactg

SEQ ID NO: 5093 - DNA, 20 bp, synthetic construct
  source 1..20: mol_type = other DNA
gtgttcttcggccgctaagc

SEQ ID NO: 5094 - DNA, 20 bp, synthetic construct
  source 1..20: mol_type = other DNA
gagacagaactgctcttgag

SEQ ID NO: 5095 - DNA, 20 bp, synthetic construct
  source 1..20: mol_type = other DNA
catcgctcctgtcttgcaaa

SEQ ID NO: 5096 - DNA, 20 bp, synthetic construct
  source 1..20: mol_type = other DNA
tcagcaattcttgactctgc

SEQ ID NO: 5097 - DNA, 20 bp, synthetic construct
  source 1..20: mol_type = other DNA
ggaagttgatttacccgtgt

SEQ ID NO: 5098 - DNA, 20 bp, synthetic construct
  source 1..20: mol_type = other DNA
tccctagggtttagggttaa

SEQ ID NO: 5099 - DNA, 20 bp, synthetic construct
  source 1..20: mol_type = other DNA
ggcctggtagaactgttatg

SEQ ID NO: 5100 - DNA, 20 bp, synthetic construct
  source 1..20: mol_type = other DNA
aacacgtattggttcttgag

SEQ ID NO: 5101 - DNA, 20 bp, synthetic construct
  source 1..20: mol_type = other DNA
tgtagatcggcgagacggga

SEQ ID NO: 5102 - DNA, 20 bp, synthetic construct
  source 1..20: mol_type = other DNA
agatcgttaatgatggcata

SEQ ID NO: 5103 - DNA, 20 bp, synthetic construct
  source 1..20: mol_type = other DNA
aataaggacccactccgtgg

SEQ ID NO: 5104 - DNA, 20 bp, synthetic construct
  source 1..20: mol_type = other DNA
gccaagtatgaggcgttaga

SEQ ID NO: 5105 - DNA, 20 bp, synthetic construct
  source 1..20: mol_type = other DNA
taccgggcaagccgggaagt

SEQ ID NO: 5106 - DNA, 20 bp, synthetic construct
  source 1..20: mol_type = other DNA
ttagctctccacaggagaaa

SEQ ID NO: 5107 - DNA, 20 bp, synthetic construct
  source 1..20: mol_type = other DNA
ggagtcattggaccctaacc

SEQ ID NO: 5108 - DNA, 20 bp, synthetic construct
  source 1..20: mol_type = other DNA
tcggacgtctacggttcgcg

SEQ ID NO: 5109 - DNA, 20 bp, synthetic construct
  source 1..20: mol_type = other DNA
ggaacgtaatacttcaggtc

SEQ ID NO: 5110 - DNA, 20 bp, synthetic construct
  source 1..20: mol_type = other DNA
gacctccatgaacctgagga

SEQ ID NO: 5111 - DNA, 20 bp, synthetic construct
  source 1..20: mol_type = other DNA
agtgcccaattctaatgtac

SEQ ID NO: 5112 - DNA, 20 bp, synthetic construct
  source 1..20: mol_type = other DNA
acttagcgacaaacgccggc

SEQ ID NO: 5113 - DNA, 20 bp, synthetic construct
  source 1..20: mol_type = other DNA
ggcagtagttacccgtctct

SEQ ID NO: 5114 - DNA, 20 bp, synthetic construct
  source 1..20: mol_type = other DNA
tcttaccgccctgaacgcca

SEQ ID NO: 5115 - DNA, 20 bp, synthetic construct
  source 1..20: mol_type = other DNA
gacaccgtgccaatgtgatg

SEQ ID NO: 5116 - DNA, 20 bp, synthetic construct
  source 1..20: mol_type = other DNA
ctaagttccgacctaagggc

SEQ ID NO: 5117 - DNA, 20 bp, synthetic construct
  source 1..20: mol_type = other DNA
tttagattacgcggtcaagt

SEQ ID NO: 5118 - DNA, 20 bp, synthetic construct
  source 1..20: mol_type = other DNA
cttgcgtctaagaatgcatc

SEQ ID NO: 5119 - DNA, 20 bp, synthetic construct
  source 1..20: mol_type = other DNA
gcggcggactcagatgtgta

SEQ ID NO: 5120 - DNA, 20 bp, synthetic construct
  source 1..20: mol_type = other DNA
tctttcgctataggaacggt

SEQ ID NO: 5121 - DNA, 20 bp, synthetic construct
  source 1..20: mol_type = other DNA
cccacctcagcgtgcttacc

SEQ ID NO: 5122 - DNA, 20 bp, synthetic construct
  source 1..20: mol_type = other DNA
cctggaggacaatgcatcgc

SEQ ID NO: 5123 - DNA, 20 bp, synthetic construct
  source 1..20: mol_type = other DNA
tgatgccatacaaccgttat

SEQ ID NO: 5124 - DNA, 20 bp, synthetic construct
  source 1..20: mol_type = other DNA
aactatcagtatttactcgg

SEQ ID NO: 5125 - DNA, 20 bp, synthetic construct
  source 1..20: mol_type = other DNA
aaagtcatctgaggtcatat

SEQ ID NO: 5126 - DNA, 20 bp, synthetic construct
  source 1..20: mol_type = other DNA
atatcgagaatggcacgtaa

SEQ ID NO: 5127 - DNA, 20 bp, synthetic construct
  source 1..20: mol_type = other DNA
tcctgacctcttggagaaca

SEQ ID NO: 5128 - DNA, 20 bp, synthetic construct
  source 1..20: mol_type = other DNA
cagcgtcttcgtccaaatga

SEQ ID NO: 5129 - DNA, 20 bp, synthetic construct
  source 1..20: mol_type = other DNA
caggcttctgttgggacctt

SEQ ID NO: 5130 - DNA, 20 bp, synthetic construct
  source 1..20: mol_type = other DNA
tatcagcccaatgtttgtct

SEQ ID NO: 5131 - DNA, 20 bp, synthetic construct
  source 1..20: mol_type = other DNA
gtttacctgggtagccttcc

SEQ ID NO: 5132 - DNA, 20 bp, synthetic construct
  source 1..20: mol_type = other DNA
tgccgtcagaatatctttca

SEQ ID NO: 5133 - DNA, 20 bp, synthetic construct
  source 1..20: mol_type = other DNA
gtaatgtctgattcaccata

SEQ ID NO: 5134 - DNA, 20 bp, synthetic construct
  source 1..20: mol_type = other DNA
tgtcatattcctctggcgac

SEQ ID NO: 5135 - DNA, 20 bp, synthetic construct
  source 1..20: mol_type = other DNA
gagtggaagccataaacacg

SEQ ID NO: 5136 - DNA, 20 bp, synthetic construct
  source 1..20: mol_type = other DNA
cgatgctaggctcgcactgg

SEQ ID NO: 5137 - DNA, 20 bp, synthetic construct
  source 1..20: mol_type = other DNA
acataggtcctgacgctcat

SEQ ID NO: 5138 - DNA, 20 bp, synthetic construct
  source 1..20: mol_type = other DNA
gatccggcgagctgatcgat

SEQ ID NO: 5139 - DNA, 20 bp, synthetic construct
  source 1..20: mol_type = other DNA
gcgcgcacctttaattattg

SEQ ID NO: 5140 - DNA, 20 bp, synthetic construct
  source 1..20: mol_type = other DNA
gcttaatgaagccaaacact

SEQ ID NO: 5141 - DNA, 20 bp, synthetic construct
  source 1..20: mol_type = other DNA
tacgagggacatgggatcga

SEQ ID NO: 5142 - DNA, 20 bp, synthetic construct
  source 1..20: mol_type = other DNA
cccttccgacaggaactcag

SEQ ID NO: 5143 - DNA, 20 bp, synthetic construct
  source 1..20: mol_type = other DNA
ttctacgctatcagtttgag

SEQ ID NO: 5144 - DNA, 20 bp, synthetic construct
  source 1..20: mol_type = other DNA
ttcgagaatcctggagggat

SEQ ID NO: 5145 - DNA, 20 bp, synthetic construct
  source 1..20: mol_type = other DNA
tgatttatgtgcactcttag

SEQ ID NO: 5146 - DNA, 20 bp, synthetic construct
  source 1..20: mol_type = other DNA
attgagttgaaccagaccgg

SEQ ID NO: 5147 - DNA, 20 bp, synthetic construct
  source 1..20: mol_type = other DNA
tgcctaaacgggcatcgatg

SEQ ID NO: 5148 - DNA, 20 bp, synthetic construct
  source 1..20: mol_type = other DNA
gggcaccgagctacgatcgg

SEQ ID NO: 5149 - DNA, 20 bp, synthetic construct
  source 1..20: mol_type = other DNA
cagcacattcacataccaaa

SEQ ID NO: 5150 - DNA, 20 bp, synthetic construct
  source 1..20: mol_type = other DNA
aacctctgtccgcgtgacgg

SEQ ID NO: 5151 - DNA, 20 bp, synthetic construct
  source 1..20: mol_type = other DNA
gctaccacgcaagggcacaa

SEQ ID NO: 5152 - DNA, 20 bp, synthetic construct
  source 1..20: mol_type = other DNA
acggaactatggctatccgt

SEQ ID NO: 5153 - DNA, 20 bp, synthetic construct
  source 1..20: mol_type = other DNA
ttcattcgttgattatgacg

SEQ ID NO: 5154 - DNA, 20 bp, synthetic construct
  source 1..20: mol_type = other DNA
gctcgatgactgtaccctca

SEQ ID NO: 5155 - DNA, 20 bp, synthetic construct
  source 1..20: mol_type = other DNA
aacaacggcacagtggcctt

SEQ ID NO: 5156 - DNA, 20 bp, synthetic construct
  source 1..20: mol_type = other DNA
agttaggtaactctggatca

SEQ ID NO: 5157 - DNA, 20 bp, synthetic construct
  source 1..20: mol_type = other DNA
caccaggccagaacaactag

SEQ ID NO: 5158 - DNA, 20 bp, synthetic construct
  source 1..20: mol_type = other DNA
tcaaattcgtttcactacac

SEQ ID NO: 5159 - DNA, 20 bp, synthetic construct
  source 1..20: mol_type = other DNA
aatgttaaagccgctcggtg

SEQ ID NO: 5160 - DNA, 20 bp, synthetic construct
  source 1..20: mol_type = other DNA
gcttcatggagaattaccag

SEQ ID NO: 5161 - DNA, 20 bp, synthetic construct
  source 1..20: mol_type = other DNA
acgtaagtagacggtagtgc

SEQ ID NO: 5162 - DNA, 20 bp, synthetic construct
  source 1..20: mol_type = other DNA
ctagtcaacagtggcatgtt

SEQ ID NO: 5163 - DNA, 20 bp, synthetic construct
  source 1..20: mol_type = other DNA
ccgaccgcgtctctaccaag

SEQ ID NO: 5164 - DNA, 20 bp, synthetic construct
  source 1..20: mol_type = other DNA
tgaagatttggctcgctcaa

SEQ ID NO: 5165 - DNA, 20 bp, synthetic construct
  source 1..20: mol_type = other DNA
actatgggacggcgaagtcg

SEQ ID NO: 5166 - DNA, 20 bp, synthetic construct
  source 1..20: mol_type = other DNA
gtgattcgcccgtgcgaaac

SEQ ID NO: 5167 - DNA, 20 bp, synthetic construct
  source 1..20: mol_type = other DNA
gggttcatgttagcgcgtcc

SEQ ID NO: 5168 - DNA, 20 bp, synthetic construct
  source 1..20: mol_type = other DNA
aggaatttgctcaggcgcgg

SEQ ID NO: 5169 - DNA, 20 bp, synthetic construct
  source 1..20: mol_type = other DNA
gcgggttagggtgagctgtg

SEQ ID NO: 5170 - DNA, 20 bp, synthetic construct
  source 1..20: mol_type = other DNA
gggttaataaatcttccgca

SEQ ID NO: 5171 - DNA, 20 bp, synthetic construct
  source 1..20: mol_type = other DNA
ctcgacggtttaactctaaa

SEQ ID NO: 5172 - DNA, 20 bp, synthetic construct
  source 1..20: mol_type = other DNA
gcagtacaaaggagtgtgag

SEQ ID NO: 5173 - DNA, 20 bp, synthetic construct
  source 1..20: mol_type = other DNA
tgcctggttgcaatgtgctg

SEQ ID NO: 5174 - DNA, 20 bp, synthetic construct
  source 1..20: mol_type = other DNA
atccggagctacctacacct

SEQ ID NO: 5175 - DNA, 20 bp, synthetic construct
  source 1..20: mol_type = other DNA
ccaaatagcgttcacaaatt

SEQ ID NO: 5176 - DNA, 20 bp, synthetic construct
  source 1..20: mol_type = other DNA
cctccacgtataaccagcag

SEQ ID NO: 5177 - DNA, 20 bp, synthetic construct
  source 1..20: mol_type = other DNA
gagtttattgttgtcgtggg

SEQ ID NO: 5178 - DNA, 20 bp, synthetic construct
  source 1..20: mol_type = other DNA
agcaacgttcagtcgaggta

SEQ ID NO: 5179 - DNA, 20 bp, synthetic construct
  source 1..20: mol_type = other DNA
cacgcctttagactatttgc

SEQ ID NO: 5180 - DNA, 20 bp, synthetic construct
  source 1..20: mol_type = other DNA
tcgctgctgtaaaggttgga

SEQ ID NO: 5181 - DNA, 20 bp, synthetic construct
  source 1..20: mol_type = other DNA
tccggtaagttccgagatag

SEQ ID NO: 5182 - DNA, 20 bp, synthetic construct
  source 1..20: mol_type = other DNA
cgtaaagcaggattactgtg

SEQ ID NO: 5183 - DNA, 20 bp, synthetic construct
  source 1..20: mol_type = other DNA
tgagtacaaccaagaaactc

SEQ ID NO: 5184 - DNA, 20 bp, synthetic construct
  source 1..20: mol_type = other DNA
gtagatgtcataatcccatg

SEQ ID NO: 5185 - DNA, 20 bp, synthetic construct
  source 1..20: mol_type = other DNA
tggtttaactctggcaacca

SEQ ID NO: 5186 - DNA, 20 bp, synthetic construct
  source 1..20: mol_type = other DNA
cgcacgccttgtgcctagtt

SEQ ID NO: 5187 - DNA, 20 bp, synthetic construct
  source 1..20: mol_type = other DNA
gctaaccgtaaatagcctga

SEQ ID NO: 5188 - DNA, 20 bp, synthetic construct
  source 1..20: mol_type = other DNA
tatgaatagagcaatgacgt

SEQ ID NO: 5189 - DNA, 20 bp, synthetic construct
  source 1..20: mol_type = other DNA
caatactttaacatcagtcc

SEQ ID NO: 5190 - DNA, 20 bp, synthetic construct
  source 1..20: mol_type = other DNA
acttgcagagcatatgttcg

SEQ ID NO: 5191 - DNA, 20 bp, synthetic construct
  source 1..20: mol_type = other DNA
ggaatgagtgtcgcgactga

SEQ ID NO: 5192 - DNA, 20 bp, synthetic construct
  source 1..20: mol_type = other DNA
catagctacagattagatgc

SEQ ID NO: 5193 - DNA, 20 bp, synthetic construct
  source 1..20: mol_type = other DNA
ccttatggcgttccgtctac

SEQ ID NO: 5194 - DNA, 20 bp, synthetic construct
  source 1..20: mol_type = other DNA
ctcctgaacacaccagaaac

SEQ ID NO: 5195 - DNA, 20 bp, synthetic construct
  source 1..20: mol_type = other DNA
ctcacacagcgtggcagaat

SEQ ID NO: 5196 - DNA, 20 bp, synthetic construct
  source 1..20: mol_type = other DNA
gtagtagcctacgaattgcc

SEQ ID NO: 5197 - DNA, 20 bp, synthetic construct
  source 1..20: mol_type = other DNA
tggtggtatcgcgcttagta

SEQ ID NO: 5198 - DNA, 20 bp, synthetic construct
  source 1..20: mol_type = other DNA
gcgaagaatgcttgttcaac

SEQ ID NO: 5199 - DNA, 20 bp, synthetic construct
  source 1..20: mol_type = other DNA
gtcgtgtcgcctggaactct

SEQ ID NO: 5200 - DNA, 20 bp, synthetic construct
  source 1..20: mol_type = other DNA
gttgatcagcctgtctttcc

SEQ ID NO: 5201 - DNA, 20 bp, synthetic construct
  source 1..20: mol_type = other DNA
aacttgacgtctacccgaac

SEQ ID NO: 5202 - DNA, 20 bp, synthetic construct
  source 1..20: mol_type = other DNA
tgggcaaactcttaactcgt

SEQ ID NO: 5203 - DNA, 20 bp, synthetic construct
  source 1..20: mol_type = other DNA
ctcttacacttccataagtt

SEQ ID NO: 5204 - DNA, 20 bp, synthetic construct
  source 1..20: mol_type = other DNA
tacagaagttgcattagaac

SEQ ID NO: 5205 - DNA, 20 bp, synthetic construct
  source 1..20: mol_type = other DNA
atcaacccaatccgattgca

SEQ ID NO: 5206 - DNA, 20 bp, synthetic construct
  source 1..20: mol_type = other DNA
ggtcaggtttcagcttgtta

SEQ ID NO: 5207 - DNA, 20 bp, synthetic construct
  source 1..20: mol_type = other DNA
taggcttaagttgaccacat

SEQ ID NO: 5208 - DNA, 20 bp, synthetic construct
  source 1..20: mol_type = other DNA
gttgcgtattagtccgcgtg

SEQ ID NO: 5209 - DNA, 20 bp, synthetic construct
  source 1..20: mol_type = other DNA
atgtcaacgggatccgtgtg

SEQ ID NO: 5210 - DNA, 20 bp, synthetic construct
  source 1..20: mol_type = other DNA
tgcgagatatatgtgtgata

SEQ ID NO: 5211 - DNA, 20 bp, synthetic construct
  source 1..20: mol_type = other DNA
gcgtcgagtggatagcgcac

SEQ ID NO: 5212 - DNA, 20 bp, synthetic construct
  source 1..20: mol_type = other DNA
gcaattcattctggcgggtc

SEQ ID NO: 5213 - DNA, 20 bp, synthetic construct
  source 1..20: mol_type = other DNA
gacgtccactgtcacactct

SEQ ID NO: 5214 - DNA, 20 bp, synthetic construct
  source 1..20: mol_type = other DNA
atcacccgattcgatccacg

SEQ ID NO: 5215 - DNA, 20 bp, synthetic construct
  source 1..20: mol_type = other DNA
aggcaaatcactatccttga

SEQ ID NO: 5216 - DNA, 20 bp, synthetic construct
  source 1..20: mol_type = other DNA
ctgcctggcattcttactac

SEQ ID NO: 5217 - DNA, 20 bp, synthetic construct
  source 1..20: mol_type = other DNA
ggtgcggtatatagtgattt

SEQ ID NO: 5218 - DNA, 20 bp, synthetic construct
  source 1..20: mol_type = other DNA
acagggagacagatcacaat

SEQ ID NO: 5219 - DNA, 20 bp, synthetic construct
  source 1..20: mol_type = other DNA
ggttaagcaaagctcgggag

SEQ ID NO: 5220 - DNA, 20 bp, synthetic construct
  source 1..20: mol_type = other DNA
ttaaccgatatgtggacacg

SEQ ID NO: 5221 - DNA, 20 bp, synthetic construct
  source 1..20: mol_type = other DNA
tcgctggaatcaccgcagag

SEQ ID NO: 5222 - DNA, 20 bp, synthetic construct
  source 1..20: mol_type = other DNA
gatgctgatagattcccgcc

SEQ ID NO: 5223 - DNA, 20 bp, synthetic construct
  source 1..20: mol_type = other DNA
gggtcagggtctgaactgtg

SEQ ID NO: 5224 - DNA, 20 bp, synthetic construct
  source 1..20: mol_type = other DNA
tctgctgagaccgctattcc

SEQ ID NO: 5225 - DNA, 20 bp, synthetic construct
  source 1..20: mol_type = other DNA
ctctaggcacggatgttaag

SEQ ID NO: 5226 - DNA, 20 bp, synthetic construct
  source 1..20: mol_type = other DNA
cgagcccgagaaactagccc

SEQ ID NO: 5227 - DNA, 20 bp, synthetic construct
  source 1..20: mol_type = other DNA
gaactgtcgtatatgtggat

SEQ ID NO: 5228 - DNA, 20 bp, synthetic construct
  source 1..20: mol_type = other DNA
tccagctgctttagtattcg

SEQ ID NO: 5229 - DNA, 20 bp, synthetic construct
  source 1..20: mol_type = other DNA
gcttacgcgaacacgttctt

SEQ ID NO: 5230 - DNA, 20 bp, synthetic construct
  source 1..20: mol_type = other DNA
cgatgactaccatcttacac

SEQ ID NO: 5231 - DNA, 20 bp, synthetic construct
  source 1..20: mol_type = other DNA
cgattgcgatggtcatcttt

SEQ ID NO: 5232 - DNA, 20 bp, synthetic construct
  source 1..20: mol_type = other DNA
aaattggctaacgccataca

SEQ ID NO: 5233 - DNA, 20 bp, synthetic construct
  source 1..20: mol_type = other DNA
cgatatgtccctgaccgtcc

SEQ ID NO: 5234 - DNA, 20 bp, synthetic construct
  source 1..20: mol_type = other DNA
cacttcatgtccagtcagta

SEQ ID NO: 5235 - DNA, 20 bp, synthetic construct
  source 1..20: mol_type = other DNA
tctgtagcgtatcgcattag

SEQ ID NO: 5236 - DNA, 20 bp, synthetic construct
  source 1..20: mol_type = other DNA
catagagagctaggatggaa

SEQ ID NO: 5237 - DNA, 20 bp, synthetic construct
  source 1..20: mol_type = other DNA
cagacttgtcacaagaagca

SEQ ID NO: 5238 - DNA, 20 bp, synthetic construct
  source 1..20: mol_type = other DNA
cagcaccattcgacgacgtc

SEQ ID NO: 5239 - DNA, 20 bp, synthetic construct
  source 1..20: mol_type = other DNA
gcactttcatgcgaaactag

SEQ ID NO: 5240 - DNA, 20 bp, synthetic construct
  source 1..20: mol_type = other DNA
taagcaactattgccctctt

SEQ ID NO: 5241 - DNA, 20 bp, synthetic construct
  source 1..20: mol_type = other DNA
cagtaaggaatctcaagtgc

SEQ ID NO: 5242 - DNA, 20 bp, synthetic construct
  source 1..20: mol_type = other DNA
tgcgatgttaggagaggacg

SEQ ID NO: 5243 - DNA, 20 bp, synthetic construct
  source 1..20: mol_type = other DNA
ccttagtccatggtatctga

SEQ ID NO: 5244 - DNA, 20 bp, synthetic construct
  source 1..20: mol_type = other DNA
atcaccaagttagatactca

SEQ ID NO: 5245 - DNA, 20 bp, synthetic construct
  source 1..20: mol_type = other DNA
tcaccatgtaggacgaatag

SEQ ID NO: 5246 - DNA, 20 bp, synthetic construct
  source 1..20: mol_type = other DNA
gattacgattgctagctaag

SEQ ID NO: 5247 - DNA, 20 bp, synthetic construct
  source 1..20: mol_type = other DNA
ttagaacccgcagtggtgtc

SEQ ID NO: 5248 - DNA, 20 bp, synthetic construct
  source 1..20: mol_type = other DNA
ggacctggaatatacatcca

SEQ ID NO: 5249 - DNA, 20 bp, synthetic construct
  source 1..20: mol_type = other DNA
agggctttctcgaatgcaga

SEQ ID NO: 5250 - DNA, 20 bp, synthetic construct
  source 1..20: mol_type = other DNA
aagtttgtccgactcttccg

SEQ ID NO: 5251 - DNA, 20 bp, synthetic construct
  source 1..20: mol_type = other DNA
gcaactagttcctcaacgtg

SEQ ID NO: 5252 - DNA, 20 bp, synthetic construct
  source 1..20: mol_type = other DNA
tacggttattcgaacgaagt

SEQ ID NO: 5253 - DNA, 20 bp, synthetic construct
  source 1..20: mol_type = other DNA
ttgtaagcccagatttgaca

SEQ ID NO: 5254 - DNA, 20 bp, synthetic construct
  source 1..20: mol_type = other DNA
tcctggtagccgctaacgca

SEQ ID NO: 5255 - DNA, 20 bp, synthetic construct
  source 1..20: mol_type = other DNA
aaatcgccaggcaatggcac

SEQ ID NO: 5256 - DNA, 20 bp, synthetic construct
  source 1..20: mol_type = other DNA
ggtgatttaacggttggccc

SEQ ID NO: 5257 - DNA, 20 bp, synthetic construct
  source 1..20: mol_type = other DNA
aagtctaactcgtctcgctt

SEQ ID NO: 5258 - DNA, 20 bp, synthetic construct
  source 1..20: mol_type = other DNA
ttctcaatagcgtacagacc

SEQ ID NO: 5259 - DNA, 20 bp, synthetic construct
  source 1..20: mol_type = other DNA
gttctgccgtctccacacgt

SEQ ID NO: 5260 - DNA, 20 bp, synthetic construct
  source 1..20: mol_type = other DNA
gcctttattatcacgacgat

SEQ ID NO: 5261 - DNA, 20 bp, synthetic construct
  source 1..20: mol_type = other DNA
gttgcgctgtcgcgcatgct

SEQ ID NO: 5262 - DNA, 20 bp, synthetic construct
  source 1..20: mol_type = other DNA
attctcgggtgtcgcctgaa

SEQ ID NO: 5263 - DNA, 20 bp, synthetic construct
  source 1..20: mol_type = other DNA
tgcgttactccgcaacagcc

SEQ ID NO: 5264 - DNA, 20 bp, synthetic construct
  source 1..20: mol_type = other DNA
tctctcatgagtcctatggt

SEQ ID NO: 5265 - DNA, 20 bp, synthetic construct
  source 1..20: mol_type = other DNA
aacctaagtccgtaatgact

SEQ ID NO: 5266 - DNA, 20 bp, synthetic construct
  source 1..20: mol_type = other DNA
ttgatgtgttatgttcggtt

SEQ ID NO: 5267 - DNA, 20 bp, synthetic construct
  source 1..20: mol_type = other DNA
tggtatataacggcattgtt

SEQ ID NO: 5268 - DNA, 20 bp, synthetic construct
  source 1..20: mol_type = other DNA
gcgcggaatcgctaaccttc

SEQ ID NO: 5269 - DNA, 20 bp, synthetic construct
  source 1..20: mol_type = other DNA
gaacccgtggtggtgggaga

SEQ ID NO: 5270 - DNA, 20 bp, synthetic construct
  source 1..20: mol_type = other DNA
ggcgaaccagttattgtcgc

SEQ ID NO: 5271 - DNA, 20 bp, synthetic construct
  source 1..20: mol_type = other DNA
gcgactaacttaatgcgcct

SEQ ID NO: 5272 - DNA, 20 bp, synthetic construct
  source 1..20: mol_type = other DNA
attactgcagatgttctcgt

SEQ ID NO: 5273 - DNA, 20 bp, synthetic construct
  source 1..20: mol_type = other DNA
cggtcgctccttatatacct

SEQ ID NO: 5274 - DNA, 20 bp, synthetic construct
  source 1..20: mol_type = other DNA
gttgaccatttctggaggct

SEQ ID NO: 5275 - DNA, 20 bp, synthetic construct
  source 1..20: mol_type = other DNA
attagaaacggcgatgccac

SEQ ID NO: 5276 - DNA, 20 bp, synthetic construct
  source 1..20: mol_type = other DNA
gaaagtattgcacagatggt

SEQ ID NO: 5277 - DNA, 20 bp, synthetic construct
  source 1..20: mol_type = other DNA
taacctggtctcgtgacctt

SEQ ID NO: 5278 - DNA, 20 bp, synthetic construct
  source 1..20: mol_type = other DNA
tatctggcacccggcgatcg

SEQ ID NO: 5279 - DNA, 20 bp, synthetic construct
  source 1..20: mol_type = other DNA
cttgacgttattcaaacctt

SEQ ID NO: 5280 - DNA, 20 bp, synthetic construct
  source 1..20: mol_type = other DNA
cactattagcatgtttccgt

SEQ ID NO: 5281 - DNA, 20 bp, synthetic construct
  source 1..20: mol_type = other DNA
aagcaactcagcatgtagta

SEQ ID NO: 5282 - DNA, 20 bp, synthetic construct
  source 1..20: mol_type = other DNA
tgtgcgcaacctcaacccta

SEQ ID NO: 5283 - DNA, 20 bp, synthetic construct
  source 1..20: mol_type = other DNA
attacctgggaccggtcaca

SEQ ID NO: 5284 - DNA, 20 bp, synthetic construct
  source 1..20: mol_type = other DNA
ggtgagcgaagctgctcacc

SEQ ID NO: 5285 - DNA, 20 bp, synthetic construct
  source 1..20: mol_type = other DNA
tcaccgtgacgtttatagtt

SEQ ID NO: 5286 - DNA, 20 bp, synthetic construct
  source 1..20: mol_type = other DNA
actctcagaaagatgcactg

SEQ ID NO: 5287 - DNA, 20 bp, synthetic construct
  source 1..20: mol_type = other DNA
agtgcagtctaggtaataga

SEQ ID NO: 5288 - DNA, 20 bp, synthetic construct
  source 1..20: mol_type = other DNA
atctcgctacaaagggatca

SEQ ID NO: 5289 - DNA, 20 bp, synthetic construct
  source 1..20: mol_type = other DNA
tctgggaccacacctgtgcg

SEQ ID NO: 5290 - DNA, 20 bp, synthetic construct
  source 1..20: mol_type = other DNA
acattctacccacctagctg

SEQ ID NO: 5291 - DNA, 20 bp, synthetic construct
  source 1..20: mol_type = other DNA
tatatccgatgtgcgctatt

SEQ ID NO: 5292 - DNA, 20 bp, synthetic construct
  source 1..20: mol_type = other DNA
taccggtgttaatatagacg

SEQ ID NO: 5293 - DNA, 20 bp, synthetic construct
  source 1..20: mol_type = other DNA
attcgtgggactatagttaa

SEQ ID NO: 5294 - DNA, 20 bp, synthetic construct
  source 1..20: mol_type = other DNA
ggcgtcctcgcggattcatt

SEQ ID NO: 5295 - DNA, 20 bp, synthetic construct
  source 1..20: mol_type = other DNA
tatggaaattcctcgcgtcg

SEQ ID NO: 5296 - DNA, 20 bp, synthetic construct
  source 1..20: mol_type = other DNA
gacttctacaatccgaaggt

SEQ ID NO: 5297 - DNA, 20 bp, synthetic construct
  source 1..20: mol_type = other DNA
tcactgacatacaacctaac

SEQ ID NO: 5298 - DNA, 20 bp, synthetic construct
  source 1..20: mol_type = other DNA
aaatgctgtttactgtgggc

SEQ ID NO: 5299 - DNA, 20 bp, synthetic construct
  source 1..20: mol_type = other DNA
ttggataagcaaggtggtac

SEQ ID NO: 5300 - DNA, 20 bp, synthetic construct
  source 1..20: mol_type = other DNA
tggttcatgtaggcagtccc

SEQ ID NO: 5301 - DNA, 20 bp, synthetic construct
  source 1..20: mol_type = other DNA
gttcattcggtcggacgttc

SEQ ID NO: 5302 - DNA, 20 bp, synthetic construct
  source 1..20: mol_type = other DNA
ggaagggagataaattcatt

SEQ ID NO: 5303 - DNA, 20 bp, synthetic construct
  source 1..20: mol_type = other DNA
aagacctcatcgaggcctaa

SEQ ID NO: 5304 - DNA, 20 bp, synthetic construct
  source 1..20: mol_type = other DNA
cctccggattcggtaatacc

SEQ ID NO: 5305 - DNA, 20 bp, synthetic construct
  source 1..20: mol_type = other DNA
ggtgggacctgattaaggaa

SEQ ID NO: 5306 - DNA, 20 bp, synthetic construct
  source 1..20: mol_type = other DNA
tagccacgcactcacgcggc

SEQ ID NO: 5307 - DNA, 20 bp, synthetic construct
  source 1..20: mol_type = other DNA
ggaagagctccaataggact

SEQ ID NO: 5308 - DNA, 20 bp, synthetic construct
  source 1..20: mol_type = other DNA
gaaccgacgctccagaaggt

SEQ ID NO: 5309 - DNA, 20 bp, synthetic construct
  source 1..20: mol_type = other DNA
gaagataagatgggaccaga

SEQ ID NO: 5310 - DNA, 20 bp, synthetic construct
  source 1..20: mol_type = other DNA
gcggatctcacgctggtcca

SEQ ID NO: 5311 - DNA, 20 bp, synthetic construct
  source 1..20: mol_type = other DNA
aatgcttcccttaaggtagt

SEQ ID NO: 5312 - DNA, 20 bp, synthetic construct
  source 1..20: mol_type = other DNA
attgtaccactgacagtcct

SEQ ID NO: 5313 - DNA, 20 bp, synthetic construct
  source 1..20: mol_type = other DNA
acaatgagcaaggtgagaca

SEQ ID NO: 5314 - DNA, 20 bp, synthetic construct
  source 1..20: mol_type = other DNA
tgaacggttccagttccatg

SEQ ID NO: 5315 - DNA, 20 bp, synthetic construct
  source 1..20: mol_type = other DNA
aaggacggcgtgttatcgcc

SEQ ID NO: 5316 - DNA, 20 bp, synthetic construct
  source 1..20: mol_type = other DNA
gatctactaccacattatag

SEQ ID NO: 5317 - DNA, 20 bp, synthetic construct
  source 1..20: mol_type = other DNA
tatcgtcgccgtctctccaa

SEQ ID NO: 5318 - DNA, 20 bp, synthetic construct
  source 1..20: mol_type = other DNA
tgcatgacaacagtggtcaa

SEQ ID NO: 5319 - DNA, 20 bp, synthetic construct
  source 1..20: mol_type = other DNA
ctccatatcaggaacagtca

SEQ ID NO: 5320 - DNA, 20 bp, synthetic construct
  source 1..20: mol_type = other DNA
tcaacgatgggcatgtttgg

SEQ ID NO: 5321 - DNA, 20 bp, synthetic construct
  source 1..20: mol_type = other DNA
tacgacatagcttagatggg

SEQ ID NO: 5322 - DNA, 20 bp, synthetic construct
  source 1..20: mol_type = other DNA
ggtccggcctctcactagct

SEQ ID NO: 5323 - DNA, 20 bp, synthetic construct
  source 1..20: mol_type = other DNA
attccgcacggaccggcatt

SEQ ID NO: 5324 - DNA, 20 bp, synthetic construct
  source 1..20: mol_type = other DNA
gcaaatgacgttgtgtgacc

SEQ ID NO: 5325 - DNA, 20 bp, synthetic construct
  source 1..20: mol_type = other DNA
acccacgtcgcgggaagata

SEQ ID NO: 5326 - DNA, 20 bp, synthetic construct
  source 1..20: mol_type = other DNA
ccgctagtcgctggtcctga

SEQ ID NO: 5327 - DNA, 20 bp, synthetic construct
  source 1..20: mol_type = other DNA
ctcacctaggcgaaaccagg

SEQ ID NO: 5328 - DNA, 20 bp, synthetic construct
  source 1..20: mol_type = other DNA
ccagtccctccatgcaccaa

SEQ ID NO: 5329 - DNA, 20 bp, synthetic construct
  source 1..20: mol_type = other DNA
attcacgcatttcgtaaact

SEQ ID NO: 5330 - DNA, 20 bp, synthetic construct
  source 1..20: mol_type = other DNA
agccaccagtatagtcacag

SEQ ID NO: 5331 - DNA, 20 bp, synthetic construct
  source 1..20: mol_type = other DNA
tacggtacccaacttgtcag

SEQ ID NO: 5332 - DNA, 20 bp, synthetic construct
  source 1..20: mol_type = other DNA
aaggcaaaccctatcacgtc

SEQ ID NO: 5333 - DNA, 20 bp, synthetic construct
  source 1..20: mol_type = other DNA
ctgccatcatgtgaatcgta

SEQ ID NO: 5334 - DNA, 20 bp, synthetic construct
  source 1..20: mol_type = other DNA
accaaccgcatctactctgc

SEQ ID NO: 5335 - DNA, 20 bp, synthetic construct
  source 1..20: mol_type = other DNA
cgcagttactcttctcaagt

SEQ ID NO: 5336 - DNA, 20 bp, synthetic construct
  source 1..20: mol_type = other DNA
gtcagggatcgaatccaatg

SEQ ID NO: 5337 - DNA, 20 bp, synthetic construct
  source 1..20: mol_type = other DNA
cacgcttatgtagctgtaac

SEQ ID NO: 5338 - DNA, 20 bp, synthetic construct
  source 1..20: mol_type = other DNA
agcgaatttacagcagctac

SEQ ID NO: 5339 - DNA, 20 bp, synthetic construct
  source 1..20: mol_type = other DNA
caatagtgccgagcttcccg

SEQ ID NO: 5340 - DNA, 20 bp, synthetic construct
  source 1..20: mol_type = other DNA
tcgcagtattgtgatacaaa

SEQ ID NO: 5341 - DNA, 20 bp, synthetic construct
  source 1..20: mol_type = other DNA
acacgacgtgaccggtgggt

SEQ ID NO: 5342 - DNA, 20 bp, synthetic construct
  source 1..20: mol_type = other DNA
tgggcgcaacgcttcaagcc

SEQ ID NO: 5343 - DNA, 20 bp, synthetic construct
  source 1..20: mol_type = other DNA
ccactcgtatatggaagggt

SEQ ID NO: 5344 - DNA, 20 bp, synthetic construct
  source 1..20: mol_type = other DNA
tagggcagtgtgagtgggtt

SEQ ID NO: 5345 - DNA, 20 bp, synthetic construct
  source 1..20: mol_type = other DNA
ctccagtgttccttcttggc

SEQ ID NO: 5346 - DNA, 20 bp, synthetic construct
  source 1..20: mol_type = other DNA
cacacttgagatggagccca

SEQ ID NO: 5347 - DNA, 20 bp, synthetic construct
  source 1..20: mol_type = other DNA
atggcatcgttgttcagctg

SEQ ID NO: 5348 - DNA, 20 bp, synthetic construct
  source 1..20: mol_type = other DNA
gcggagaatgtgatgatatg

SEQ ID NO: 5349 - DNA, 20 bp, synthetic construct
  source 1..20: mol_type = other DNA
gtcgagtgtcaccgggtgct

SEQ ID NO: 5350 - DNA, 20 bp, synthetic construct
  source 1..20: mol_type = other DNA
ggtacttaaacttgcctcat

SEQ ID NO: 5351 - DNA, 20 bp, synthetic construct
  source 1..20: mol_type = other DNA
gagcaatctccacttcgatg

SEQ ID NO: 5352 - DNA, 20 bp, synthetic construct
  source 1..20: mol_type = other DNA
ggaccatctactatctgcgg

SEQ ID NO: 5353 - DNA, 20 bp, synthetic construct
  source 1..20: mol_type = other DNA
tacacgttccgatccttaaa

SEQ ID NO: 5354 - DNA, 20 bp, synthetic construct
  source 1..20: mol_type = other DNA
ggtggtcgctgtcaaactct

SEQ ID NO: 5355 - DNA, 20 bp, synthetic construct
  source 1..20: mol_type = other DNA
ggaaagcacaacatttacac

SEQ ID NO: 5356 - DNA, 20 bp, synthetic construct
  source 1..20: mol_type = other DNA
cgccagtgttcatccactgc

SEQ ID NO: 5357 - DNA, 20 bp, synthetic construct
  source 1..20: mol_type = other DNA
tcgggactgaaagtgatctg

SEQ ID NO: 5358 - DNA, 20 bp, synthetic construct
  source 1..20: mol_type = other DNA
agccgtgtacatgaaatact

SEQ ID NO: 5359 - DNA, 20 bp, synthetic construct
  source 1..20: mol_type = other DNA
tttatctccgctaatctccg

SEQ ID NO: 5360 - DNA, 20 bp, synthetic construct
  source 1..20: mol_type = other DNA
tacgctgactttgttgatcg

SEQ ID NO: 5361 - DNA, 20 bp, synthetic construct
  source 1..20: mol_type = other DNA
cttcgaggacctgcatcctc

SEQ ID NO: 5362 - DNA, 20 bp, synthetic construct
  source 1..20: mol_type = other DNA
tattgtaaccagttgcacag

SEQ ID NO: 5363 - DNA, 20 bp, synthetic construct
  source 1..20: mol_type = other DNA
gggatgggtttccacggttg

SEQ ID NO: 5364 - DNA, 20 bp, synthetic construct
  source 1..20: mol_type = other DNA
gtttcccagattacgtagta

SEQ ID NO: 5365 - DNA, 20 bp, synthetic construct
  source 1..20: mol_type = other DNA
ggtcactattaatcggtgat

SEQ ID NO: 5366 - DNA, 20 bp, synthetic construct
  source 1..20: mol_type = other DNA
tcaaggcggcaggtaccaag

SEQ ID NO: 5367 - DNA, 20 bp, synthetic construct
  source 1..20: mol_type = other DNA
ggcaatgctggagggctatg

SEQ ID NO: 5368 - DNA, 20 bp, synthetic construct
  source 1..20: mol_type = other DNA
cgaatcagtcttagacggca

SEQ ID NO: 5369 - DNA, 20 bp, synthetic construct
  source 1..20: mol_type = other DNA
aagtttactgcttcctacga

SEQ ID NO: 5370 - DNA, 20 bp, synthetic construct
  source 1..20: mol_type = other DNA
cggccgagggtcttcaacga

SEQ ID NO: 5371 - DNA, 20 bp, synthetic construct
  source 1..20: mol_type = other DNA
cgataatcgtgatatgccag

SEQ ID NO: 5372 - DNA, 20 bp, synthetic construct
  source 1..20: mol_type = other DNA
tcgccgggaaggatagtccg

SEQ ID NO: 5373 - DNA, 20 bp, synthetic construct
  source 1..20: mol_type = other DNA
tgggtagttcgtaccggagc

SEQ ID NO: 5374 - DNA, 20 bp, synthetic construct
  source 1..20: mol_type = other DNA
tacgtgactctttcccacct

SEQ ID NO: 5375 - DNA, 20 bp, synthetic construct
  source 1..20: mol_type = other DNA
cgaggtgactcaaatgttat

SEQ ID NO: 5376 - DNA, 20 bp, synthetic construct
  source 1..20: mol_type = other DNA
gtctacgcgtatttcgtccg

SEQ ID NO: 5377 - DNA, 20 bp, synthetic construct
  source 1..20: mol_type = other DNA
gctagtagagtagtgtttat

SEQ ID NO: 5378 - DNA, 20 bp, synthetic construct
  source 1..20: mol_type = other DNA
ggcaagagtgaaggccctga

SEQ ID NO: 5379 - DNA, 20 bp, synthetic construct
  source 1..20: mol_type = other DNA
ttctcagtctgtgacgcgat

SEQ ID NO: 5380 - DNA, 20 bp, synthetic construct
  source 1..20: mol_type = other DNA
tcatgtccgaaaggagtgca

SEQ ID NO: 5381 - DNA, 20 bp, synthetic construct
  source 1..20: mol_type = other DNA
agcctgtgctccgacctaac

SEQ ID NO: 5382 - DNA, 20 bp, synthetic construct
  source 1..20: mol_type = other DNA
tccgagtaggcaccaataac

SEQ ID NO: 5383 - DNA, 20 bp, synthetic construct
  source 1..20: mol_type = other DNA
aacagcccggtaccgtcact

SEQ ID NO: 5384 - DNA, 20 bp, synthetic construct
  source 1..20: mol_type = other DNA
gtatggtaaggcacgtaact

SEQ ID NO: 5385 - DNA, 20 bp, synthetic construct
  source 1..20: mol_type = other DNA
taagtctagctcaaacacgg

SEQ ID NO: 5386 - DNA, 20 bp, synthetic construct
  source 1..20: mol_type = other DNA
gttgaacagcgactgaacat

SEQ ID NO: 5387 - DNA, 20 bp, synthetic construct
  source 1..20: mol_type = other DNA
ccgaagtgtgagtgcgattt

SEQ ID NO: 5388 - DNA, 20 bp, synthetic construct
  source 1..20: mol_type = other DNA
agcgattcggttaaatatcc

SEQ ID NO: 5389 - DNA, 20 bp, synthetic construct
  source 1..20: mol_type = other DNA
gggtcacatgcctttcccat

SEQ ID NO: 5390 - DNA, 20 bp, synthetic construct
  source 1..20: mol_type = other DNA
tagttgatgcccgtctgcgg

SEQ ID NO: 5391 - DNA, 20 bp, synthetic construct
  source 1..20: mol_type = other DNA
tgtgatgacgctactggtgc

SEQ ID NO: 5392 - DNA, 20 bp, synthetic construct
  source 1..20: mol_type = other DNA
tacggtttacaagtgtggtc

SEQ ID NO: 5393 - DNA, 20 bp, synthetic construct
  source 1..20: mol_type = other DNA
gtctgatctcagagcgtcca

SEQ ID NO: 5394 - DNA, 20 bp, synthetic construct
  source 1..20: mol_type = other DNA
ttaacgtgccagcagaagat

SEQ ID NO: 5395 - DNA, 20 bp, synthetic construct
  source 1..20: mol_type = other DNA
ggttaattccctgaggcggg

SEQ ID NO: 5396 - DNA, 20 bp, synthetic construct
  source 1..20: mol_type = other DNA
ctggttgtttaggttccaga

SEQ ID NO: 5397 - DNA, 20 bp, synthetic construct
  source 1..20: mol_type = other DNA
aacggtctcaagcgctactt

SEQ ID NO: 5398 - DNA, 20 bp, synthetic construct
  source 1..20: mol_type = other DNA
ttctacctcgcgataggaga

SEQ ID NO: 5399 - DNA, 20 bp, synthetic construct
  source 1..20: mol_type = other DNA
tatatagcatgtccgtggcg

SEQ ID NO: 5400 - DNA, 20 bp, synthetic construct
  source 1..20: mol_type = other DNA
catgcgtctctaatgtctag

SEQ ID NO: 5401 - DNA, 20 bp, synthetic construct
  source 1..20: mol_type = other DNA
tttgcttaacaatccgccat

SEQ ID NO: 5402 - DNA, 20 bp, synthetic construct
  source 1..20: mol_type = other DNA
tccaaatagtcgccctcgtt

SEQ ID NO: 5403 - DNA, 20 bp, synthetic construct
  source 1..20: mol_type = other DNA
ttctgtccctgaacagtgtg

SEQ ID NO: 5404 - DNA, 20 bp, synthetic construct
  source 1..20: mol_type = other DNA
atgggcgcatctgtacttga

SEQ ID NO: 5405 - DNA, 20 bp, synthetic construct
  source 1..20: mol_type = other DNA
gtatcatcaataggctgcaa

SEQ ID NO: 5406 - DNA, 20 bp, synthetic construct
  source 1..20: mol_type = other DNA
aacttgtagctgagagagct

SEQ ID NO: 5407 - DNA, 20 bp, synthetic construct
  source 1..20: mol_type = other DNA
aacgccgtctaagccgagta

SEQ ID NO: 5408 - DNA, 20 bp, synthetic construct
  source 1..20: mol_type = other DNA
tcccgctgagagaatccttg

SEQ ID NO: 5409 - DNA, 20 bp, synthetic construct
  source 1..20: mol_type = other DNA
cttactggcttcatcagaat

SEQ ID NO: 5410 - DNA, 20 bp, synthetic construct
  source 1..20: mol_type = other DNA
atagcgttcgtcctttcacg

SEQ ID NO: 5411 - DNA, 20 bp, synthetic construct
  source 1..20: mol_type = other DNA
tgccattcttgctgttcgta

SEQ ID NO: 5412 - DNA, 20 bp, synthetic construct
  source 1..20: mol_type = other DNA
gggtttcacattaataccgc

SEQ ID NO: 5413 - DNA, 20 bp, synthetic construct
  source 1..20: mol_type = other DNA
gacaccaaaccgcggtattt

SEQ ID NO: 5414 - DNA, 20 bp, synthetic construct
  source 1..20: mol_type = other DNA
aaaccgtgctcgtctgcaat

SEQ ID NO: 5415 - DNA, 20 bp, synthetic construct
  source 1..20: mol_type = other DNA
cttaccaagtgctagtccac

SEQ ID NO: 5416 - DNA, 20 bp, synthetic construct
  source 1..20: mol_type = other DNA
agttctatgctcgtggtaga

SEQ ID NO: 5417 - DNA, 20 bp, synthetic construct
  source 1..20: mol_type = other DNA
atatgtggcggttcaaagac

SEQ ID NO: 5418 - DNA, 20 bp, synthetic construct
  source 1..20: mol_type = other DNA
atcaatagcttaagacagct

SEQ ID NO: 5419 - DNA, 20 bp, synthetic construct
  source 1..20: mol_type = other DNA
gtgtgcaaactgcccgctgt

SEQ ID NO: 5420 - DNA, 20 bp, synthetic construct
  source 1..20: mol_type = other DNA
accaacagtgcgtcgcacga

SEQ ID NO: 5421 - DNA, 20 bp, synthetic construct
  source 1..20: mol_type = other DNA
tggactcctggctcctctca

SEQ ID NO: 5422 - DNA, 20 bp, synthetic construct
  source 1..20: mol_type = other DNA
actctcagagatgcgcaagt

SEQ ID NO: 5423 - DNA, 20 bp, synthetic construct
  source 1..20: mol_type = other DNA
ccgtaaatagagtaataaca

SEQ ID NO: 5424 - DNA, 20 bp, synthetic construct
  source 1..20: mol_type = other DNA
actagcaaacaagttcaaca

SEQ ID NO: 5425 - DNA, 20 bp, synthetic construct
  source 1..20: mol_type = other DNA
gtgttggaacttgccgtagc

SEQ ID NO: 5426 - DNA, 20 bp, synthetic construct
  source 1..20: mol_type = other DNA
tgaggctcaaccctcagcaa

SEQ ID NO: 5427 - DNA, 20 bp, synthetic construct
  source 1..20: mol_type = other DNA
gtagggagaacgttggagac

SEQ ID NO: 5428 - DNA, 20 bp, synthetic construct
  source 1..20: mol_type = other DNA
gtacggactcttgcatggct

SEQ ID NO: 5429 - DNA, 20 bp, synthetic construct
  source 1..20: mol_type = other DNA
ggccagatcgacttcacggt

SEQ ID NO: 5430 - DNA, 20 bp, synthetic construct
  source 1..20: mol_type = other DNA
gtgggaaatgccggttctgg

SEQ ID NO: 5431 - DNA, 20 bp, synthetic construct
  source 1..20: mol_type = other DNA
tcccgtgtaacatccctaaa

SEQ ID NO: 5432 - DNA, 20 bp, synthetic construct
  source 1..20: mol_type = other DNA
ctcagcgtagtaatcgctta

SEQ ID NO: 5433 - DNA, 20 bp, synthetic construct
  source 1..20: mol_type = other DNA
gattaaccatcaaccagtct

SEQ ID NO: 5434 - DNA, 20 bp, synthetic construct
  source 1..20: mol_type = other DNA
cggcagttacgttcatgcgc

SEQ ID NO: 5435 - DNA, 20 bp, synthetic construct
  source 1..20: mol_type = other DNA
ggctttactagtattaccat

SEQ ID NO: 5436 - DNA, 20 bp, synthetic construct
  source 1..20: mol_type = other DNA
agctcggacctctattacat

SEQ ID NO: 5437 - DNA, 20 bp, synthetic construct
  source 1..20: mol_type = other DNA
tacgtggcgccgaacactta

SEQ ID NO: 5438 - DNA, 20 bp, synthetic construct
  source 1..20: mol_type = other DNA
ataataagcagtgcctatcc

SEQ ID NO: 5439 - DNA, 20 bp, synthetic construct
  source 1..20: mol_type = other DNA
attggtcccgcaattacacg

SEQ ID NO: 5440 - DNA, 20 bp, synthetic construct
  source 1..20: mol_type = other DNA
ggcggcactcgcgattgtgt

SEQ ID NO: 5441 - DNA, 20 bp, synthetic construct
  source 1..20: mol_type = other DNA
agctaagcgtgttacaagga

SEQ ID NO: 5442 - DNA, 20 bp, synthetic construct
  source 1..20: mol_type = other DNA
cgcgggagtctccgtccaaa

SEQ ID NO: 5443 - DNA, 20 bp, synthetic construct
  source 1..20: mol_type = other DNA
aatcagacacagtttcaccg

SEQ ID NO: 5444 - DNA, 20 bp, synthetic construct
  source 1..20: mol_type = other DNA
atgttcgtactggtgataag

SEQ ID NO: 5445 - DNA, 20 bp, synthetic construct
  source 1..20: mol_type = other DNA
gtgtccttgcctccgacgag

SEQ ID NO: 5446 - DNA, 20 bp, synthetic construct
  source 1..20: mol_type = other DNA
cctgctaattcggcctatgt

SEQ ID NO: 5447 - DNA, 20 bp, synthetic construct
  source 1..20: mol_type = other DNA
catcactcctagacaggctg

SEQ ID NO: 5448 - DNA, 20 bp, synthetic construct
  source 1..20: mol_type = other DNA
gagcagttaatccgccatcc

SEQ ID NO: 5449 - DNA, 20 bp, synthetic construct
  source 1..20: mol_type = other DNA
catggtctttcgcctggcgc

SEQ ID NO: 5450 - DNA, 20 bp, synthetic construct
  source 1..20: mol_type = other DNA
gcgctaactcagaacactgc

SEQ ID NO: 5451 - DNA, 20 bp, synthetic construct
  source 1..20: mol_type = other DNA
taagagcggcagctctgcta

SEQ ID NO: 5452 - DNA, 20 bp, synthetic construct
  source 1..20: mol_type = other DNA
cgcacttccgccaaatattc

SEQ ID NO: 5453 - DNA, 20 bp, synthetic construct
  source 1..20: mol_type = other DNA
tttatgtatatctcccagtg

SEQ ID NO: 5454 - DNA, 20 bp, synthetic construct
  source 1..20: mol_type = other DNA
cattgcgccaagaatggcta

SEQ ID NO: 5455 - DNA, 20 bp, synthetic construct
  source 1..20: mol_type = other DNA
acttagaggccaatcgttcg

SEQ ID NO: 5456 - DNA, 20 bp, synthetic construct
  source 1..20: mol_type = other DNA
gtgagacgacaaattgcgtt

SEQ ID NO: 5457 - DNA, 20 bp, synthetic construct
  source 1..20: mol_type = other DNA
ctaagacgattacgaaaggc

SEQ ID NO: 5458 - DNA, 20 bp, synthetic construct
  source 1..20: mol_type = other DNA
ccgtcggtcataagagggta

SEQ ID NO: 5459 - DNA, 20 bp, synthetic construct
  source 1..20: mol_type = other DNA
taccttggcactctaaacaa

SEQ ID NO: 5460 - DNA, 20 bp, synthetic construct
  source 1..20: mol_type = other DNA
tagaactaggacggatctcg

SEQ ID NO: 5461 - DNA, 20 bp, synthetic construct
  source 1..20: mol_type = other DNA
tgctggatagagtgacaccg

SEQ ID NO: 5462 - DNA, 20 bp, synthetic construct
  source 1..20: mol_type = other DNA
cggtgaatacaggtaaagct

SEQ ID NO: 5463 - DNA, 20 bp, synthetic construct
  source 1..20: mol_type = other DNA
gtcccgcatgtttcaggcga

SEQ ID NO: 5464 - DNA, 20 bp, synthetic construct
  source 1..20: mol_type = other DNA
tgtatagagcaatcgcactg

SEQ ID NO: 5465 - DNA, 20 bp, synthetic construct
  source 1..20: mol_type = other DNA
aacttccaggtttgaagtcg

SEQ ID NO: 5466 - DNA, 20 bp, synthetic construct
  source 1..20: mol_type = other DNA
aacacatacggcttagcatc

SEQ ID NO: 5467 - DNA, 20 bp, synthetic construct
  source 1..20: mol_type = other DNA
aacatctcgtggctcggcgc

SEQ ID NO: 5468 - DNA, 20 bp, synthetic construct
  source 1..20: mol_type = other DNA
atgcatcccttgtgtccata

SEQ ID NO: 5469 - DNA, 20 bp, synthetic construct
  source 1..20: mol_type = other DNA
ttcgtgatgtggagtggctg

SEQ ID NO: 5470 - DNA, 20 bp, synthetic construct
  source 1..20: mol_type = other DNA
ccagttacgagtggacttag

SEQ ID NO: 5471 - DNA, 20 bp, synthetic construct
  source 1..20: mol_type = other DNA
agcttgtttactacggcgag

SEQ ID NO: 5472 - DNA, 20 bp, synthetic construct
  source 1..20: mol_type = other DNA
tgaggcggatgtcgtaggct

SEQ ID NO: 5473 - DNA, 20 bp, synthetic construct
  source 1..20: mol_type = other DNA
tatgtaaatccacaaaccaa

SEQ ID NO: 5474 - DNA, 20 bp, synthetic construct
  source 1..20: mol_type = other DNA
aaagaactttctcgtcagag

SEQ ID NO: 5475 - DNA, 20 bp, synthetic construct
  source 1..20: mol_type = other DNA
ccatcccagcaggttgatgc

SEQ ID NO: 5476 - DNA, 20 bp, synthetic construct
  source 1..20: mol_type = other DNA
gcagttagcgatgtgtagcc

SEQ ID NO: 5477 - DNA, 20 bp, synthetic construct
  source 1..20: mol_type = other DNA
ggttcgtgagcgaggtgata

SEQ ID NO: 5478 - DNA, 20 bp, synthetic construct
  source 1..20: mol_type = other DNA
gcccacataatattcctccc

SEQ ID NO: 5479 - DNA, 20 bp, synthetic construct
  source 1..20: mol_type = other DNA
ggattcccggttggaagtgc

SEQ ID NO: 5480 - DNA, 20 bp, synthetic construct
  source 1..20: mol_type = other DNA
cactctagtagttccaataa

SEQ ID NO: 5481 - DNA, 20 bp, synthetic construct
  source 1..20: mol_type = other DNA
agacaaatccattacacctg

SEQ ID NO: 5482 - DNA, 20 bp, synthetic construct
  source 1..20: mol_type = other DNA
gaggtttggcaccggtttac

SEQ ID NO: 5483 - DNA, 20 bp, synthetic construct
  source 1..20: mol_type = other DNA
aaccacgtttctatcaggtc

SEQ ID NO: 5484 - DNA, 20 bp, synthetic construct
  source 1..20: mol_type = other DNA
acaacgcgcgtgcccagtat

SEQ ID NO: 5485 - DNA, 20 bp, synthetic construct
  source 1..20: mol_type = other DNA
tggacatgggtgacgactat

SEQ ID NO: 5486 - DNA, 20 bp, synthetic construct
  source 1..20: mol_type = other DNA
aatatttgcccacctggagt

SEQ ID NO: 5487 - DNA, 20 bp, synthetic construct
  source 1..20: mol_type = other DNA
actataattaagcccaggca

SEQ ID NO: 5488 - DNA, 20 bp, synthetic construct
  source 1..20: mol_type = other DNA
tgagttaatgttaggctcta

SEQ ID NO: 5489 - DNA, 20 bp, synthetic construct
  source 1..20: mol_type = other DNA
aacgatccgttaactgtcga

SEQ ID NO: 5490 - DNA, 20 bp, synthetic construct
  source 1..20: mol_type = other DNA
tacccggagggtcacgttgt

SEQ ID NO: 5491 - DNA, 20 bp, synthetic construct
  source 1..20: mol_type = other DNA
gccacatattggacaagatc

SEQ ID NO: 5492 - DNA, 20 bp, synthetic construct
  source 1..20: mol_type = other DNA
gcgcgtagtcaaagcaacta

SEQ ID NO: 5493 - DNA, 20 bp, synthetic construct
  source 1..20: mol_type = other DNA
ataggcaaatctcacttcta

SEQ ID NO: 5494 - DNA, 20 bp, synthetic construct
  source 1..20: mol_type = other DNA
tgttgtcgtacgggcacact

SEQ ID NO: 5495 - DNA, 20 bp, synthetic construct
  source 1..20: mol_type = other DNA
atcaccacaggaagcaacgc

SEQ ID NO: 5496 - DNA, 20 bp, synthetic construct
  source 1..20: mol_type = other DNA
tccctaaacggatgatcgct

SEQ ID NO: 5497 - DNA, 20 bp, synthetic construct
  source 1..20: mol_type = other DNA
ggtaacctacttagcgggta

SEQ ID NO: 5498 - DNA, 20 bp, synthetic construct
  source 1..20: mol_type = other DNA
agccggaatatcgcgttctg

SEQ ID NO: 5499 - DNA, 20 bp, synthetic construct
  source 1..20: mol_type = other DNA
attactaccgttatgggtga

SEQ ID NO: 5500 - DNA, 20 bp, synthetic construct
  source 1..20: mol_type = other DNA
ctcaccggcaagatgatggc

SEQ ID NO: 5501 - DNA, 20 bp, synthetic construct
  source 1..20: mol_type = other DNA
ccgctcgtgatgctatggcg

SEQ ID NO: 5502 - DNA, 20 bp, synthetic construct
  source 1..20: mol_type = other DNA
ttcgtgtcacttgcgcgccc

SEQ ID NO: 5503 - DNA, 20 bp, synthetic construct
  source 1..20: mol_type = other DNA
tcccgtgacgtatagcacta

SEQ ID NO: 5504 - DNA, 20 bp, synthetic construct
  source 1..20: mol_type = other DNA
gtgtcggtatactgagccat

SEQ ID NO: 5505 - DNA, 20 bp, synthetic construct
  source 1..20: mol_type = other DNA
caacctcccggaatcgcgag

SEQ ID NO: 5506 - DNA, 20 bp, synthetic construct
  source 1..20: mol_type = other DNA
taaccatgcgacaccgctcc

SEQ ID NO: 5507 - DNA, 20 bp, synthetic construct
  source 1..20: mol_type = other DNA
ttatgctaactccgttgcct

SEQ ID NO: 5508 - DNA, 20 bp, synthetic construct
  source 1..20: mol_type = other DNA
cagggagacccagatggtcg

SEQ ID NO: 5509 - DNA, 20 bp, synthetic construct
  source 1..20: mol_type = other DNA
agcccggcatgcaacacatg

SEQ ID NO: 5510 - DNA, 20 bp, synthetic construct
  source 1..20: mol_type = other DNA
aggagcgcaaccaggcacac

SEQ ID NO: 5511 - DNA, 20 bp, synthetic construct
  source 1..20: mol_type = other DNA
gccatttcttcaaactcacg

SEQ ID NO: 5512 - DNA, 20 bp, synthetic construct
  source 1..20: mol_type = other DNA
acggctggaacctcactgac

SEQ ID NO: 5513 - DNA, 20 bp, synthetic construct
  source 1..20: mol_type = other DNA
tagcgtcacgctgcacccgt

SEQ ID NO: 5514 - DNA, 20 bp, synthetic construct
  source 1..20: mol_type = other DNA
gcacgacggcgtccttccaa

SEQ ID NO: 5515 - DNA, 20 bp, synthetic construct
  source 1..20: mol_type = other DNA
cacgacctgtggctcagttg

SEQ ID NO: 5516 - DNA, 20 bp, synthetic construct
  source 1..20: mol_type = other DNA
ccaatgtgcgttcctgccgt

SEQ ID NO: 5517 - DNA, 20 bp, synthetic construct
  source 1..20: mol_type = other DNA
tagatacttaatcctctgtc

SEQ ID NO: 5518 - DNA, 20 bp, synthetic construct
  source 1..20: mol_type = other DNA
tatcatcggcctcgtcacaa

SEQ ID NO: 5519 - DNA, 20 bp, synthetic construct
  source 1..20: mol_type = other DNA
gtttggtgccttctatattc

SEQ ID NO: 5520 - DNA, 20 bp, synthetic construct
  source 1..20: mol_type = other DNA
tgttatttccgatactggcg

SEQ ID NO: 5521 - DNA, 20 bp, synthetic construct
  source 1..20: mol_type = other DNA
aagtcagcattcacaactgc

SEQ ID NO: 5522 - DNA, 20 bp, synthetic construct
  source 1..20: mol_type = other DNA
gcgttacagtctgatgttgc

SEQ ID NO: 5523 - DNA, 20 bp, synthetic construct
  source 1..20: mol_type = other DNA
actgaagtccgattgtggta

SEQ ID NO: 5524 - DNA, 20 bp, synthetic construct
  source 1..20: mol_type = other DNA
cattgacgctcgaatacgtc

SEQ ID NO: 5525 - DNA, 20 bp, synthetic construct
  source 1..20: mol_type = other DNA
agcattaaacttggacatgg

SEQ ID NO: 5526 - DNA, 20 bp, synthetic construct
  source 1..20: mol_type = other DNA
aacgagcaacttctccggtc

SEQ ID NO: 5527 - DNA, 20 bp, synthetic construct
  source 1..20: mol_type = other DNA
aacagtgaagttgaacacat

SEQ ID NO: 5528 - DNA, 20 bp, synthetic construct
  source 1..20: mol_type = other DNA
gaatgaaccctgatgcgtgc

SEQ ID NO: 5529 - DNA, 20 bp, synthetic construct
  source 1..20: mol_type = other DNA
agtggaaagttaacagtcac

SEQ ID NO: 5530 - DNA, 20 bp, synthetic construct
  source 1..20: mol_type = other DNA
gaactgcgtgtatatcgccg

SEQ ID NO: 5531 - DNA, 20 bp, synthetic construct
  source 1..20: mol_type = other DNA
aggagttctcagagacatac

SEQ ID NO: 5532 - DNA, 20 bp, synthetic construct
  source 1..20: mol_type = other DNA
ccttgcaagcggaactttcc

SEQ ID NO: 5533 - DNA, 20 bp, synthetic construct
  source 1..20: mol_type = other DNA
tgaaggagaaacgggatcga

SEQ ID NO: 5534 - DNA, 20 bp, synthetic construct
  source 1..20: mol_type = other DNA
agtagaggcgcgataacagg

SEQ ID NO: 5535 - DNA, 20 bp, synthetic construct
  source 1..20: mol_type = other DNA
ttacccatcactgcattgcc

SEQ ID NO: 5536 - DNA, 20 bp, synthetic construct
  source 1..20: mol_type = other DNA
cgtaaacgacgataatcggc

SEQ ID NO: 5537 - DNA, 20 bp, synthetic construct
  source 1..20: mol_type = other DNA
ccactatcgacgattaatct

SEQ ID NO: 5538 - DNA, 20 bp, synthetic construct
  source 1..20: mol_type = other DNA
ctcgctacgtttggagcgat

SEQ ID NO: 5539 - DNA, 20 bp, synthetic construct
  source 1..20: mol_type = other DNA
atacgagtattaccgcatga

SEQ ID NO: 5540 - DNA, 20 bp, synthetic construct
  source 1..20: mol_type = other DNA
gccaccggctttacaaccag

SEQ ID NO: 5541 - DNA, 20 bp, synthetic construct
  source 1..20: mol_type = other DNA
ttgtggtcgtgtacgttcta

SEQ ID NO: 5542 - DNA, 20 bp, synthetic construct
  source 1..20: mol_type = other DNA
tttcttatgagacggcgagt

SEQ ID NO: 5543 - DNA, 20 bp, synthetic construct
  source 1..20: mol_type = other DNA
gtagtgctgaacagtcttga

SEQ ID NO: 5544 - DNA, 20 bp, synthetic construct
  source 1..20: mol_type = other DNA
gaatcgcagtctcgtctagg

SEQ ID NO: 5545 - DNA, 20 bp, synthetic construct
  source 1..20: mol_type = other DNA
cattcctttcggtaatacag

SEQ ID NO: 5546 - DNA, 20 bp, synthetic construct
  source 1..20: mol_type = other DNA
agcaagctactaactgggtt

SEQ ID NO: 5547 - DNA, 20 bp, synthetic construct
  source 1..20: mol_type = other DNA
aatttgactcagttgagagg

SEQ ID NO: 5548 - DNA, 20 bp, synthetic construct
  source 1..20: mol_type = other DNA
gagcgtgcgaactacgatag

SEQ ID NO: 5549 - DNA, 20 bp, synthetic construct
  source 1..20: mol_type = other DNA
ggtcactgccaatccgcaga

SEQ ID NO: 5550 - DNA, 20 bp, synthetic construct
  source 1..20: mol_type = other DNA
agggagactgactcgtgccg

SEQ ID NO: 5551 - DNA, 20 bp, synthetic construct
  source 1..20: mol_type = other DNA
tgaaataagagatcaagtgc

SEQ ID NO: 5552 - DNA, 20 bp, synthetic construct
  source 1..20: mol_type = other DNA
gggtgatcgacacttctgtt

SEQ ID NO: 5553 - DNA, 20 bp, synthetic construct
  source 1..20: mol_type = other DNA
acgacacgactctgatggca

SEQ ID NO: 5554 - DNA, 20 bp, synthetic construct
  source 1..20: mol_type = other DNA
actcgcgagtgtgtgacgcc

SEQ ID NO: 5555 - DNA, 20 bp, synthetic construct
  source 1..20: mol_type = other DNA
acggctctgatggtcccgat

SEQ ID NO: 5556 - DNA, 20 bp, synthetic construct
  source 1..20: mol_type = other DNA
tgacggtgctaggtcctaga

SEQ ID NO: 5557 - DNA, 20 bp, synthetic construct
  source 1..20: mol_type = other DNA
cgatgatccaatgacccagc

SEQ ID NO: 5558 - DNA, 20 bp, synthetic construct
  source 1..20: mol_type = other DNA
atattcagccttgtttcagt

SEQ ID NO: 5559 - DNA, 20 bp, synthetic construct
  source 1..20: mol_type = other DNA
accgctgcctgacgattatc

SEQ ID NO: 5560 - DNA, 20 bp, synthetic construct
  source 1..20: mol_type = other DNA
ttccagggtggaaatgacga

SEQ ID NO: 5561 - DNA, 20 bp, synthetic construct
  source 1..20: mol_type = other DNA
gattactcatccaaaggctt

SEQ ID NO: 5562 - DNA, 20 bp, synthetic construct
  source 1..20: mol_type = other DNA
ataaccagacactgtggagt

SEQ ID NO: 5563 - DNA, 20 bp, synthetic construct
  source 1..20: mol_type = other DNA
cactgcttaccgaaactgat

SEQ ID NO: 5564 - DNA, 20 bp, synthetic construct
  source 1..20: mol_type = other DNA
tgtcatggtcattcggttta

SEQ ID NO: 5565 - DNA, 20 bp, synthetic construct
  source 1..20: mol_type = other DNA
tactttctgcaccgtccagc

SEQ ID NO: 5566 - DNA, 20 bp, synthetic construct
  source 1..20: mol_type = other DNA
ttattctcatacgtggtcta

SEQ ID NO: 5567 - DNA, 20 bp, synthetic construct
  source 1..20: mol_type = other DNA
caactagccgatcccttccg

SEQ ID NO: 5568 - DNA, 20 bp, synthetic construct
  source 1..20: mol_type = other DNA
aaccaaagtcactcacctta

SEQ ID NO: 5569 - DNA, 20 bp, synthetic construct
  source 1..20: mol_type = other DNA
attggtgggatgaactagta

SEQ ID NO: 5570 - DNA, 20 bp, synthetic construct
  source 1..20: mol_type = other DNA
actctggatccagcaccgcc

SEQ ID NO: 5571 - DNA, 20 bp, synthetic construct
  source 1..20: mol_type = other DNA
ttgggctatccgacatatac

SEQ ID NO: 5572 - DNA, 20 bp, synthetic construct
  source 1..20: mol_type = other DNA
caaactcttcctacgacagt

SEQ ID NO: 5573 - DNA, 20 bp, synthetic construct
  source 1..20: mol_type = other DNA
ctgctcatatcagcccggcc

SEQ ID NO: 5574 - DNA, 20 bp, synthetic construct
  source 1..20: mol_type = other DNA
cccacttatgaactttgtac

SEQ ID NO: 5575 - DNA, 20 bp, synthetic construct
  source 1..20: mol_type = other DNA
gactgcccacttagatgcag

SEQ ID NO: 5576 - DNA, 20 bp, synthetic construct
  source 1..20: mol_type = other DNA
ggtcatcaggtcctagcgcc

SEQ ID NO: 5577 - DNA, 20 bp, synthetic construct
  source 1..20: mol_type = other DNA
cccagtgtagtcgtgccatt

SEQ ID NO: 5578 - DNA, 20 bp, synthetic construct
  source 1..20: mol_type = other DNA
cccactcttatgtgtattgg

SEQ ID NO: 5579 - DNA, 20 bp, synthetic construct
  source 1..20: mol_type = other DNA
gtaaggtatattaacaaggg

SEQ ID NO: 5580 - DNA, 20 bp, synthetic construct
  source 1..20: mol_type = other DNA
ccgacaatttcgggcgcaat

SEQ ID NO: 5581 - DNA, 20 bp, synthetic construct
  source 1..20: mol_type = other DNA
ctacctcccttatcccgatt

SEQ ID NO: 5582 - DNA, 20 bp, synthetic construct
  source 1..20: mol_type = other DNA
taagttcggtagacgagcga

SEQ ID NO: 5583 - DNA, 20 bp, synthetic construct
  source 1..20: mol_type = other DNA
actacttcgggaaggtttga

SEQ ID NO: 5584 - DNA, 20 bp, synthetic construct
  source 1..20: mol_type = other DNA
gccgtctacagaggttgaat

SEQ ID NO: 5585 - DNA, 20 bp, synthetic construct
  source 1..20: mol_type = other DNA
agtcccggttctgcactcga

SEQ ID NO: 5586 - DNA, 20 bp, synthetic construct
  source 1..20: mol_type = other DNA
tagtgccgcacggtgtttaa

SEQ ID NO: 5587 - DNA, 20 bp, synthetic construct
  source 1..20: mol_type = other DNA
aaagccagatatacactagc

SEQ ID NO: 5588 - DNA, 20 bp, synthetic construct
  source 1..20: mol_type = other DNA
cagatttggatttgggtccg

SEQ ID NO: 5589 - DNA, 20 bp, synthetic construct
  source 1..20: mol_type = other DNA
tcgtgaattgcgaacagctg

SEQ ID NO: 5590 - DNA, 20 bp, synthetic construct
  source 1..20: mol_type = other DNA
tagcgttgctacacccgtat

SEQ ID NO: 5591 - DNA, 20 bp, synthetic construct
  source 1..20: mol_type = other DNA
tcgcaagtaggatatgtatt

SEQ ID NO: 5592 - DNA, 20 bp, synthetic construct
  source 1..20: mol_type = other DNA
gagcacggctagcatgcgtc

SEQ ID NO: 5593 - DNA, 20 bp, synthetic construct
  source 1..20: mol_type = other DNA
tatcataggcgatataaagg

SEQ ID NO: 5594 - DNA, 20 bp, synthetic construct
  source 1..20: mol_type = other DNA
ggattaatcagagatacaga

SEQ ID NO: 5595 - DNA, 20 bp, synthetic construct
  source 1..20: mol_type = other DNA
ggagaatgcttgtgtaaatc

SEQ ID NO: 5596 - DNA, 20 bp, synthetic construct
  source 1..20: mol_type = other DNA
gcctcggacttgcagggatc

SEQ ID NO: 5597 - DNA, 20 bp, synthetic construct
  source 1..20: mol_type = other DNA
taccatctgaatggatctca

SEQ ID NO: 5598 - DNA, 20 bp, synthetic construct
  source 1..20: mol_type = other DNA
atgcggctgtgagttctagt

SEQ ID NO: 5599 - DNA, 20 bp, synthetic construct
  source 1..20: mol_type = other DNA
ggtctaaatgagataacagg

SEQ ID NO: 5600 - DNA, 20 bp, synthetic construct
  source 1..20: mol_type = other DNA
tcccgtacctggaaggagct

SEQ ID NO: 5601 - DNA, 20 bp, synthetic construct
  source 1..20: mol_type = other DNA
gcatctaagacaggtttgtc

SEQ ID NO: 5602 - DNA, 20 bp, synthetic construct
  source 1..20: mol_type = other DNA
taggtggctgtagtcgagtc

SEQ ID NO: 5603 - DNA, 20 bp, synthetic construct
  source 1..20: mol_type = other DNA
tgtttcgtatatcccaagca

SEQ ID NO: 5604 - DNA, 20 bp, synthetic construct
  source 1..20: mol_type = other DNA
actgctcttaccagaagagg

SEQ ID NO: 5605 - DNA, 20 bp, synthetic construct
  source 1..20: mol_type = other DNA
gacctttgagtgttcgatat

SEQ ID NO: 5606 - DNA, 20 bp, synthetic construct
  source 1..20: mol_type = other DNA
aaagtacaactgaacccgga

SEQ ID NO: 5607 - DNA, 20 bp, synthetic construct
  source 1..20: mol_type = other DNA
cgtcattgctggcatagcca

SEQ ID NO: 5608 - DNA, 20 bp, synthetic construct
  source 1..20: mol_type = other DNA
ccgctgataagtaacctaat

SEQ ID NO: 5609 - DNA, 20 bp, synthetic construct
  source 1..20: mol_type = other DNA
gtatcgcgcgagctatgtta

SEQ ID NO: 5610 - DNA, 20 bp, synthetic construct
  source 1..20: mol_type = other DNA
gggctacgtctctctattac

SEQ ID NO: 5611 - DNA, 20 bp, synthetic construct
  source 1..20: mol_type = other DNA
aggcttgtgcattcggaagt

SEQ ID NO: 5612 - DNA, 20 bp, synthetic construct
  source 1..20: mol_type = other DNA
tctacagtacattgtcgtgt

SEQ ID NO: 5613 - DNA, 20 bp, synthetic construct
  source 1..20: mol_type = other DNA
agaccgggcatttgggtctt

SEQ ID NO: 5614 - DNA, 20 bp, synthetic construct
  source 1..20: mol_type = other DNA
catgaggagaatcgggacta

SEQ ID NO: 5615 - DNA, 20 bp, synthetic construct
  source 1..20: mol_type = other DNA
gaactaccattattactgcc

SEQ ID NO: 5616 - DNA, 20 bp, synthetic construct
  source 1..20: mol_type = other DNA
ttcctgagacgaggcgctag

SEQ ID NO: 5617 - DNA, 20 bp, synthetic construct
  source 1..20: mol_type = other DNA
cacatagttgcagacaagtt

SEQ ID NO: 5618 - DNA, 20 bp, synthetic construct
  source 1..20: mol_type = other DNA
aaacgcgtcctaagagttcc

SEQ ID NO: 5619 - DNA, 20 bp, synthetic construct
  source 1..20: mol_type = other DNA
ctttgcgaggtctgccgaat

SEQ ID NO: 5620 - DNA, 20 bp, synthetic construct
  source 1..20: mol_type = other DNA
gcgcttcgaataggaatgcg

SEQ ID NO: 5621 - DNA, 20 bp, synthetic construct
  source 1..20: mol_type = other DNA
tcactagccattaattgagt

SEQ ID NO: 5622 - DNA, 20 bp, synthetic construct
  source 1..20: mol_type = other DNA
ctatcatttggatctctcgc

SEQ ID NO: 5623 - DNA, 20 bp, synthetic construct
  source 1..20: mol_type = other DNA
ctctggagcctactccttat

SEQ ID NO: 5624 - DNA, 20 bp, synthetic construct
  source 1..20: mol_type = other DNA
ctctaaatgtctttagctct

SEQ ID NO: 5625 - DNA, 20 bp, synthetic construct
  source 1..20: mol_type = other DNA
ggtgcgattacaaagaatgt

SEQ ID NO: 5626 - DNA, 20 bp, synthetic construct
  source 1..20: mol_type = other DNA
cacacaccgatctgcttcta

SEQ ID NO: 5627 - DNA, 20 bp, synthetic construct
  source 1..20: mol_type = other DNA
ctgagctgccacaatactcc

SEQ ID NO: 5628 - DNA, 20 bp, synthetic construct
  source 1..20: mol_type = other DNA
taataatagccgtctgtaca

SEQ ID NO: 5629 - DNA, 20 bp, synthetic construct
  source 1..20: mol_type = other DNA
cgacggacggtttatactcg

SEQ ID NO: 5630 - DNA, 20 bp, synthetic construct
  source 1..20: mol_type = other DNA
gcatttcagagttgctgagg

SEQ ID NO: 5631 - DNA, 20 bp, synthetic construct
  source 1..20: mol_type = other DNA
tgcacttaagtctagcgtac

SEQ ID NO: 5632 - DNA, 20 bp, synthetic construct
  source 1..20: mol_type = other DNA
aatagtatgaacctcaggaa

SEQ ID NO: 5633 - DNA, 20 bp, synthetic construct
  source 1..20: mol_type = other DNA
catgtagtttaaatggccct

SEQ ID NO: 5634 - DNA, 20 bp, synthetic construct
  source 1..20: mol_type = other DNA
tctgaaatcacgacttgggt

SEQ ID NO: 5635 - DNA, 20 bp, synthetic construct
  source 1..20: mol_type = other DNA
aggtctgccgctttatgctt

SEQ ID NO: 5636 - DNA, 20 bp, synthetic construct
  source 1..20: mol_type = other DNA
ctcgccacaatacgacacgt

SEQ ID NO: 5637 - DNA, 20 bp, synthetic construct
  source 1..20: mol_type = other DNA
cgtgtgcacttaaggatgac

SEQ ID NO: 5638 - DNA, 20 bp, synthetic construct
  source 1..20: mol_type = other DNA
cttgagcggtacgattctcg

SEQ ID NO: 5639 - DNA, 20 bp, synthetic construct
  source 1..20: mol_type = other DNA
aggctagtacaggaagttag

SEQ ID NO: 5640 - DNA, 20 bp, synthetic construct
  source 1..20: mol_type = other DNA
tggacgcttagaaccgtgaa

SEQ ID NO: 5641 - DNA, 20 bp, synthetic construct
  source 1..20: mol_type = other DNA
atggctcacgtgctaagcat

SEQ ID NO: 5642 - DNA, 20 bp, synthetic construct
  source 1..20: mol_type = other DNA
gtcaaagataagtggtcaga

SEQ ID NO: 5643 - DNA, 20 bp, synthetic construct
  source 1..20: mol_type = other DNA
gaacccaaactatctacaga

SEQ ID NO: 5644 - DNA, 20 bp, synthetic construct
  source 1..20: mol_type = other DNA
ctacaatgctcgccctgtag

SEQ ID NO: 5645 - DNA, 20 bp, synthetic construct
  source 1..20: mol_type = other DNA
cgactcgtatggcaatctga

SEQ ID NO: 5646 - DNA, 20 bp, synthetic construct
  source 1..20: mol_type = other DNA
cagtggccttccataattca

SEQ ID NO: 5647 - DNA, 20 bp, synthetic construct
  source 1..20: mol_type = other DNA
aataagcaagcgaaccaatt

SEQ ID NO: 5648 - DNA, 20 bp, synthetic construct
  source 1..20: mol_type = other DNA
tttagggcgaagtttatggg

SEQ ID NO: 5649 - DNA, 20 bp, synthetic construct
  source 1..20: mol_type = other DNA
gacttggtctctaaagttta

SEQ ID NO: 5650 - DNA, 20 bp, synthetic construct
  source 1..20: mol_type = other DNA
attacttgactgccctgcga

SEQ ID NO: 5651 - DNA, 20 bp, synthetic construct
  source 1..20: mol_type = other DNA
gatggaacccggaaccggtt

SEQ ID NO: 5652 - DNA, 20 bp, synthetic construct
  source 1..20: mol_type = other DNA
tcgttattccatgacaggag

SEQ ID NO: 5653 - DNA, 20 bp, synthetic construct
  source 1..20: mol_type = other DNA
cgaccttggtgcttattggc

SEQ ID NO: 5654 - DNA, 20 bp, synthetic construct
  source 1..20: mol_type = other DNA
atccaatgttgagaaatccc

SEQ ID NO: 5655 - DNA, 20 bp, synthetic construct
  source 1..20: mol_type = other DNA
gtcgaggctccgtcactacc

SEQ ID NO: 5656 - DNA, 20 bp, synthetic construct
  source 1..20: mol_type = other DNA
gctgcacaggccacgcgtaa

SEQ ID NO: 5657 - DNA, 20 bp, synthetic construct
  source 1..20: mol_type = other DNA
gtaacagtgtccggatagct

SEQ ID NO: 5658 - DNA, 20 bp, synthetic construct
  source 1..20: mol_type = other DNA
gtgcataagtcccatggagt

SEQ ID NO: 5659 - DNA, 20 bp, synthetic construct
  source 1..20: mol_type = other DNA
catcgcgaaggtggttccca

SEQ ID NO: 5660 - DNA, 20 bp, synthetic construct
  source 1..20: mol_type = other DNA
gggatgatagcaaaccacgc

SEQ ID NO: 5661 - DNA, 20 bp, synthetic construct
  source 1..20: mol_type = other DNA
caatggattgcgtgcgattg

SEQ ID NO: 5662 - DNA, 20 bp, synthetic construct
  source 1..20: mol_type = other DNA
gtatccaaagaacccgcggt

SEQ ID NO: 5663 - DNA, 20 bp, synthetic construct
  source 1..20: mol_type = other DNA
gccataacgcgaggatatgg

SEQ ID NO: 5664 - DNA, 20 bp, synthetic construct
  source 1..20: mol_type = other DNA
cttgccaaactgactgagaa

SEQ ID NO: 5665 - DNA, 20 bp, synthetic construct
  source 1..20: mol_type = other DNA
tctcacgcgctatagtctct

SEQ ID NO: 5666 - DNA, 20 bp, synthetic construct
  source 1..20: mol_type = other DNA
gagcagttgcgatgttacgc

SEQ ID NO: 5667 - DNA, 20 bp, synthetic construct
  source 1..20: mol_type = other DNA
ataacagccgcattgcatgg

SEQ ID NO: 5668 - DNA, 20 bp, synthetic construct
  source 1..20: mol_type = other DNA
tcaaacgctcaggaaacgca

SEQ ID NO: 5669 - DNA, 20 bp, synthetic construct
  source 1..20: mol_type = other DNA
ccggtacatgaactccagcg

SEQ ID NO: 5670 - DNA, 20 bp, synthetic construct
  source 1..20: mol_type = other DNA
caatattagagaaagaaccc

SEQ ID NO: 5671 - DNA, 20 bp, synthetic construct
  source 1..20: mol_type = other DNA
agcttatctaagtctctttc

SEQ ID NO: 5672 - DNA, 20 bp, synthetic construct
  source 1..20: mol_type = other DNA
ggacatgtgaacttacgcgc

SEQ ID NO: 5673 - DNA, 20 bp, synthetic construct
  source 1..20: mol_type = other DNA
gcagaagggtcctatgtttg

SEQ ID NO: 5674 - DNA, 20 bp, synthetic construct
  source 1..20: mol_type = other DNA
tatatcaagggccaagaagt

SEQ ID NO: 5675 - DNA, 20 bp, synthetic construct
  source 1..20: mol_type = other DNA
cgagaacttaattagccatc

SEQ ID NO: 5676 - DNA, 20 bp, synthetic construct
  source 1..20: mol_type = other DNA
tcccaacggtcgtttgcagg

SEQ ID NO: 5677 - DNA, 20 bp, synthetic construct
  source 1..20: mol_type = other DNA
cgtgcgctccttaagcctca

SEQ ID NO: 5678 - DNA, 20 bp, synthetic construct
  source 1..20: mol_type = other DNA
gcaagagcttcgtcccaatt

SEQ ID NO: 5679 - DNA, 20 bp, synthetic construct
  source 1..20: mol_type = other DNA
gtcagacgtttccacggtat

SEQ ID NO: 5680 - DNA, 20 bp, synthetic construct
  source 1..20: mol_type = other DNA
gcccactgacacgttgcttg

SEQ ID NO: 5681 - DNA, 20 bp, synthetic construct
  source 1..20: mol_type = other DNA
atataactcacatggcggat

SEQ ID NO: 5682 - DNA, 20 bp, synthetic construct
  source 1..20: mol_type = other DNA
actcccgaacgttggctctg

SEQ ID NO: 5683 - DNA, 20 bp, synthetic construct
  source 1..20: mol_type = other DNA
gggaatctcgtaggaggtga

SEQ ID NO: 5684 - DNA, 20 bp, synthetic construct
  source 1..20: mol_type = other DNA
cagatcgcttaaggcacgac

SEQ ID NO: 5685 - DNA, 20 bp, synthetic construct
  source 1..20: mol_type = other DNA
agacataggcacgcatcctt

SEQ ID NO: 5686 - DNA, 20 bp, synthetic construct
  source 1..20: mol_type = other DNA
acggagagccacatatcttc

SEQ ID NO: 5687 - DNA, 20 bp, synthetic construct
  source 1..20: mol_type = other DNA
ggattgcggcttgcaccaag

SEQ ID NO: 5688 - DNA, 20 bp, synthetic construct
  source 1..20: mol_type = other DNA
tggcggcaggagtacactct

SEQ ID NO: 5689 - DNA, 20 bp, synthetic construct
  source 1..20: mol_type = other DNA
cggtatcccagaacttcact

SEQ ID NO: 5690 - DNA, 20 bp, synthetic construct
  source 1..20: mol_type = other DNA
gcttgctcttatcgaatgca

SEQ ID NO: 5691 - DNA, 20 bp, synthetic construct
  source 1..20: mol_type = other DNA
tcacgaatggagcgtggaaa

SEQ ID NO: 5692 - DNA, 20 bp, synthetic construct
  source 1..20: mol_type = other DNA
acggtccactcttcatcgct

SEQ ID NO: 5693 - DNA, 20 bp, synthetic construct
  source 1..20: mol_type = other DNA
tgatgcccagaagtatttaa

SEQ ID NO: 5694 - DNA, 20 bp, synthetic construct
  source 1..20: mol_type = other DNA
ctggtcaggaccgagcctgt

SEQ ID NO: 5695 - DNA, 20 bp, synthetic construct
  source 1..20: mol_type = other DNA
tttgactgttgtgaacctta

SEQ ID NO: 5696 - DNA, 20 bp, synthetic construct
  source 1..20: mol_type = other DNA
ggataagggccacatcatcg

SEQ ID NO: 5697 - DNA, 20 bp, synthetic construct
  source 1..20: mol_type = other DNA
cgctgtaggcgggcaacata

SEQ ID NO: 5698 - DNA, 20 bp, synthetic construct
  source 1..20: mol_type = other DNA
cgacccaaatcaagatccaa

SEQ ID NO: 5699 - DNA, 20 bp, synthetic construct
  source 1..20: mol_type = other DNA
tctctttccgtgtgttcgaa

SEQ ID NO: 5700 - DNA, 20 bp, synthetic construct
  source 1..20: mol_type = other DNA
tgcgtttgccgggtcgctca

SEQ ID NO: 5701 - DNA, 20 bp, synthetic construct
  source 1..20: mol_type = other DNA
ggtccctccgtgagttgaca

SEQ ID NO: 5702 - DNA, 20 bp, synthetic construct
  source 1..20: mol_type = other DNA
gatagagcatgaaagacatc

SEQ ID NO: 5703 - DNA, 20 bp, synthetic construct
  source 1..20: mol_type = other DNA
ttcatctgtaacaggcaact

SEQ ID NO: 5704 - DNA, 20 bp, synthetic construct
  source 1..20: mol_type = other DNA
accgtgagtggtaagttggc

SEQ ID NO: 5705 - DNA, 20 bp, synthetic construct
  source 1..20: mol_type = other DNA
gtctaggtcgaacaagatgt

SEQ ID NO: 5706 - DNA, 20 bp, synthetic construct
  source 1..20: mol_type = other DNA
ctgactacagcggcttgcaa

SEQ ID NO: 5707 - DNA, 20 bp, synthetic construct
  source 1..20: mol_type = other DNA
aatacaccatatcgacttgc

SEQ ID NO: 5708 - DNA, 20 bp, synthetic construct
  source 1..20: mol_type = other DNA
tcatgcgttaaatgggtaac

SEQ ID NO: 5709 - DNA, 20 bp, synthetic construct
  source 1..20: mol_type = other DNA
cactaagctcatgcgggtga

SEQ ID NO: 5710 - DNA, 20 bp, synthetic construct
  source 1..20: mol_type = other DNA
cgtaagccttaatcaccggc

SEQ ID NO: 5711 - DNA, 20 bp, synthetic construct
  source 1..20: mol_type = other DNA
cagtacgcgctagcgaccct

SEQ ID NO: 5712 - DNA, 20 bp, synthetic construct
  source 1..20: mol_type = other DNA
taattctatacgctgtcacc

SEQ ID NO: 5713 - DNA, 20 bp, synthetic construct
  source 1..20: mol_type = other DNA
ttctatggctgcatggatta

SEQ ID NO: 5714 - DNA, 20 bp, synthetic construct
  source 1..20: mol_type = other DNA
gtgataaaggagtatggcac

SEQ ID NO: 5715 - DNA, 20 bp, synthetic construct
  source 1..20: mol_type = other DNA
tatcataagctgggtagtcg

SEQ ID NO: 5716 - DNA, 20 bp, synthetic construct
  source 1..20: mol_type = other DNA
gaacatgttgctgtacgagg

SEQ ID NO: 5717 - DNA, 20 bp, synthetic construct
  source 1..20: mol_type = other DNA
aatgctgaagatcaccttca

SEQ ID NO: 5718 - DNA, 20 bp, synthetic construct
  source 1..20: mol_type = other DNA
tgaatagaccggtgccgtgt

SEQ ID NO: 5719 - DNA, 20 bp, synthetic construct
  source 1..20: mol_type = other DNA
tagctagacaacctaatctt

SEQ ID NO: 5720 - DNA, 20 bp, synthetic construct
  source 1..20: mol_type = other DNA
tctcatgtattcgcagccgt

SEQ ID NO: 5721 - DNA, 20 bp, synthetic construct
  source 1..20: mol_type = other DNA
gtttgactctggacatattg

SEQ ID NO: 5722 - DNA, 20 bp, synthetic construct
  source 1..20: mol_type = other DNA
accatcggagagaaagactt

SEQ ID NO: 5723 - DNA, 20 bp, synthetic construct
  source 1..20: mol_type = other DNA
cccggcggcacacttataag

SEQ ID NO: 5724 - DNA, 20 bp, synthetic construct
  source 1..20: mol_type = other DNA
agtagacatcactccacagc

SEQ ID NO: 5725 - DNA, 20 bp, synthetic construct
  source 1..20: mol_type = other DNA
cgttggtaggcgtctccgtg

SEQ ID NO: 5726 - DNA, 20 bp, synthetic construct
  source 1..20: mol_type = other DNA
tgaaacacgtttatttgcct

SEQ ID NO: 5727 - DNA, 20 bp, synthetic construct
  source 1..20: mol_type = other DNA
catgcccgctactttcaacc

SEQ ID NO: 5728 - DNA, 20 bp, synthetic construct
  source 1..20: mol_type = other DNA
ctttgtaccatacggatttg

SEQ ID NO: 5729 - DNA, 20 bp, synthetic construct
  source 1..20: mol_type = other DNA
agttcgtaccctccggtaat

SEQ ID NO: 5730 - DNA, 20 bp, synthetic construct
  source 1..20: mol_type = other DNA
gaggtggatctacgtggttt

SEQ ID NO: 5731 - DNA, 20 bp, synthetic construct
  source 1..20: mol_type = other DNA
agcgacgcacaaccgaaata

SEQ ID NO: 5732 - DNA, 20 bp, synthetic construct
  source 1..20: mol_type = other DNA
ctagagttacaagcggtcag

SEQ ID NO: 5733 - DNA, 20 bp, synthetic construct
  source 1..20: mol_type = other DNA
aaatctcgcattccctgcct

SEQ ID NO: 5734 - DNA, 20 bp, synthetic construct
  source 1..20: mol_type = other DNA
tcgtatctatcatataggct

SEQ ID NO: 5735 - DNA, 20 bp, synthetic construct
  source 1..20: mol_type = other DNA
ggaagcccgttccagttcct

SEQ ID NO: 5736 - DNA, 20 bp, synthetic construct
  source 1..20: mol_type = other DNA
tagcgacggtatagctggag

SEQ ID NO: 5737 - DNA, 20 bp, synthetic construct
  source 1..20: mol_type = other DNA
gctaacagtggccagagacc

SEQ ID NO: 5738 - DNA, 20 bp, synthetic construct
  source 1..20: mol_type = other DNA
ggatagagtgcctatcccgg

SEQ ID NO: 5739 - DNA, 20 bp, synthetic construct
  source 1..20: mol_type = other DNA
gtactatgcacatagcggta

SEQ ID NO: 5740 - DNA, 20 bp, synthetic construct
  source 1..20: mol_type = other DNA
cggtgtgcgcttaggagtcg

SEQ ID NO: 5741 - DNA, 20 bp, synthetic construct
  source 1..20: mol_type = other DNA
ttattcgagcaaacttgcct

SEQ ID NO: 5742 - DNA, 20 bp, synthetic construct
  source 1..20: mol_type = other DNA
ccgcgaaatcgagaaatgcg

SEQ ID NO: 5743 - DNA, 20 bp, synthetic construct
  source 1..20: mol_type = other DNA
tcgaataatgtaaatccgct

SEQ ID NO: 5744 - DNA, 20 bp, synthetic construct
  source 1..20: mol_type = other DNA
tgacgccatcttgtaccaca

SEQ ID NO: 5745 - DNA, 20 bp, synthetic construct
  source 1..20: mol_type = other DNA
ccttgctacgatgcgttata

SEQ ID NO: 5746 - DNA, 20 bp, synthetic construct
  source 1..20: mol_type = other DNA
gaccgttaaggtcccacttt

SEQ ID NO: 5747 - DNA, 20 bp, synthetic construct
  source 1..20: mol_type = other DNA
cgggactctcggctgtcaag

SEQ ID NO: 5748 - DNA, 20 bp, synthetic construct
  source 1..20: mol_type = other DNA
tcaaggcgtgttcgggctac

SEQ ID NO: 5749 - DNA, 20 bp, synthetic construct
  source 1..20: mol_type = other DNA
gcggctacaatatccgtcca

SEQ ID NO: 5750 - DNA, 20 bp, synthetic construct
  source 1..20: mol_type = other DNA
cacagatctacaatgagact

SEQ ID NO: 5751 - DNA, 20 bp, synthetic construct
  source 1..20: mol_type = other DNA
atatctccaccttacgcatt

SEQ ID NO: 5752 - DNA, 20 bp, synthetic construct
  source 1..20: mol_type = other DNA
ttgctcccaacaagaactca

SEQ ID NO: 5753 - DNA, 20 bp, synthetic construct
  source 1..20: mol_type = other DNA
cataattgctgcccaactct

SEQ ID NO: 5754 - DNA, 20 bp, synthetic construct
  source 1..20: mol_type = other DNA
tgtagtaaccgatgaatcgg

SEQ ID NO: 5755 - DNA, 20 bp, synthetic construct
  source 1..20: mol_type = other DNA
cagactaatgacgcttacat

SEQ ID NO: 5756 - DNA, 20 bp, synthetic construct
  source 1..20: mol_type = other DNA
gacgctaaccgtcagcttac

SEQ ID NO: 5757 - DNA, 20 bp, synthetic construct
  source 1..20: mol_type = other DNA
ggtagccgaaatccggcaca

SEQ ID NO: 5758 - DNA, 20 bp, synthetic construct
  source 1..20: mol_type = other DNA
gcgcaatcggcggtcttaga

SEQ ID NO: 5759 - DNA, 20 bp, synthetic construct
  source 1..20: mol_type = other DNA
ggcttatggctttcatccgc

SEQ ID NO: 5760 - DNA, 20 bp, synthetic construct
  source 1..20: mol_type = other DNA
gcgcgtagcatgaagcgcca

SEQ ID NO: 5761 - DNA, 20 bp, synthetic construct
  source 1..20: mol_type = other DNA
ttgtagatcgttctgatgac

SEQ ID NO: 5762 - DNA, 20 bp, synthetic construct
  source 1..20: mol_type = other DNA
gcacgcgtgcatctaccatc

SEQ ID NO: 5763 - DNA, 20 bp, synthetic construct
  source 1..20: mol_type = other DNA
ctcgattcacgcagcttcca

SEQ ID NO: 5764 - DNA, 20 bp, synthetic construct
  source 1..20: mol_type = other DNA
ccatgattgtatcgctgctc

SEQ ID NO: 5765 - DNA, 20 bp, synthetic construct
  source 1..20: mol_type = other DNA
cgtcggtgggatgagtttcc

SEQ ID NO: 5766 - DNA, 20 bp, synthetic construct
  source 1..20: mol_type = other DNA
tagtacagctggactgtgaa

SEQ ID NO: 5767 - DNA, 20 bp, synthetic construct
  source 1..20: mol_type = other DNA
tgtgaaattgtccagcaccc

SEQ ID NO: 5768 - DNA, 20 bp, synthetic construct
  source 1..20: mol_type = other DNA
tcacttagaaactgcgagaa

SEQ ID NO: 5769 - DNA, 20 bp, synthetic construct
  source 1..20: mol_type = other DNA
atctgtccacctctctgggt

SEQ ID NO: 5770 - DNA, 20 bp, synthetic construct
  source 1..20: mol_type = other DNA
cgaatcacggccacacgtga

SEQ ID NO: 5771 - DNA, 20 bp, synthetic construct
  source 1..20: mol_type = other DNA
aacgcatgtaatgtagacga

SEQ ID NO: 5772 - DNA, 20 bp, synthetic construct
  source 1..20: mol_type = other DNA
ttattcaccacgtagtcctt

SEQ ID NO: 5773 - DNA, 20 bp, synthetic construct
  source 1..20: mol_type = other DNA
aggtggaatcacctgccatg

SEQ ID NO: 5774 - DNA, 20 bp, synthetic construct
  source 1..20: mol_type = other DNA
tcaccatatagatgaatcct

SEQ ID NO: 5775 - DNA, 20 bp, synthetic construct
  source 1..20: mol_type = other DNA
atgagctttgttcagggtcg

SEQ ID NO: 5776 - DNA, 20 bp, synthetic construct
  source 1..20: mol_type = other DNA
aaataggtgccgagaaatgg

SEQ ID NO: 5777 - DNA, 20 bp, synthetic construct
  source 1..20: mol_type = other DNA
attatggaccctcggctcaa

SEQ ID NO: 5778 - DNA, 20 bp, synthetic construct
  source 1..20: mol_type = other DNA
tagcattgtcggttgttatt

SEQ ID NO: 5779 - DNA, 20 bp, synthetic construct
  source 1..20: mol_type = other DNA
gagtcaggtgggtagtccca

SEQ ID NO: 5780 - DNA, 20 bp, synthetic construct
  source 1..20: mol_type = other DNA
ctacgcccagtgttgtggtc

SEQ ID NO: 5781 - DNA, 20 bp, synthetic construct
  source 1..20: mol_type = other DNA
aagggagtctcaacctgcac

SEQ ID NO: 5782 - DNA, 20 bp, synthetic construct
  source 1..20: mol_type = other DNA
cctctttggaaacacattcc

SEQ ID NO: 5783 - DNA, 20 bp, synthetic construct
  source 1..20: mol_type = other DNA
aagcgctactaagaaacgac

SEQ ID NO: 5784 - DNA, 20 bp, synthetic construct
  source 1..20: mol_type = other DNA
acttctcagaccaatctgcc

SEQ ID NO: 5785 - DNA, 20 bp, synthetic construct
  source 1..20: mol_type = other DNA
aggttgcgtgcgctacaggt

SEQ ID NO: 5786 - DNA, 20 bp, synthetic construct
  source 1..20: mol_type = other DNA
ctttcgggagctatatttgc

SEQ ID NO: 5787 - DNA, 20 bp, synthetic construct
  source 1..20: mol_type = other DNA
aaagtcactgtttgtagacc

SEQ ID NO: 5788 - DNA, 20 bp, synthetic construct
  source 1..20: mol_type = other DNA
ccaagtgacgagggttccac

SEQ ID NO: 5789 - DNA, 20 bp, synthetic construct
  source 1..20: mol_type = other DNA
agcaaggtttgcgtaatcgt

SEQ ID NO: 5790 - DNA, 20 bp, synthetic construct
  source 1..20: mol_type = other DNA
accgaggcacagatgtgtaa

SEQ ID NO: 5791 - DNA, 20 bp, synthetic construct
  source 1..20: mol_type = other DNA
tatgtctgtgcgtttaatag

SEQ ID NO: 5792 - DNA, 20 bp, synthetic construct
  source 1..20: mol_type = other DNA
aattgtaatcattgcgcccg

SEQ ID NO: 5793 - DNA, 20 bp, synthetic construct
  source 1..20: mol_type = other DNA
gctcttggaaacatcgcact

SEQ ID NO: 5794 - DNA, 20 bp, synthetic construct
  source 1..20: mol_type = other DNA
gatcgacatccagacttatt

SEQ ID NO: 5795 - DNA, 20 bp, synthetic construct
  source 1..20: mol_type = other DNA
cggatattaagctagttgct

SEQ ID NO: 5796 - DNA, 20 bp, synthetic construct
  source 1..20: mol_type = other DNA
tccgatagaaatccctgctc

SEQ ID NO: 5797 - DNA, 20 bp, synthetic construct
  source 1..20: mol_type = other DNA
ccctctatggcggaatgaag

SEQ ID NO: 5798 - DNA, 20 bp, synthetic construct
  source 1..20: mol_type = other DNA
gccgctcgattggtgatgtg

SEQ ID NO: 5799 - DNA, 20 bp, synthetic construct
  source 1..20: mol_type = other DNA
cgacagtaattgcagaagag

SEQ ID NO: 5800 - DNA, 20 bp, synthetic construct
  source 1..20: mol_type = other DNA
ctgggcgtattcagttacat

SEQ ID NO: 5801 - DNA, 20 bp, synthetic construct
  source 1..20: mol_type = other DNA
gcctaaagttctgtccctgc

SEQ ID NO: 5802 - DNA, 20 bp, synthetic construct
  source 1..20: mol_type = other DNA
tcgggcgtttgatccactcc

SEQ ID NO: 5803 - DNA, 20 bp, synthetic construct
  source 1..20: mol_type = other DNA
cgcacgtccgggaatacctt

SEQ ID NO: 5804 - DNA, 20 bp, synthetic construct
  source 1..20: mol_type = other DNA
atggcttgcacatacctggg

SEQ ID NO: 5805 - DNA, 20 bp, synthetic construct
  source 1..20: mol_type = other DNA
ttgaatgagaggcttacgaa

SEQ ID NO: 5806 - DNA, 20 bp, synthetic construct
  source 1..20: mol_type = other DNA
ataaattcgtagtcggataa

SEQ ID NO: 5807 - DNA, 20 bp, synthetic construct
  source 1..20: mol_type = other DNA
gattagtatgagcaagtcgc

SEQ ID NO: 5808 - DNA, 20 bp, synthetic construct
  source 1..20: mol_type = other DNA
ctggcttgtaagtttacaat

SEQ ID NO: 5809 - DNA, 20 bp, synthetic construct
  source 1..20: mol_type = other DNA
tcacagattgaagggactct

SEQ ID NO: 5810 - DNA, 20 bp, synthetic construct
  source 1..20: mol_type = other DNA
cagcgcgaaagcagaagtaa

SEQ ID NO: 5811 - DNA, 20 bp, synthetic construct
  source 1..20: mol_type = other DNA
agtcggatgcaacgagttct

SEQ ID NO: 5812 - DNA, 20 bp, synthetic construct
  source 1..20: mol_type = other DNA
tcggcgacccgcatgataat

SEQ ID NO: 5813 - DNA, 20 bp, synthetic construct
  source 1..20: mol_type = other DNA
ccttccagggtttcgcgttg

SEQ ID NO: 5814 - DNA, 20 bp, synthetic construct
  source 1..20: mol_type = other DNA
gataatagggtatacgtcgg

SEQ ID NO: 5815 - DNA, 20 bp, synthetic construct
  source 1..20: mol_type = other DNA
tgtcggttgagactattcca

SEQ ID NO: 5816 - DNA, 20 bp, synthetic construct
  source 1..20: mol_type = other DNA
aacacacgggctaggaggag

SEQ ID NO: 5817 - DNA, 20 bp, synthetic construct
  source 1..20: mol_type = other DNA
attgtcctaattacacctac

SEQ ID NO: 5818 - DNA, 20 bp, synthetic construct
  source 1..20: mol_type = other DNA
cgaatgccagacaaatttgt

SEQ ID NO: 5819 - DNA, 20 bp, synthetic construct
  source 1..20: mol_type = other DNA
gcatttcatcggtgaggcgg

SEQ ID NO: 5820 - DNA, 20 bp, synthetic construct
  source 1..20: mol_type = other DNA
catatgaccgattgccacca

SEQ ID NO: 5821 - DNA, 20 bp, synthetic construct
  source 1..20: mol_type = other DNA
attggccgtatcattctgct

SEQ ID NO: 5822 - DNA, 20 bp, synthetic construct
  source 1..20: mol_type = other DNA
cagctacaagacggaactaa

SEQ ID NO: 5823 - DNA, 20 bp, synthetic construct
  source 1..20: mol_type = other DNA
gtcaagagggcgcgataaac

SEQ ID NO: 5824 - DNA, 20 bp, synthetic construct
  source 1..20: mol_type = other DNA
aaatagcacgccaagagaat

SEQ ID NO: 5825 - DNA, 20 bp, synthetic construct
  source 1..20: mol_type = other DNA
cgttggaatcccgacagatc

SEQ ID NO: 5826 - DNA, 20 bp, synthetic construct
  source 1..20: mol_type = other DNA
tgcgcctccgtgttaggctg

SEQ ID NO: 5827 - DNA, 20 bp, synthetic construct
  source 1..20: mol_type = other DNA
tcgtagtcattaaagctgag

SEQ ID NO: 5828 - DNA, 20 bp, synthetic construct
  source 1..20: mol_type = other DNA
accatcacgtgaagcaacat

SEQ ID NO: 5829 - DNA, 20 bp, synthetic construct
  source 1..20: mol_type = other DNA
actgctccggtggattgcac

SEQ ID NO: 5830 - DNA, 20 bp, synthetic construct
  source 1..20: mol_type = other DNA
cgaacatagtgaggcctacg

SEQ ID NO: 5831 - DNA, 20 bp, synthetic construct
  source 1..20: mol_type = other DNA
acgttactgcgccaactgtc

SEQ ID NO: 5832 - DNA, 20 bp, synthetic construct
  source 1..20: mol_type = other DNA
gaccataggtacactgcgcc

SEQ ID NO: 5833 - DNA, 20 bp, synthetic construct
  source 1..20: mol_type = other DNA
gtatgctgtacaaccagaga

SEQ ID NO: 5834 - DNA, 20 bp, synthetic construct
  source 1..20: mol_type = other DNA
gctttgggaacttcctaaat

SEQ ID NO: 5835 - DNA, 20 bp, synthetic construct
  source 1..20: mol_type = other DNA
cttatcactctgctacacac

SEQ ID NO: 5836 - DNA, 20 bp, synthetic construct
  source 1..20: mol_type = other DNA
cgtactacggattggtttca

SEQ ID NO: 5837 - DNA, 20 bp, synthetic construct
  source 1..20: mol_type = other DNA
ttctttccactcttgggagg

SEQ ID NO: 5838 - DNA, 20 bp, synthetic construct
  source 1..20: mol_type = other DNA
ccgaaccgagaaacattgct

SEQ ID NO: 5839 - DNA, 20 bp, synthetic construct
  source 1..20: mol_type = other DNA
acaacattcgcacaagatta

SEQ ID NO: 5840 - DNA, 20 bp, synthetic construct
  source 1..20: mol_type = other DNA
ataatagtccctgatggatt

SEQ ID NO: 5841 - DNA, 20 bp, synthetic construct
  source 1..20: mol_type = other DNA
tggcatggagagccggttga

SEQ ID NO: 5842 - DNA, 20 bp, synthetic construct
  source 1..20: mol_type = other DNA
taagtttacaccgctttgtg

SEQ ID NO: 5843 - DNA, 20 bp, synthetic construct
  source 1..20: mol_type = other DNA
gcattgcaaacacctactca

SEQ ID NO: 5844 - DNA, 20 bp, synthetic construct
  source 1..20: mol_type = other DNA
taggatcgaaagataaggcc

SEQ ID NO: 5845 - DNA, 20 bp, synthetic construct
  source 1..20: mol_type = other DNA
agcggtcgctaagtgccttt

SEQ ID NO: 5846 - DNA, 20 bp, synthetic construct
  source 1..20: mol_type = other DNA
ttcgatccaaatggaatact

SEQ ID NO: 5847 - DNA, 20 bp, synthetic construct
  source 1..20: mol_type = other DNA
tctcttctccgcattacgca

SEQ ID NO: 5848 - DNA, 20 bp, synthetic construct
  source 1..20: mol_type = other DNA
cgtcatttaactgccggtgc

SEQ ID NO: 5849 - DNA, 20 bp, synthetic construct
  source 1..20: mol_type = other DNA
tttcgtagctagaaataggc

SEQ ID NO: 5850 - DNA, 20 bp, synthetic construct
  source 1..20: mol_type = other DNA
gaatacgaatgcgcccatcc

SEQ ID NO: 5851 - DNA, 20 bp, synthetic construct
  source 1..20: mol_type = other DNA
ctagagaccatgcagcctcc

SEQ ID NO: 5852 - DNA, 20 bp, synthetic construct
  source 1..20: mol_type = other DNA
ctagacagcggagtaatgcg

SEQ ID NO: 5853 - DNA, 20 bp, synthetic construct
  source 1..20: mol_type = other DNA
gaagttgactaactagatag

SEQ ID NO: 5854 - DNA, 20 bp, synthetic construct
  source 1..20: mol_type = other DNA
gttgaagcattacctaagcg

SEQ ID NO: 5855 - DNA, 20 bp, synthetic construct
  source 1..20: mol_type = other DNA
aggcacacgacatcaacgta

SEQ ID NO: 5856 - DNA, 20 bp, synthetic construct
  source 1..20: mol_type = other DNA
gacagtaggtgggaatagtg

SEQ ID NO: 5857 - DNA, 20 bp, synthetic construct
  source 1..20: mol_type = other DNA
gcgagtgtgtcatgtgtgtg

SEQ ID NO: 5858 - DNA, 20 bp, synthetic construct
  source 1..20: mol_type = other DNA
caatgctacactacggaatg

SEQ ID NO: 5859 - DNA, 20 bp, synthetic construct
  source 1..20: mol_type = other DNA
ccatttattccgtaagaagc

SEQ ID NO: 5860 - DNA, 20 bp, synthetic construct
  source 1..20: mol_type = other DNA
tcggcatataatagtagttg

SEQ ID NO: 5861 - DNA, 20 bp, synthetic construct
  source 1..20: mol_type = other DNA
agctgacgtcgataactcta

SEQ ID NO: 5862 - DNA, 20 bp, synthetic construct
  source 1..20: mol_type = other DNA
gtgcacgaatctatgggaat

SEQ ID NO: 5863 - DNA, 20 bp, synthetic construct
  source 1..20: mol_type = other DNA
taggcacaactgataggaat

SEQ ID NO: 5864 - DNA, 20 bp, synthetic construct
  source 1..20: mol_type = other DNA
tcaaactcagtaccgccgaa

SEQ ID NO: 5865 - DNA, 20 bp, synthetic construct
  source 1..20: mol_type = other DNA
ggaaatagggccgttgcaaa

SEQ ID NO: 5866 - DNA, 20 bp, synthetic construct
  source 1..20: mol_type = other DNA
agatggtttctcatgttgaa

SEQ ID NO: 5867 - DNA, 20 bp, synthetic construct
  source 1..20: mol_type = other DNA
acagtcttacagggtcacag

SEQ ID NO: 5868 - DNA, 20 bp, synthetic construct
  source 1..20: mol_type = other DNA
gtcttgtattatcgtctcgt

SEQ ID NO: 5869 - DNA, 20 bp, synthetic construct
  source 1..20: mol_type = other DNA
gctgcccaaattaattagaa

SEQ ID NO: 5870 - DNA, 20 bp, synthetic construct
  source 1..20: mol_type = other DNA
ccaaagccgcacacagaccg

SEQ ID NO: 5871 - DNA, 20 bp, synthetic construct
  source 1..20: mol_type = other DNA
aagccgagctaccacgactt

SEQ ID NO: 5872 - DNA, 20 bp, synthetic construct
  source 1..20: mol_type = other DNA
tactccatatacttcttgag

SEQ ID NO: 5873 - DNA, 20 bp, synthetic construct
  source 1..20: mol_type = other DNA
ctactcacttatgttcgata

SEQ ID NO: 5874 - DNA, 20 bp, synthetic construct
  source 1..20: mol_type = other DNA
tggtttctagtaaactcacg

SEQ ID NO: 5875 - DNA, 20 bp, synthetic construct
  source 1..20: mol_type = other DNA
ccagactcgtgtcgggtaga

SEQ ID NO: 5876 - DNA, 20 bp, synthetic construct
  source 1..20: mol_type = other DNA
agtgacaacttactgcaggg

SEQ ID NO: 5877 - DNA, 20 bp, synthetic construct
  source 1..20: mol_type = other DNA
aatgctggatagcagtggat

SEQ ID NO: 5878 - DNA, 20 bp, synthetic construct
  source 1..20: mol_type = other DNA
atgcgcattacttacagatc

SEQ ID NO: 5879 - DNA, 20 bp, synthetic construct
  source 1..20: mol_type = other DNA
gaaagatgaacgggcaccag

SEQ ID NO: 5880 - DNA, 20 bp, synthetic construct
  source 1..20: mol_type = other DNA
acgggagcggaccagaatgg

SEQ ID NO: 5881 - DNA, 20 bp, synthetic construct
  source 1..20: mol_type = other DNA
tgtattgtttcaagatgggt

SEQ ID NO: 5882 - DNA, 20 bp, synthetic construct
  source 1..20: mol_type = other DNA
ctcccgagataaccaatcca

SEQ ID NO: 5883 - DNA, 20 bp, synthetic construct
  source 1..20: mol_type = other DNA
aacagtccggtacgattcct

SEQ ID NO: 5884 - DNA, 20 bp, synthetic construct
  source 1..20: mol_type = other DNA
cccgagttcggtaccagttg

SEQ ID NO: 5885 - DNA, 20 bp, synthetic construct
  source 1..20: mol_type = other DNA
ccatgcctcacccgtctacc

SEQ ID NO: 5886 - DNA, 20 bp, synthetic construct
  source 1..20: mol_type = other DNA
ccaagattcaaggatatggt

SEQ ID NO: 5887 - DNA, 20 bp, synthetic construct
  source 1..20: mol_type = other DNA
ttctcgcactatcattacac

SEQ ID NO: 5888 - DNA, 20 bp, synthetic construct
  source 1..20: mol_type = other DNA
agttgccgatcccgtccact

SEQ ID NO: 5889 - DNA, 20 bp, synthetic construct
  source 1..20: mol_type = other DNA
agaatttccgcagggtgagc

SEQ ID NO: 5890 - DNA, 20 bp, synthetic construct
  source 1..20: mol_type = other DNA
ctagacagtgttacggcatc

SEQ ID NO: 5891 - DNA, 20 bp, synthetic construct
  source 1..20: mol_type = other DNA
gtcgcacagtctcttaccga

SEQ ID NO: 5892 - DNA, 20 bp, synthetic construct
  source 1..20: mol_type = other DNA
gcgaggccacaaagactaag

SEQ ID NO: 5893 - DNA, 20 bp, synthetic construct
  source 1..20: mol_type = other DNA
attaagttagcaacaccaga

SEQ ID NO: 5894 - DNA, 20 bp, synthetic construct
  source 1..20: mol_type = other DNA
ggcaatcgcacgtcttcggg

SEQ ID NO: 5895 - DNA, 20 bp, synthetic construct
  source 1..20: mol_type = other DNA
gtcggaacaaccggtggcag

SEQ ID NO: 5896 - DNA, 20 bp, synthetic construct
  source 1..20: mol_type = other DNA
ttggtatcaaggtagctgtc

SEQ ID NO: 5897 - DNA, 20 bp, synthetic construct
  source 1..20: mol_type = other DNA
tctaactcgtttggcacgtc

SEQ ID NO: 5898 - DNA, 20 bp, synthetic construct
  source 1..20: mol_type = other DNA
ggcttgcgcagagatatatg

SEQ ID NO: 5899 - DNA, 20 bp, synthetic construct
  source 1..20: mol_type = other DNA
tcacgagtaaacgaactgga

SEQ ID NO: 5900 - DNA, 20 bp, synthetic construct
  source 1..20: mol_type = other DNA
gcaatcacttgaactaagac

SEQ ID NO: 5901 - DNA, 20 bp, synthetic construct
  source 1..20: mol_type = other DNA
gccggtttagacggaagagc

SEQ ID NO: 5902 - DNA, 20 bp, synthetic construct
  source 1..20: mol_type = other DNA
tccgaattaattagtggtgc

SEQ ID NO: 5903 - DNA, 20 bp, synthetic construct
  source 1..20: mol_type = other DNA
agttgttggcgatcctcgct

SEQ ID NO: 5904 - DNA, 20 bp, synthetic construct
  source 1..20: mol_type = other DNA
gcaagttccaacaagaaacg

SEQ ID NO: 5905 - DNA, 20 bp, synthetic construct
  source 1..20: mol_type = other DNA
gtcttacgtccagtaacggg

SEQ ID NO: 5906 - DNA, 20 bp, synthetic construct
  source 1..20: mol_type = other DNA
acaacggagctgatgtatgt

SEQ ID NO: 5907 - DNA, 20 bp, synthetic construct
  source 1..20: mol_type = other DNA
gcgcgcctagttgttacttt

SEQ ID NO: 5908 - DNA, 20 bp, synthetic construct
  source 1..20: mol_type = other DNA
ctatcccgcacgctacgtac

SEQ ID NO: 5909 - DNA, 20 bp, synthetic construct
  source 1..20: mol_type = other DNA
tggaccatcccgctagcttg

SEQ ID NO: 5910 - DNA, 20 bp, synthetic construct
  source 1..20: mol_type = other DNA
caccaattcgcaagtaagaa

SEQ ID NO: 5911 - DNA, 20 bp, synthetic construct
  source 1..20: mol_type = other DNA
gacaacacatctcgttccga

SEQ ID NO: 5912 - DNA, 20 bp, synthetic construct
  source 1..20: mol_type = other DNA
tagttattcggttgctggaa

SEQ ID NO: 5913 - DNA, 20 bp, synthetic construct
  source 1..20: mol_type = other DNA
agtgtgcgagccatcaaacg

SEQ ID NO: 5914 - DNA, 20 bp, synthetic construct
  source 1..20: mol_type = other DNA
tgacctcaggtagtatagct

SEQ ID NO: 5915 - DNA, 20 bp, synthetic construct
  source 1..20: mol_type = other DNA
agacgtctaggctctccagc

SEQ ID NO: 5916 - DNA, 20 bp, synthetic construct
  source 1..20: mol_type = other DNA
tgcaccatgtaggtgggctt

SEQ ID NO: 5917 - DNA, 20 bp, synthetic construct
  source 1..20: mol_type = other DNA
tacctgcgcccatcttagcc

SEQ ID NO: 5918 - DNA, 20 bp, synthetic construct
  source 1..20: mol_type = other DNA
tggtgtgatttgcagtgtcg

SEQ ID NO: 5919 - DNA, 20 bp, synthetic construct
  source 1..20: mol_type = other DNA
cccgttcggaaagtgtgacc

SEQ ID NO: 5920 - DNA, 20 bp, synthetic construct
  source 1..20: mol_type = other DNA
tcacatcaccacgcctacgt

SEQ ID NO: 5921 - DNA, 20 bp, synthetic construct
  source 1..20: mol_type = other DNA
actttgccgtgtcgttccaa

SEQ ID NO: 5922 - DNA, 20 bp, synthetic construct
  source 1..20: mol_type = other DNA
cgccctgttcgattaggtag

SEQ ID NO: 5923 - DNA, 20 bp, synthetic construct
  source 1..20: mol_type = other DNA
taggtactcatgttgagatg

SEQ ID NO: 5924 - DNA, 20 bp, synthetic construct
  source 1..20: mol_type = other DNA
gttctgcggagcaagactcg

SEQ ID NO: 5925 - DNA, 20 bp, synthetic construct
  source 1..20: mol_type = other DNA
atgtgttgcgtggatgcaca

SEQ ID NO: 5926 - DNA, 20 bp, synthetic construct
  source 1..20: mol_type = other DNA
ctccatgcaacaatacatat

SEQ ID NO: 5927 - DNA, 20 bp, synthetic construct
  source 1..20: mol_type = other DNA
taggtctcgtgtcatgacac

SEQ ID NO: 5928 - DNA, 20 bp, synthetic construct
  source 1..20: mol_type = other DNA
ttgtaagtgtacgatgctat

SEQ ID NO: 5929 - DNA, 20 bp, synthetic construct
  source 1..20: mol_type = other DNA
catcgacgttagatttatcc

SEQ ID NO: 5930 - DNA, 20 bp, synthetic construct
  source 1..20: mol_type = other DNA
agctcaccgtccatcattct

SEQ ID NO: 5931 - DNA, 20 bp, synthetic construct
  source 1..20: mol_type = other DNA
tgagatccgttggtccctag

SEQ ID NO: 5932 - DNA, 20 bp, synthetic construct
  source 1..20: mol_type = other DNA
ctcgtagatttccgctgcgg

SEQ ID NO: 5933 - DNA, 20 bp, synthetic construct
  source 1..20: mol_type = other DNA
cagcagcgccgtggaacaat

SEQ ID NO: 5934 - DNA, 20 bp, synthetic construct
  source 1..20: mol_type = other DNA
tcggtgccttagcgttgttc

SEQ ID NO: 5935 - DNA, 20 bp, synthetic construct
  source 1..20: mol_type = other DNA
tacaccgcattggcgccgaa

SEQ ID NO: 5936 - DNA, 20 bp, synthetic construct
  source 1..20: mol_type = other DNA
gtaacctcacccagacgagt

SEQ ID NO: 5937 - DNA, 20 bp, synthetic construct
  source 1..20: mol_type = other DNA
aagagtttcagtctcagtta

SEQ ID NO: 5938 - DNA, 20 bp, synthetic construct
  source 1..20: mol_type = other DNA
agatatggtcaatgcgggca

SEQ ID NO: 5939 - DNA, 20 bp, synthetic construct
  source 1..20: mol_type = other DNA
ccaacgtggctaacgagtta

SEQ ID NO: 5940 - DNA, 20 bp, synthetic construct
  source 1..20: mol_type = other DNA
tgtgttggaaattctgccat

SEQ ID NO: 5941 - DNA, 20 bp, synthetic construct
  source 1..20: mol_type = other DNA
ccagagtacgatagataacc

SEQ ID NO: 5942 - DNA, 20 bp, synthetic construct
  source 1..20: mol_type = other DNA
cgacgctgtccgaagtgaca

SEQ ID NO: 5943 - DNA, 20 bp, synthetic construct
  source 1..20: mol_type = other DNA
ccctacaacatctaaacctc

SEQ ID NO: 5944 - DNA, 20 bp, synthetic construct
  source 1..20: mol_type = other DNA
atatcaatcgacccatcaga

SEQ ID NO: 5945 - DNA, 20 bp, synthetic construct
  source 1..20: mol_type = other DNA
cttagtacgaatgcatactg

SEQ ID NO: 5946 - DNA, 20 bp, synthetic construct
  source 1..20: mol_type = other DNA
gggcttggattcacgaccaa

SEQ ID NO: 5947 - DNA, 20 bp, synthetic construct
  source 1..20: mol_type = other DNA
ctatgaaataggcgtgctgt

SEQ ID NO: 5948 - DNA, 20 bp, synthetic construct
  source 1..20: mol_type = other DNA
ggtccgcccgttactgagca

SEQ ID NO: 5949 - DNA, 20 bp, synthetic construct
  source 1..20: mol_type = other DNA
gatagacgtgtcttcatgct

SEQ ID NO: 5950 - DNA, 20 bp, synthetic construct
  source 1..20: mol_type = other DNA
catcggaggtacaatcctca

SEQ ID NO: 5951 - DNA, 20 bp, synthetic construct
  source 1..20: mol_type = other DNA
cagtctgacatactttccga

SEQ ID NO: 5952 - DNA, 20 bp, synthetic construct
  source 1..20: mol_type = other DNA
tgactcgtgtagcgggttgg

SEQ ID NO: 5953 - DNA, 20 bp, synthetic construct
  source 1..20: mol_type = other DNA
acagctgttgcacatgctta

SEQ ID NO: 5954 - DNA, 20 bp, synthetic construct
  source 1..20: mol_type = other DNA
cctctccgtctgtaactaag

SEQ ID NO: 5955 - DNA, 20 bp, synthetic construct
  source 1..20: mol_type = other DNA
cacaggagacgcccgctgaa

SEQ ID NO: 5956 - DNA, 20 bp, synthetic construct
  source 1..20: mol_type = other DNA
gtcgtgtgcactgagtacgc

SEQ ID NO: 5957 - DNA, 20 bp, synthetic construct
  source 1..20: mol_type = other DNA
gtcggagctttcccgacaat

SEQ ID NO: 5958 - DNA, 20 bp, synthetic construct
  source 1..20: mol_type = other DNA
gtcgggagagcaccggagaa

SEQ ID NO: 5959 - DNA, 20 bp, synthetic construct
  source 1..20: mol_type = other DNA
accctttcccactccacttg

SEQ ID NO: 5960 - DNA, 20 bp, synthetic construct
  source 1..20: mol_type = other DNA
cacaagtcacaaggttggtg

SEQ ID NO: 5961 - DNA, 20 bp, synthetic construct
  source 1..20: mol_type = other DNA
cctacctcgcctttccatta

SEQ ID NO: 5962 - DNA, 20 bp, synthetic construct
  source 1..20: mol_type = other DNA
aggtttacgtcaagaacaag

SEQ ID NO: 5963 - DNA, 20 bp, synthetic construct
  source 1..20: mol_type = other DNA
aaacgcagagtttggtccat

SEQ ID NO: 5964 - DNA, 20 bp, synthetic construct
  source 1..20: mol_type = other DNA
gtatgagggcccacgagagc

SEQ ID NO: 5965 - DNA, 20 bp, synthetic construct
  source 1..20: mol_type = other DNA
tgggcagaatgtgccgagtc

SEQ ID NO: 5966 - DNA, 20 bp, synthetic construct
  source 1..20: mol_type = other DNA
ctcacgcttccgcgattgac

SEQ ID NO: 5967 - DNA, 20 bp, synthetic construct
  source 1..20: mol_type = other DNA
tccagggctaactttccagg

SEQ ID NO: 5968 - DNA, 20 bp, synthetic construct
  source 1..20: mol_type = other DNA
ctctaagtgggaacctgcga

SEQ ID NO: 5969 - DNA, 20 bp, synthetic construct
  source 1..20: mol_type = other DNA
tctgttaagcccaatgtccg

SEQ ID NO: 5970 - DNA, 20 bp, synthetic construct
  source 1..20: mol_type = other DNA
cttaactcgatatggacttg

SEQ ID NO: 5971 - DNA, 20 bp, synthetic construct
  source 1..20: mol_type = other DNA
taggccggcagaactggtaa

SEQ ID NO: 5972 - DNA, 20 bp, synthetic construct
  source 1..20: mol_type = other DNA
acacatatccgaagccacgc

SEQ ID NO: 5973 - DNA, 20 bp, synthetic construct
  source 1..20: mol_type = other DNA
tattggatctgaacggtggt

SEQ ID NO: 5974 - DNA, 20 bp, synthetic construct
  source 1..20: mol_type = other DNA
tgatcgccgcaacagggtta

SEQ ID NO: 5975 - DNA, 20 bp, synthetic construct
  source 1..20: mol_type = other DNA
ccgacgacggttattccgga

SEQ ID NO: 5976 - DNA, 20 bp, synthetic construct
  source 1..20: mol_type = other DNA
tcgtttcacgaatgccttgt

SEQ ID NO: 5977 - DNA, 20 bp, synthetic construct
  source 1..20: mol_type = other DNA
tcaccatatttcagttgctt

SEQ ID NO: 5978 - DNA, 20 bp, synthetic construct
  source 1..20: mol_type = other DNA
cgcaagaagtagttatcaca

SEQ ID NO: 5979 - DNA, 20 bp, synthetic construct
  source 1..20: mol_type = other DNA
ctactatcacgtgacttatt

SEQ ID NO: 5980 - DNA, 20 bp, synthetic construct
  source 1..20: mol_type = other DNA
tattgtccctgttagcagtt

SEQ ID NO: 5981 - DNA, 20 bp, synthetic construct
  source 1..20: mol_type = other DNA
tggcagaatcgcatattact

SEQ ID NO: 5982 - DNA, 20 bp, synthetic construct
  source 1..20: mol_type = other DNA
gcaagatggtcactagtata

SEQ ID NO: 5983 - DNA, 20 bp, synthetic construct
  source 1..20: mol_type = other DNA
taattaacatcgcgcatgcc

SEQ ID NO: 5984 - DNA, 20 bp, synthetic construct
  source 1..20: mol_type = other DNA
gcaccctagttacatggcgc

SEQ ID NO: 5985 - DNA, 20 bp, synthetic construct
  source 1..20: mol_type = other DNA
tgcaaggacacgggtacacc

SEQ ID NO: 5986 - DNA, 20 bp, synthetic construct
  source 1..20: mol_type = other DNA
catcggccacaccagtcaca

SEQ ID NO: 5987 - DNA, 20 bp, synthetic construct
  source 1..20: mol_type = other DNA
tacctatcacaagatgcctg

SEQ ID NO: 5988 - DNA, 20 bp, synthetic construct
  source 1..20: mol_type = other DNA
cgtgccatctcgtgctgaga

SEQ ID NO: 5989 - DNA, 20 bp, synthetic construct
  source 1..20: mol_type = other DNA
gtgtagcactcacgtggaca

SEQ ID NO: 5990 - DNA, 20 bp, synthetic construct
  source 1..20: mol_type = other DNA
ttgtgcaacggcattgggtt

SEQ ID NO: 5991 - DNA, 20 bp, synthetic construct
  source 1..20: mol_type = other DNA
agccatgttctactgaccat

SEQ ID NO: 5992 - DNA, 20 bp, synthetic construct
  source 1..20: mol_type = other DNA
ctgactcctagctgcttcca

SEQ ID NO: 5993 - DNA, 20 bp, synthetic construct
  source 1..20: mol_type = other DNA
cgtcctaccgagtaccgttg

SEQ ID NO: 5994 - DNA, 20 bp, synthetic construct
  source 1..20: mol_type = other DNA
tgacagatggtagaccggct

SEQ ID NO: 5995 - DNA, 20 bp, synthetic construct
  source 1..20: mol_type = other DNA
aaacgcaatgagccgttgct

SEQ ID NO: 5996 - DNA, 20 bp, synthetic construct
  source 1..20: mol_type = other DNA
tgggaggatgctcgcgctgt

SEQ ID NO: 5997 - DNA, 20 bp, synthetic construct
  source 1..20: mol_type = other DNA
ggtagctacctccctcgtcc

SEQ ID NO: 5998 - DNA, 20 bp, synthetic construct
  source 1..20: mol_type = other DNA
gtagcgccagatatgtagga

SEQ ID NO: 5999 - DNA, 20 bp, synthetic construct
  source 1..20: mol_type = other DNA
cgtattggtatggtaacacg

SEQ ID NO: 6000 - DNA, 20 bp, synthetic construct
  source 1..20: mol_type = other DNA
acttaacagtcgctcgcgac

SEQ ID NO: 6001 - DNA, 20 bp, synthetic construct
  source 1..20: mol_type = other DNA
acatcgggcgtatgtgccca

SEQ ID NO: 6002 - DNA, 20 bp, synthetic construct
  source 1..20: mol_type = other DNA
tttgcttaggaaagagtcgc

SEQ ID NO: 6003 - DNA, 20 bp, synthetic construct
  source 1..20: mol_type = other DNA
atctcgcttaactccctcgc

SEQ ID NO: 6004 - DNA, 20 bp, synthetic construct
  source 1..20: mol_type = other DNA
gctcattacgtcgaaaccag

SEQ ID NO: 6005 - DNA, 20 bp, synthetic construct
  source 1..20: mol_type = other DNA
cagccatatatcataggagg

SEQ ID NO: 6006 - DNA, 20 bp, synthetic construct
  source 1..20: mol_type = other DNA
cttatgcgtgtcgtttagcc

SEQ ID NO: 6007 - DNA, 20 bp, synthetic construct
  source 1..20: mol_type = other DNA
ctacagacccaagtacgagc

SEQ ID NO: 6008 - DNA, 20 bp, synthetic construct
  source 1..20: mol_type = other DNA
catcgtgctaccaatggatg

SEQ ID NO: 6009 - DNA, 20 bp, synthetic construct
  source 1..20: mol_type = other DNA
attgaaggttgggctaccac

SEQ ID NO: 6010 - DNA, 20 bp, synthetic construct
  source 1..20: mol_type = other DNA
atcagaatttaggtctctat

SEQ ID NO: 6011 - DNA, 20 bp, synthetic construct
  source 1..20: mol_type = other DNA
gtgaagcggaaggaacttag

SEQ ID NO: 6012 - DNA, 20 bp, synthetic construct
  source 1..20: mol_type = other DNA
atatagactaaccagcgttc

SEQ ID NO: 6013 - DNA, 20 bp, synthetic construct
  source 1..20: mol_type = other DNA
tgcgtgtttgcaattgccta

SEQ ID NO: 6014 - DNA, 20 bp, synthetic construct
  source 1..20: mol_type = other DNA
cgttggacgctacgagggta

SEQ ID NO: 6015 - DNA, 20 bp, synthetic construct
  source 1..20: mol_type = other DNA
ctaatacctatactgaaccc

SEQ ID NO: 6016 - DNA, 20 bp, synthetic construct
  source 1..20: mol_type = other DNA
aagcatcggttggacatcca

SEQ ID NO: 6017 - DNA, 20 bp, synthetic construct
  source 1..20: mol_type = other DNA
gggtactgcgatgcttacat

SEQ ID NO: 6018 - DNA, 20 bp, synthetic construct
  source 1..20: mol_type = other DNA
ttgcatcgagtgcatatgct

SEQ ID NO: 6019 - DNA, 20 bp, synthetic construct
  source 1..20: mol_type = other DNA
atcttgactacacagctcag

SEQ ID NO: 6020 - DNA, 20 bp, synthetic construct
  source 1..20: mol_type = other DNA
gacgtcctcgatgcgaatga

SEQ ID NO: 6021 - DNA, 20 bp, synthetic construct
  source 1..20: mol_type = other DNA
gttagcgatgtaacgacgca

SEQ ID NO: 6022 - DNA, 20 bp, synthetic construct
  source 1..20: mol_type = other DNA
cctaaacaatgccggtgtta

SEQ ID NO: 6023 - DNA, 20 bp, synthetic construct
  source 1..20: mol_type = other DNA
aatagaccgcactacgtccg

SEQ ID NO: 6024 - DNA, 20 bp, synthetic construct
  source 1..20: mol_type = other DNA
gtacttcagggaacgccgga

SEQ ID NO: 6025 - DNA, 20 bp, synthetic construct
  source 1..20: mol_type = other DNA
atagctcgaccaccgtatta

SEQ ID NO: 6026 - DNA, 20 bp, synthetic construct
  source 1..20: mol_type = other DNA
gtaccacaccagaagagaca

SEQ ID NO: 6027 - DNA, 20 bp, synthetic construct
  source 1..20: mol_type = other DNA
gttccatccaagtccgagag

SEQ ID NO: 6028 - DNA, 20 bp, synthetic construct
  source 1..20: mol_type = other DNA
accgtaactgcgaggagccc

SEQ ID NO: 6029 - DNA, 20 bp, synthetic construct
  source 1..20: mol_type = other DNA
ataccaggcgttacccttcg

SEQ ID NO: 6030 - DNA, 20 bp, synthetic construct
  source 1..20: mol_type = other DNA
caaggcgatttagaaaggtc

SEQ ID NO: 6031 - DNA, 20 bp, synthetic construct
  source 1..20: mol_type = other DNA
gggctgcaatctcgatgaat

SEQ ID NO: 6032 - DNA, 20 bp, synthetic construct
  source 1..20: mol_type = other DNA
ttctccatgggagcctcaac

SEQ ID NO: 6033 - DNA, 20 bp, synthetic construct
  source 1..20: mol_type = other DNA
tgtctatactccgagatcca

SEQ ID NO: 6034 - DNA, 20 bp, synthetic construct
  source 1..20: mol_type = other DNA
gtcaacaattgaagcctcca

SEQ ID NO: 6035 - DNA, 20 bp, synthetic construct
  source 1..20: mol_type = other DNA
tgcccgacatggtcaaatat

SEQ ID NO: 6036 - DNA, 20 bp, synthetic construct
  source 1..20: mol_type = other DNA
aggcacgtatcgcggctagt

SEQ ID NO: 6037 - DNA, 20 bp, synthetic construct
  source 1..20: mol_type = other DNA
cggatgcagatgggcctcag

SEQ ID NO: 6038 - DNA, 20 bp, synthetic construct
  source 1..20: mol_type = other DNA
tagacacgacgattcagtaa

SEQ ID NO: 6039 - DNA, 20 bp, synthetic construct
  source 1..20: mol_type = other DNA
aatgactttggatctcaggt

SEQ ID NO: 6040 - DNA, 20 bp, synthetic construct
  source 1..20: mol_type = other DNA
tactaccaagccggtaatac

SEQ ID NO: 6041 - DNA, 20 bp, synthetic construct
  source 1..20: mol_type = other DNA
tatctcgttaatcgggtgat

SEQ ID NO: 6042 - DNA, 20 bp, synthetic construct
  source 1..20: mol_type = other DNA
agctctggtatacgtcgttt

SEQ ID NO: 6043 - DNA, 20 bp, synthetic construct
  source 1..20: mol_type = other DNA
aattggcagaggctgtaatg

SEQ ID NO: 6044 - DNA, 20 bp, synthetic construct
  source 1..20: mol_type = other DNA
ttcccgtgtaggactgtgca

SEQ ID NO: 6045 - DNA, 20 bp, synthetic construct
  source 1..20: mol_type = other DNA
cgtggtaagagcgccttaag

SEQ ID NO: 6046 - DNA, 20 bp, synthetic construct
  source 1..20: mol_type = other DNA
ctgtggtcgtaacgcggtaa

SEQ ID NO: 6047 - DNA, 20 bp, synthetic construct
  source 1..20: mol_type = other DNA
ctacgaccgttgactactgt

SEQ ID NO: 6048 - DNA, 20 bp, synthetic construct
  source 1..20: mol_type = other DNA
ggtgataattgggagccagt

SEQ ID NO: 6049 - DNA, 20 bp, synthetic construct
  source 1..20: mol_type = other DNA
agtgtgatgggagcgaactc

SEQ ID NO: 6050 - DNA, 20 bp, synthetic construct
  source 1..20: mol_type = other DNA
gtatccgggatttcaatgat

SEQ ID NO: 6051 - DNA, 20 bp, synthetic construct
  source 1..20: mol_type = other DNA
ttactcgtactgaggccata

SEQ ID NO: 6052 - DNA, 20 bp, synthetic construct
  source 1..20: mol_type = other DNA
aactctgttgtcgcgacgga

SEQ ID NO: 6053 - DNA, 20 bp, synthetic construct
  source 1..20: mol_type = other DNA
gtgccacgtagtccaacact

SEQ ID NO: 6054 - DNA, 20 bp, synthetic construct
  source 1..20: mol_type = other DNA
ggtgggatgtctcgactacg

SEQ ID NO: 6055 - DNA, 20 bp, synthetic construct
  source 1..20: mol_type = other DNA
atctcttcccgtataactgg

SEQ ID NO: 6056 - DNA, 20 bp, synthetic construct
  source 1..20: mol_type = other DNA
ccatgtcgcactcgtaagct

SEQ ID NO: 6057 - DNA, 20 bp, synthetic construct
  source 1..20: mol_type = other DNA
gctcgttagcactcagatag

SEQ ID NO: 6058 - DNA, 20 bp, synthetic construct
  source 1..20: mol_type = other DNA
cagcttcgtggccaacatac

SEQ ID NO: 6059 - DNA, 20 bp, synthetic construct
  source 1..20: mol_type = other DNA
tgcgcgaggagagaaactat

SEQ ID NO: 6060 - DNA, 20 bp, synthetic construct
  source 1..20: mol_type = other DNA
gctcaggaggacaaggcttt

SEQ ID NO: 6061 - DNA, 20 bp, synthetic construct
  source 1..20: mol_type = other DNA
ataattgctgcgatacgtta

SEQ ID NO: 6062 - DNA, 20 bp, synthetic construct
  source 1..20: mol_type = other DNA
caccatctgaacgggtgtga

SEQ ID NO: 6063 - DNA, 20 bp, synthetic construct
  source 1..20: mol_type = other DNA
ggatgcacatatcccgccga

SEQ ID NO: 6064 - DNA, 20 bp, synthetic construct
  source 1..20: mol_type = other DNA
aaacctagattgacggctca

SEQ ID NO: 6065 - DNA, 20 bp, synthetic construct
  source 1..20: mol_type = other DNA
gcaatacatagtgcgtttca

SEQ ID NO: 6066 - DNA, 20 bp, synthetic construct
  source 1..20: mol_type = other DNA
cctctgcacctgccatagct

SEQ ID NO: 6067 - DNA, 20 bp, synthetic construct
  source 1..20: mol_type = other DNA
cgtagccatcgaacatgctt

SEQ ID NO: 6068 - DNA, 20 bp, synthetic construct
  source 1..20: mol_type = other DNA
atcactcctgaatcgcaccg

SEQ ID NO: 6069 - DNA, 20 bp, synthetic construct
  source 1..20: mol_type = other DNA
gacagcacaggcagaacaat

SEQ ID NO: 6070 - DNA, 20 bp, synthetic construct
  source 1..20: mol_type = other DNA
agcagaagtatctcttcaca

SEQ ID NO: 6071 - DNA, 20 bp, synthetic construct
  source 1..20: mol_type = other DNA
ggtcaccagatccatgagac

SEQ ID NO: 6072 - DNA, 20 bp, synthetic construct
  source 1..20: mol_type = other DNA
cgactacgacctagcgcaat

SEQ ID NO: 6073 - DNA, 20 bp, synthetic construct
  source 1..20: mol_type = other DNA
caattaaacttccaacgtgt

SEQ ID NO: 6074 - DNA, 20 bp, synthetic construct
  source 1..20: mol_type = other DNA
ctcaaggatatttgaaaggg

SEQ ID NO: 6075 - DNA, 20 bp, synthetic construct
  source 1..20: mol_type = other DNA
acctttagcaacgcgagtgg

SEQ ID NO: 6076 - DNA, 20 bp, synthetic construct
  source 1..20: mol_type = other DNA
ccataaaggaggccgggctt

SEQ ID NO: 6077 - DNA, 20 bp, synthetic construct
  source 1..20: mol_type = other DNA
cttcttacgtcgtcttaaat

SEQ ID NO: 6078 - DNA, 20 bp, synthetic construct
  source 1..20: mol_type = other DNA
gtaatcataagggtcctcac

SEQ ID NO: 6079 - DNA, 20 bp, synthetic construct
  source 1..20: mol_type = other DNA
tcgaggaaccatcatcgcga

SEQ ID NO: 6080 - DNA, 20 bp, synthetic construct
  source 1..20: mol_type = other DNA
gacaactcccgaagtcagac

SEQ ID NO: 6081 - DNA, 20 bp, synthetic construct
  source 1..20: mol_type = other DNA
agcgagatcatatttgcatg

SEQ ID NO: 6082 - DNA, 20 bp, synthetic construct
  source 1..20: mol_type = other DNA
ccctcatagttatcgaaagg

SEQ ID NO: 6083 - DNA, 20 bp, synthetic construct
  source 1..20: mol_type = other DNA
cggaccgttctttgcagata

SEQ ID NO: 6084 - DNA, 20 bp, synthetic construct
  source 1..20: mol_type = other DNA
cactatactggccagctggc

SEQ ID NO: 6085 - DNA, 20 bp, synthetic construct
  source 1..20: mol_type = other DNA
tgagaggctattacattcct

SEQ ID NO: 6086 - DNA, 20 bp, synthetic construct
  source 1..20: mol_type = other DNA
gcgtgttcatgagattcggg

SEQ ID NO: 6087 - DNA, 20 bp, synthetic construct
  source 1..20: mol_type = other DNA
atgagtccgcgtttaccaag

SEQ ID NO: 6088 - DNA, 20 bp, synthetic construct
  source 1..20: mol_type = other DNA
cgaaggatccaactatggca

SEQ ID NO: 6089 - DNA, 20 bp, synthetic construct
  source 1..20: mol_type = other DNA
cagaccaggccacagtcatg

SEQ ID NO: 6090 - DNA, 20 bp, synthetic construct
  source 1..20: mol_type = other DNA
atcaggtcagacgggagatt

SEQ ID NO: 6091 - DNA, 20 bp, synthetic construct
  source 1..20: mol_type = other DNA
gaagaacaaccgctttcctg

SEQ ID NO: 6092 - DNA, 20 bp, synthetic construct
  source 1..20: mol_type = other DNA
gtcggaacagttcttcggga

SEQ ID NO: 6093 - DNA, 20 bp, synthetic construct
  source 1..20: mol_type = other DNA
actgagtgtacacaatagga

SEQ ID NO: 6094 - DNA, 20 bp, synthetic construct
  source 1..20: mol_type = other DNA
aaaggaccaggcttcatctg

SEQ ID NO: 6095 - DNA, 20 bp, synthetic construct
  source 1..20: mol_type = other DNA
atttacgtaaggctggtggg

SEQ ID NO: 6096 - DNA, 20 bp, synthetic construct
  source 1..20: mol_type = other DNA
gcgagagtgatgcactcccg

SEQ ID NO: 6097 - DNA, 20 bp, synthetic construct
  source 1..20: mol_type = other DNA
cacaatcgaccagagtgtgc

SEQ ID NO: 6098 - DNA, 20 bp, synthetic construct
  source 1..20: mol_type = other DNA
gattacttgattgctcggaa

SEQ ID NO: 6099 - DNA, 20 bp, synthetic construct
  source 1..20: mol_type = other DNA
ccacagacgattgactgcgg

SEQ ID NO: 6100 - DNA, 20 bp, synthetic construct
  source 1..20: mol_type = other DNA
agcgcacataggctgctgag

SEQ ID NO: 6101 - DNA, 20 bp, synthetic construct
  source 1..20: mol_type = other DNA
tgaacatgaatgtgtctaag

SEQ ID NO: 6102 - DNA, 20 bp, synthetic construct
  source 1..20: mol_type = other DNA
gtgttacaagtctgtggtcg

SEQ ID NO: 6103 - DNA, 20 bp, synthetic construct
  source 1..20: mol_type = other DNA
ggtcactttcctgattacac

SEQ ID NO: 6104 - DNA, 20 bp, synthetic construct
  source 1..20: mol_type = other DNA
ggcgcagacacgatctaggt

SEQ ID NO: 6105 - DNA, 20 bp, synthetic construct
  source 1..20: mol_type = other DNA
gtaggccgttgtccagagcc

SEQ ID NO: 6106 - DNA, 20 bp, synthetic construct
  source 1..20: mol_type = other DNA
gattcggttgccgtgtacga

SEQ ID NO: 6107 - DNA, 20 bp, synthetic construct
  source 1..20: mol_type = other DNA
gtctcagcagataacatagt

SEQ ID NO: 6108 - DNA, 20 bp, synthetic construct
  source 1..20: mol_type = other DNA
tcctcactgtctagttgaag

SEQ ID NO: 6109 - DNA, 20 bp, synthetic construct
  source 1..20: mol_type = other DNA
attagtgactgagccaagac

SEQ ID NO: 6110 - DNA, 20 bp, synthetic construct
  source 1..20: mol_type = other DNA
ttgtttcactaaacggacgt

SEQ ID NO: 6111 - DNA, 20 bp, synthetic construct
  source 1..20: mol_type = other DNA
ggataataaagcaaggtgaa

SEQ ID NO: 6112 - DNA, 20 bp, synthetic construct
  source 1..20: mol_type = other DNA
ctggtacaccgccaattagg

SEQ ID NO: 6113 - DNA, 20 bp, synthetic construct
  source 1..20: mol_type = other DNA
cggagacggcgtatgtacga

SEQ ID NO: 6114 - DNA, 20 bp, synthetic construct
  source 1..20: mol_type = other DNA
ccatctacgtgatctgttgc

SEQ ID NO: 6115 - DNA, 20 bp, synthetic construct
  source 1..20: mol_type = other DNA
agaatgcacggccggaatcg

SEQ ID NO: 6116 - DNA, 20 bp, synthetic construct
  source 1..20: mol_type = other DNA
ggtgttctgttagagacttg

SEQ ID NO: 6117 - DNA, 20 bp, synthetic construct
  source 1..20: mol_type = other DNA
ttgtcaccaccgctctcatt

SEQ ID NO: 6118 - DNA, 20 bp, synthetic construct
  source 1..20: mol_type = other DNA
agagtgatgaactcccgtag

SEQ ID NO: 6119 - DNA, 20 bp, synthetic construct
  source 1..20: mol_type = other DNA
gtagcagcctatccttgagt

SEQ ID NO: 6120 - DNA, 20 bp, synthetic construct
  source 1..20: mol_type = other DNA
gccgtaagctagtaactcag

SEQ ID NO: 6121 - DNA, 20 bp, synthetic construct
  source 1..20: mol_type = other DNA
cgcgtatgctctgcatccga

SEQ ID NO: 6122 - DNA, 20 bp, synthetic construct
  source 1..20: mol_type = other DNA
cagacaagccatgttcctgt

SEQ ID NO: 6123 - DNA, 20 bp, synthetic construct
  source 1..20: mol_type = other DNA
gcattagtccgctatgtgtt

SEQ ID NO: 6124 - DNA, 20 bp, synthetic construct
  source 1..20: mol_type = other DNA
agtccataatcctacagagg

SEQ ID NO: 6125 - DNA, 20 bp, synthetic construct
  source 1..20: mol_type = other DNA
cctctaatattaccacttag

SEQ ID NO: 6126 - DNA, 20 bp, synthetic construct
  source 1..20: mol_type = other DNA
ctctggcggaatcagtagag

SEQ ID NO: 6127 - DNA, 20 bp, synthetic construct
  source 1..20: mol_type = other DNA
cgtactatgtgtggtgtctc

SEQ ID NO: 6128 - DNA, 20 bp, synthetic construct
  source 1..20: mol_type = other DNA
aaatataccacggccatcgt

SEQ ID NO: 6129 - DNA, 20 bp, synthetic construct
  source 1..20: mol_type = other DNA
cgatcgcggcttagtacatc

SEQ ID NO: 6130 - DNA, 20 bp, synthetic construct
  source 1..20: mol_type = other DNA
ggacgctaacgtatgaaggg

SEQ ID NO: 6131 - DNA, 20 bp, synthetic construct
  source 1..20: mol_type = other DNA
ttctacagttgtaaaccctg

SEQ ID NO: 6132 - DNA, 20 bp, synthetic construct
  source 1..20: mol_type = other DNA
cgcggacagctgagtaagct

SEQ ID NO: 6133 - DNA, 20 bp, synthetic construct
  source 1..20: mol_type = other DNA
tgcccgcctggtattccggt

SEQ ID NO: 6134 - DNA, 20 bp, synthetic construct
  source 1..20: mol_type = other DNA
gaggttggtcagttcgtcat

SEQ ID NO: 6135 - DNA, 20 bp, synthetic construct
  source 1..20: mol_type = other DNA
cgcgctagacgtctcttagc

SEQ ID NO: 6136 - DNA, 20 bp, synthetic construct
  source 1..20: mol_type = other DNA
acctatcaccatcagagcat

SEQ ID NO: 6137 - DNA, 20 bp, synthetic construct
  source 1..20: mol_type = other DNA
tggttcattctagcgcgtgt

SEQ ID NO: 6138 - DNA, 20 bp, synthetic construct
  source 1..20: mol_type = other DNA
gttatgctaacgaccaggtc

SEQ ID NO: 6139 - DNA, 20 bp, synthetic construct
  source 1..20: mol_type = other DNA
ttgtcgtgtataacgagcat

SEQ ID NO: 6140 - DNA, 20 bp, synthetic construct
  source 1..20: mol_type = other DNA
ttgcagcccacgacggctcc

SEQ ID NO: 6141 - DNA, 20 bp, synthetic construct
  source 1..20: mol_type = other DNA
agaagagctccagcaaccca

SEQ ID NO: 6142 - DNA, 20 bp, synthetic construct
  source 1..20: mol_type = other DNA
tagggtgaaccgattgccct

SEQ ID NO: 6143 - DNA, 20 bp, synthetic construct
  source 1..20: mol_type = other DNA
taccaagctcctgatcataa

SEQ ID NO: 6144 - DNA, 20 bp, synthetic construct
  source 1..20: mol_type = other DNA
atgccttagcgttatttaga

SEQ ID NO: 6145 - DNA, 20 bp, synthetic construct
  source 1..20: mol_type = other DNA
gacgttatcttgctcgtatg

SEQ ID NO: 6146 - DNA, 20 bp, synthetic construct
  source 1..20: mol_type = other DNA
gacgccaacctatcgtgaat

SEQ ID NO: 6147 - DNA, 20 bp, synthetic construct
  source 1..20: mol_type = other DNA
acctatacatgctagcgaac

SEQ ID NO: 6148 - DNA, 20 bp, synthetic construct
  source 1..20: mol_type = other DNA
tagaataagagagatacgct

SEQ ID NO: 6149 - DNA, 20 bp, synthetic construct
  source 1..20: mol_type = other DNA
aaatgtccattgacatactc

SEQ ID NO: 6150 - DNA, 20 bp, synthetic construct
  source 1..20: mol_type = other DNA
aagcaggaaggaggcgacag

SEQ ID NO: 6151 - DNA, 20 bp, synthetic construct
  source 1..20: mol_type = other DNA
gattgcgtgactagctgtta

SEQ ID NO: 6152 - DNA, 20 bp, synthetic construct
  source 1..20: mol_type = other DNA
acccgtgtatgacacggctg

SEQ ID NO: 6153 - DNA, 20 bp, synthetic construct
  source 1..20: mol_type = other DNA
aagttaaggcatttgaagaa

SEQ ID NO: 6154 - DNA, 20 bp, synthetic construct
  source 1..20: mol_type = other DNA
gtagatgtaccatgccgact

SEQ ID NO: 6155 - DNA, 20 bp, synthetic construct
  source 1..20: mol_type = other DNA
catgtcgtcacaatccgccc

SEQ ID NO: 6156 - DNA, 20 bp, synthetic construct
  source 1..20: mol_type = other DNA
ctcacacatatccggtcaca

SEQ ID NO: 6157 - DNA, 20 bp, synthetic construct
  source 1..20: mol_type = other DNA
gtgaggataacgacggtcct

SEQ ID NO: 6158 - DNA, 20 bp, synthetic construct
  source 1..20: mol_type = other DNA
attgttcatgactggcgtat

SEQ ID NO: 6159 - DNA, 20 bp, synthetic construct
  source 1..20: mol_type = other DNA
tgggagtagcattattcaaa

SEQ ID NO: 6160 - DNA, 20 bp, synthetic construct
  source 1..20: mol_type = other DNA
cagcggaatcgcctcattca

SEQ ID NO: 6161 - DNA, 20 bp, synthetic construct
  source 1..20: mol_type = other DNA
tgcacgacgtcagcccacct

SEQ ID NO: 6162 - DNA, 20 bp, synthetic construct
  source 1..20: mol_type = other DNA
tgcgcctgcgtctccacgtt

SEQ ID NO: 6163 - DNA, 20 bp, synthetic construct
  source 1..20: mol_type = other DNA
gaattgaaaggtccgggcac

SEQ ID NO: 6164 - DNA, 20 bp, synthetic construct
  source 1..20: mol_type = other DNA
agagaggctttatagttgcc

SEQ ID NO: 6165 - DNA, 20 bp, synthetic construct
  source 1..20: mol_type = other DNA
gtgacgacattattgacaca

SEQ ID NO: 6166 - DNA, 20 bp, synthetic construct
  source 1..20: mol_type = other DNA
aagaagtactagggcgtaaa

SEQ ID NO: 6167 - DNA, 20 bp, synthetic construct
  source 1..20: mol_type = other DNA
cccgatccagggacgttgag

SEQ ID NO: 6168 - DNA, 20 bp, synthetic construct
  source 1..20: mol_type = other DNA
catctgtcacagtagctact

SEQ ID NO: 6169 - DNA, 20 bp, synthetic construct
  source 1..20: mol_type = other DNA
cttcgataggatgatccatt

SEQ ID NO: 6170 - DNA, 20 bp, synthetic construct
  source 1..20: mol_type = other DNA
tcctttgagtcgaatataac

SEQ ID NO: 6171 - DNA, 20 bp, synthetic construct
  source 1..20: mol_type = other DNA
cataataaccctcgaaagat

SEQ ID NO: 6172 - DNA, 20 bp, synthetic construct
  source 1..20: mol_type = other DNA
tgggtactcgtgccagtaat

SEQ ID NO: 6173 - DNA, 20 bp, synthetic construct
  source 1..20: mol_type = other DNA
catgcactctcgttccctta

SEQ ID NO: 6174 - DNA, 20 bp, synthetic construct
  source 1..20: mol_type = other DNA
cctcacattcgtcacgtaag

SEQ ID NO: 6175 - DNA, 20 bp, synthetic construct
  source 1..20: mol_type = other DNA
agtagccaccgatagaggtg

SEQ ID NO: 6176 - DNA, 20 bp, synthetic construct
  source 1..20: mol_type = other DNA
cagtgttcaaggctgcccta

SEQ ID NO: 6177 - DNA, 20 bp, synthetic construct
  source 1..20: mol_type = other DNA
cgtcaaggccgtgctgcaca

SEQ ID NO: 6178 - DNA, 20 bp, synthetic construct
  source 1..20: mol_type = other DNA
tttggtactgtcctaatcag

SEQ ID NO: 6179 - DNA, 20 bp, synthetic construct
  source 1..20: mol_type = other DNA
gatccaacgttcgccctgag

SEQ ID NO: 6180 - DNA, 20 bp, synthetic construct
  source 1..20: mol_type = other DNA
cgcatcgttctgagcgcgtg

SEQ ID NO: 6181 - DNA, 20 bp, synthetic construct
  source 1..20: mol_type = other DNA
gtaaaggcaactgaattaaa

SEQ ID NO: 6182 - DNA, 20 bp, synthetic construct
  source 1..20: mol_type = other DNA
cttgggtccgcactgaagcg

SEQ ID NO: 6183 - DNA, 20 bp, synthetic construct
  source 1..20: mol_type = other DNA
cccgcgcgtgggtaattgca

SEQ ID NO: 6184 - DNA, 20 bp, synthetic construct
  source 1..20: mol_type = other DNA
gcctgtgtttacgaatcgaa

SEQ ID NO: 6185 - DNA, 20 bp, synthetic construct
  source 1..20: mol_type = other DNA
gatccgttacaggcggctac

SEQ ID NO: 6186 - DNA, 20 bp, synthetic construct
  source 1..20: mol_type = other DNA
cctataagaaaccaagcccg

SEQ ID NO: 6187 - DNA, 20 bp, synthetic construct
  source 1..20: mol_type = other DNA
agaccgtaccgtaagggcaa

SEQ ID NO: 6188 - DNA, 20 bp, synthetic construct
  source 1..20: mol_type = other DNA
acgacgcctagcaagagtta

SEQ ID NO: 6189 - DNA, 20 bp, synthetic construct
  source 1..20: mol_type = other DNA
cgggtacgttgtgagtgaat

SEQ ID NO: 6190 - DNA, 20 bp, synthetic construct
  source 1..20: mol_type = other DNA
aacggctacgaaaccttccc

SEQ ID NO: 6191 - DNA, 20 bp, synthetic construct
  source 1..20: mol_type = other DNA
tctacagctctacaagacgc

SEQ ID NO: 6192 - DNA, 20 bp, synthetic construct
  source 1..20: mol_type = other DNA
agtattgatgggcattccgg

SEQ ID NO: 6193 - DNA, 20 bp, synthetic construct
  source 1..20: mol_type = other DNA
cgctcgcgtgtagtagtgga

SEQ ID NO: 6194 - DNA, 20 bp, synthetic construct
  source 1..20: mol_type = other DNA
gggttaggcgaatcactccc

SEQ ID NO: 6195 - DNA, 20 bp, synthetic construct
  source 1..20: mol_type = other DNA
gcctggacagggctagatct

SEQ ID NO: 6196 - DNA, 20 bp, synthetic construct
  source 1..20: mol_type = other DNA
gtgaccactataacgattca

SEQ ID NO: 6197 - DNA, 20 bp, synthetic construct
  source 1..20: mol_type = other DNA
gattctacttgccgttacat

SEQ ID NO: 6198 - DNA, 20 bp, synthetic construct
  source 1..20: mol_type = other DNA
atcagggtacttaccagtgg

SEQ ID NO: 6199 - DNA, 20 bp, synthetic construct
  source 1..20: mol_type = other DNA
ttgtgagtatgttgactgtt

SEQ ID NO: 6200 - DNA, 20 bp, synthetic construct
  source 1..20: mol_type = other DNA
agaatcactccttgcccacc

SEQ ID NO: 6201 - DNA, 20 bp, synthetic construct
  source 1..20: mol_type = other DNA
atcaccggacaaggtagacc

SEQ ID NO: 6202 - DNA, 20 bp, synthetic construct
  source 1..20: mol_type = other DNA
ccgattgatagaacgtacta

SEQ ID NO: 6203 - DNA, 20 bp, synthetic construct
  source 1..20: mol_type = other DNA
ttaataaggaacttccacga

SEQ ID NO: 6204 - DNA, 20 bp, synthetic construct
  source 1..20: mol_type = other DNA
taattcccgttccgccttta

SEQ ID NO: 6205 - DNA, 20 bp, synthetic construct
  source 1..20: mol_type = other DNA
gcatcttaagaaacgttatc

SEQ ID NO: 6206 - DNA, 20 bp, synthetic construct
  source 1..20: mol_type = other DNA
gtgactacatagcgagaagt

SEQ ID NO: 6207 - DNA, 20 bp, synthetic construct
  source 1..20: mol_type = other DNA
gaagttaacaggttcgttaa

SEQ ID NO: 6208 - DNA, 20 bp, synthetic construct
  source 1..20: mol_type = other DNA
tattatggtgcgtgcaaaca

SEQ ID NO: 6209 - DNA, 20 bp, synthetic construct
  source 1..20: mol_type = other DNA
gcgatgcgaattgcgatgga

SEQ ID NO: 6210 - DNA, 20 bp, synthetic construct
  source 1..20: mol_type = other DNA
ctatcttcaatcgtcagttg

SEQ ID NO: 6211 - DNA, 20 bp, synthetic construct
  source 1..20: mol_type = other DNA
agggctgtatgagctcgacg

SEQ ID NO: 6212 - DNA, 20 bp, synthetic construct
  source 1..20: mol_type = other DNA
tgtctgatcgcttcactcac

SEQ ID NO: 6213 - DNA, 20 bp, synthetic construct
  source 1..20: mol_type = other DNA
aagatacgtgtcatcattct

SEQ ID NO: 6214 - DNA, 20 bp, synthetic construct
  source 1..20: mol_type = other DNA
agagactgaaagagtggtgc

SEQ ID NO: 6215 - DNA, 20 bp, synthetic construct
  source 1..20: mol_type = other DNA
cgaaataagttcccaaagga

SEQ ID NO: 6216 - DNA, 20 bp, synthetic construct
  source 1..20: mol_type = other DNA
ctatggttcagctgcaactt

SEQ ID NO: 6217 - DNA, 20 bp, synthetic construct
  source 1..20: mol_type = other DNA
ctcagcatgacggtgattga

SEQ ID NO: 6218 - DNA, 20 bp, synthetic construct
  source 1..20: mol_type = other DNA
tacagcagctatcgaacgcg

SEQ ID NO: 6219 - DNA, 20 bp, synthetic construct
  source 1..20: mol_type = other DNA
cccgagtagatttcgcttta

SEQ ID NO: 6220 - DNA, 20 bp, synthetic construct
  source 1..20: mol_type = other DNA
gttggctacaagatccaaat

SEQ ID NO: 6221 - DNA, 20 bp, synthetic construct
  source 1..20: mol_type = other DNA
caatacgggctccacgaccg

SEQ ID NO: 6222 - DNA, 20 bp, synthetic construct
  source 1..20: mol_type = other DNA
ctgtacgtgacctgcattag

SEQ ID NO: 6223 - DNA, 20 bp, synthetic construct
  source 1..20: mol_type = other DNA
tataatccgaatactctcag

SEQ ID NO: 6224 - DNA, 20 bp, synthetic construct
  source 1..20: mol_type = other DNA
actaaacatctgtggccatc

SEQ ID NO: 6225 - DNA, 20 bp, synthetic construct
  source 1..20: mol_type = other DNA
ctagaacttgagtccattga

SEQ ID NO: 6226 - DNA, 20 bp, synthetic construct
  source 1..20: mol_type = other DNA
cagataatagcgaaaccgat

SEQ ID NO: 6227 - DNA, 20 bp, synthetic construct
  source 1..20: mol_type = other DNA
accgcgtatagcttagacat

SEQ ID NO: 6228 - DNA, 20 bp, synthetic construct
  source 1..20: mol_type = other DNA
caagggccagaagcgggtcc

SEQ ID NO: 6229 - DNA, 20 bp, synthetic construct
  source 1..20: mol_type = other DNA
tactggtcggcaatacggca

SEQ ID NO: 6230 - DNA, 20 bp, synthetic construct
  source 1..20: mol_type = other DNA
cccgcgcattcatgctagcg

SEQ ID NO: 6231 - DNA, 20 bp, synthetic construct
  source 1..20: mol_type = other DNA
atctagtccattggtgtgag

SEQ ID NO: 6232 - DNA, 20 bp, synthetic construct
  source 1..20: mol_type = other DNA
cgggagttctgttggcgaat

SEQ ID NO: 6233 - DNA, 20 bp, synthetic construct
  source 1..20: mol_type = other DNA
cgtgagggtttcagaggagt

SEQ ID NO: 6234 - DNA, 20 bp, synthetic construct
  source 1..20: mol_type = other DNA
acctcagttgatccttgcga

SEQ ID NO: 6235 - DNA, 20 bp, synthetic construct
  source 1..20: mol_type = other DNA
ctgaccacattacaagtgta

SEQ ID NO: 6236 - DNA, 20 bp, synthetic construct
  source 1..20: mol_type = other DNA
cggtgtactcatgagattcg

SEQ ID NO: 6237 - DNA, 20 bp, synthetic construct
  source 1..20: mol_type = other DNA
taatacgagccctttaaggg

SEQ ID NO: 6238 - DNA, 20 bp, synthetic construct
  source 1..20: mol_type = other DNA
catcagagtagcaaggtaat

SEQ ID NO: 6239 - DNA, 20 bp, synthetic construct
  source 1..20: mol_type = other DNA
tgtgagtgggacggcgagcc

SEQ ID NO: 6240 - DNA, 20 bp, synthetic construct
  source 1..20: mol_type = other DNA
agcagtctaccgaatggtta

SEQ ID NO: 6241 - DNA, 20 bp, synthetic construct
  source 1..20: mol_type = other DNA
attaccttacaaattctggg

SEQ ID NO: 6242 - DNA, 20 bp, synthetic construct
  source 1..20: mol_type = other DNA
tctcattgagggcgcattac

SEQ ID NO: 6243 - DNA, 20 bp, synthetic construct
  source 1..20: mol_type = other DNA
ttatactaacgcagaacgcg

SEQ ID NO: 6244 - DNA, 20 bp, synthetic construct
  source 1..20: mol_type = other DNA
tcccatatacatccgagctt

SEQ ID NO: 6245 - DNA, 20 bp, synthetic construct
  source 1..20: mol_type = other DNA
tcgaataggactcggtacaa

SEQ ID NO: 6246 - DNA, 20 bp, synthetic construct
  source 1..20: mol_type = other DNA
gaacagaactgcagtctcac

SEQ ID NO: 6247 - DNA, 20 bp, synthetic construct
  source 1..20: mol_type = other DNA
ggatatgagactgccggctg

SEQ ID NO: 6248 - DNA, 20 bp, synthetic construct
  source 1..20: mol_type = other DNA
attgcattgagacgcggttt

SEQ ID NO: 6249 - DNA, 20 bp, synthetic construct
  source 1..20: mol_type = other DNA
cccgcggcacattgctaatg

SEQ ID NO: 6250 - DNA, 20 bp, synthetic construct
  source 1..20: mol_type = other DNA
cggcacttatacggaaggca

SEQ ID NO: 6251 - DNA, 20 bp, synthetic construct
  source 1..20: mol_type = other DNA
actgccgttggtcagctgat

SEQ ID NO: 6252 - DNA, 20 bp, synthetic construct
  source 1..20: mol_type = other DNA
taaatgtaataggtgcaccg

SEQ ID NO: 6253 - DNA, 20 bp, synthetic construct
  source 1..20: mol_type = other DNA
cagattctgcaacacttaag

SEQ ID NO: 6254 - DNA, 20 bp, synthetic construct
  source 1..20: mol_type = other DNA
ttctaacacgcctaaccagg

SEQ ID NO: 6255 - DNA, 20 bp, synthetic construct
  source 1..20: mol_type = other DNA
gagacgcggtcactctatgg

SEQ ID NO: 6256 - DNA, 20 bp, synthetic construct
  source 1..20: mol_type = other DNA
ctatagacatcactcgctcc

SEQ ID NO: 6257 - DNA, 20 bp, synthetic construct
  source 1..20: mol_type = other DNA
actgccggtttcatgcttgg

SEQ ID NO: 6258 - DNA, 20 bp, synthetic construct
  source 1..20: mol_type = other DNA
cacaccgaaattccggttac

SEQ ID NO: 6259 - DNA, 20 bp, synthetic construct
  source 1..20: mol_type = other DNA
gaaagtagggtgtatgctga

SEQ ID NO: 6260 - DNA, 20 bp, synthetic construct
  source 1..20: mol_type = other DNA
atcgacgtatcggtcagcca

SEQ ID NO: 6261 - DNA, 20 bp, synthetic construct
  source 1..20: mol_type = other DNA
tatgcttggtctctgcattt

SEQ ID NO: 6262 - DNA, 20 bp, synthetic construct
  source 1..20: mol_type = other DNA
gcgcgcatatcacccgtcac

SEQ ID NO: 6263 - DNA, 20 bp, synthetic construct
  source 1..20: mol_type = other DNA
accgtgtgcgacggagatgg

SEQ ID NO: 6264 - DNA, 20 bp, synthetic construct
  source 1..20: mol_type = other DNA
ctttcaacccatctgatagc

SEQ ID NO: 6265 - DNA, 20 bp, synthetic construct
  source 1..20: mol_type = other DNA
agcatctgtttacactgact

SEQ ID NO: 6266 - DNA, 20 bp, synthetic construct
  source 1..20: mol_type = other DNA
atgcgggattgaggtcaaag

SEQ ID NO: 6267 - DNA, 20 bp, synthetic construct
  source 1..20: mol_type = other DNA
cggatagcaatatcctctaa

SEQ ID NO: 6268 - DNA, 20 bp, synthetic construct
  source 1..20: mol_type = other DNA
cgaccatccgtccagaatcg

SEQ ID NO: 6269 - DNA, 20 bp, synthetic construct
  source 1..20: mol_type = other DNA
ggcaccgaatcgtgacccgt

SEQ ID NO: 6270 - DNA, 20 bp, synthetic construct
  source 1..20: mol_type = other DNA
tcatacccgagactaggcaa

SEQ ID NO: 6271 - DNA, 20 bp, synthetic construct
  source 1..20: mol_type = other DNA
gattatgccgaactgatgat

SEQ ID NO: 6272 - DNA, 20 bp, synthetic construct
  source 1..20: mol_type = other DNA
ttggcagtaccgtgagtaat

SEQ ID NO: 6273 - DNA, 20 bp, synthetic construct
  source 1..20: mol_type = other DNA
ggtagagtcagcacctgcat

SEQ ID NO: 6274 - DNA, 20 bp, synthetic construct
  source 1..20: mol_type = other DNA
catcatgtccgcccgagtga

SEQ ID NO: 6275 - DNA, 20 bp, synthetic construct
  source 1..20: mol_type = other DNA
tcacgaggctgggatcgcat

SEQ ID NO: 6276 - DNA, 20 bp, synthetic construct
  source 1..20: mol_type = other DNA
aagacccacatcacctatag

SEQ ID NO: 6277 - DNA, 20 bp, synthetic construct
  source 1..20: mol_type = other DNA
aataagaatcacatgttcga

SEQ ID NO: 6278 - DNA, 20 bp, synthetic construct
  source 1..20: mol_type = other DNA
acgcccgagagcacaagaac

SEQ ID NO: 6279 - DNA, 20 bp, synthetic construct
  source 1..20: mol_type = other DNA
acaacagattatggttggag

SEQ ID NO: 6280 - DNA, 20 bp, synthetic construct
  source 1..20: mol_type = other DNA
tgcggtccactgccaagaac

SEQ ID NO: 6281 - DNA, 20 bp, synthetic construct
  source 1..20: mol_type = other DNA
tcttgatacgctattcgaga

SEQ ID NO: 6282 - DNA, 20 bp, synthetic construct
  source 1..20: mol_type = other DNA
agggtagtatggctctgagt

SEQ ID NO: 6283 - DNA, 20 bp, synthetic construct
  source 1..20: mol_type = other DNA
agtgcacgattatgcgtcat

SEQ ID NO: 6284 - DNA, 20 bp, synthetic construct
  source 1..20: mol_type = other DNA
gaacatccagttcctacgat

SEQ ID NO: 6285 - DNA, 20 bp, synthetic construct
  source 1..20: mol_type = other DNA
gctaaagtaaagcgatacac

SEQ ID NO: 6286 - DNA, 20 bp, synthetic construct
  source 1..20: mol_type = other DNA
ggatgaaggtatgtatgtat

SEQ ID NO: 6287 - DNA, 20 bp, synthetic construct
  source 1..20: mol_type = other DNA
ccctaggtacgatgaagtaa

SEQ ID NO: 6288 - DNA, 20 bp, synthetic construct
  source 1..20: mol_type = other DNA
tcaaagtgtaatccacaggg

SEQ ID NO: 6289 - DNA, 20 bp, synthetic construct
  source 1..20: mol_type = other DNA
caagacctccgcgttatgga

SEQ ID NO: 6290 - DNA, 20 bp, synthetic construct
  source 1..20: mol_type = other DNA
caccgccctaaagtacgtca

SEQ ID NO: 6291 - DNA, 20 bp, synthetic construct
  source 1..20: mol_type = other DNA
ggtcggaggcttgttagaaa

SEQ ID NO: 6292 - DNA, 20 bp, synthetic construct
  source 1..20: mol_type = other DNA
ttgcttcgcactgaacaagc

SEQ ID NO: 6293 - DNA, 20 bp, synthetic construct
  source 1..20: mol_type = other DNA
tgcccgagcgtatctgccga

SEQ ID NO: 6294 - DNA, 20 bp, synthetic construct
  source 1..20: mol_type = other DNA
catctttcctgatttgtgca

SEQ ID NO: 6295 - DNA, 20 bp, synthetic construct
  source 1..20: mol_type = other DNA
gcgtaacgcctaataatcgc

SEQ ID NO: 6296 - DNA, 20 bp, synthetic construct
  source 1..20: mol_type = other DNA
ctggccaatttgccaataaa

SEQ ID NO: 6297 - DNA, 20 bp, synthetic construct
  source 1..20: mol_type = other DNA
ggagaacccgcgtatcagac

SEQ ID NO: 6298 - DNA, 20 bp, synthetic construct
  source 1..20: mol_type = other DNA
ggatttcctattgtccgaag

SEQ ID NO: 6299 - DNA, 20 bp, synthetic construct
  source 1..20: mol_type = other DNA
aaacagtacacacggttagc

SEQ ID NO: 6300 - DNA, 20 bp, synthetic construct
  source 1..20: mol_type = other DNA
caaggaccaacttctagtaa

SEQ ID NO: 6301 - DNA, 20 bp, synthetic construct
  source 1..20: mol_type = other DNA
aagaacgcccaacccaacca

SEQ ID NO: 6302 - DNA, 20 bp, synthetic construct
  source 1..20: mol_type = other DNA
tttggttaacaggtccgggc

SEQ ID NO: 6303 - DNA, 20 bp, synthetic construct
  source 1..20: mol_type = other DNA
attcaggatcagtcacgatc

SEQ ID NO: 6304 - DNA, 20 bp, synthetic construct
  source 1..20: mol_type = other DNA
taggcaatcaggcagcgggc

SEQ ID NO: 6305 - DNA, 20 bp, synthetic construct
  source 1..20: mol_type = other DNA
tacaccctatctgtggagcg

SEQ ID NO: 6306 - DNA, 20 bp, synthetic construct
  source 1..20: mol_type = other DNA
cggagcactcatcgatctta

SEQ ID NO: 6307 - DNA, 20 bp, synthetic construct
  source 1..20: mol_type = other DNA
gacgctggtgtatgggtgga

SEQ ID NO: 6308 - DNA, 20 bp, synthetic construct
  source 1..20: mol_type = other DNA
tagggcagtgaatccgtcga

SEQ ID NO: 6309 - DNA, 20 bp, synthetic construct
  source 1..20: mol_type = other DNA
tctatatctatcggttcgac

SEQ ID NO: 6310 - DNA, 20 bp, synthetic construct
  source 1..20: mol_type = other DNA
tgatcatctccctgcgctcg

SEQ ID NO: 6311 - DNA, 20 bp, synthetic construct
  source 1..20: mol_type = other DNA
agtacacctggaagtgtggg

SEQ ID NO: 6312 - DNA, 20 bp, synthetic construct
  source 1..20: mol_type = other DNA
agcactacaatcaattgcct

SEQ ID NO: 6313 - DNA, 20 bp, synthetic construct
  source 1..20: mol_type = other DNA
tcttagagaagggtgaggaa

SEQ ID NO: 6314 - DNA, 20 bp, synthetic construct
  source 1..20: mol_type = other DNA
cgagatacgtgcgttgaatg

SEQ ID NO: 6315 - DNA, 20 bp, synthetic construct
  source 1..20: mol_type = other DNA
taaacgagcagcttgtggct

SEQ ID NO: 6316 - DNA, 20 bp, synthetic construct
  source 1..20: mol_type = other DNA
gagcggagttgtcatcgatc

SEQ ID NO: 6317 - DNA, 20 bp, synthetic construct
  source 1..20: mol_type = other DNA
cattcgaatccatctagctc

SEQ ID NO: 6318 - DNA, 20 bp, synthetic construct
  source 1..20: mol_type = other DNA
ggtgtatcacgtcgctgtga

SEQ ID NO: 6319 - DNA, 20 bp, synthetic construct
  source 1..20: mol_type = other DNA
attaggtacgctttgggcct

SEQ ID NO: 6320 - DNA, 20 bp, synthetic construct
  source 1..20: mol_type = other DNA
actttccaatggtcttcggt

SEQ ID NO: 6321 - DNA, 20 bp, synthetic construct
  source 1..20: mol_type = other DNA
ctaataccttaccgcttctg

SEQ ID NO: 6322 - DNA, 20 bp, synthetic construct
  source 1..20: mol_type = other DNA
gaagagtcaagcccggacgg

SEQ ID NO: 6323 - DNA, 20 bp, synthetic construct
  source 1..20: mol_type = other DNA
ctatggattccctctatagt

SEQ ID NO: 6324 - DNA, 20 bp, synthetic construct
  source 1..20: mol_type = other DNA
aaccaatcaacagaagagaa

SEQ ID NO: 6325 - DNA, 20 bp, synthetic construct
  source 1..20: mol_type = other DNA
tactgcgattagcctgaaca

SEQ ID NO: 6326 - DNA, 20 bp, synthetic construct
  source 1..20: mol_type = other DNA
ctcatcggtccgtgtggaac

SEQ ID NO: 6327 - DNA, 20 bp, synthetic construct
  source 1..20: mol_type = other DNA
atttcccaggttacgtacaa

SEQ ID NO: 6328 - DNA, 20 bp, synthetic construct
  source 1..20: mol_type = other DNA
ggcccattcccaatatggta

SEQ ID NO: 6329 - DNA, 20 bp, synthetic construct
  source 1..20: mol_type = other DNA
actaattctgagtcgtctag

SEQ ID NO: 6330 - DNA, 20 bp, synthetic construct
  source 1..20: mol_type = other DNA
gtcaccaggctaaatcagta

SEQ ID NO: 6331 - DNA, 20 bp, synthetic construct
  source 1..20: mol_type = other DNA
ccgtagagacgcactatgag

SEQ ID NO: 6332 - DNA, 20 bp, synthetic construct
  source 1..20: mol_type = other DNA
gcttggtacttcggaagcga

SEQ ID NO: 6333 - DNA, 20 bp, synthetic construct
  source 1..20: mol_type = other DNA
acttgttagaacctactcct

SEQ ID NO: 6334 - DNA, 20 bp, synthetic construct
  source 1..20: mol_type = other DNA
ggcccagcatggtatcgagt

SEQ ID NO: 6335 - DNA, 20 bp, synthetic construct
  source 1..20: mol_type = other DNA
gaatcatgatggctcattaa

SEQ ID NO: 6336 - DNA, 20 bp, synthetic construct
  source 1..20: mol_type = other DNA
cgggaactgggtggttctga

SEQ ID NO: 6337 - DNA, 20 bp, synthetic construct
  source 1..20: mol_type = other DNA
gcttggaaacaccaaggcga

SEQ ID NO: 6338 - DNA, 20 bp, synthetic construct
  source 1..20: mol_type = other DNA
attctcaggacctgagtcca

SEQ ID NO: 6339 - DNA, 20 bp, synthetic construct
  source 1..20: mol_type = other DNA
ggtccataaacccatgcaat

SEQ ID NO: 6340 - DNA, 20 bp, synthetic construct
  source 1..20: mol_type = other DNA
gtcactaagagcttagtgtt

SEQ ID NO: 6341 - DNA, 20 bp, synthetic construct
  source 1..20: mol_type = other DNA
cgtaggccacacgtcctctc

SEQ ID NO: 6342 - DNA, 20 bp, synthetic construct
  source 1..20: mol_type = other DNA
gtgatattcgaacgacttga

SEQ ID NO: 6343 - DNA, 20 bp, synthetic construct
  source 1..20: mol_type = other DNA
ttcggttatttaatggtgtg

SEQ ID NO: 6344 - DNA, 20 bp, synthetic construct
  source 1..20: mol_type = other DNA
cgcacagtcaacgactacaa

SEQ ID NO: 6345 - DNA, 20 bp, synthetic construct
  source 1..20: mol_type = other DNA
gcgtgaagagttaaccgaat

SEQ ID NO: 6346 - DNA, 20 bp, synthetic construct
  source 1..20: mol_type = other DNA
actcctagtagcgtgccatt

SEQ ID NO: 6347 - DNA, 20 bp, synthetic construct
  source 1..20: mol_type = other DNA
tgagggattcgagactggtg

SEQ ID NO: 6348 - DNA, 20 bp, synthetic construct
  source 1..20: mol_type = other DNA
tcactggcggaacatgctcc

SEQ ID NO: 6349 - DNA, 20 bp, synthetic construct
  source 1..20: mol_type = other DNA
gtgatctgagtcactctgct

SEQ ID NO: 6350 - DNA, 20 bp, synthetic construct
  source 1..20: mol_type = other DNA
gttagactcataaggttccc

SEQ ID NO: 6351 - DNA, 20 bp, synthetic construct
  source 1..20: mol_type = other DNA
ggcatgtccagaacgccgtt

SEQ ID NO: 6352 - DNA, 20 bp, synthetic construct
  source 1..20: mol_type = other DNA
acgctattctctttacgcta

SEQ ID NO: 6353 - DNA, 20 bp, synthetic construct
  source 1..20: mol_type = other DNA
tgcctaccataaagatacgg

SEQ ID NO: 6354 - DNA, 20 bp, synthetic construct
  source 1..20: mol_type = other DNA
ccaagcagtcgtgcgatcgt

SEQ ID NO: 6355 - DNA, 20 bp, synthetic construct
  source 1..20: mol_type = other DNA
gaacggtcgatctttgacga

SEQ ID NO: 6356 - DNA, 20 bp, synthetic construct
  source 1..20: mol_type = other DNA
cgaagtgttgggattctcca

SEQ ID NO: 6357 - DNA, 20 bp, synthetic construct
  source 1..20: mol_type = other DNA
tcaatttgtcggtccgccgt

SEQ ID NO: 6358 - DNA, 20 bp, synthetic construct
  source 1..20: mol_type = other DNA
ttagcatggtgtcatggaga

SEQ ID NO: 6359 - DNA, 20 bp, synthetic construct
  source 1..20: mol_type = other DNA
cccatccctagtgacctctg

SEQ ID NO: 6360 - DNA, 20 bp, synthetic construct
  source 1..20: mol_type = other DNA
ggattcctagcgctgtgtgt

SEQ ID NO: 6361 - DNA, 20 bp, synthetic construct
  source 1..20: mol_type = other DNA
atgcagtcaccgaagctctc

SEQ ID NO: 6362 - DNA, 20 bp, synthetic construct
  source 1..20: mol_type = other DNA
tattccgtgctgggcgccag

SEQ ID NO: 6363 - DNA, 20 bp, synthetic construct
  source 1..20: mol_type = other DNA
accatagctacacgctttgg

SEQ ID NO: 6364 - DNA, 20 bp, synthetic construct
  source 1..20: mol_type = other DNA
tcctcctattcatattcact

SEQ ID NO: 6365 - DNA, 20 bp, synthetic construct
  source 1..20: mol_type = other DNA
atcacaaatgcaactggcca

SEQ ID NO: 6366 - DNA, 20 bp, synthetic construct
  source 1..20: mol_type = other DNA
gtgtcctgtcgctccagaca

SEQ ID NO: 6367 - DNA, 20 bp, synthetic construct
  source 1..20: mol_type = other DNA
agagttgggaattgcgagac

SEQ ID NO: 6368 - DNA, 20 bp, synthetic construct
  source 1..20: mol_type = other DNA
aacgcaggactgacatgtct

SEQ ID NO: 6369 - DNA, 20 bp, synthetic construct
  source 1..20: mol_type = other DNA
tgccgtaatgggtgggagag

SEQ ID NO: 6370 - DNA, 20 bp, synthetic construct
  source 1..20: mol_type = other DNA
gtaaacttacgtatctgcga

SEQ ID NO: 6371 - DNA, 20 bp, synthetic construct
  source 1..20: mol_type = other DNA
acacctggtagttccgcgca

SEQ ID NO: 6372 - DNA, 20 bp, synthetic construct
  source 1..20: mol_type = other DNA
acacagtcgtcgtgacggtt

SEQ ID NO: 6373 - DNA, 20 bp, synthetic construct
  source 1..20: mol_type = other DNA
agaagtcagacttcttcgcg

SEQ ID NO: 6374 - DNA, 20 bp, synthetic construct
  source 1..20: mol_type = other DNA
atcaatcttcaagtgttggg

SEQ ID NO: 6375 - DNA, 20 bp, synthetic construct
  source 1..20: mol_type = other DNA
aagcacgcagctttctcatc

SEQ ID NO: 6376 - DNA, 20 bp, synthetic construct
  source 1..20: mol_type = other DNA
tcgaacggctgtgtctgcgt

SEQ ID NO: 6377 - DNA, 20 bp, synthetic construct
  source 1..20: mol_type = other DNA
aatgggtgcgggtcttaccg

SEQ ID NO: 6378 - DNA, 20 bp, synthetic construct
  source 1..20: mol_type = other DNA
aaacgcattgactagcgttg

SEQ ID NO: 6379 - DNA, 20 bp, synthetic construct
  source 1..20: mol_type = other DNA
tacacggcgcagtgaattaa

SEQ ID NO: 6380 - DNA, 20 bp, synthetic construct
  source 1..20: mol_type = other DNA
tctctctgcctcgcccaatg

SEQ ID NO: 6381 - DNA, 20 bp, synthetic construct
  source 1..20: mol_type = other DNA
ctttacgagcaagggacgag

SEQ ID NO: 6382 - DNA, 20 bp, synthetic construct
  source 1..20: mol_type = other DNA
acgtaactgctaagcaccac

SEQ ID NO: 6383 - DNA, 20 bp, synthetic construct
  source 1..20: mol_type = other DNA
taataagccgcacgtggtga

SEQ ID NO: 6384 - DNA, 20 bp, synthetic construct
  source 1..20: mol_type = other DNA
gtgctggcttactagcatgt

SEQ ID NO: 6385 - DNA, 20 bp, synthetic construct
  source 1..20: mol_type = other DNA
actaaacaattgaggtacag

SEQ ID NO: 6386 - DNA, 20 bp, synthetic construct
  source 1..20: mol_type = other DNA
cagggactgagacagtccac

SEQ ID NO: 6387 - DNA, 20 bp, synthetic construct
  source 1..20: mol_type = other DNA
tgttcccgtttactagcctg

SEQ ID NO: 6388 - DNA, 20 bp, synthetic construct
  source 1..20: mol_type = other DNA
gcctgaaatagttacaatca

SEQ ID NO: 6389 - DNA, 20 bp, synthetic construct
  source 1..20: mol_type = other DNA
ggtctcatggaccattggtc

SEQ ID NO: 6390 - DNA, 20 bp, synthetic construct
  source 1..20: mol_type = other DNA
acccattgagagccgtaggc

SEQ ID NO: 6391 - DNA, 20 bp, synthetic construct
  source 1..20: mol_type = other DNA
caaatgatgtaaagcgtctt

SEQ ID NO: 6392 - DNA, 20 bp, synthetic construct
  source 1..20: mol_type = other DNA
gtaatggttcactcttactg

SEQ ID NO: 6393 - DNA, 20 bp, synthetic construct
  source 1..20: mol_type = other DNA
cctggagctgacacttatga

SEQ ID NO: 6394 - DNA, 20 bp, synthetic construct
  source 1..20: mol_type = other DNA
ttggcagaactaaccattta

SEQ ID NO: 6395 - DNA, 20 bp, synthetic construct
  source 1..20: mol_type = other DNA
ttgtgtgttgtcatttccat

SEQ ID NO: 6396 - DNA, 20 bp, synthetic construct
  source 1..20: mol_type = other DNA
tacggtgtcagatctcctaa

SEQ ID NO: 6397 - DNA, 20 bp, synthetic construct
  source 1..20: mol_type = other DNA
tctcctgcgccgatcagatt

SEQ ID NO: 6398 - DNA, 20 bp, synthetic construct
  source 1..20: mol_type = other DNA
agtccatggctaggagagcc

SEQ ID NO: 6399 - DNA, 20 bp, synthetic construct
  source 1..20: mol_type = other DNA
tctattcgtgtgacactgcc

SEQ ID NO: 6400 - DNA, 20 bp, synthetic construct
  source 1..20: mol_type = other DNA
atgaccgcgaggacttacat

SEQ ID NO: 6401 - DNA, 20 bp, synthetic construct
  source 1..20: mol_type = other DNA
gatgaggaaacaattgccga

SEQ ID NO: 6402 - DNA, 20 bp, synthetic construct
  source 1..20: mol_type = other DNA
ttatttcagcaccgcctgcc

SEQ ID NO: 6403 - DNA, 20 bp, synthetic construct
  source 1..20: mol_type = other DNA
ccgctgcaggaccactttcc

SEQ ID NO: 6404 - DNA, 20 bp, synthetic construct
  source 1..20: mol_type = other DNA
acccgtttgatgagcagtga

SEQ ID NO: 6405 - DNA, 20 bp, synthetic construct
  source 1..20: mol_type = other DNA
gtgataggcagtctacctct

SEQ ID NO: 6406 - DNA, 20 bp, synthetic construct
  source 1..20: mol_type = other DNA
gctaatggatatttgagtcc

SEQ ID NO: 6407 - DNA, 20 bp, synthetic construct
  source 1..20: mol_type = other DNA
aggactcctaagacacgacc

SEQ ID NO: 6408 - DNA, 20 bp, synthetic construct
  source 1..20: mol_type = other DNA
accagaaacgcggagttcct

SEQ ID NO: 6409 - DNA, 20 bp, synthetic construct
  source 1..20: mol_type = other DNA
cggtcgtagttacaaccaat

SEQ ID NO: 6410 - DNA, 20 bp, synthetic construct
  source 1..20: mol_type = other DNA
aaagcgttagcggataggaa

SEQ ID NO: 6411 - DNA, 20 bp, synthetic construct
  source 1..20: mol_type = other DNA
ccgttacgatacgaattagc

SEQ ID NO: 6412 - DNA, 20 bp, synthetic construct
  source 1..20: mol_type = other DNA
ctgcgcatcaggctctcagt

SEQ ID NO: 6413 - DNA, 20 bp, synthetic construct
  source 1..20: mol_type = other DNA
ctatccggcagcccattgag

SEQ ID NO: 6414 - DNA, 20 bp, synthetic construct
  source 1..20: mol_type = other DNA
tctgatagagcttcgaagaa

SEQ ID NO: 6415 - DNA, 20 bp, synthetic construct
  source 1..20: mol_type = other DNA
ctttagtgatggacttccta

SEQ ID NO: 6416 - DNA, 20 bp, synthetic construct
  source 1..20: mol_type = other DNA
tgctagatgaagcgtgaaga

SEQ ID NO: 6417 - DNA, 20 bp, synthetic construct
  source 1..20: mol_type = other DNA
ttcacgacgcccttccgcat

SEQ ID NO: 6418 - DNA, 20 bp, synthetic construct
  source 1..20: mol_type = other DNA
gtttcgatggtaatgctgac

SEQ ID NO: 6419 - DNA, 20 bp, synthetic construct
  source 1..20: mol_type = other DNA
ttagtgcagtaacaatggac

SEQ ID NO: 6420 - DNA, 20 bp, synthetic construct
  source 1..20: mol_type = other DNA
tcgatccgtctcgggagctc

SEQ ID NO: 6421 - DNA, 20 bp, synthetic construct
  source 1..20: mol_type = other DNA
gcgctgaacaagccaagtaa

SEQ ID NO: 6422 - DNA, 20 bp, synthetic construct
  source 1..20: mol_type = other DNA
cgctcctgctagctaaagtt

SEQ ID NO: 6423 - DNA, 20 bp, synthetic construct
  source 1..20: mol_type = other DNA
cgccgcaccacgtctgatta

SEQ ID NO: 6424 - DNA, 20 bp, synthetic construct
  source 1..20: mol_type = other DNA
gcttgagcacgatgtcgaag

SEQ ID NO: 6425 - DNA, 20 bp, synthetic construct
  source 1..20: mol_type = other DNA
atagagttcgcaacccggat

SEQ ID NO: 6426 - DNA, 20 bp, synthetic construct
  source 1..20: mol_type = other DNA
ctccgccgagatggacacat

SEQ ID NO: 6427 - DNA, 20 bp, synthetic construct
  source 1..20: mol_type = other DNA
ctcggtccatgttaattaac

SEQ ID NO: 6428 - DNA, 20 bp, synthetic construct
  source 1..20: mol_type = other DNA
caatggctgggtcccgcgag

SEQ ID NO: 6429 - DNA, 20 bp, synthetic construct
  source 1..20: mol_type = other DNA
tggttctttatcctccgcga

SEQ ID NO: 6430 - DNA, 20 bp, synthetic construct
  source 1..20: mol_type = other DNA
acagtgtagataccgcagtt

SEQ ID NO: 6431 - DNA, 20 bp, synthetic construct
  source 1..20: mol_type = other DNA
ctctggtactacagagccat

SEQ ID NO: 6432 - DNA, 20 bp, synthetic construct
  source 1..20: mol_type = other DNA
ttacgggacggttacatatg

SEQ ID NO: 6433 - DNA, 20 bp, synthetic construct
  source 1..20: mol_type = other DNA
tcactaacctacccactcct

SEQ ID NO: 6434 - DNA, 20 bp, synthetic construct
  source 1..20: mol_type = other DNA
tacccggctgctagaatacg

SEQ ID NO: 6435 - DNA, 20 bp, synthetic construct
  source 1..20: mol_type = other DNA
ttgagatggcgtcagcttag

SEQ ID NO: 6436 - DNA, 20 bp, synthetic construct
  source 1..20: mol_type = other DNA
cagctgatcctttgggaata

SEQ ID NO: 6437 - DNA, 20 bp, synthetic construct
  source 1..20: mol_type = other DNA
tacttcggtttaagtactcc

SEQ ID NO: 6438 - DNA, 20 bp, synthetic construct
  source 1..20: mol_type = other DNA
gctagcttcggagcataaag

SEQ ID NO: 6439 - DNA, 20 bp, synthetic construct
  source 1..20: mol_type = other DNA
aagcgaaacgtagggaggcc

SEQ ID NO: 6440 - DNA, 20 bp, synthetic construct
  source 1..20: mol_type = other DNA
tttggcaggaatagaaggtc

SEQ ID NO: 6441 - DNA, 20 bp, synthetic construct
  source 1..20: mol_type = other DNA
gatgcatacgtagggagtgc

SEQ ID NO: 6442 - DNA, 20 bp, synthetic construct
  source 1..20: mol_type = other DNA
gtcctcctggagtcgatttg

SEQ ID NO: 6443 - DNA, 20 bp, synthetic construct
  source 1..20: mol_type = other DNA
ctctctgtatctacgtgctc

SEQ ID NO: 6444 - DNA, 20 bp, synthetic construct
  source 1..20: mol_type = other DNA
caacacaggcgggtataagg

SEQ ID NO: 6445 - DNA, 20 bp, synthetic construct
  source 1..20: mol_type = other DNA
atctatcccgcaaattggac

SEQ ID NO: 6446 - DNA, 20 bp, synthetic construct
  source 1..20: mol_type = other DNA
gttatataacaatcagggtc

SEQ ID NO: 6447 - DNA, 20 bp, synthetic construct
  source 1..20: mol_type = other DNA
taggacgccagatcatgtcc

SEQ ID NO: 6448 - DNA, 20 bp, synthetic construct
  source 1..20: mol_type = other DNA
ggccaagataacgatgcacg

SEQ ID NO: 6449 - DNA, 20 bp, synthetic construct
  source 1..20: mol_type = other DNA
gttgttgagcgcagactatt

SEQ ID NO: 6450 - DNA, 20 bp, synthetic construct
  source 1..20: mol_type = other DNA
ggttagttgcgctacctatt

SEQ ID NO: 6451 - DNA, 20 bp, synthetic construct
  source 1..20: mol_type = other DNA
ctgacggtatttgatcgtca

SEQ ID NO: 6452 - DNA, 20 bp, synthetic construct
  source 1..20: mol_type = other DNA
gatctacctcttacgagaat

SEQ ID NO: 6453 - DNA, 20 bp, synthetic construct
  source 1..20: mol_type = other DNA
cgagatactaattccgaggt

SEQ ID NO: 6454 - DNA, 20 bp, synthetic construct
  source 1..20: mol_type = other DNA
ccatgggtatcatacacctt

SEQ ID NO: 6455 - DNA, 20 bp, synthetic construct
  source 1..20: mol_type = other DNA
ctggcatgagggaagattct

SEQ ID NO: 6456 - DNA, 20 bp, synthetic construct
  source 1..20: mol_type = other DNA
gcctaatcatctcaaatgaa

SEQ ID NO: 6457 - DNA, 20 bp, synthetic construct
  source 1..20: mol_type = other DNA
aaacgcattcttagtcggtt

SEQ ID NO: 6458 - DNA, 20 bp, synthetic construct
  source 1..20: mol_type = other DNA
caaccacgtcctccgcgaaa

SEQ ID NO: 6459 - DNA, 20 bp, synthetic construct
  source 1..20: mol_type = other DNA
gctggctggaatgacagtgt

SEQ ID NO: 6460 - DNA, 20 bp, synthetic construct
  source 1..20: mol_type = other DNA
agtggattgtgtgtcgtgga

SEQ ID NO: 6461 - DNA, 20 bp, synthetic construct
  source 1..20: mol_type = other DNA
aacaaatcgaagtaactgca

SEQ ID NO: 6462 - DNA, 20 bp, synthetic construct
  source 1..20: mol_type = other DNA
gattcagcggcgatccttat

SEQ ID NO: 6463 - DNA, 20 bp, synthetic construct
  source 1..20: mol_type = other DNA
tgtttccgcagcagtggatt

SEQ ID NO: 6464 - DNA, 20 bp, synthetic construct
  source 1..20: mol_type = other DNA
cggatggtaccgtacaacag

SEQ ID NO: 6465 - DNA, 20 bp, synthetic construct
  source 1..20: mol_type = other DNA
atatgacgaacgatcccgat

SEQ ID NO: 6466 - DNA, 20 bp, synthetic construct
  source 1..20: mol_type = other DNA
caggcactttgtatggaatc

SEQ ID NO: 6467 - DNA, 20 bp, synthetic construct
  source 1..20: mol_type = other DNA
agccagactgaactgtattg

SEQ ID NO: 6468 - DNA, 20 bp, synthetic construct
  source 1..20: mol_type = other DNA
tgggtgcagtcaatgtaaat

SEQ ID NO: 6469 - DNA, 20 bp, synthetic construct
  source 1..20: mol_type = other DNA
ctactcggcaatagcgctta

SEQ ID NO: 6470 - DNA, 20 bp, synthetic construct
  source 1..20: mol_type = other DNA
acctggccaaagcgtgcaaa

SEQ ID NO: 6471 - DNA, 20 bp, synthetic construct
  source 1..20: mol_type = other DNA
ctgactatgccgatgcacaa

SEQ ID NO: 6472 - DNA, 20 bp, synthetic construct
  source 1..20: mol_type = other DNA
tgggcgtgaaatttgcccac

SEQ ID NO: 6473 - DNA, 20 bp, synthetic construct
  source 1..20: mol_type = other DNA
cgttcccgcagaatgtgata

SEQ ID NO: 6474 - DNA, 20 bp, synthetic construct
  source 1..20: mol_type = other DNA
caagaaacagagtttgactg

SEQ ID NO: 6475 - DNA, 20 bp, synthetic construct
  source 1..20: mol_type = other DNA
gcagggctaacacgagtcct

SEQ ID NO: 6476 - DNA, 20 bp, synthetic construct
  source 1..20: mol_type = other DNA
agaacagagaggagcacgcg

SEQ ID NO: 6477 - DNA, 20 bp, synthetic construct
  source 1..20: mol_type = other DNA
catgatcctgagagcaacag

SEQ ID NO: 6478 - DNA, 20 bp, synthetic construct
  source 1..20: mol_type = other DNA
ccgacaaatcttcggcatca

SEQ ID NO: 6479 - DNA, 20 bp, synthetic construct
  source 1..20: mol_type = other DNA
ttgtgcgtgtccctatcgga

SEQ ID NO: 6480 - DNA, 20 bp, synthetic construct
  source 1..20: mol_type = other DNA
aacctcccacttagtggtac

SEQ ID NO: 6481 - DNA, 20 bp, synthetic construct
  source 1..20: mol_type = other DNA
ggatctcctggaaataaatt

SEQ ID NO: 6482 - DNA, 20 bp, synthetic construct
  source 1..20: mol_type = other DNA
acaatcgataacgcaggcac

SEQ ID NO: 6483 - DNA, 20 bp, synthetic construct
  source 1..20: mol_type = other DNA
gcagactgtacccttcccat

SEQ ID NO: 6484 - DNA, 20 bp, synthetic construct
  source 1..20: mol_type = other DNA
tctaagcggacaattctcag

SEQ ID NO: 6485 - DNA, 20 bp, synthetic construct
  source 1..20: mol_type = other DNA
acgctgactctaatcgcaaa

SEQ ID NO: 6486 - DNA, 20 bp, synthetic construct
  source 1..20: mol_type = other DNA
caaccttacctgtactttgc

SEQ ID NO: 6487 - DNA, 20 bp, synthetic construct
  source 1..20: mol_type = other DNA
aatcgcttgctgccatgccg

SEQ ID NO: 6488 - DNA, 20 bp, synthetic construct
  source 1..20: mol_type = other DNA
tgggtttgatccctaactgt

SEQ ID NO: 6489 - DNA, 20 bp, synthetic construct
  source 1..20: mol_type = other DNA
tcaatctcgccacaggccat

SEQ ID NO: 6490 - DNA, 20 bp, synthetic construct
  source 1..20: mol_type = other DNA
ccaatctcccattcctgaaa

SEQ ID NO: 6491 - DNA, 20 bp, synthetic construct
  source 1..20: mol_type = other DNA
cgactctacttgttaaaggc

SEQ ID NO: 6492 - DNA, 20 bp, synthetic construct
  source 1..20: mol_type = other DNA
tgcagtacgtagcatcctaa

SEQ ID NO: 6493 - DNA, 20 bp, synthetic construct
  source 1..20: mol_type = other DNA
acgcgagagagtaaacacgc

SEQ ID NO: 6494 - DNA, 20 bp, synthetic construct
  source 1..20: mol_type = other DNA
gtccaaggtttatttcgatc

SEQ ID NO: 6495 - DNA, 20 bp, synthetic construct
  source 1..20: mol_type = other DNA
tttactctgtcagcgtatgt

SEQ ID NO: 6496 - DNA, 20 bp, synthetic construct
  source 1..20: mol_type = other DNA
ggccctggacacgttcatag

SEQ ID NO: 6497 - DNA, 20 bp, synthetic construct
  source 1..20: mol_type = other DNA
gacacggcactattgaccga

SEQ ID NO: 6498 - DNA, 20 bp, synthetic construct
  source 1..20: mol_type = other DNA
gttctgcgagggcgagaata

SEQ ID NO: 6499 - DNA, 20 bp, synthetic construct
  source 1..20: mol_type = other DNA
atagcctagtcctcggctct

SEQ ID NO: 6500 - DNA, 20 bp, synthetic construct
  source 1..20: mol_type = other DNA
aaagaactcaacatgctccg

SEQ ID NO: 6501 - DNA, 20 bp, synthetic construct
  source 1..20: mol_type = other DNA
tggttgttacttgcgcaatt

SEQ ID NO: 6502 - DNA, 20 bp, synthetic construct
  source 1..20: mol_type = other DNA
aactctaacccaagggtgtc

SEQ ID NO: 6503 - DNA, 20 bp, synthetic construct
  source 1..20: mol_type = other DNA
tgaatatgtatagctgcatc

SEQ ID NO: 6504 - DNA, 20 bp, synthetic construct
  source 1..20: mol_type = other DNA
gggttcacgtccggtaaagc

SEQ ID NO: 6505 - DNA, 20 bp, synthetic construct
  source 1..20: mol_type = other DNA
gaccgtcgagtctctttaag

SEQ ID NO: 6506 - DNA, 20 bp, synthetic construct
  source 1..20: mol_type = other DNA
ccggtaattagcaggattca

SEQ ID NO: 6507 - DNA, 20 bp, synthetic construct
  source 1..20: mol_type = other DNA
atgaggaagtgcaattcagc

SEQ ID NO: 6508 - DNA, 20 bp, synthetic construct
  source 1..20: mol_type = other DNA
ttcctccacgtgtttgcatg

SEQ ID NO: 6509 - DNA, 20 bp, synthetic construct
  source 1..20: mol_type = other DNA
cctagccaacaaagccctat

SEQ ID NO: 6510 - DNA, 20 bp, synthetic construct
  source 1..20: mol_type = other DNA
cgtggtgtacatgcggtttg

SEQ ID NO: 6511 - DNA, 20 bp, synthetic construct
  source 1..20: mol_type = other DNA
gatggcgagcaagtgatgct

SEQ ID NO: 6512 - DNA, 20 bp, synthetic construct
  source 1..20: mol_type = other DNA
tcgcgccgatattccctgga

SEQ ID NO: 6513 - DNA, 20 bp, synthetic construct
  source 1..20: mol_type = other DNA
agttcgttacggctcacctc

SEQ ID NO: 6514 - DNA, 20 bp, synthetic construct
  source 1..20: mol_type = other DNA
caccaagtcggctctgggta

SEQ ID NO: 6515 - DNA, 20 bp, synthetic construct
  source 1..20: mol_type = other DNA
attctaacgacaacctcgcc

SEQ ID NO: 6516 - DNA, 20 bp, synthetic construct
  source 1..20: mol_type = other DNA
gaggtttgaatagtgatgcc

SEQ ID NO: 6517 - DNA, 20 bp, synthetic construct
  source 1..20: mol_type = other DNA
gtggagtcgcgttctaaccc

SEQ ID NO: 6518 - DNA, 20 bp, synthetic construct
  source 1..20: mol_type = other DNA
cgtacactgtttgctatccc

SEQ ID NO: 6519 - DNA, 20 bp, synthetic construct
  source 1..20: mol_type = other DNA
gaaagctgtactagcgaggc

SEQ ID NO: 6520 - DNA, 20 bp, synthetic construct
  source 1..20: mol_type = other DNA
gaccaggatggttcattatt

SEQ ID NO: 6521 - DNA, 20 bp, synthetic construct
  source 1..20: mol_type = other DNA
aaagtcgcaaactgttgatg

SEQ ID NO: 6522 - DNA, 20 bp, synthetic construct
  source 1..20: mol_type = other DNA
cgtaatggtctacctaacgt

SEQ ID NO: 6523 - DNA, 20 bp, synthetic construct
  source 1..20: mol_type = other DNA
agtacggaagccacgctgcc

SEQ ID NO: 6524 - DNA, 20 bp, synthetic construct
  source 1..20: mol_type = other DNA
ctaaaggtccgtgtgaacat

SEQ ID NO: 6525 - DNA, 20 bp, synthetic construct
  source 1..20: mol_type = other DNA
ctggctttggagtccggcag

SEQ ID NO: 6526 - DNA, 20 bp, synthetic construct
  source 1..20: mol_type = other DNA
tacacctagaaggacgctaa

SEQ ID NO: 6527 - DNA, 20 bp, synthetic construct
  source 1..20: mol_type = other DNA
catattgttaccgactgtgt

SEQ ID NO: 6528 - DNA, 20 bp, synthetic construct
  source 1..20: mol_type = other DNA
catcagcgtattcaagttcg

SEQ ID NO: 6529 - DNA, 20 bp, synthetic construct
  source 1..20: mol_type = other DNA
caaccgtctgtgctcttggg

SEQ ID NO: 6530 - DNA, 20 bp, synthetic construct
  source 1..20: mol_type = other DNA
ctcaatcgcgaaacacggtt

SEQ ID NO: 6531 - DNA, 20 bp, synthetic construct
  source 1..20: mol_type = other DNA
ttggaactgttcagttaccc

SEQ ID NO: 6532 - DNA, 20 bp, synthetic construct
  source 1..20: mol_type = other DNA
cctgtgtaacgctccctgct

SEQ ID NO: 6533 - DNA, 20 bp, synthetic construct
  source 1..20: mol_type = other DNA
gacaggcacccaatagttgt

SEQ ID NO: 6534 - DNA, 20 bp, synthetic construct
  source 1..20: mol_type = other DNA
ggtgagcacaatgtcgtaga

SEQ ID NO: 6535 - DNA, 20 bp, synthetic construct
  source 1..20: mol_type = other DNA
aatctctacagtacgagtgt

SEQ ID NO: 6536 - DNA, 20 bp, synthetic construct
  source 1..20: mol_type = other DNA
tacgaggagttgcaatctac

SEQ ID NO: 6537 - DNA, 20 bp, synthetic construct
  source 1..20: mol_type = other DNA
gcaattcgaggcgcggtacg

SEQ ID NO: 6538 - DNA, 20 bp, synthetic construct
  source 1..20: mol_type = other DNA
cgttggcacggtatcgtaac

SEQ ID NO: 6539 - DNA, 20 bp, synthetic construct
  source 1..20: mol_type = other DNA
gcagtatagcctccagttcc

SEQ ID NO: 6540 - DNA, 20 bp, synthetic construct
  source 1..20: mol_type = other DNA
atgaattatcgcagaccaga

SEQ ID NO: 6541 - DNA, 20 bp, synthetic construct
  source 1..20: mol_type = other DNA
gatatgtcccggtgatagtc

SEQ ID NO: 6542 - DNA, 20 bp, synthetic construct
  source 1..20: mol_type = other DNA
cgcaactcctctttgcaggg

SEQ ID NO: 6543 - DNA, 20 bp, synthetic construct
  source 1..20: mol_type = other DNA
cgcggtgacatccaagagaa

SEQ ID NO: 6544 - DNA, 20 bp, synthetic construct
  source 1..20: mol_type = other DNA
aaggtgtgagggccgttgaa

SEQ ID NO: 6545 - DNA, 20 bp, synthetic construct
  source 1..20: mol_type = other DNA
cggaaggccgtaaccttccc

SEQ ID NO: 6546 - DNA, 20 bp, synthetic construct
  source 1..20: mol_type = other DNA
agggtaggtgaatatatagc

SEQ ID NO: 6547 - DNA, 20 bp, synthetic construct
  source 1..20: mol_type = other DNA
ccggcgaccactgcataagg

SEQ ID NO: 6548 - DNA, 20 bp, synthetic construct
  source 1..20: mol_type = other DNA
caccggtcacctatagctag

SEQ ID NO: 6549 - DNA, 20 bp, synthetic construct
  source 1..20: mol_type = other DNA
actgtcacctttgacgagca

SEQ ID NO: 6550 - DNA, 20 bp, synthetic construct
  source 1..20: mol_type = other DNA
acactcaaagtgtgaatccc

SEQ ID NO: 6551 - DNA, 20 bp, synthetic construct
  source 1..20: mol_type = other DNA
aacacaggtttgagcgcgga

SEQ ID NO: 6552 - DNA, 20 bp, synthetic construct
  source 1..20: mol_type = other DNA
gcatgagctctgcccgtgta

SEQ ID NO: 6553 - DNA, 20 bp, synthetic construct
  source 1..20: mol_type = other DNA
tcagcggagtgtttaatccc

SEQ ID NO: 6554 - DNA, 20 bp, synthetic construct
  source 1..20: mol_type = other DNA
tataacgatcagtgtgtggt

SEQ ID NO: 6555 - DNA, 20 bp, synthetic construct
  source 1..20: mol_type = other DNA
gtgatcctcgcgaaaggaat

SEQ ID NO: 6556 - DNA, 20 bp, synthetic construct
  source 1..20: mol_type = other DNA
caacctggtgatgtgcgatt

SEQ ID NO: 6557 - DNA, 20 bp, synthetic construct
  source 1..20: mol_type = other DNA
aggcaatctgttcgactttc

SEQ ID NO: 6558 - DNA, 20 bp, synthetic construct
  source 1..20: mol_type = other DNA
taccgggatttaagaaggga

SEQ ID NO: 6559 - DNA, 20 bp, synthetic construct
  source 1..20: mol_type = other DNA
tgtttgggccacatggcaaa

SEQ ID NO: 6560 - DNA, 20 bp, synthetic construct
  source 1..20: mol_type = other DNA
cttgaaccaggctgtggtgt

SEQ ID NO: 6561 - DNA, 20 bp, synthetic construct
  source 1..20: mol_type = other DNA
tagattgcgaccgggttcaa

SEQ ID NO: 6562 - DNA, 20 bp, synthetic construct
  source 1..20: mol_type = other DNA
aaatagtgcccacgtaaatc

SEQ ID NO: 6563 - DNA, 20 bp, synthetic construct
  source 1..20: mol_type = other DNA
gttaaatgattctcaaggca

SEQ ID NO: 6564 - DNA, 20 bp, synthetic construct
  source 1..20: mol_type = other DNA
tacctcactctaatcggtgc

SEQ ID NO: 6565 - DNA, 20 bp, synthetic construct
  source 1..20: mol_type = other DNA
ctaagttgggcacctacact

SEQ ID NO: 6566 - DNA, 20 bp, synthetic construct
  source 1..20: mol_type = other DNA
taggcaaggcggtggaaagg

SEQ ID NO: 6567 - DNA, 20 bp, synthetic construct
  source 1..20: mol_type = other DNA
ttgagagagtaggaagcggc

SEQ ID NO: 6568 - DNA, 20 bp, synthetic construct
  source 1..20: mol_type = other DNA
atctagtggttacggataaa

SEQ ID NO: 6569 - DNA, 20 bp, synthetic construct
  source 1..20: mol_type = other DNA
tacgggactcgacggattcc

SEQ ID NO: 6570 - DNA, 20 bp, synthetic construct
  source 1..20: mol_type = other DNA
tgaatagaccaccgagaacc

SEQ ID NO: 6571 - DNA, 20 bp, synthetic construct
  source 1..20: mol_type = other DNA
gggtatttcgatgctgacga

SEQ ID NO: 6572 - DNA, 20 bp, synthetic construct
  source 1..20: mol_type = other DNA
cccaaatgatactgtaatgg

SEQ ID NO: 6573 - DNA, 20 bp, synthetic construct
  source 1..20: mol_type = other DNA
actatgcagactaaggtcag

SEQ ID NO: 6574 - DNA, 20 bp, synthetic construct
  source 1..20: mol_type = other DNA
tacgaacacacgcctatttc

SEQ ID NO: 6575 - DNA, 20 bp, synthetic construct
  source 1..20: mol_type = other DNA
atggcaatttccctcacggc

SEQ ID NO: 6576 - DNA, 20 bp, synthetic construct
  source 1..20: mol_type = other DNA
agaagtgccgatagatctac

SEQ ID NO: 6577 - DNA, 20 bp, synthetic construct
  source 1..20: mol_type = other DNA
acccgtgtagtcggtaacat

SEQ ID NO: 6578 - DNA, 20 bp, synthetic construct
  source 1..20: mol_type = other DNA
gcaaagtcatctatgccgat

SEQ ID NO: 6579 - DNA, 20 bp, synthetic construct
  source 1..20: mol_type = other DNA
cgcataagtcacacatcaat

SEQ ID NO: 6580 - DNA, 20 bp, synthetic construct
  source 1..20: mol_type = other DNA
accctgactatcggcgtatt

SEQ ID NO: 6581 - DNA, 20 bp, synthetic construct
  source 1..20: mol_type = other DNA
ttactcagacgactttcgca

SEQ ID NO: 6582 - DNA, 20 bp, synthetic construct
  source 1..20: mol_type = other DNA
ggaaggcccaccgtagcttg

SEQ ID NO: 6583 - DNA, 20 bp, synthetic construct
  source 1..20: mol_type = other DNA
catgcggccggtccagatag

SEQ ID NO: 6584 - DNA, 20 bp, synthetic construct
  source 1..20: mol_type = other DNA
aactagtcgcccgtacaatc

SEQ ID NO: 6585 - DNA, 20 bp, synthetic construct
  source 1..20: mol_type = other DNA
atctttagcccggtaatacc

SEQ ID NO: 6586 - DNA, 20 bp, synthetic construct
  source 1..20: mol_type = other DNA
ggctactaggttcgatgccg

SEQ ID NO: 6587 - DNA, 20 bp, synthetic construct
  source 1..20: mol_type = other DNA
ggattcacaatagttcgcaa

SEQ ID NO: 6588 - DNA, 20 bp, synthetic construct
  source 1..20: mol_type = other DNA
tgtggcgacgcactcgatgt

SEQ ID NO: 6589 - DNA, 20 bp, synthetic construct
  source 1..20: mol_type = other DNA
tgcccacggttagtttcaat

SEQ ID NO: 6590 - DNA, 20 bp, synthetic construct
  source 1..20: mol_type = other DNA
aaacgcgcggaggcaaggtg

SEQ ID NO: 6591 - DNA, 20 bp, synthetic construct
  source 1..20: mol_type = other DNA
taatatggcaatcttactga

SEQ ID NO: 6592 - DNA, 20 bp, synthetic construct
  source 1..20: mol_type = other DNA
aattccaatggcagaactgc

SEQ ID NO: 6593 - DNA, 20 bp, synthetic construct
  source 1..20: mol_type = other DNA
tactcgacaggaaggcgttc

SEQ ID NO: 6594 - DNA, 20 bp, synthetic construct
  source 1..20: mol_type = other DNA
gagctcgattaggtacttct

SEQ ID NO: 6595 - DNA, 20 bp, synthetic construct
  source 1..20: mol_type = other DNA
cctagcgtagggactagttt

SEQ ID NO: 6596 - DNA, 20 bp, synthetic construct
  source 1..20: mol_type = other DNA
tgtttcacgtcacgcgtacc

SEQ ID NO: 6597 - DNA, 20 bp, synthetic construct
  source 1..20: mol_type = other DNA
cacgaaagagagtgtacaat

SEQ ID NO: 6598 - DNA, 20 bp, synthetic construct
  source 1..20: mol_type = other DNA
atgtcgtcgcagataggtgc

SEQ ID NO: 6599 - DNA, 20 bp, synthetic construct
  source 1..20: mol_type = other DNA
gacactggccttcaagggac

SEQ ID NO: 6600 - DNA, 20 bp, synthetic construct
  source 1..20: mol_type = other DNA
agggtggtcctatcgtagta

SEQ ID NO: 6601 - DNA, 20 bp, synthetic construct
  source 1..20: mol_type = other DNA
cttgctgtaatctaaagtct

SEQ ID NO: 6602 - DNA, 20 bp, synthetic construct
  source 1..20: mol_type = other DNA
agttgctctttccatcctca

SEQ ID NO: 6603 - DNA, 20 bp, synthetic construct
  source 1..20: mol_type = other DNA
accttcgatacggttatcta

SEQ ID NO: 6604 - DNA, 20 bp, synthetic construct
  source 1..20: mol_type = other DNA
cgcagaacaggcagaagagt

SEQ ID NO: 6605 - DNA, 20 bp, synthetic construct
  source 1..20: mol_type = other DNA
ctgcggtccatgattaagat

SEQ ID NO: 6606 - DNA, 20 bp, synthetic construct
  source 1..20: mol_type = other DNA
gcttgagtggacagaaatct

SEQ ID NO: 6607 - DNA, 20 bp, synthetic construct
  source 1..20: mol_type = other DNA
gaaagagcgaatgtacgaca

SEQ ID NO: 6608 - DNA, 20 bp, synthetic construct
  source 1..20: mol_type = other DNA
gccaagaacgataacaagcc

SEQ ID NO: 6609 - DNA, 20 bp, synthetic construct
  source 1..20: mol_type = other DNA
gagttagtatggacaaagga

SEQ ID NO: 6610 - DNA, 20 bp, synthetic construct
  source 1..20: mol_type = other DNA
tttgtagggctttcacactt

SEQ ID NO: 6611 - DNA, 20 bp, synthetic construct
  source 1..20: mol_type = other DNA
tccagtcacattggctgtgc

SEQ ID NO: 6612 - DNA, 20 bp, synthetic construct
  source 1..20: mol_type = other DNA
cacgtcagggtggatgacgt

SEQ ID NO: 6613 - DNA, 20 bp, synthetic construct
  source 1..20: mol_type = other DNA
acaacacggtgctcataaga

SEQ ID NO: 6614 - DNA, 20 bp, synthetic construct
  source 1..20: mol_type = other DNA
gaacgacccttgacgacata

SEQ ID NO: 6615 - DNA, 20 bp, synthetic construct
  source 1..20: mol_type = other DNA
acccgctggtacctcatcag

SEQ ID NO: 6616 - DNA, 20 bp, synthetic construct
  source 1..20: mol_type = other DNA
ggtgtattagacgaacgtca

SEQ ID NO: 6617 - DNA, 20 bp, synthetic construct
  source 1..20: mol_type = other DNA
ttcactccatcccatgcggc

SEQ ID NO: 6618 - DNA, 20 bp, synthetic construct
  source 1..20: mol_type = other DNA
ggccgtattcactatggagt

SEQ ID NO: 6619 - DNA, 20 bp, synthetic construct
  source 1..20: mol_type = other DNA
ctgtcttccgcaatgttgct

SEQ ID NO: 6620 - DNA, 20 bp, synthetic construct
  source 1..20: mol_type = other DNA
gagcgctgcagaatactgcg

SEQ ID NO: 6621 - DNA, 20 bp, synthetic construct
  source 1..20: mol_type = other DNA
gtctgccgaccagactaagt

SEQ ID NO: 6622 - DNA, 20 bp, synthetic construct
  source 1..20: mol_type = other DNA
gttccatccatggtggacag

SEQ ID NO: 6623 - DNA, 20 bp, synthetic construct
  source 1..20: mol_type = other DNA
ttgcaaatggatcctaccgg

SEQ ID NO: 6624 - DNA, 20 bp, synthetic construct
  source 1..20: mol_type = other DNA
atgttcgtcttatgcttatg

SEQ ID NO: 6625 - DNA, 20 bp, synthetic construct
  source 1..20: mol_type = other DNA
agcgtttgcagttgtacagg

SEQ ID NO: 6626 - DNA, 20 bp, synthetic construct
  source 1..20: mol_type = other DNA
cactttgagttcgctcaccc

SEQ ID NO: 6627 - DNA, 20 bp, synthetic construct
  source 1..20: mol_type = other DNA
ttcaagttaccacactcaca

SEQ ID NO: 6628 - DNA, 20 bp, synthetic construct
  source 1..20: mol_type = other DNA
taggcgtcgtagaatcaagt

SEQ ID NO: 6629 - DNA, 20 bp, synthetic construct
  source 1..20: mol_type = other DNA
ctttcaaactcttccggtgc

SEQ ID NO: 6630 - DNA, 20 bp, synthetic construct
  source 1..20: mol_type = other DNA
agaagtcaactacagggccc

SEQ ID NO: 6631 - DNA, 20 bp, synthetic construct
  source 1..20: mol_type = other DNA
gaaactaggcaggtcatccg

SEQ ID NO: 6632 - DNA, 20 bp, synthetic construct
  source 1..20: mol_type = other DNA
tttggaatgggagtaccata

SEQ ID NO: 6633 - DNA, 20 bp, synthetic construct
  source 1..20: mol_type = other DNA
tacttgggaacccgtgtgcc

SEQ ID NO: 6634 - DNA, 20 bp, synthetic construct
  source 1..20: mol_type = other DNA
actgaggccgagatagccca

SEQ ID NO: 6635 - DNA, 20 bp, synthetic construct
  source 1..20: mol_type = other DNA
ttggaagtcctcatatacta

SEQ ID NO: 6636 - DNA, 20 bp, synthetic construct
  source 1..20: mol_type = other DNA
cgatacccaagtccggtaat

SEQ ID NO: 6637 - DNA, 20 bp, synthetic construct
  source 1..20: mol_type = other DNA
aatttaaattccgctaccaa

SEQ ID NO: 6638 - DNA, 20 bp, synthetic construct
  source 1..20: mol_type = other DNA
ggaaagcgatgacctcgaat

SEQ ID NO: 6639 - DNA, 20 bp, synthetic construct
  source 1..20: mol_type = other DNA
tagggttatttccaacagcg

SEQ ID NO: 6640 - DNA, 20 bp, synthetic construct
  source 1..20: mol_type = other DNA
acggtgcccattgtgagcag

SEQ ID NO: 6641 - DNA, 20 bp, synthetic construct
  source 1..20: mol_type = other DNA
acaagtcaactgtcaactta

SEQ ID NO: 6642 - DNA, 20 bp, synthetic construct
  source 1..20: mol_type = other DNA
ataccttgagttagtacctt

SEQ ID NO: 6643 - DNA, 20 bp, synthetic construct
  source 1..20: mol_type = other DNA
caacactgttcccacagtgc

SEQ ID NO: 6644 - DNA, 20 bp, synthetic construct
  source 1..20: mol_type = other DNA
ggatcacggcggctagaacg

SEQ ID NO: 6645 - DNA, 20 bp, synthetic construct
  source 1..20: mol_type = other DNA
taaccgcttggtctgacggg

SEQ ID NO: 6646 - DNA, 20 bp, synthetic construct
  source 1..20: mol_type = other DNA
tagctcccgtgagaccaata

SEQ ID NO: 6647 - DNA, 20 bp, synthetic construct
  source 1..20: mol_type = other DNA
atctcgggtattggtaatta

SEQ ID NO: 6648 - DNA, 20 bp, synthetic construct
  source 1..20: mol_type = other DNA
attccgtaagccaacaccta

SEQ ID NO: 6649 - DNA, 20 bp, synthetic construct
  source 1..20: mol_type = other DNA
attgtccgcgcttagcggca

SEQ ID NO: 6650 - DNA, 20 bp, synthetic construct
  source 1..20: mol_type = other DNA
cagtatatacagagaattgt

SEQ ID NO: 6651 - DNA, 20 bp, synthetic construct
  source 1..20: mol_type = other DNA
gtgtcagacaccgcaaaccg

SEQ ID NO: 6652 - DNA, 20 bp, synthetic construct
  source 1..20: mol_type = other DNA
accgctttcgggactggacc

SEQ ID NO: 6653 - DNA, 20 bp, synthetic construct
  source 1..20: mol_type = other DNA
tgcctagagtgttggtttgc

SEQ ID NO: 6654 - DNA, 20 bp, synthetic construct
  source 1..20: mol_type = other DNA
catgatacaggaacctagct

SEQ ID NO: 6655 - DNA, 20 bp, synthetic construct
  source 1..20: mol_type = other DNA
gctcttcagattccgtcact

SEQ ID NO: 6656 - DNA, 20 bp, synthetic construct
  source 1..20: mol_type = other DNA
agacaactgggtgcttccac

SEQ ID NO: 6657 - DNA, 20 bp, synthetic construct
  source 1..20: mol_type = other DNA
taatatcccagcacgatatt

SEQ ID NO: 6658 - DNA, 20 bp, synthetic construct
  source 1..20: mol_type = other DNA
cgtcacggatgtagcctaag

SEQ ID NO: 6659 - DNA, 20 bp, synthetic construct
  source 1..20: mol_type = other DNA
atacggatcactattaggac

SEQ ID NO: 6660 - DNA, 20 bp, synthetic construct
  source 1..20: mol_type = other DNA
acgtttatttgggagttact

SEQ ID NO: 6661 - DNA, 20 bp, synthetic construct
  source 1..20: mol_type = other DNA
gacgacgttggctagttatc

SEQ ID NO: 6662 - DNA, 20 bp, synthetic construct
  source 1..20: mol_type = other DNA
gttctgtgctataacgaagg

SEQ ID NO: 6663 - DNA, 20 bp, synthetic construct
  source 1..20: mol_type = other DNA
gcatgcaatgtagggagatt

SEQ ID NO: 6664 - DNA, 20 bp, synthetic construct
  source 1..20: mol_type = other DNA
gggaccctcaagtgctacct

SEQ ID NO: 6665 - DNA, 20 bp, synthetic construct
  source 1..20: mol_type = other DNA
tatgtgacatttcccgccgc

SEQ ID NO: 6666 - DNA, 20 bp, synthetic construct
  source 1..20: mol_type = other DNA
tgccggcagagcaccatcac

SEQ ID NO: 6667 - DNA, 20 bp, synthetic construct
  source 1..20: mol_type = other DNA
atgcacaacatatttattgc

SEQ ID NO: 6668 - DNA, 20 bp, synthetic construct
  source 1..20: mol_type = other DNA
gcccgatcgttgtaagagcc

SEQ ID NO: 6669 - DNA, 20 bp, synthetic construct
  source 1..20: mol_type = other DNA
agggatactgaagagcggat

SEQ ID NO: 6670 - DNA, 20 bp, synthetic construct
  source 1..20: mol_type = other DNA
atcaggtacgtggatagata

SEQ ID NO: 6671 - DNA, 20 bp, synthetic construct
  source 1..20: mol_type = other DNA
catcgtcattggagtgattg

SEQ ID NO: 6672 - DNA, 20 bp, synthetic construct
  source 1..20: mol_type = other DNA
cagcacatgggattctcggt

SEQ ID NO: 6673 - DNA, 20 bp, synthetic construct
  source 1..20: mol_type = other DNA
gtactgccatttcgtggtca

SEQ ID NO: 6674 - DNA, 20 bp, synthetic construct
  source 1..20: mol_type = other DNA
atagtggacgtcacccttag

SEQ ID NO: 6675 - DNA, 20 bp, synthetic construct
  source 1..20: mol_type = other DNA
aacttcccattaacagacct

SEQ ID NO: 6676 - DNA, 20 bp, synthetic construct
  source 1..20: mol_type = other DNA
tccgccgctttcgtgcttcg

SEQ ID NO: 6677 - DNA, 20 bp, synthetic construct
  source 1..20: mol_type = other DNA
attaaacaggcatctgcggc

SEQ ID NO: 6678 - DNA, 20 bp, synthetic construct
  source 1..20: mol_type = other DNA
ctgtgaacagtctacaggct

SEQ ID NO: 6679 - DNA, 20 bp, synthetic construct
  source 1..20: mol_type = other DNA
atctacacttcgcatcttaa

SEQ ID NO: 6680 - DNA, 20 bp, synthetic construct
  source 1..20: mol_type = other DNA
acgatgcgagtacgccactt

SEQ ID NO: 6681 - DNA, 20 bp, synthetic construct
  source 1..20: mol_type = other DNA
ccttctttggagacccacgc

SEQ ID NO: 6682 - DNA, 20 bp, synthetic construct
  source 1..20: mol_type = other DNA
ggctattcggatgattagga

SEQ ID NO: 6683 - DNA, 20 bp, synthetic construct
  source 1..20: mol_type = other DNA
gatacgtgttgacgtgcgcc

SEQ ID NO: 6684 - DNA, 20 bp, synthetic construct
  source 1..20: mol_type = other DNA
tatctacatatgcccgtgaa

SEQ ID NO: 6685 - DNA, 20 bp, synthetic construct
  source 1..20: mol_type = other DNA
gcccaacttatttgctccgg

SEQ ID NO: 6686 - DNA, 20 bp, synthetic construct
  source 1..20: mol_type = other DNA
acagagcttcacgaacttgt

SEQ ID NO: 6687 - DNA, 20 bp, synthetic construct
  source 1..20: mol_type = other DNA
tacgggattcatgaggtgaa

SEQ ID NO: 6688 - DNA, 20 bp, synthetic construct
  source 1..20: mol_type = other DNA
tagagtctttggttctgata

SEQ ID NO: 6689 - DNA, 20 bp, synthetic construct
  source 1..20: mol_type = other DNA
cacttgaccctaacagtccc

SEQ ID NO: 6690 - DNA, 20 bp, synthetic construct
  source 1..20: mol_type = other DNA
ccatctacgtcgggcaccgc

SEQ ID NO: 6691 - DNA, 20 bp, synthetic construct
  source 1..20: mol_type = other DNA
gtccgccgcaagaacctgaa

SEQ ID NO: 6692 - DNA, 20 bp, synthetic construct
  source 1..20: mol_type = other DNA
ttctatatgtttgacggatg

SEQ ID NO: 6693 - DNA, 20 bp, synthetic construct
  source 1..20: mol_type = other DNA
cgcgaggcccgttagagaat

SEQ ID NO: 6694 - DNA, 20 bp, synthetic construct
  source 1..20: mol_type = other DNA
agaacacgttacgagcatca

SEQ ID NO: 6695 - DNA, 20 bp, synthetic construct
  source 1..20: mol_type = other DNA
agctgagcccggacaggtac

SEQ ID NO: 6696 - DNA, 20 bp, synthetic construct
  source 1..20: mol_type = other DNA
tcatgactagtcccacacta

SEQ ID NO: 6697 - DNA, 20 bp, synthetic construct
  source 1..20: mol_type = other DNA
ggactatatgtcatgacgta

SEQ ID NO: 6698 - DNA, 20 bp, synthetic construct
  source 1..20: mol_type = other DNA
tactcccatacagctggata

SEQ ID NO: 6699 - DNA, 20 bp, synthetic construct
  source 1..20: mol_type = other DNA
gactgaagtgtcggctaggc

SEQ ID NO: 6700 - DNA, 20 bp, synthetic construct
  source 1..20: mol_type = other DNA
gctttaaggcgaccgttaca

SEQ ID NO: 6701 - DNA, 20 bp, synthetic construct
  source 1..20: mol_type = other DNA
ctatctatcctataagggac

SEQ ID NO: 6702 - DNA, 20 bp, synthetic construct
  source 1..20: mol_type = other DNA
gtgcatgattctgtgcgctg

SEQ ID NO: 6703 - DNA, 20 bp, synthetic construct
  source 1..20: mol_type = other DNA
ctacttctggagagcatcga

SEQ ID NO: 6704 - DNA, 20 bp, synthetic construct
  source 1..20: mol_type = other DNA
gtgcggtatattgatgacgc

SEQ ID NO: 6705 - DNA, 20 bp, synthetic construct
  source 1..20: mol_type = other DNA
catgttcttcagggacaagg

SEQ ID NO: 6706 - DNA, 20 bp, synthetic construct
  source 1..20: mol_type = other DNA
aacccaggcagaacctttag

SEQ ID NO: 6707 - DNA, 20 bp, synthetic construct
  source 1..20: mol_type = other DNA
agatctggcaagcaatcagt

SEQ ID NO: 6708 - DNA, 20 bp, synthetic construct
  source 1..20: mol_type = other DNA
gtcagtgggaacctcataca

SEQ ID NO: 6709 - DNA, 20 bp, synthetic construct
  source 1..20: mol_type = other DNA
ggaatttaggatcgccacga

SEQ ID NO: 6710 - DNA, 20 bp, synthetic construct
  source 1..20: mol_type = other DNA
catcttgttcgcgagcggca

SEQ ID NO: 6711 - DNA, 20 bp, synthetic construct
  source 1..20: mol_type = other DNA
cggatccagattccaaatga

SEQ ID NO: 6712 - DNA, 20 bp, synthetic construct
  source 1..20: mol_type = other DNA
aatctcgccacgatgccgga

SEQ ID NO: 6713 - DNA, 20 bp, synthetic construct
  source 1..20: mol_type = other DNA
ccacctttcaccacattata

SEQ ID NO: 6714 - DNA, 20 bp, synthetic construct
  source 1..20: mol_type = other DNA
ggcgcaagatctccgggcta

SEQ ID NO: 6715 - DNA, 20 bp, synthetic construct
  source 1..20: mol_type = other DNA
gacggtgcaaccgcatgtgc

SEQ ID NO: 6716 - DNA, 20 bp, synthetic construct
  source 1..20: mol_type = other DNA
gactttgatgcacgtagtcc

SEQ ID NO: 6717 - DNA, 20 bp, synthetic construct
  source 1..20: mol_type = other DNA
gccctgctttacttacatta

SEQ ID NO: 6718 - DNA, 20 bp, synthetic construct
  source 1..20: mol_type = other DNA
tggaataagccagtagaagc

SEQ ID NO: 6719 - DNA, 20 bp, synthetic construct
  source 1..20: mol_type = other DNA
cgtgccggatttcttagacg

SEQ ID NO: 6720 - DNA, 20 bp, synthetic construct
  source 1..20: mol_type = other DNA
tcatcaagccttaaatatga

SEQ ID NO: 6721 - DNA, 20 bp, synthetic construct
  source 1..20: mol_type = other DNA
gatagtccaagtttactgca

SEQ ID NO: 6722 - DNA, 20 bp, synthetic construct
  source 1..20: mol_type = other DNA
aggacgatgcttgagggcgg

SEQ ID NO: 6723 - DNA, 20 bp, synthetic construct
  source 1..20: mol_type = other DNA
gatctacacactagaatcct

SEQ ID NO: 6724 - DNA, 20 bp, synthetic construct
  source 1..20: mol_type = other DNA
atggagtataggcagcggtt

SEQ ID NO: 6725 - DNA, 20 bp, synthetic construct
  source 1..20: mol_type = other DNA
ggctgtggagtcggtatgcg

SEQ ID NO: 6726 - DNA, 20 bp, synthetic construct
  source 1..20: mol_type = other DNA
ttctgagcttcgacgacact

SEQ ID NO: 6727 - DNA, 20 bp, synthetic construct
  source 1..20: mol_type = other DNA
tcaccagtacggtcagaatc

SEQ ID NO: 6728 - DNA, 20 bp, synthetic construct
  source 1..20: mol_type = other DNA
aggttggaggtgatataaga

SEQ ID NO: 6729 - DNA, 20 bp, synthetic construct
  source 1..20: mol_type = other DNA
atagtacccatccagaatga

SEQ ID NO: 6730 - DNA, 20 bp, synthetic construct
  source 1..20: mol_type = other DNA
taagcatgtagcgagacaac

SEQ ID NO: 6731 - DNA, 20 bp, synthetic construct
  source 1..20: mol_type = other DNA
ttacggcgtcagggactatt

SEQ ID NO: 6732 - DNA, 20 bp, synthetic construct
  source 1..20: mol_type = other DNA
gtcacgaaaccttgcggcaa

SEQ ID NO: 6733 - DNA, 20 bp, synthetic construct
  source 1..20: mol_type = other DNA
agcacgcggcgctagcagtt

SEQ ID NO: 6734 - DNA, 20 bp, synthetic construct
  source 1..20: mol_type = other DNA
atacctcgttagaaatctgc

SEQ ID NO: 6735 - DNA, 20 bp, synthetic construct
  source 1..20: mol_type = other DNA
ctggcgtgcactgtagagct

SEQ ID NO: 6736 - DNA, 20 bp, synthetic construct
  source 1..20: mol_type = other DNA
gtcgaatgcgacttcattcc

SEQ ID NO: 6737 - DNA, 20 bp, synthetic construct
  source 1..20: mol_type = other DNA
ctaatcaagaatgatcttgc

SEQ ID NO: 6738 - DNA, 20 bp, synthetic construct
  source 1..20: mol_type = other DNA
actctagtaggacttctgca

SEQ ID NO: 6739 - DNA, 20 bp, synthetic construct
  source 1..20: mol_type = other DNA
agtcgggtgctttgggtttc

SEQ ID NO: 6740 - DNA, 20 bp, synthetic construct
  source 1..20: mol_type = other DNA
gtagaaaccgtcttgtctta

SEQ ID NO: 6741 - DNA, 20 bp, synthetic construct
  source 1..20: mol_type = other DNA
agattgtaaataacgctgcg

SEQ ID NO: 6742 - DNA, 20 bp, synthetic construct
  source 1..20: mol_type = other DNA
gtcaataagactgaaggtcc

SEQ ID NO: 6743 - DNA, 20 bp, synthetic construct
  source 1..20: mol_type = other DNA
gtctggacaagggatctagc

SEQ ID NO: 6744 - DNA, 20 bp, synthetic construct
  source 1..20: mol_type = other DNA
gagatgatcataggcgttag

SEQ ID NO: 6745 - DNA, 20 bp, synthetic construct
  source 1..20: mol_type = other DNA
acggttcgacgtgtgacaac

SEQ ID NO: 6746 - DNA, 20 bp, synthetic construct
  source 1..20: mol_type = other DNA
ctccaatcgtttgaactggg

SEQ ID NO: 6747 - DNA, 20 bp, synthetic construct
  source 1..20: mol_type = other DNA
ctctgattgtgtgtccttgc

SEQ ID NO: 6748 - DNA, 20 bp, synthetic construct
  source 1..20: mol_type = other DNA
atcgcttcaatgtcgcccag

SEQ ID NO: 6749 - DNA, 20 bp, synthetic construct
  source 1..20: mol_type = other DNA
tgagccgctagcgcatgtcg

SEQ ID NO: 6750 - DNA, 20 bp, synthetic construct
  source 1..20: mol_type = other DNA
aacgagtaaccggatggtgc

SEQ ID NO: 6751 - DNA, 20 bp, synthetic construct
  source 1..20: mol_type = other DNA
cacccttactctcggtactt

SEQ ID NO: 6752 - DNA, 20 bp, synthetic construct
  source 1..20: mol_type = other DNA
accatgttagtttcgcaggc

SEQ ID NO: 6753 - DNA, 20 bp, synthetic construct
  source 1..20: mol_type = other DNA
gaccatttggcctaatcgaa

SEQ ID NO: 6754 - DNA, 20 bp, synthetic construct
  source 1..20: mol_type = other DNA
tacgtcgtgccagcttccga

SEQ ID NO: 6755 - DNA, 20 bp, synthetic construct
  source 1..20: mol_type = other DNA
ggagactagccaaacggtaa

SEQ ID NO: 6756 - DNA, 20 bp, synthetic construct
  source 1..20: mol_type = other DNA
tagatccaaacgtacggtcc

SEQ ID NO: 6757 - DNA, 20 bp, synthetic construct
  source 1..20: mol_type = other DNA
ccatagaactgtactccggg

SEQ ID NO: 6758 - DNA, 20 bp, synthetic construct
  source 1..20: mol_type = other DNA
tgcatccggtgttgcgggac

SEQ ID NO: 6759 - DNA, 20 bp, synthetic construct
  source 1..20: mol_type = other DNA
gattgaaggctcagatggag

SEQ ID NO: 6760 - DNA, 20 bp, synthetic construct
  source 1..20: mol_type = other DNA
ttagtagctacagggcactt

SEQ ID NO: 6761 - DNA, 20 bp, synthetic construct
  source 1..20: mol_type = other DNA
gatggatctccatcggatgc

SEQ ID NO: 6762 - DNA, 20 bp, synthetic construct
  source 1..20: mol_type = other DNA
tggtacttactacccgctga

SEQ ID NO: 6763 - DNA, 20 bp, synthetic construct
  source 1..20: mol_type = other DNA
gtttggatagattcgttcat

SEQ ID NO: 6764 - DNA, 20 bp, synthetic construct
  source 1..20: mol_type = other DNA
ctgcagctcacacgaagaac

SEQ ID NO: 6765 - DNA, 20 bp, synthetic construct
  source 1..20: mol_type = other DNA
cgtcgcggatcattggacga

SEQ ID NO: 6766 - DNA, 20 bp, synthetic construct
  source 1..20: mol_type = other DNA
ccgcaatcaggtgtgacgtg

SEQ ID NO: 6767 - DNA, 20 bp, synthetic construct
  source 1..20: mol_type = other DNA
tttcgtccggtcgttagaga

SEQ ID NO: 6768 - DNA, 20 bp, synthetic construct
  source 1..20: mol_type = other DNA
agtcgaacaaacaacagaac

SEQ ID NO: 6769 - DNA, 20 bp, synthetic construct
  source 1..20: mol_type = other DNA
tgagtgggctccatgcatac

SEQ ID NO: 6770 - DNA, 20 bp, synthetic construct
  source 1..20: mol_type = other DNA
catttggctccacttcggta

SEQ ID NO: 6771 - DNA, 20 bp, synthetic construct
  source 1..20: mol_type = other DNA
gtagcctaggtcaatatgaa

SEQ ID NO: 6772 - DNA, 20 bp, synthetic construct
  source 1..20: mol_type = other DNA
ggtagctgtaaccttgtcct

SEQ ID NO: 6773 - DNA, 20 bp, synthetic construct
  source 1..20: mol_type = other DNA
aggttcacgaggacgtgtta

SEQ ID NO: 6774 - DNA, 20 bp, synthetic construct
  source 1..20: mol_type = other DNA
gggcaagcactagagaccgt

SEQ ID NO: 6775 - DNA, 20 bp, synthetic construct
  source 1..20: mol_type = other DNA
ccagagcgaaaccgagcttc

SEQ ID NO: 6776 - DNA, 20 bp, synthetic construct
  source 1..20: mol_type = other DNA
gcctaatgcaggtgctgttt

SEQ ID NO: 6777 - DNA, 20 bp, synthetic construct
  source 1..20: mol_type = other DNA
aaattgaaggcggttacagt

SEQ ID NO: 6778 - DNA, 20 bp, synthetic construct
  source 1..20: mol_type = other DNA
acaggaaccgcgttgaagaa

SEQ ID NO: 6779 - DNA, 20 bp, synthetic construct
  source 1..20: mol_type = other DNA
tcggtcgtcgttcaattgcc

SEQ ID NO: 6780 - DNA, 20 bp, synthetic construct
  source 1..20: mol_type = other DNA
acgcttaggccaagcagggc

SEQ ID NO: 6781 - DNA, 20 bp, synthetic construct
  source 1..20: mol_type = other DNA
gggaaatcaagctcaaactt

SEQ ID NO: 6782 - DNA, 20 bp, synthetic construct
  source 1..20: mol_type = other DNA
tgaacgatcacgcatctgcg

SEQ ID NO: 6783 - DNA, 20 bp, synthetic construct
  source 1..20: mol_type = other DNA
cacgtgagtgttacggttgg

SEQ ID NO: 6784 - DNA, 20 bp, synthetic construct
  source 1..20: mol_type = other DNA
gcaaatttgacccgctcgaa

SEQ ID NO: 6785 - DNA, 20 bp, synthetic construct
  source 1..20: mol_type = other DNA
atttgaggccggtcagccaa

SEQ ID NO: 6786 - DNA, 20 bp, synthetic construct
  source 1..20: mol_type = other DNA
atggccagcctcgattcccg

SEQ ID NO: 6787 - DNA, 20 bp, synthetic construct
  source 1..20: mol_type = other DNA
aggtcaacgggcacctagtg

SEQ ID NO: 6788 - DNA, 20 bp, synthetic construct
  source 1..20: mol_type = other DNA
ttaccacgtggaacagttac

SEQ ID NO: 6789 - DNA, 20 bp, synthetic construct
  source 1..20: mol_type = other DNA
tctgttgctatacccttaat

SEQ ID NO: 6790 - DNA, 20 bp, synthetic construct
  source 1..20: mol_type = other DNA
tattatagctttgctatctg

SEQ ID NO: 6791 - DNA, 20 bp, synthetic construct
  source 1..20: mol_type = other DNA
ggattactgcgtttgcggat

SEQ ID NO: 6792 - DNA, 20 bp, synthetic construct
  source 1..20: mol_type = other DNA
tcgcggttatgttgagtcca

SEQ ID NO: 6793 - DNA, 20 bp, synthetic construct
  source 1..20: mol_type = other DNA
gctggtagattatgaggagg

SEQ ID NO: 6794 - DNA, 20 bp, synthetic construct
  source 1..20: mol_type = other DNA
ctcttcgttaagctgagatt

SEQ ID NO: 6795 - DNA, 20 bp, synthetic construct
  source 1..20: mol_type = other DNA
tcgcaacgggcggcatgtga

SEQ ID NO: 6796 - DNA, 20 bp, synthetic construct
  source 1..20: mol_type = other DNA
gaatagcgcaaacctcccag

SEQ ID NO: 6797 - DNA, 20 bp, synthetic construct
  source 1..20: mol_type = other DNA
cacaactcggtttcttgatt

SEQ ID NO: 6798 - DNA, 20 bp, synthetic construct
  source 1..20: mol_type = other DNA
cggatacccgttactttgcg

SEQ ID NO: 6799 - DNA, 20 bp, synthetic construct
  source 1..20: mol_type = other DNA
tacaactggaacggataaga

SEQ ID NO: 6800 - DNA, 20 bp, synthetic construct
  source 1..20: mol_type = other DNA
actcaagaacttatcttgac

SEQ ID NO: 6801 - DNA, 20 bp, synthetic construct
  source 1..20: mol_type = other DNA
catagctcatattatcccat

SEQ ID NO: 6802 - DNA, 20 bp, synthetic construct
  source 1..20: mol_type = other DNA
gggtgggctaggtctttcat

SEQ ID NO: 6803 - DNA, 20 bp, synthetic construct
  source 1..20: mol_type = other DNA
tccactaggtgggtcacact

SEQ ID NO: 6804 - DNA, 20 bp, synthetic construct
  source 1..20: mol_type = other DNA
aagcgacacgtaaggccagt

SEQ ID NO: 6805 - DNA, 20 bp, synthetic construct
  source 1..20: mol_type = other DNA
gttagcgaggttagttccaa

SEQ ID NO: 6806 - DNA, 20 bp, synthetic construct
  source 1..20: mol_type = other DNA
accgtcgagttgttgaaatc

SEQ ID NO: 6807 - DNA, 20 bp, synthetic construct
  source 1..20: mol_type = other DNA
agcctatgcatcgcgcactc

SEQ ID NO: 6808 - DNA, 20 bp, synthetic construct
  source 1..20: mol_type = other DNA
tcactgatctgttgattcat

SEQ ID NO: 6809 - DNA, 20 bp, synthetic construct
  source 1..20: mol_type = other DNA
ttgcatcgtgtagatgtctg

SEQ ID NO: 6810 - DNA, 20 bp, synthetic construct
  source 1..20: mol_type = other DNA
taatttcccgtgaagttcaa

SEQ ID NO: 6811 - DNA, 20 bp, synthetic construct
  source 1..20: mol_type = other DNA
gccctagctcagtactgggc

SEQ ID NO: 6812 - DNA, 20 bp, synthetic construct
  source 1..20: mol_type = other DNA
cgaagtggattctaacctga

SEQ ID NO: 6813 - DNA, 20 bp, synthetic construct
  source 1..20: mol_type = other DNA
gacagtgcggtaatgaggta

SEQ ID NO: 6814 - DNA, 20 bp, synthetic construct
  source 1..20: mol_type = other DNA
ccgttcgttggcggtcttgg

SEQ ID NO: 6815 - DNA, 20 bp, synthetic construct
  source 1..20: mol_type = other DNA
ctgcgcactcccgaaggcta

SEQ ID NO: 6816 - DNA, 20 bp, synthetic construct
  source 1..20: mol_type = other DNA
ctcgtctaaggcaaagacat

SEQ ID NO: 6817 - DNA, 20 bp, synthetic construct
  source 1..20: mol_type = other DNA
ccacaccctagcgttgctga

SEQ ID NO: 6818 - DNA, 20 bp, synthetic construct
  source 1..20: mol_type = other DNA
tcacgatccgtactaactcc

SEQ ID NO: 6819 - DNA, 20 bp, synthetic construct
  source 1..20: mol_type = other DNA
gtgcaccgcgtcctacacgt

SEQ ID NO: 6820 - DNA, 20 bp, synthetic construct
  source 1..20: mol_type = other DNA
gacgggttacgcagcgttta

SEQ ID NO: 6821 - DNA, 20 bp, synthetic construct
  source 1..20: mol_type = other DNA
ctacatcaccttgacacagt

SEQ ID NO: 6822 - DNA, 20 bp, synthetic construct
  source 1..20: mol_type = other DNA
tcaacagctgattactaacc

SEQ ID NO: 6823 - DNA, 20 bp, synthetic construct
  source 1..20: mol_type = other DNA
atgtgggcggtagatggaat

SEQ ID NO: 6824 - DNA, 20 bp, synthetic construct
  source 1..20: mol_type = other DNA
ctgtgtgctatggagtatta

SEQ ID NO: 6825 - DNA, 20 bp, synthetic construct
  source 1..20: mol_type = other DNA
actaacattgagatgaggct

SEQ ID NO: 6826 - DNA, 20 bp, synthetic construct
  source 1..20: mol_type = other DNA
tggcaacggacgcataacag

SEQ ID NO: 6827 - DNA, 20 bp, synthetic construct
  source 1..20: mol_type = other DNA
taacgccaatccggaggtat

SEQ ID NO: 6828 - DNA, 20 bp, synthetic construct
  source 1..20: mol_type = other DNA
cccatgcacgggatacgaga

SEQ ID NO: 6829 - DNA, 20 bp, synthetic construct
  source 1..20: mol_type = other DNA
aatgatggcgcgttaataca

SEQ ID NO: 6830 - DNA, 20 bp, synthetic construct
  source 1..20: mol_type = other DNA
cgtatgcgacactgttcagc

SEQ ID NO: 6831 - DNA, 20 bp, synthetic construct
  source 1..20: mol_type = other DNA
atcaagctacgtgggcgtcg

SEQ ID NO: 6832 - DNA, 20 bp, synthetic construct
  source 1..20: mol_type = other DNA
gatcttaagtccgcaattag

SEQ ID NO: 6833 - DNA, 20 bp, synthetic construct
  source 1..20: mol_type = other DNA
ataactaccgacccgctgcg

SEQ ID NO: 6834 - DNA, 20 bp, synthetic construct
  source 1..20: mol_type = other DNA
ccgctgtgtcaaagtgttct

SEQ ID NO: 6835 - DNA, 20 bp, synthetic construct
  source 1..20: mol_type = other DNA
acttgtggcaactttaactg

SEQ ID NO: 6836 - DNA, 20 bp, synthetic construct
  source 1..20: mol_type = other DNA
ccgactacacagattattta

SEQ ID NO: 6837 - DNA, 20 bp, synthetic construct
  source 1..20: mol_type = other DNA
accgtcgggcctatacaact

SEQ ID NO: 6838 - DNA, 20 bp, synthetic construct
  source 1..20: mol_type = other DNA
gcctaggagatcaggctcgt

SEQ ID NO: 6839 - DNA, 20 bp, synthetic construct
  source 1..20: mol_type = other DNA
gccagcaagacgtgatcctg

SEQ ID NO: 6840 - DNA, 20 bp, synthetic construct
  source 1..20: mol_type = other DNA
ttgctcgtggcggcggagtt

SEQ ID NO: 6841 - DNA, 20 bp, synthetic construct
  source 1..20: mol_type = other DNA
gataacaagggctcccggtc

SEQ ID NO: 6842 - DNA, 20 bp, synthetic construct
  source 1..20: mol_type = other DNA
cactttcgggagccaggacc

SEQ ID NO: 6843 - DNA, 20 bp, synthetic construct
  source 1..20: mol_type = other DNA
ggcggaggcttcgcgacata

SEQ ID NO: 6844 - DNA, 20 bp, synthetic construct
  source 1..20: mol_type = other DNA
gctccaggtttctccactat

SEQ ID NO: 6845 - DNA, 20 bp, synthetic construct
  source 1..20: mol_type = other DNA
acacatccaatcacactcgg

SEQ ID NO: 6846 - DNA, 20 bp, synthetic construct
  source 1..20: mol_type = other DNA
ggctttgttaccacttgagt

SEQ ID NO: 6847 - DNA, 20 bp, synthetic construct
  source 1..20: mol_type = other DNA
gaccgcttgcctcagcttaa

SEQ ID NO: 6848 - DNA, 20 bp, synthetic construct
  source 1..20: mol_type = other DNA
ttgttactttaatcgccgcc

SEQ ID NO: 6849 - DNA, 20 bp, synthetic construct
  source 1..20: mol_type = other DNA
tgcagcccatccgtgaatga

SEQ ID NO: 6850 - DNA, 20 bp, synthetic construct
  source 1..20: mol_type = other DNA
ccgcatacactaaacccaat

SEQ ID NO: 6851 - DNA, 20 bp, synthetic construct
  source 1..20: mol_type = other DNA
acgctttacacttccgcccg

SEQ ID NO: 6852 - DNA, 20 bp, synthetic construct
  source 1..20: mol_type = other DNA
ggtaatggctggagatacaa

SEQ ID NO: 6853 - DNA, 20 bp, synthetic construct
  source 1..20: mol_type = other DNA
ctgtacgagcagtccttagc

SEQ ID NO: 6854 - DNA, 20 bp, synthetic construct
  source 1..20: mol_type = other DNA
taggacctctcggcatatgt

SEQ ID NO: 6855 - DNA, 20 bp, synthetic construct
  source 1..20: mol_type = other DNA
cggtcaccggcttactgaga

SEQ ID NO: 6856 - DNA, 20 bp, synthetic construct
  source 1..20: mol_type = other DNA
ccggcgctagtccatgacct

SEQ ID NO: 6857 - DNA, 20 bp, synthetic construct
  source 1..20: mol_type = other DNA
aacattcttgcgctgaatac

SEQ ID NO: 6858 - DNA, 20 bp, synthetic construct
  source 1..20: mol_type = other DNA
cagactttagcgcatgggag

SEQ ID NO: 6859 - DNA, 20 bp, synthetic construct
  source 1..20: mol_type = other DNA
cttcagtgtaaagtctctac

SEQ ID NO: 6860 - DNA, 20 bp, synthetic construct
  source 1..20: mol_type = other DNA
cggtttgtccacttattaga

SEQ ID NO: 6861 - DNA, 20 bp, synthetic construct
  source 1..20: mol_type = other DNA
gacttgacttcagtgatccc

SEQ ID NO: 6862 - DNA, 20 bp, synthetic construct
  source 1..20: mol_type = other DNA
catctcactgaggacctaag

SEQ ID NO: 6863 - DNA, 20 bp, synthetic construct
  source 1..20: mol_type = other DNA
ccgggagcacttgagacgat

SEQ ID NO: 6864 - DNA, 20 bp, synthetic construct
  source 1..20: mol_type = other DNA
gagtgttaccgtcggaagtt

SEQ ID NO: 6865 - DNA, 20 bp, synthetic construct
  source 1..20: mol_type = other DNA
ccaacccgacttcttcacaa

SEQ ID NO: 6866 - DNA, 20 bp, synthetic construct
  source 1..20: mol_type = other DNA
ttcttacacggagagtcagg

SEQ ID NO: 6867 - DNA, 20 bp, synthetic construct
  source 1..20: mol_type = other DNA
ctcaccaagttccttcctag

SEQ ID NO: 6868 - DNA, 20 bp, synthetic construct
  source 1..20: mol_type = other DNA
tgacacgcgtcacgagggct

SEQ ID NO: 6869 - DNA, 20 bp, synthetic construct
  source 1..20: mol_type = other DNA
tatataagatggtcgagtta

SEQ ID NO: 6870 - DNA, 20 bp, synthetic construct
  source 1..20: mol_type = other DNA
cgcggctctcgtttcgatat

SEQ ID NO: 6871 - DNA, 20 bp, synthetic construct
  source 1..20: mol_type = other DNA
atgctggtgtgcatcatcac

SEQ ID NO: 6872 - DNA, 20 bp, synthetic construct
  source 1..20: mol_type = other DNA
tgctgtggtttgttaccgca

SEQ ID NO: 6873 - DNA, 20 bp, synthetic construct
  source 1..20: mol_type = other DNA
gttcatattgggccgagaac

SEQ ID NO: 6874 - DNA, 20 bp, synthetic construct
  source 1..20: mol_type = other DNA
atgtccgtcaacgaggactg

SEQ ID NO: 6875 - DNA, 20 bp, synthetic construct
  source 1..20: mol_type = other DNA
ccctgctaggagcacaccaa

SEQ ID NO: 6876 - DNA, 20 bp, synthetic construct
  source 1..20: mol_type = other DNA
actgaactagctgcgcccgg

SEQ ID NO: 6877 - DNA, 20 bp, synthetic construct
  source 1..20: mol_type = other DNA
caaggatctatattacgcta

SEQ ID NO: 6878 - DNA, 20 bp, synthetic construct
  source 1..20: mol_type = other DNA
cggtaaacggtgggtccatt

SEQ ID NO: 6879 - DNA, 20 bp, synthetic construct
  source 1..20: mol_type = other DNA
tcatgcatcgctggtaaggg

SEQ ID NO: 6880 - DNA, 20 bp, synthetic construct
  source 1..20: mol_type = other DNA
taatgtcctcccatgttaga

SEQ ID NO: 6881 - DNA, 20 bp, synthetic construct
  source 1..20: mol_type = other DNA
caccgctacccgatagtttc

SEQ ID NO: 6882 - DNA, 20 bp, synthetic construct
  source 1..20: mol_type = other DNA
caagtatgtaccaccaagtc

SEQ ID NO: 6883 - DNA, 20 bp, synthetic construct
  source 1..20: mol_type = other DNA
tagagatggcggcacggttt

SEQ ID NO: 6884 - DNA, 20 bp, synthetic construct
  source 1..20: mol_type = other DNA
cttgcggtcggaaactttgc

SEQ ID NO: 6885 - DNA, 20 bp, synthetic construct
  source 1..20: mol_type = other DNA
ctagcccatcctgttgcacc

SEQ ID NO: 6886 - DNA, 20 bp, synthetic construct
  source 1..20: mol_type = other DNA
ccggcgtaccaatcgttcga

SEQ ID NO: 6887 - DNA, 20 bp, synthetic construct
  source 1..20: mol_type = other DNA
aaaccgagctaacaacacgt

SEQ ID NO: 6888 - DNA, 20 bp, synthetic construct
  source 1..20: mol_type = other DNA
cactgtgagtaggaggagtg

SEQ ID NO: 6889 - DNA, 20 bp, synthetic construct
  source 1..20: mol_type = other DNA
tatgatgtatcatctggtct

SEQ ID NO: 6890 - DNA, 20 bp, synthetic construct
  source 1..20: mol_type = other DNA
acagggtccttatgttcttt

SEQ ID NO: 6891 - DNA, 20 bp, synthetic construct
  source 1..20: mol_type = other DNA
atcccgtacctaaattaaca

SEQ ID NO: 6892 - DNA, 20 bp, synthetic construct
  source 1..20: mol_type = other DNA
acgtacgacttgccaatgtc

SEQ ID NO: 6893 - DNA, 20 bp, synthetic construct
  source 1..20: mol_type = other DNA
aggagtgctgatatagattc

SEQ ID NO: 6894 - DNA, 20 bp, synthetic construct
  source 1..20: mol_type = other DNA
tactatttacgctccgggtt

SEQ ID NO: 6895 - DNA, 20 bp, synthetic construct
  source 1..20: mol_type = other DNA
aaggagctagtagcacccgc

SEQ ID NO: 6896 - DNA, 20 bp, synthetic construct
  source 1..20: mol_type = other DNA
aggcattagcagcatcgcaa

SEQ ID NO: 6897 - DNA, 20 bp, synthetic construct
  source 1..20: mol_type = other DNA
aaggcccatattgagtcctg

SEQ ID NO: 6898 - DNA, 20 bp, synthetic construct
  source 1..20: mol_type = other DNA
ttatccggaaccgtatcgct

SEQ ID NO: 6899 - DNA, 20 bp, synthetic construct
  source 1..20: mol_type = other DNA
tttagtgtgcccagatggtt

SEQ ID NO: 6900 - DNA, 20 bp, synthetic construct
  source 1..20: mol_type = other DNA
tatcgatttcgaccacacag

SEQ ID NO: 6901 - DNA, 20 bp, synthetic construct
  source 1..20: mol_type = other DNA
gctactgatttccctgtggt

SEQ ID NO: 6902 - DNA, 20 bp, synthetic construct
  source 1..20: mol_type = other DNA
cacctggactgccctaagtg

SEQ ID NO: 6903 - DNA, 20 bp, synthetic construct
  source 1..20: mol_type = other DNA
tgaggaaatggtatcgcgtg

SEQ ID NO: 6904 - DNA, 20 bp, synthetic construct
  source 1..20: mol_type = other DNA
ccgtccggagtcatgttgtc

SEQ ID NO: 6905 - DNA, 20 bp, synthetic construct
  source 1..20: mol_type = other DNA
ggaatacacactttacaaga

SEQ ID NO: 6906 - DNA, 20 bp, synthetic construct
  source 1..20: mol_type = other DNA
gagagctggtttcatcgaac

SEQ ID NO: 6907 - DNA, 20 bp, synthetic construct
  source 1..20: mol_type = other DNA
cggcatatgcgtgtagtagg

SEQ ID NO: 6908 - DNA, 20 bp, synthetic construct
  source 1..20: mol_type = other DNA
ccgtacgctcctctgagatt

SEQ ID NO: 6909 - DNA, 20 bp, synthetic construct
  source 1..20: mol_type = other DNA
tatctcgcatcggctccaca

SEQ ID NO: 6910 - DNA, 20 bp, synthetic construct
  source 1..20: mol_type = other DNA
acctcaccgagcgccgcaac

SEQ ID NO: 6911 - DNA, 20 bp, synthetic construct
  source 1..20: mol_type = other DNA
gacaatctgctaacttgtaa

SEQ ID NO: 6912 - DNA, 20 bp, synthetic construct
  source 1..20: mol_type = other DNA
aagatcatcatgacccattc

SEQ ID NO: 6913 - DNA, 20 bp, synthetic construct
  source 1..20: mol_type = other DNA
ccagctactaagaagaatca

SEQ ID NO: 6914 - DNA, 20 bp, synthetic construct
  source 1..20: mol_type = other DNA
gcgtggcggttacggtagtg

SEQ ID NO: 6915 - DNA, 20 bp, synthetic construct
  source 1..20: mol_type = other DNA
gtatgggcctgtagcggact

SEQ ID NO: 6916 - DNA, 20 bp, synthetic construct
  source 1..20: mol_type = other DNA
aacaaattgtccagcgagta

SEQ ID NO: 6917 - DNA, 20 bp, synthetic construct
  source 1..20: mol_type = other DNA
ctaactagctaactatgacc

SEQ ID NO: 6918 - DNA, 20 bp, synthetic construct
  source 1..20: mol_type = other DNA
tctcgatgactctctaactt

SEQ ID NO: 6919 - DNA, 20 bp, synthetic construct
  source 1..20: mol_type = other DNA
ggaagtaaacagtctctagg

SEQ ID NO: 6920 - DNA, 20 bp, synthetic construct
  source 1..20: mol_type = other DNA
ctagtggctgttccatcccg

SEQ ID NO: 6921 - DNA, 20 bp, synthetic construct
  source 1..20: mol_type = other DNA
gcctatcaaccctcaaagga

SEQ ID NO: 6922 - DNA, 20 bp, synthetic construct
  source 1..20: mol_type = other DNA
acactaacttcggagctacg

SEQ ID NO: 6923 - DNA, 20 bp, synthetic construct
  source 1..20: mol_type = other DNA
gatccaggcctattcgacct

SEQ ID NO: 6924 - DNA, 20 bp, synthetic construct
  source 1..20: mol_type = other DNA
caacagagcttaccctacta

SEQ ID NO: 6925 - DNA, 20 bp, synthetic construct
  source 1..20: mol_type = other DNA
cagtactataaggcagctcc

SEQ ID NO: 6926 - DNA, 20 bp, synthetic construct
  source 1..20: mol_type = other DNA
atctcaaccgtttgcacatg

SEQ ID NO: 6927 - DNA, 20 bp, synthetic construct
  source 1..20: mol_type = other DNA
tgcaggagtcatgaccgtat

SEQ ID NO: 6928 - DNA, 20 bp, synthetic construct
  source 1..20: mol_type = other DNA
cttccattctaaccggtagg

SEQ ID NO: 6929 - DNA, 20 bp, synthetic construct
  source 1..20: mol_type = other DNA
tactggcaaatcaaggcgag

SEQ ID NO: 6930 - DNA, 20 bp, synthetic construct
  source 1..20: mol_type = other DNA
agagcgcatttctcctgttt

SEQ ID NO: 6931 - DNA, 20 bp, synthetic construct
  source 1..20: mol_type = other DNA
tgaatcaaccttggaactcc

SEQ ID NO: 6932 - DNA, 20 bp, synthetic construct
  source 1..20: mol_type = other DNA
gctaccatgagttgaatctg

SEQ ID NO: 6933 - DNA, 20 bp, synthetic construct
  source 1..20: mol_type = other DNA
ctgaacagaccatctagcag

SEQ ID NO: 6934 - DNA, 20 bp, synthetic construct
  source 1..20: mol_type = other DNA
attcgacccgagtccgtagg

SEQ ID NO: 6935 - DNA, 20 bp, synthetic construct
  source 1..20: mol_type = other DNA
cacgagaggcgatccaaatc

SEQ ID NO: 6936 - DNA, 20 bp, synthetic construct
  source 1..20: mol_type = other DNA
tattgaaggagcctatctgg

SEQ ID NO: 6937 - DNA, 20 bp, synthetic construct
  source 1..20: mol_type = other DNA
agtatgaagcacaagtactg

SEQ ID NO: 6938 - DNA, 20 bp, synthetic construct
  source 1..20: mol_type = other DNA
tctgttagtggttgtgtact

SEQ ID NO: 6939 - DNA, 20 bp, synthetic construct
  source 1..20: mol_type = other DNA
gatacaggcatcgttattgt

SEQ ID NO: 6940 - DNA, 20 bp, synthetic construct
  source 1..20: mol_type = other DNA
atcccgcgccgcatgctgta

SEQ ID NO: 6941 - DNA, 20 bp, synthetic construct
  source 1..20: mol_type = other DNA
ctcccagggtctgtcaggcc

SEQ ID NO: 6942 - DNA, 20 bp, synthetic construct
  source 1..20: mol_type = other DNA
agcagcgctggcgtccatca

SEQ ID NO: 6943 - DNA, 20 bp, synthetic construct
  source 1..20: mol_type = other DNA
tgtgaatttcgacatgtcgt

SEQ ID NO: 6944 - DNA, 20 bp, synthetic construct
  source 1..20: mol_type = other DNA
gtgcttagcgaagaacacgg

SEQ ID NO: 6945 - DNA, 20 bp, synthetic construct
  source 1..20: mol_type = other DNA
tatgactgcgccctcactaa

SEQ ID NO: 6946 - DNA, 20 bp, synthetic construct
  source 1..20: mol_type = other DNA
ctccagatgtgcatcagatg

SEQ ID NO: 6947 - DNA, 20 bp, synthetic construct
  source 1..20: mol_type = other DNA
agagctccttggtactaaac

SEQ ID NO: 6948 - DNA, 20 bp, synthetic construct
  source 1..20: mol_type = other DNA
cttgatcaagagattgtcca

SEQ ID NO: 6949 - DNA, 20 bp, synthetic construct
  source 1..20: mol_type = other DNA
cacggtttaactgcgtcgga

SEQ ID NO: 6950 - DNA, 20 bp, synthetic construct
  source 1..20: mol_type = other DNA
ggcattggattctcgtggta

SEQ ID NO: 6951 - DNA, 20 bp, synthetic construct
  source 1..20: mol_type = other DNA
ccatattacccttcgtttac

SEQ ID NO: 6952 - DNA, 20 bp, synthetic construct
  source 1..20: mol_type = other DNA
ttacaccgtattcagcccat

SEQ ID NO: 6953 - DNA, 20 bp, synthetic construct
  source 1..20: mol_type = other DNA
gctaccactttccaccgcgt

SEQ ID NO: 6954 - DNA, 20 bp, synthetic construct
  source 1..20: mol_type = other DNA
attgtgagatgtttcggcta

SEQ ID NO: 6955 - DNA, 20 bp, synthetic construct
  source 1..20: mol_type = other DNA
gcacctagaccaccacagac

SEQ ID NO: 6956 - DNA, 20 bp, synthetic construct
  source 1..20: mol_type = other DNA
cttgacgagcttagcagtca

SEQ ID NO: 6957 - DNA, 20 bp, synthetic construct
  source 1..20: mol_type = other DNA
gcactgaccagtgcccgact

SEQ ID NO: 6958 - DNA, 20 bp, synthetic construct
  source 1..20: mol_type = other DNA
aggtcctcaaactgtaaggg

SEQ ID NO: 6959 - DNA, 20 bp, synthetic construct
  source 1..20: mol_type = other DNA
aattcgccaatccgtccttt

SEQ ID NO: 6960 - DNA, 20 bp, synthetic construct
  source 1..20: mol_type = other DNA
cgactcttctttggaaagta

SEQ ID NO: 6961 - DNA, 20 bp, synthetic construct
  source 1..20: mol_type = other DNA
tttgggatggtcgggcttag

SEQ ID NO: 6962 - DNA, 20 bp, synthetic construct
  source 1..20: mol_type = other DNA
gctaggagcgccataagagg

SEQ ID NO: 6963 - DNA, 20 bp, synthetic construct
  source 1..20: mol_type = other DNA
tgacagaactgcgagcctgt

SEQ ID NO: 6964 - DNA, 20 bp, synthetic construct
  source 1..20: mol_type = other DNA
ggataaagcacttccgctca

SEQ ID NO: 6965 - DNA, 20 bp, synthetic construct
  source 1..20: mol_type = other DNA
ctgggccgcgcacaattaga

SEQ ID NO: 6966 - DNA, 20 bp, synthetic construct
  source 1..20: mol_type = other DNA
catcggtgacttatttcacg

SEQ ID NO: 6967 - DNA, 20 bp, synthetic construct
  source 1..20: mol_type = other DNA
cgggcagagcttgtgaacac

SEQ ID NO: 6968 - DNA, 20 bp, synthetic construct
  source 1..20: mol_type = other DNA
caagagttcctgcccatctt

SEQ ID NO: 6969 - DNA, 20 bp, synthetic construct
  source 1..20: mol_type = other DNA
aactttgtgggcgtaagatt

SEQ ID NO: 6970 - DNA, 20 bp, synthetic construct
  source 1..20: mol_type = other DNA
gcctaactctcgtggttcgc

SEQ ID NO: 6971 - DNA, 20 bp, synthetic construct
  source 1..20: mol_type = other DNA
gatagaggaccaagaatcaa

SEQ ID NO: 6972 - DNA, 20 bp, synthetic construct
  source 1..20: mol_type = other DNA
agccgtggcagtaacacaat

SEQ ID NO: 6973 - DNA, 20 bp, synthetic construct
  source 1..20: mol_type = other DNA
ggaggctctatcacaatgct

SEQ ID NO: 6974 - DNA, 20 bp, synthetic construct
  source 1..20: mol_type = other DNA
ggtatccgagtcgcacttcg

SEQ ID NO: 6975 - DNA, 20 bp, synthetic construct
  source 1..20: mol_type = other DNA
ggtgccttaaactacagtgg

SEQ ID NO: 6976 - DNA, 20 bp, synthetic construct
  source 1..20: mol_type = other DNA
cagttggtaattcacgccct

SEQ ID NO: 6977 - DNA, 20 bp, synthetic construct
  source 1..20: mol_type = other DNA
ggtctggcggcaccataaga

SEQ ID NO: 6978 - DNA, 20 bp, synthetic construct
  source 1..20: mol_type = other DNA
gttgttctccaggaatagga

SEQ ID NO: 6979 - DNA, 20 bp, synthetic construct
  source 1..20: mol_type = other DNA
cggatcggtttgaacatctt

SEQ ID NO: 6980 - DNA, 20 bp, synthetic construct
  source 1..20: mol_type = other DNA
cgtctgaaatgctgcttcga

SEQ ID NO: 6981 - DNA, 20 bp, synthetic construct
  source 1..20: mol_type = other DNA
cagactatgctaagtgtagg

SEQ ID NO: 6982 - DNA, 20 bp, synthetic construct
  source 1..20: mol_type = other DNA
ttggacacagtcctgacgag

SEQ ID NO: 6983 - DNA, 20 bp, synthetic construct
  source 1..20: mol_type = other DNA
tagatatattgtagccaggt

SEQ ID NO: 6984 - DNA, 20 bp, synthetic construct
  source 1..20: mol_type = other DNA
attacctcttagtgcgcgac

SEQ ID NO: 6985 - DNA, 20 bp, synthetic construct
  source 1..20: mol_type = other DNA
atgacccattattggtacgg

SEQ ID NO: 6986 - DNA, 20 bp, synthetic construct
  source 1..20: mol_type = other DNA
acggcatccgtcgaatgtgt

SEQ ID NO: 6987 - DNA, 20 bp, synthetic construct
  source 1..20: mol_type = other DNA
tgatctacgagcaaagatcc

SEQ ID NO: 6988 - DNA, 20 bp, synthetic construct
  source 1..20: mol_type = other DNA
taaatagaccagctccacaa

SEQ ID NO: 6989 - DNA, 20 bp, synthetic construct
  source 1..20: mol_type = other DNA
tttctccgaggtccactcta

SEQ ID NO: 6990 - DNA, 20 bp, synthetic construct
  source 1..20: mol_type = other DNA
ttagctaggtttcctcggta

SEQ ID NO: 6991 - DNA, 20 bp, synthetic construct
  source 1..20: mol_type = other DNA
ccctcagagcactaagaagt

SEQ ID NO: 6992 - DNA, 20 bp, synthetic construct
  source 1..20: mol_type = other DNA
atctggtctatcacgtgacc

SEQ ID NO: 6993 - DNA, 20 bp, synthetic construct
  source 1..20: mol_type = other DNA
tcatcacttggctaacggga

SEQ ID NO: 6994 - DNA, 20 bp, synthetic construct
  source 1..20: mol_type = other DNA
agtcctcatgacaaatgatc

SEQ ID NO: 6995 - DNA, 20 bp, synthetic construct
  source 1..20: mol_type = other DNA
cctcttggacagaacatggt

SEQ ID NO: 6996 - DNA, 20 bp, synthetic construct
  source 1..20: mol_type = other DNA
tagaacggcacgcgattgat

SEQ ID NO: 6997 - DNA, 20 bp, synthetic construct
  source 1..20: mol_type = other DNA
gatcaaggcgaaccattcgt

SEQ ID NO: 6998 - DNA, 20 bp, synthetic construct
  source 1..20: mol_type = other DNA
cctccaagcgcatcatgaat

SEQ ID NO: 6999 - DNA, 20 bp, synthetic construct
  source 1..20: mol_type = other DNA
cagtactgtacctaggcaag

SEQ ID NO: 7000 - DNA, 20 bp, synthetic construct
  source 1..20: mol_type = other DNA
aaggcaggtggtggtaacga

SEQ ID NO: 7001 - DNA, 20 bp, synthetic construct
  source 1..20: mol_type = other DNA
ggtcgatcgaggtctacaaa

SEQ ID NO: 7002 - DNA, 20 bp, synthetic construct
  source 1..20: mol_type = other DNA
aatcggcacaatttcgagat

SEQ ID NO: 7003 - DNA, 20 bp, synthetic construct
  source 1..20: mol_type = other DNA
gttctggaccgtttcattgt

SEQ ID NO: 7004 - DNA, 20 bp, synthetic construct
  source 1..20: mol_type = other DNA
cgcgaatggctcgttgtagt

SEQ ID NO: 7005 - DNA, 20 bp, synthetic construct
  source 1..20: mol_type = other DNA
tacagctccttggcatcata

SEQ ID NO: 7006 - DNA, 20 bp, synthetic construct
  source 1..20: mol_type = other DNA
gtgattgcaaagctgaccaa

SEQ ID NO: 7007 - DNA, 20 bp, synthetic construct
  source 1..20: mol_type = other DNA
gtttcgatgaacaccaacaa

SEQ ID NO: 7008 - DNA, 20 bp, synthetic construct
  source 1..20: mol_type = other DNA
gagtgtgagcttagagtctc

SEQ ID NO: 7009 - DNA, 20 bp, synthetic construct
  source 1..20: mol_type = other DNA
ttcgtcgaaaccagaaggct

SEQ ID NO: 7010 - DNA, 20 bp, synthetic construct
  source 1..20: mol_type = other DNA
tattgctgtaaggacgaatc

SEQ ID NO: 7011 - DNA, 20 bp, synthetic construct
  source 1..20: mol_type = other DNA
gcatttacgttgctcgaagc

SEQ ID NO: 7012 - DNA, 20 bp, synthetic construct
  source 1..20: mol_type = other DNA
cgttagttgcgccgggtcaa

SEQ ID NO: 7013 - DNA, 20 bp, synthetic construct
  source 1..20: mol_type = other DNA
tggtattgtccaacggagaa

SEQ ID NO: 7014 - DNA, 20 bp, synthetic construct
  source 1..20: mol_type = other DNA
ccgacaacaatagggcaaag

SEQ ID NO: 7015 - DNA, 20 bp, synthetic construct
  source 1..20: mol_type = other DNA
tcagatcgattgatgcgcgc

SEQ ID NO: 7016 - DNA, 20 bp, synthetic construct
  source 1..20: mol_type = other DNA
gtatgttagtatcacccttc

SEQ ID NO: 7017 - DNA, 20 bp, synthetic construct
  source 1..20: mol_type = other DNA
gtgttatagtgaacggaccg

SEQ ID NO: 7018 - DNA, 20 bp, synthetic construct
  source 1..20: mol_type = other DNA
gggctttctctcggcttgtt

SEQ ID NO: 7019 - DNA, 20 bp, synthetic construct
  source 1..20: mol_type = other DNA
cattggtaattaagaccacc

SEQ ID NO: 7020 - DNA, 20 bp, synthetic construct
  source 1..20: mol_type = other DNA
cataatgccaaaggcagggc

SEQ ID NO: 7021 - DNA, 20 bp, synthetic construct
  source 1..20: mol_type = other DNA
gaccagtactgtccatgtac

SEQ ID NO: 7022 - DNA, 20 bp, synthetic construct
  source 1..20: mol_type = other DNA
accgctgtatgcactatcca

SEQ ID NO: 7023 - DNA, 20 bp, synthetic construct
  source 1..20: mol_type = other DNA
gagctaatgttgtgcaatat

SEQ ID NO: 7024 - DNA, 20 bp, synthetic construct
  source 1..20: mol_type = other DNA
gcgggtctttgtcgaacggc

SEQ ID NO: 7025 - DNA, 20 bp, synthetic construct
  source 1..20: mol_type = other DNA
tctcatggagatattggctg

SEQ ID NO: 7026 - DNA, 20 bp, synthetic construct
  source 1..20: mol_type = other DNA
tctctcgataacaccgttcc

SEQ ID NO: 7027 - DNA, 20 bp, synthetic construct
  source 1..20: mol_type = other DNA
gtccgaaggaagtgtggctg

SEQ ID NO: 7028 - DNA, 20 bp, synthetic construct
  source 1..20: mol_type = other DNA
atattgacaatcactatgcg

SEQ ID NO: 7029 - DNA, 20 bp, synthetic construct
  source 1..20: mol_type = other DNA
cctacaatgtggatgggtat

SEQ ID NO: 7030 - DNA, 20 bp, synthetic construct
  source 1..20: mol_type = other DNA
gatcagccgtattccaattc

SEQ ID NO: 7031 - DNA, 20 bp, synthetic construct
  source 1..20: mol_type = other DNA
acagccgcacgttggagaaa

SEQ ID NO: 7032 - DNA, 20 bp, synthetic construct
  source 1..20: mol_type = other DNA
ctaacccttggcgactaact

SEQ ID NO: 7033 - DNA, 20 bp, synthetic construct
  source 1..20: mol_type = other DNA
ccatcagatttcggcccggt

SEQ ID NO: 7034 - DNA, 20 bp, synthetic construct
  source 1..20: mol_type = other DNA
ttgggtgacggctgttgctg

SEQ ID NO: 7035 - DNA, 20 bp, synthetic construct
  source 1..20: mol_type = other DNA
aagtcataattccgagctcc

SEQ ID NO: 7036 - DNA, 20 bp, synthetic construct
  source 1..20: mol_type = other DNA
cgttatgagtactcgaacca

SEQ ID NO: 7037 - DNA, 20 bp, synthetic construct
  source 1..20: mol_type = other DNA
catcactagcccagcgagta

SEQ ID NO: 7038 - DNA, 20 bp, synthetic construct
  source 1..20: mol_type = other DNA
taatcagcgatgagtctaac

SEQ ID NO: 7039 - DNA, 20 bp, synthetic construct
  source 1..20: mol_type = other DNA
ttatacgagtaagtggttat

SEQ ID NO: 7040 - DNA, 20 bp, synthetic construct
  source 1..20: mol_type = other DNA
aacctcttcccatacctagt

SEQ ID NO: 7041 - DNA, 20 bp, synthetic construct
  source 1..20: mol_type = other DNA
tcgtagccgtcgctaacgta

SEQ ID NO: 7042 - DNA, 20 bp, synthetic construct
  source 1..20: mol_type = other DNA
gctaacaggtccagttataa

SEQ ID NO: 7043 - DNA, 20 bp, synthetic construct
  source 1..20: mol_type = other DNA
cttaaatagtcttgagggta

SEQ ID NO: 7044 - DNA, 20 bp, synthetic construct
  source 1..20: mol_type = other DNA
ctcggctcagacacttactc

SEQ ID NO: 7045 - DNA, 20 bp, synthetic construct
  source 1..20: mol_type = other DNA
agacaaggcgatgataatgt

SEQ ID NO: 7046 - DNA, 20 bp, synthetic construct
  source 1..20: mol_type = other DNA
tgttaatacggtagagtttc

SEQ ID NO: 7047 - DNA, 20 bp, synthetic construct
  source 1..20: mol_type = other DNA
caacctttggctagcttgtc

SEQ ID NO: 7048 - DNA, 20 bp, synthetic construct
  source 1..20: mol_type = other DNA
ggcctaggcgtaaggttgaa

SEQ ID NO: 7049 - DNA, 20 bp, synthetic construct
  source 1..20: mol_type = other DNA
aatgcgggtaattacggatg

SEQ ID NO: 7050 - DNA, 20 bp, synthetic construct
  source 1..20: mol_type = other DNA
ataaccttggttaccacttc

SEQ ID NO: 7051 - DNA, 20 bp, synthetic construct
  source 1..20: mol_type = other DNA
cagggagctatcatctctac

SEQ ID NO: 7052 - DNA, 20 bp, synthetic construct
  source 1..20: mol_type = other DNA
aaattcctaagcagaagccg

SEQ ID NO: 7053 - DNA, 20 bp, synthetic construct
  source 1..20: mol_type = other DNA
aacagcccgccgtagtgagt

SEQ ID NO: 7054 - DNA, 20 bp, synthetic construct
  source 1..20: mol_type = other DNA
tgaccacccaattcatccag

SEQ ID NO: 7055 - DNA, 20 bp, synthetic construct
  source 1..20: mol_type = other DNA
tttctggctacattactact

SEQ ID NO: 7056 - DNA, 20 bp, synthetic construct
  source 1..20: mol_type = other DNA
tacgcatttcgcatgtagat

SEQ ID NO: 7057 - DNA, 20 bp, synthetic construct
  source 1..20: mol_type = other DNA
tggaagaacttcataaggac

SEQ ID NO: 7058 - DNA, 20 bp, synthetic construct
  source 1..20: mol_type = other DNA
ctatagaatcggagaatctg

SEQ ID NO: 7059 - DNA, 20 bp, synthetic construct
  source 1..20: mol_type = other DNA
caacgtaagtcgaagtattc

SEQ ID NO: 7060 - DNA, 20 bp, synthetic construct
  source 1..20: mol_type = other DNA
aaatgtatccagttatacga

SEQ ID NO: 7061 - DNA, 20 bp, synthetic construct
  source 1..20: mol_type = other DNA
cggctctgacgtgactgaaa

SEQ ID NO: 7062 - DNA, 20 bp, synthetic construct
  source 1..20: mol_type = other DNA
caatcaacgaagcccacctg

SEQ ID NO: 7063 - DNA, 20 bp, synthetic construct
  source 1..20: mol_type = other DNA
acgcggcagactctggatac

SEQ ID NO: 7064 - DNA, 20 bp, synthetic construct
  source 1..20: mol_type = other DNA
cggatgacaagctgtgaagg

SEQ ID NO: 7065 - DNA, 20 bp, synthetic construct
  source 1..20: mol_type = other DNA
gataagctgtatctcatctg

SEQ ID NO: 7066 - DNA, 20 bp, synthetic construct
  source 1..20: mol_type = other DNA
gattaacacgtacgctcttt

SEQ ID NO: 7067 - DNA, 20 bp, synthetic construct
  source 1..20: mol_type = other DNA
tattgccgtgtagcatggcc

SEQ ID NO: 7068 - DNA, 20 bp, synthetic construct
  source 1..20: mol_type = other DNA
cgatcagcgcagaagttatg

SEQ ID NO: 7069 - DNA, 20 bp, synthetic construct
  source 1..20: mol_type = other DNA
ggttgcctacaataagcggc

SEQ ID NO: 7070 - DNA, 20 bp, synthetic construct
  source 1..20: mol_type = other DNA
ccttaagacacccggttgca

SEQ ID NO: 7071 - DNA, 20 bp, synthetic construct
  source 1..20: mol_type = other DNA
tcaaggaagcatatcaacag

SEQ ID NO: 7072 - DNA, 20 bp, synthetic construct
  source 1..20: mol_type = other DNA
aaggagatacttgcgtttgt

SEQ ID NO: 7073 - DNA, 20 bp, synthetic construct
  source 1..20: mol_type = other DNA
cgaaaggcttgcatagttcg

SEQ ID NO: 7074 - DNA, 20 bp, synthetic construct
  source 1..20: mol_type = other DNA
attacacgggaggattgtat

SEQ ID NO: 7075 - DNA, 20 bp, synthetic construct
  source 1..20: mol_type = other DNA
ggcctttgggcggattcgac

SEQ ID NO: 7076 - DNA, 20 bp, synthetic construct
  source 1..20: mol_type = other DNA
cgtcttgtttgttcccgcga

SEQ ID NO: 7077 - DNA, 20 bp, synthetic construct
  source 1..20: mol_type = other DNA
cttgctatctgccatacgtt

SEQ ID NO: 7078 - DNA, 20 bp, synthetic construct
  source 1..20: mol_type = other DNA
gacagactcctgctagacct

SEQ ID NO: 7079 - DNA, 20 bp, synthetic construct
  source 1..20: mol_type = other DNA
ccaacatggccagcagactt

SEQ ID NO: 7080 - DNA, 20 bp, synthetic construct
  source 1..20: mol_type = other DNA
taaaggtgttagggagtaag

SEQ ID NO: 7081 - DNA, 20 bp, synthetic construct
  source 1..20: mol_type = other DNA
ggtttaatggacaaatcaac

SEQ ID NO: 7082 - DNA, 20 bp, synthetic construct
  source 1..20: mol_type = other DNA
ctgagttctgatcagatcga

SEQ ID NO: 7083 - DNA, 20 bp, synthetic construct
  source 1..20: mol_type = other DNA
tcaaggtgtcggatatagcc

SEQ ID NO: 7084 - DNA, 20 bp, synthetic construct
  source 1..20: mol_type = other DNA
gttggcatcccgacctatgc

SEQ ID NO: 7085 - DNA, 20 bp, synthetic construct
  source 1..20: mol_type = other DNA
ctcggatgacatcacatatt

SEQ ID NO: 7086 - DNA, 20 bp, synthetic construct
  source 1..20: mol_type = other DNA
cagggttaacttacgcctgg

SEQ ID NO: 7087 - DNA, 20 bp, synthetic construct
  source 1..20: mol_type = other DNA
ggacaagatagctaactcct

SEQ ID NO: 7088 - DNA, 20 bp, synthetic construct
  source 1..20: mol_type = other DNA
gttcgcgtagttgtattctc

SEQ ID NO: 7089 - DNA, 20 bp, synthetic construct
  source 1..20: mol_type = other DNA
aggaccaaaggtgagaagat

SEQ ID NO: 7090 - DNA, 20 bp, synthetic construct
  source 1..20: mol_type = other DNA
atgaaagggtagtttcgacc

SEQ ID NO: 7091 - DNA, 20 bp, synthetic construct
  source 1..20: mol_type = other DNA
acagggatttccctcctcga

SEQ ID NO: 7092 - DNA, 20 bp, synthetic construct
  source 1..20: mol_type = other DNA
gtgttaagatgcgtcagacg

SEQ ID NO: 7093 - DNA, 20 bp, synthetic construct
  source 1..20: mol_type = other DNA
aggcacgctataggtttggt

SEQ ID NO: 7094 - DNA, 20 bp, synthetic construct
  source 1..20: mol_type = other DNA
gcgcaggaaattcccgagcc

SEQ ID NO: 7095 - DNA, 20 bp, synthetic construct
  source 1..20: mol_type = other DNA
gtttggtcatccacggaagc

SEQ ID NO: 7096 - DNA, 20 bp, synthetic construct
  source 1..20: mol_type = other DNA
attgcacgaccagccaagtg

SEQ ID NO: 7097 - DNA, 20 bp, synthetic construct
  source 1..20: mol_type = other DNA
ggtaatgaggttgtatacgt

SEQ ID NO: 7098 - DNA, 20 bp, synthetic construct
  source 1..20: mol_type = other DNA
ttcgtcgcgatttattggat

SEQ ID NO: 7099 - DNA, 20 bp, synthetic construct
  source 1..20: mol_type = other DNA
gtctacacgtatctcaacaa

SEQ ID NO: 7100 - DNA, 20 bp, synthetic construct
  source 1..20: mol_type = other DNA
atcggattgatcgtgcgtag

SEQ ID NO: 7101 - DNA, 20 bp, synthetic construct
  source 1..20: mol_type = other DNA
aaaccgtgctctgggccgaa

SEQ ID NO: 7102 - DNA, 20 bp, synthetic construct
  source 1..20: mol_type = other DNA
cgaggattgtgatagaatcc

SEQ ID NO: 7103 - DNA, 20 bp, synthetic construct
  source 1..20: mol_type = other DNA
accgtcatcgacctttgcac

SEQ ID NO: 7104 - DNA, 20 bp, synthetic construct
  source 1..20: mol_type = other DNA
ggctgtttaagaaatacatc

SEQ ID NO: 7105 - DNA, 20 bp, synthetic construct
  source 1..20: mol_type = other DNA
cgtgcatgagtctgttaaga

SEQ ID NO: 7106 - DNA, 20 bp, synthetic construct
  source 1..20: mol_type = other DNA
gaaggaattagatacgagaa

SEQ ID NO: 7107 - DNA, 20 bp, synthetic construct
  source 1..20: mol_type = other DNA
gtgatcatgggacagcaaac

SEQ ID NO: 7108 - DNA, 20 bp, synthetic construct
  source 1..20: mol_type = other DNA
tacatactagctggtacaat

SEQ ID NO: 7109 - DNA, 20 bp, synthetic construct
  source 1..20: mol_type = other DNA
tttggctgactgaagaaggt

SEQ ID NO: 7110 - DNA, 20 bp, synthetic construct
  source 1..20: mol_type = other DNA
agattcggcgaccattagga

SEQ ID NO: 7111 - DNA, 20 bp, synthetic construct
  source 1..20: mol_type = other DNA
cgacctgttgagatccgcgt

SEQ ID NO: 7112 - DNA, 20 bp, synthetic construct
  source 1..20: mol_type = other DNA
cctcgcgtcaacaatgcact

SEQ ID NO: 7113 - DNA, 20 bp, synthetic construct
  source 1..20: mol_type = other DNA
catcttatatctaactgacg

SEQ ID NO: 7114 - DNA, 20 bp, synthetic construct
  source 1..20: mol_type = other DNA
ctccctccgactcgttggag

SEQ ID NO: 7115 - DNA, 20 bp, synthetic construct
  source 1..20: mol_type = other DNA
tttcacggatgaactgtgct

SEQ ID NO: 7116 - DNA, 20 bp, synthetic construct
  source 1..20: mol_type = other DNA
aaattatctgcgtggtccgc

SEQ ID NO: 7117 - DNA, 20 bp, synthetic construct
  source 1..20: mol_type = other DNA
gtgaccagagtgaggttatg

SEQ ID NO: 7118 - DNA, 20 bp, synthetic construct
  source 1..20: mol_type = other DNA
gagtctagcaccatcattct

SEQ ID NO: 7119 - DNA, 20 bp, synthetic construct
  source 1..20: mol_type = other DNA
tatccttgaaggtcggctgt

SEQ ID NO: 7120 - DNA, 20 bp, synthetic construct
  source 1..20: mol_type = other DNA
cacataccctagtgtcgtgc

SEQ ID NO: 7121 - DNA, 20 bp, synthetic construct
  source 1..20: mol_type = other DNA
acacggtccacccttgacgc

SEQ ID NO: 7122 - DNA, 20 bp, synthetic construct
  source 1..20: mol_type = other DNA
tgagccaccagtgcaacaca

SEQ ID NO: 7123 - DNA, 20 bp, synthetic construct
  source 1..20: mol_type = other DNA
actatggcataagagcttcg

SEQ ID NO: 7124 - DNA, 20 bp, synthetic construct
  source 1..20: mol_type = other DNA
agtatgcggtacttgcacca

SEQ ID NO: 7125 - DNA, 20 bp, synthetic construct
  source 1..20: mol_type = other DNA
actcacgcttacatttgtgc

SEQ ID NO: 7126 - DNA, 20 bp, synthetic construct
  source 1..20: mol_type = other DNA
gtactcatgcagcttcccac

SEQ ID NO: 7127 - DNA, 20 bp, synthetic construct
  source 1..20: mol_type = other DNA
tcggaacgaatgaggcatat

SEQ ID NO: 7128 - DNA, 20 bp, synthetic construct
  source 1..20: mol_type = other DNA
ccttccgggtaagcgggttt

SEQ ID NO: 7129 - DNA, 20 bp, synthetic construct
  source 1..20: mol_type = other DNA
gatgtctgctggcttcatcc

SEQ ID NO: 7130 - DNA, 20 bp, synthetic construct
  source 1..20: mol_type = other DNA
cgtgacataggaatgcaaga

SEQ ID NO: 7131 - DNA, 20 bp, synthetic construct
  source 1..20: mol_type = other DNA
cgaacactaacccgaagaac

SEQ ID NO: 7132 - DNA, 20 bp, synthetic construct
  source 1..20: mol_type = other DNA
tagtgataacttggattgac

SEQ ID NO: 7133 - DNA, 20 bp, synthetic construct
  source 1..20: mol_type = other DNA
acatcgctgctcgacactag

SEQ ID NO: 7134 - DNA, 20 bp, synthetic construct
  source 1..20: mol_type = other DNA
cttcaagctcgaatggaaca

SEQ ID NO: 7135 - DNA, 20 bp, synthetic construct
  source 1..20: mol_type = other DNA
agagaagtatggtctggagt

SEQ ID NO: 7136 - DNA, 20 bp, synthetic construct
  source 1..20: mol_type = other DNA
tagtacactgcaactcggga

SEQ ID NO: 7137 - DNA, 20 bp, synthetic construct
  source 1..20: mol_type = other DNA
gtgcgtgtatgttagaattg

SEQ ID NO: 7138 - DNA, 20 bp, synthetic construct
  source 1..20: mol_type = other DNA
gactaggaaactaggagatc

SEQ ID NO: 7139 - DNA, 20 bp, synthetic construct
  source 1..20: mol_type = other DNA
acactgggatttccaacggc

SEQ ID NO: 7140 - DNA, 20 bp, synthetic construct
  source 1..20: mol_type = other DNA
tacagtacacctcggctccg

SEQ ID NO: 7141 - DNA, 20 bp, synthetic construct
  source 1..20: mol_type = other DNA
ttgttaaccctgcatcctca

SEQ ID NO: 7142 - DNA, 20 bp, synthetic construct
  source 1..20: mol_type = other DNA
agttagttccgctccgagac

SEQ ID NO: 7143 - DNA, 20 bp, synthetic construct
  source 1..20: mol_type = other DNA
tacagatgagaaagcacaag

SEQ ID NO: 7144 - DNA, 20 bp, synthetic construct
  source 1..20: mol_type = other DNA
taaggaggtaaggtctcgcg

SEQ ID NO: 7145 - DNA, 20 bp, synthetic construct
  source 1..20: mol_type = other DNA
tgcgtgtacatggctccgtc

SEQ ID NO: 7146 - DNA, 20 bp, synthetic construct
  source 1..20: mol_type = other DNA
tggccaggtgcgtagttcgt

SEQ ID NO: 7147 - DNA, 20 bp, synthetic construct
  source 1..20: mol_type = other DNA
tccgacatggtccgagcttg

SEQ ID NO: 7148 - DNA, 20 bp, synthetic construct
  source 1..20: mol_type = other DNA
tttgtggccattatagaact

SEQ ID NO: 7149 - DNA, 20 bp, synthetic construct
  source 1..20: mol_type = other DNA
cccacagtctacggaagtga

SEQ ID NO: 7150 - DNA, 20 bp, synthetic construct
  source 1..20: mol_type = other DNA
acattaaagatagtccgata

SEQ ID NO: 7151 - DNA, 20 bp, synthetic construct
  source 1..20: mol_type = other DNA
agccgtatgcgttgatttag

SEQ ID NO: 7152 - DNA, 20 bp, synthetic construct
  source 1..20: mol_type = other DNA
cggacacgactaccgatccg

SEQ ID NO: 7153 - DNA, 20 bp, synthetic construct
  source 1..20: mol_type = other DNA
atttgttgagatcactgcac

SEQ ID NO: 7154 - DNA, 20 bp, synthetic construct
  source 1..20: mol_type = other DNA
taaggaagccatacggcggt

SEQ ID NO: 7155 - DNA, 20 bp, synthetic construct
  source 1..20: mol_type = other DNA
tttctcctcctaccggactg

SEQ ID NO: 7156 - DNA, 20 bp, synthetic construct
  source 1..20: mol_type = other DNA
ccaggtagtatgctatgaca

SEQ ID NO: 7157 - DNA, 20 bp, synthetic construct
  source 1..20: mol_type = other DNA
ctggcgggccaaatctaccg

SEQ ID NO: 7158 - DNA, 20 bp, synthetic construct
  source 1..20: mol_type = other DNA
atcatagatttggtaccgac

SEQ ID NO: 7159 - DNA, 20 bp, synthetic construct
  source 1..20: mol_type = other DNA
catatatcgcaatatctcac

SEQ ID NO: 7160 - DNA, 20 bp, synthetic construct
  source 1..20: mol_type = other DNA
ggcgcctgcatgtcactctt

SEQ ID NO: 7161 - DNA, 20 bp, synthetic construct
  source 1..20: mol_type = other DNA
agccttgcgtggcaataagc

SEQ ID NO: 7162 - DNA, 20 bp, synthetic construct
  source 1..20: mol_type = other DNA
gctttcgcagagagttacgg

SEQ ID NO: 7163 - DNA, 20 bp, synthetic construct
  source 1..20: mol_type = other DNA
cctacgcgcatgagtgcacg

SEQ ID NO: 7164 - DNA, 20 bp, synthetic construct
  source 1..20: mol_type = other DNA
gactcttagaaggctggata

SEQ ID NO: 7165 - DNA, 20 bp, synthetic construct
  source 1..20: mol_type = other DNA
gtatgaaattcctgccaact

SEQ ID NO: 7166 - DNA, 20 bp, synthetic construct
  source 1..20: mol_type = other DNA
gcgtatgcattcttaaaccg

SEQ ID NO: 7167 - DNA, 20 bp, synthetic construct
  source 1..20: mol_type = other DNA
cgtttacggttctgtataat

SEQ ID NO: 7168 - DNA, 20 bp, synthetic construct
  source 1..20: mol_type = other DNA
cgggtacctattccgatctt

SEQ ID NO: 7169 - DNA, 20 bp, synthetic construct
  source 1..20: mol_type = other DNA
tacttatagcggctcacaga

SEQ ID NO: 7170 - DNA, 20 bp, synthetic construct
  source 1..20: mol_type = other DNA
ctgttaggttaacgcgcaga

SEQ ID NO: 7171 - DNA, 20 bp, synthetic construct
  source 1..20: mol_type = other DNA
cctcgccaaacagtcagagc

SEQ ID NO: 7172 - DNA, 20 bp, synthetic construct
  source 1..20: mol_type = other DNA
agtccgtaccatcatattca

SEQ ID NO: 7173 - DNA, 20 bp, synthetic construct
  source 1..20: mol_type = other DNA
attattggagatatgggtac

SEQ ID NO: 7174 - DNA, 20 bp, synthetic construct
  source 1..20: mol_type = other DNA
acgagacgagccttcagagg

SEQ ID NO: 7175 - DNA, 20 bp, synthetic construct
  source 1..20: mol_type = other DNA
aacttctcagacccattggt

SEQ ID NO: 7176 - DNA, 20 bp, synthetic construct
  source 1..20: mol_type = other DNA
cggatgcttcagcgcgtgag

SEQ ID NO: 7177 - DNA, 20 bp, synthetic construct
  source 1..20: mol_type = other DNA
ggcagggattcctaccgaac

SEQ ID NO: 7178 - DNA, 20 bp, synthetic construct
  source 1..20: mol_type = other DNA
tttaagctctggtcccagct

SEQ ID NO: 7179 - DNA, 20 bp, synthetic construct
  source 1..20: mol_type = other DNA
atgccgggttcaagtgattc

SEQ ID NO: 7180 - DNA, 20 bp, synthetic construct
  source 1..20: mol_type = other DNA
gttcaacttcctcctcctct

SEQ ID NO: 7181 - DNA, 20 bp, synthetic construct
  source 1..20: mol_type = other DNA
gattccgtctgtctgtatcg

SEQ ID NO: 7182 - DNA, 20 bp, synthetic construct
  source 1..20: mol_type = other DNA
cctctcggatgcacgaatgt

SEQ ID NO: 7183 - DNA, 20 bp, synthetic construct
  source 1..20: mol_type = other DNA
aatcaaattgtgacaacgta

SEQ ID NO: 7184 - DNA, 20 bp, synthetic construct
  source 1..20: mol_type = other DNA
gacgttgagacactgtcgaa

SEQ ID NO: 7185 - DNA, 20 bp, synthetic construct
  source 1..20: mol_type = other DNA
atgcggttatagttgtcgga

SEQ ID NO: 7186 - DNA, 20 bp, synthetic construct
  source 1..20: mol_type = other DNA
cgaaataagctgggatctgt

SEQ ID NO: 7187 - DNA, 20 bp, synthetic construct
  source 1..20: mol_type = other DNA
ggtgaccgacatgtcagatg

SEQ ID NO: 7188 - DNA, 20 bp, synthetic construct
  source 1..20: mol_type = other DNA
gcgatcgtcccgcatcagct

SEQ ID NO: 7189 - DNA, 20 bp, synthetic construct
  source 1..20: mol_type = other DNA
ccgaacaatttctgcccacg

SEQ ID NO: 7190 - DNA, 20 bp, synthetic construct
  source 1..20: mol_type = other DNA
tctgcctaggatgggattaa

SEQ ID NO: 7191 - DNA, 20 bp, synthetic construct
  source 1..20: mol_type = other DNA
gtctgaaggtgagtcctgtt

SEQ ID NO: 7192 - DNA, 20 bp, synthetic construct
  source 1..20: mol_type = other DNA
gttcggcggcgtagacttct

SEQ ID NO: 7193 - DNA, 20 bp, synthetic construct
  source 1..20: mol_type = other DNA
gattcctaatgggtaccaac

SEQ ID NO: 7194 - DNA, 20 bp, synthetic construct
  source 1..20: mol_type = other DNA
aatccgcccaatacaaatcg

SEQ ID NO: 7195 - DNA, 20 bp, synthetic construct
  source 1..20: mol_type = other DNA
acttcttgtgcacccagcaa

SEQ ID NO: 7196 - DNA, 20 bp, synthetic construct
  source 1..20: mol_type = other DNA
caccttcacttgttggagaa

SEQ ID NO: 7197 - DNA, 20 bp, synthetic construct
  source 1..20: mol_type = other DNA
atacagtcccagtggaggca

SEQ ID NO: 7198 - DNA, 20 bp, synthetic construct
  source 1..20: mol_type = other DNA
caacttagtccttactaacc

SEQ ID NO: 7199 - DNA, 20 bp, synthetic construct
  source 1..20: mol_type = other DNA
cttccgtatatactgctcga

SEQ ID NO: 7200 - DNA, 20 bp, synthetic construct
  source 1..20: mol_type = other DNA
cctgcatgggttactctaac

SEQ ID NO: 7201 - DNA, 20 bp, synthetic construct
  source 1..20: mol_type = other DNA
aggagaaggtagaagagtga

SEQ ID NO: 7202 - DNA, 20 bp, synthetic construct
  source 1..20: mol_type = other DNA
cttgtggcgtgcgtacatca

SEQ ID NO: 7203 - DNA, 20 bp, synthetic construct
  source 1..20: mol_type = other DNA
cctatgtagaacagacacgc

SEQ ID NO: 7204 - DNA, 20 bp, synthetic construct
  source 1..20: mol_type = other DNA
ggagcaaccagcttccgtcc

SEQ ID NO: 7205 - DNA, 20 bp, synthetic construct
  source 1..20: mol_type = other DNA
gtagaggacttctgtatcta

SEQ ID NO: 7206 - DNA, 20 bp, synthetic construct
  source 1..20: mol_type = other DNA
ttgttcttcgctcggtggct

SEQ ID NO: 7207 - DNA, 20 bp, synthetic construct
  source 1..20: mol_type = other DNA
tgatctacctccgcatcaag

SEQ ID NO: 7208 - DNA, 20 bp, synthetic construct
  source 1..20: mol_type = other DNA
aatgtccggccacttctaag

SEQ ID NO: 7209 - DNA, 20 bp, synthetic construct
  source 1..20: mol_type = other DNA
aggaagtcattccgcgagtc

SEQ ID NO: 7210 - DNA, 20 bp, synthetic construct
  source 1..20: mol_type = other DNA
cgcttaaggagtactcgcct

SEQ ID NO: 7211 - DNA, 20 bp, synthetic construct
  source 1..20: mol_type = other DNA
ggacagtcgtgtaatgatcc

SEQ ID NO: 7212 - DNA, 20 bp, synthetic construct
  source 1..20: mol_type = other DNA
caggctggtgtgcttatccg

SEQ ID NO: 7213 - DNA, 20 bp, synthetic construct
  source 1..20: mol_type = other DNA
ttccactgacgcacattctg

SEQ ID NO: 7214 - DNA, 20 bp, synthetic construct
  source 1..20: mol_type = other DNA
tgtgcttgagtctagggact

SEQ ID NO: 7215 - DNA, 20 bp, synthetic construct
  source 1..20: mol_type = other DNA
gggttggagccttccaagga

SEQ ID NO: 7216 - DNA, 20 bp, synthetic construct
  source 1..20: mol_type = other DNA
acgcaagatcttcgatagaa

SEQ ID NO: 7217 - DNA, 20 bp, synthetic construct
  source 1..20: mol_type = other DNA
gaggaataatacgggttgaa

SEQ ID NO: 7218 - DNA, 20 bp, synthetic construct
  source 1..20: mol_type = other DNA
taagcgttgatgagctttgt

SEQ ID NO: 7219 - DNA, 20 bp, synthetic construct
  source 1..20: mol_type = other DNA
aatattgtacgtatgcgcgg

SEQ ID NO: 7220 - DNA, 20 bp, synthetic construct
  source 1..20: mol_type = other DNA
ctccttgggccacagctttg

SEQ ID NO: 7221 - DNA, 20 bp, synthetic construct
  source 1..20: mol_type = other DNA
cacgtgcccagcaagaactt

SEQ ID NO: 7222 - DNA, 20 bp, synthetic construct
  source 1..20: mol_type = other DNA
aggagccgtgcactgtagcg

SEQ ID NO: 7223 - DNA, 20 bp, synthetic construct
  source 1..20: mol_type = other DNA
tgctgggtggaggagcgagc

SEQ ID NO: 7224 - DNA, 20 bp, synthetic construct
  source 1..20: mol_type = other DNA
tcccaggtcacgacccttaa

SEQ ID NO: 7225 - DNA, 20 bp, synthetic construct
  source 1..20: mol_type = other DNA
gccactgactcctgaacgca

SEQ ID NO: 7226 - DNA, 20 bp, synthetic construct
  source 1..20: mol_type = other DNA
gcaaatatctatacaagcat

SEQ ID NO: 7227 - DNA, 20 bp, synthetic construct
  source 1..20: mol_type = other DNA
gaggtaagactagggaagtc

SEQ ID NO: 7228 - DNA, 20 bp, synthetic construct
  source 1..20: mol_type = other DNA
gtctgtagtcattaagtgaa

SEQ ID NO: 7229 - DNA, 20 bp, synthetic construct
  source 1..20: mol_type = other DNA
gcgctatagcaccagcagca

SEQ ID NO: 7230 - DNA, 20 bp, synthetic construct
  source 1..20: mol_type = other DNA
cggactgcggtctaccttta

SEQ ID NO: 7231 - DNA, 20 bp, synthetic construct
  source 1..20: mol_type = other DNA
tgccaactggaacgaattta

SEQ ID NO: 7232 - DNA, 20 bp, synthetic construct
  source 1..20: mol_type = other DNA
actcaagttcgtcgtccgta

SEQ ID NO: 7233 - DNA, 20 bp, synthetic construct
  source 1..20: mol_type = other DNA
cgtgggcaataaccggcagc

SEQ ID NO: 7234 - DNA, 20 bp, synthetic construct
  source 1..20: mol_type = other DNA
ccaatacaaatcgccgataa

SEQ ID NO: 7235 - DNA, 20 bp, synthetic construct
  source 1..20: mol_type = other DNA
caccaaagcggacgaagagg

SEQ ID NO: 7236 - DNA, 20 bp, synthetic construct
  source 1..20: mol_type = other DNA
ccacgcaatcaggttggagc

SEQ ID NO: 7237 - DNA, 20 bp, synthetic construct
  source 1..20: mol_type = other DNA
cctgccgccaaatgatagcc

SEQ ID NO: 7238 - DNA, 20 bp, synthetic construct
  source 1..20: mol_type = other DNA
aaattcatccacgacgacca

SEQ ID NO: 7239 - DNA, 20 bp, synthetic construct
  source 1..20: mol_type = other DNA
tcaatggctaggttattgtt

SEQ ID NO: 7240 - DNA, 20 bp, synthetic construct
  source 1..20: mol_type = other DNA
ctgtggtccataagtcttac

SEQ ID NO: 7241 - DNA, 20 bp, synthetic construct
  source 1..20: mol_type = other DNA
tttaggagtgagttgacgac

SEQ ID NO: 7242 - DNA, 20 bp, synthetic construct
  source 1..20: mol_type = other DNA
tccggctttagcgcctacgc

SEQ ID NO: 7243 - DNA, 20 bp, synthetic construct
  source 1..20: mol_type = other DNA
gtgtgacaataatcgtcgcg

SEQ ID NO: 7244 - DNA, 20 bp, synthetic construct
  source 1..20: mol_type = other DNA
cataaggatagatgcagcga

SEQ ID NO: 7245 - DNA, 20 bp, synthetic construct
  source 1..20: mol_type = other DNA
tgataacgtactagagcgca

SEQ ID NO: 7246 - DNA, 20 bp, synthetic construct
  source 1..20: mol_type = other DNA
tcttccacgtacacgtaacg

SEQ ID NO: 7247 - DNA, 20 bp, synthetic construct
  source 1..20: mol_type = other DNA
caccactgtaggtctctcca

SEQ ID NO: 7248 - DNA, 20 bp, synthetic construct
  source 1..20: mol_type = other DNA
cgcggcaatttagggtgaca

SEQ ID NO: 7249 - DNA, 20 bp, synthetic construct
  source 1..20: mol_type = other DNA
ctgtgtatgatgtgcaggcc

SEQ ID NO: 7250 - DNA, 20 bp, synthetic construct
  source 1..20: mol_type = other DNA
cttaatgattcacccaggcg

SEQ ID NO: 7251 - DNA, 20 bp, synthetic construct
  source 1..20: mol_type = other DNA
cttcatgcgcgagatactcc

SEQ ID NO: 7252 - DNA, 20 bp, synthetic construct
  source 1..20: mol_type = other DNA
acgtctgtgcgaccctcacc

SEQ ID NO: 7253 - DNA, 20 bp, synthetic construct
  source 1..20: mol_type = other DNA
ggaccaaatccacctgcacg

SEQ ID NO: 7254 - DNA, 20 bp, synthetic construct
  source 1..20: mol_type = other DNA
tctcttccggactaggccaa

SEQ ID NO: 7255 - DNA, 20 bp, synthetic construct
  source 1..20: mol_type = other DNA
gctgattatacttcaggtga

SEQ ID NO: 7256 - DNA, 20 bp, synthetic construct
  source 1..20: mol_type = other DNA
tcatagccgaagaatacaca

SEQ ID NO: 7257 - DNA, 20 bp, synthetic construct
  source 1..20: mol_type = other DNA
atctacgagccaaccacaac

SEQ ID NO: 7258 - DNA, 20 bp, synthetic construct
  source 1..20: mol_type = other DNA
acctacttctccattgaagt

SEQ ID NO: 7259 - DNA, 20 bp, synthetic construct
  source 1..20: mol_type = other DNA
aggcaacacttatcctgcga

SEQ ID NO: 7260 - DNA, 20 bp, synthetic construct
  source 1..20: mol_type = other DNA
atttgactaagctaacagtg

SEQ ID NO: 7261 - DNA, 20 bp, synthetic construct
  source 1..20: mol_type = other DNA
gaggccgttcctgattaggt

SEQ ID NO: 7262 - DNA, 20 bp, synthetic construct
  source 1..20: mol_type = other DNA
tagatgggacccataatagt

SEQ ID NO: 7263 - DNA, 20 bp, synthetic construct
  source 1..20: mol_type = other DNA
gtctggttcaagggagattc

SEQ ID NO: 7264 - DNA, 20 bp, synthetic construct
  source 1..20: mol_type = other DNA
agtaacgtaagagtcttcaa

SEQ ID NO: 7265 - DNA, 20 bp, synthetic construct
  source 1..20: mol_type = other DNA
cacagatctcagctcttgct

SEQ ID NO: 7266 - DNA, 20 bp, synthetic construct
  source 1..20: mol_type = other DNA
ctgcgttgtctcagaagccc

SEQ ID NO: 7267 - DNA, 20 bp, synthetic construct
  source 1..20: mol_type = other DNA
tatctcttcataacatccag

SEQ ID NO: 7268 - DNA, 20 bp, synthetic construct
  source 1..20: mol_type = other DNA
ttcgggatacttaagtctaa

SEQ ID NO: 7269 - DNA, 20 bp, synthetic construct
  source 1..20: mol_type = other DNA
cttattgcgccaatcaacct

SEQ ID NO: 7270 - DNA, 20 bp, synthetic construct
  source 1..20: mol_type = other DNA
aatataccgcaggtgcttgc

SEQ ID NO: 7271 - DNA, 20 bp, synthetic construct
  source 1..20: mol_type = other DNA
gtcacgttaaggacaaccag

SEQ ID NO: 7272 - DNA, 20 bp, synthetic construct
  source 1..20: mol_type = other DNA
gtgtgctcactttctcgcag

SEQ ID NO: 7273 - DNA, 20 bp, synthetic construct
  source 1..20: mol_type = other DNA
ggtcatgtgttgtagcgtct

SEQ ID NO: 7274 - DNA, 20 bp, synthetic construct
  source 1..20: mol_type = other DNA
tagcacgcgtgtcacctctt

SEQ ID NO: 7275 - DNA, 20 bp, synthetic construct
  source 1..20: mol_type = other DNA
gacgttctacagagggtgcc

SEQ ID NO: 7276 - DNA, 20 bp, synthetic construct
  source 1..20: mol_type = other DNA
tagtgctggttgtcccgcag

SEQ ID NO: 7277 - DNA, 20 bp, synthetic construct
  source 1..20: mol_type = other DNA
agggctgtggatggttcgga

SEQ ID NO: 7278 - DNA, 20 bp, synthetic construct
  source 1..20: mol_type = other DNA
agcatacaaacccaaacaga

SEQ ID NO: 7279 - DNA, 20 bp, synthetic construct
  source 1..20: mol_type = other DNA
acatcagcaatcgctaattc

SEQ ID NO: 7280 - DNA, 20 bp, synthetic construct
  source 1..20: mol_type = other DNA
ggctaatctcgtttagagcc

SEQ ID NO: 7281 - DNA, 20 bp, synthetic construct
  source 1..20: mol_type = other DNA
tatatcacctttgagcgttt

SEQ ID NO: 7282 - DNA, 20 bp, synthetic construct
  source 1..20: mol_type = other DNA
gccgagtctaaggactcttt

SEQ ID NO: 7283 - DNA, 20 bp, synthetic construct
  source 1..20: mol_type = other DNA
gacgggcaccggatcgtact

SEQ ID NO: 7284 - DNA, 20 bp, synthetic construct
  source 1..20: mol_type = other DNA
tcactattagtaacgcctta

SEQ ID NO: 7285 - DNA, 20 bp, synthetic construct
  source 1..20: mol_type = other DNA
ataattaagcgactggtcag

SEQ ID NO: 7286 - DNA, 20 bp, synthetic construct
  source 1..20: mol_type = other DNA
tacaagaacggttgatttcc

SEQ ID NO: 7287 - DNA, 20 bp, synthetic construct
  source 1..20: mol_type = other DNA
cctactgtcttcttagggta

SEQ ID NO: 7288 - DNA, 20 bp, synthetic construct
  source 1..20: mol_type = other DNA
gaaattctgtgatacggtta

SEQ ID NO: 7289 - DNA, 20 bp, synthetic construct
  source 1..20: mol_type = other DNA
atgtcgaagtcatcttatat

SEQ ID NO: 7290 - DNA, 20 bp, synthetic construct
  source 1..20: mol_type = other DNA
ccaatcctccacatcctcac

SEQ ID NO: 7291 - DNA, 20 bp, synthetic construct
  source 1..20: mol_type = other DNA
ggtaataggtagcacggcaa

SEQ ID NO: 7292 - DNA, 20 bp, synthetic construct
  source 1..20: mol_type = other DNA
agtggaccctccgtggtgag

SEQ ID NO: 7293 - DNA, 20 bp, synthetic construct
  source 1..20: mol_type = other DNA
tgttacggcaactacacact

SEQ ID NO: 7294 - DNA, 20 bp, synthetic construct
  source 1..20: mol_type = other DNA
ttattatactgtcctacagg

SEQ ID NO: 7295 - DNA, 20 bp, synthetic construct
  source 1..20: mol_type = other DNA
gacaagcggcctcgggattt

SEQ ID NO: 7296 - DNA, 20 bp, synthetic construct
  source 1..20: mol_type = other DNA
tacgaggaagaacttatgtt

SEQ ID NO: 7297 - DNA, 20 bp, synthetic construct
  source 1..20: mol_type = other DNA
ccgttactggctcgcgagat

SEQ ID NO: 7298 - DNA, 20 bp, synthetic construct
  source 1..20: mol_type = other DNA
agtctgggcgagtgaagagt

SEQ ID NO: 7299 - DNA, 20 bp, synthetic construct
  source 1..20: mol_type = other DNA
ctagcgcttacccgtacagg

SEQ ID NO: 7300 - DNA, 20 bp, synthetic construct
  source 1..20: mol_type = other DNA
tcttactaggaacggtgccg

SEQ ID NO: 7301 - DNA, 20 bp, synthetic construct
  source 1..20: mol_type = other DNA
aatagctgacggaccggacg

SEQ ID NO: 7302 - DNA, 20 bp, synthetic construct
  source 1..20: mol_type = other DNA
gcgcattatttgcactagca

SEQ ID NO: 7303 - DNA, 20 bp, synthetic construct
  source 1..20: mol_type = other DNA
gctcaatcgagtaagtcgat

SEQ ID NO: 7304 - DNA, 20 bp, synthetic construct
  source 1..20: mol_type = other DNA
cgcttggtctgatcaccgga

SEQ ID NO: 7305 - DNA, 20 bp, synthetic construct
  source 1..20: mol_type = other DNA
ctacctctccgcgcttggga

SEQ ID NO: 7306 - DNA, 20 bp, synthetic construct
  source 1..20: mol_type = other DNA
acataaggttaaagctaacg

SEQ ID NO: 7307 - DNA, 20 bp, synthetic construct
  source 1..20: mol_type = other DNA
tttgctgggactgtgtttaa

SEQ ID NO: 7308 - DNA, 20 bp, synthetic construct
  source 1..20: mol_type = other DNA
atgtagcatgtagttcgatt

SEQ ID NO: 7309 - DNA, 20 bp, synthetic construct
  source 1..20: mol_type = other DNA
tccttgattatgatgaaccg

SEQ ID NO: 7310 - DNA, 20 bp, synthetic construct
  source 1..20: mol_type = other DNA
tggtcttacacctacggatc

SEQ ID NO: 7311 - DNA, 20 bp, synthetic construct
  source 1..20: mol_type = other DNA
atccatagcggattggaaca

SEQ ID NO: 7312 - DNA, 20 bp, synthetic construct
  source 1..20: mol_type = other DNA
tttccaaaggaacttgtgca

SEQ ID NO: 7313 - DNA, 20 bp, synthetic construct
  source 1..20: mol_type = other DNA
ctgtgcttgcatccgtctac

SEQ ID NO: 7314 - DNA, 20 bp, synthetic construct
  source 1..20: mol_type = other DNA
tccagctcaggctcagacat

SEQ ID NO: 7315 - DNA, 20 bp, synthetic construct
  source 1..20: mol_type = other DNA
cctgaaagaggctagcgttt

SEQ ID NO: 7316 - DNA, 20 bp, synthetic construct
  source 1..20: mol_type = other DNA
atcgtgctatagcccttcct

SEQ ID NO: 7317 - DNA, 20 bp, synthetic construct
  source 1..20: mol_type = other DNA
agtagcaatgatcgtctacg

SEQ ID NO: 7318 - DNA, 20 bp, synthetic construct
  source 1..20: mol_type = other DNA
taggcctcttagcatgtcta

SEQ ID NO: 7319 - DNA, 20 bp, synthetic construct
  source 1..20: mol_type = other DNA
ggtttcggacgagggcgtta

SEQ ID NO: 7320 - DNA, 20 bp, synthetic construct
  source 1..20: mol_type = other DNA
tcaacccggaagggtcaact

SEQ ID NO: 7321 - DNA, 20 bp, synthetic construct
  source 1..20: mol_type = other DNA
acggactagttgtctgaggg

SEQ ID NO: 7322 - DNA, 20 bp, synthetic construct
  source 1..20: mol_type = other DNA
agtcaccaagttaacaaagc

SEQ ID NO: 7323 - DNA, 20 bp, synthetic construct
  source 1..20: mol_type = other DNA
cgtagatgattcgaataact

SEQ ID NO: 7324 - DNA, 20 bp, synthetic construct
  source 1..20: mol_type = other DNA
gagtattgagcctcatcaac

SEQ ID NO: 7325 - DNA, 20 bp, synthetic construct
  source 1..20: mol_type = other DNA
gctcacgcggtcaagtcatc

SEQ ID NO: 7326 - DNA, 20 bp, synthetic construct
  source 1..20: mol_type = other DNA
ccggtgcggcaaagatgatg

SEQ ID NO: 7327 - DNA, 20 bp, synthetic construct
  source 1..20: mol_type = other DNA
gtttagcccgtgaactgctt

SEQ ID NO: 7328 - DNA, 20 bp, synthetic construct
  source 1..20: mol_type = other DNA
taggtgccttctgacggctc

SEQ ID NO: 7329 - DNA, 20 bp, synthetic construct
  source 1..20: mol_type = other DNA
cctacgatacgtttgaagat

SEQ ID NO: 7330 - DNA, 20 bp, synthetic construct
  source 1..20: mol_type = other DNA
ttctagcaggttaacgaact

SEQ ID NO: 7331 - DNA, 20 bp, synthetic construct
  source 1..20: mol_type = other DNA
ccactgatagagctattcaa

SEQ ID NO: 7332 - DNA, 20 bp, synthetic construct
  source 1..20: mol_type = other DNA
gcccaattaacgccgtattg

SEQ ID NO: 7333 - DNA, 20 bp, synthetic construct
  source 1..20: mol_type = other DNA
tgccatgcctatgggtgtta

SEQ ID NO: 7334 - DNA, 20 bp, synthetic construct
  source 1..20: mol_type = other DNA
cgagaccttacaacttccat

SEQ ID NO: 7335 - DNA, 20 bp, synthetic construct
  source 1..20: mol_type = other DNA
gggtttgaagggcggcaacg

SEQ ID NO: 7336 - DNA, 20 bp, synthetic construct
  source 1..20: mol_type = other DNA
agcgcgacgctgatcggtga

SEQ ID NO: 7337 - DNA, 20 bp, synthetic construct
  source 1..20: mol_type = other DNA
atgtccgtgctcgcaccaag

SEQ ID NO: 7338 - DNA, 20 bp, synthetic construct
  source 1..20: mol_type = other DNA
ttgggtgaccgttatcaagt

SEQ ID NO: 7339 - DNA, 20 bp, synthetic construct
  source 1..20: mol_type = other DNA
tactgtggtcagggcataag

SEQ ID NO: 7340 - DNA, 20 bp, synthetic construct
  source 1..20: mol_type = other DNA
tcggtcgtgccgatacagaa

SEQ ID NO: 7341 - DNA, 20 bp, synthetic construct
  source 1..20: mol_type = other DNA
aataatgcttccagatctct

SEQ ID NO: 7342 - DNA, 20 bp, synthetic construct
  source 1..20: mol_type = other DNA
agccgggagcaccggaacta

SEQ ID NO: 7343 - DNA, 20 bp, synthetic construct
  source 1..20: mol_type = other DNA
atgtactagccgagaggagg

SEQ ID NO: 7344 - DNA, 20 bp, synthetic construct
  source 1..20: mol_type = other DNA
gctaatcctcagcggtgtga

SEQ ID NO: 7345 - DNA, 20 bp, synthetic construct
  source 1..20: mol_type = other DNA
gcgtaaacgggcgttagtta

SEQ ID NO: 7346 - DNA, 20 bp, synthetic construct
  source 1..20: mol_type = other DNA
ccgccgtcattaacgttaca

SEQ ID NO: 7347 - DNA, 20 bp, synthetic construct
  source 1..20: mol_type = other DNA
actgtcgagtaatgaggctg

SEQ ID NO: 7348 - DNA, 20 bp, synthetic construct
  source 1..20: mol_type = other DNA
aaggctgactttgcagggta

SEQ ID NO: 7349 - DNA, 20 bp, synthetic construct
  source 1..20: mol_type = other DNA
tgtgcccagatttccaagcc

SEQ ID NO: 7350 - DNA, 20 bp, synthetic construct
  source 1..20: mol_type = other DNA
agagggatcatctaagctct

SEQ ID NO: 7351 - DNA, 20 bp, synthetic construct
  source 1..20: mol_type = other DNA
ctgtgctggtgttactgaga

SEQ ID NO: 7352 - DNA, 20 bp, synthetic construct
  source 1..20: mol_type = other DNA
tagactagcgagatctctct

SEQ ID NO: 7353 - DNA, 20 bp, synthetic construct
  source 1..20: mol_type = other DNA
ggatgcgcaaagtgatccct

SEQ ID NO: 7354 - DNA, 20 bp, synthetic construct
  source 1..20: mol_type = other DNA
ttctaggcaaacaagcgaag

SEQ ID NO: 7355 - DNA, 20 bp, synthetic construct
  source 1..20: mol_type = other DNA
ttgtggtacggagggcttta

SEQ ID NO: 7356 - DNA, 20 bp, synthetic construct
  source 1..20: mol_type = other DNA
attagcaatatgcctcctca

SEQ ID NO: 7357 - DNA, 20 bp, synthetic construct
  source 1..20: mol_type = other DNA
tgggaaagctatagcttcca

SEQ ID NO: 7358 - DNA, 20 bp, synthetic construct
  source 1..20: mol_type = other DNA
acacacctctacggtgtgat

SEQ ID NO: 7359 - DNA, 20 bp, synthetic construct
  source 1..20: mol_type = other DNA
tctcgggctctagcttggtt

SEQ ID NO: 7360 - DNA, 20 bp, synthetic construct
  source 1..20: mol_type = other DNA
gcaattggagatagtatccc

SEQ ID NO: 7361 - DNA, 20 bp, synthetic construct
  source 1..20: mol_type = other DNA
gtctaacacaacgagtccag

SEQ ID NO: 7362 - DNA, 20 bp, synthetic construct
  source 1..20: mol_type = other DNA
ccaggaatcgcgggcatgat

SEQ ID NO: 7363 - DNA, 20 bp, synthetic construct
  source 1..20: mol_type = other DNA
agaatattcacgaggttcca

SEQ ID NO: 7364 - DNA, 20 bp, synthetic construct
  source 1..20: mol_type = other DNA
taggccacacaaagacgcaa

SEQ ID NO: 7365 - DNA, 20 bp, synthetic construct
  source 1..20: mol_type = other DNA
gccgccagaatacctacgct

SEQ ID NO: 7366 - DNA, 20 bp, synthetic construct
  source 1..20: mol_type = other DNA
ccagaccagtggtgattgac

SEQ ID NO: 7367 - DNA, 20 bp, synthetic construct
  source 1..20: mol_type = other DNA
ggcctgtaatccggcacgac

SEQ ID NO: 7368 - DNA, 20 bp, synthetic construct
  source 1..20: mol_type = other DNA
gtcttcgaccacagttgagc

SEQ ID NO: 7369 - DNA, 20 bp, synthetic construct
  source 1..20: mol_type = other DNA
tgcagtgctttcggcgagtt

SEQ ID NO: 7370 - DNA, 20 bp, synthetic construct
  source 1..20: mol_type = other DNA
cgcgcaacgtatagtccggg

SEQ ID NO: 7371 - DNA, 20 bp, synthetic construct
  source 1..20: mol_type = other DNA
ctatcagaaacaacgatagc

SEQ ID NO: 7372 - DNA, 20 bp, synthetic construct
  source 1..20: mol_type = other DNA
gcagcctaactttaggtact

SEQ ID NO: 7373 - DNA, 20 bp, synthetic construct
  source 1..20: mol_type = other DNA
acgagtcggttagtgacaat

SEQ ID NO: 7374 - DNA, 20 bp, synthetic construct
  source 1..20: mol_type = other DNA
tggaggttgtgttaaatgaa

SEQ ID NO: 7375 - DNA, 20 bp, synthetic construct
  source 1..20: mol_type = other DNA
tcggcccttgccggttaacg

SEQ ID NO: 7376 - DNA, 20 bp, synthetic construct
  source 1..20: mol_type = other DNA
tttgcaaagacgcagacttc

SEQ ID NO: 7377 - DNA, 20 bp, synthetic construct
  source 1..20: mol_type = other DNA
taggaaaccgcttgcttagc

SEQ ID NO: 7378 - DNA, 20 bp, synthetic construct
  source 1..20: mol_type = other DNA
atgcgtggaccattccgagc

SEQ ID NO: 7379 - DNA, 20 bp, synthetic construct
  source 1..20: mol_type = other DNA
cacctcacatacttgtcatt

SEQ ID NO: 7380 - DNA, 20 bp, synthetic construct
  source 1..20: mol_type = other DNA
gtcgagagcggatactggta

SEQ ID NO: 7381 - DNA, 20 bp, synthetic construct
  source 1..20: mol_type = other DNA
actccttaagtgcgacggat

SEQ ID NO: 7382 - DNA, 20 bp, synthetic construct
  source 1..20: mol_type = other DNA
gaagatgcttgtaattggtc

SEQ ID NO: 7383 - DNA, 20 bp, synthetic construct
  source 1..20: mol_type = other DNA
acctgcttcgcacgaccagt

SEQ ID NO: 7384 - DNA, 20 bp, synthetic construct
  source 1..20: mol_type = other DNA
ccttatccgatattcaattc

SEQ ID NO: 7385 - DNA, 20 bp, synthetic construct
  source 1..20: mol_type = other DNA
cagtcactagattagtgaaa

SEQ ID NO: 7386 - DNA, 20 bp, synthetic construct
  source 1..20: mol_type = other DNA
tgagcaggcatgccacagat

SEQ ID NO: 7387 - DNA, 20 bp, synthetic construct
  source 1..20: mol_type = other DNA
gcgagttatggaccctaacg

SEQ ID NO: 7388 - DNA, 20 bp, synthetic construct
  source 1..20: mol_type = other DNA
tacatatccggatgagtacg

SEQ ID NO: 7389 - DNA, 20 bp, synthetic construct
  source 1..20: mol_type = other DNA
gtccgcatgtgtcctgatgc

SEQ ID NO: 7390 - DNA, 20 bp, synthetic construct
  source 1..20: mol_type = other DNA
gaggatgccattggacctgc

SEQ ID NO: 7391 - DNA, 20 bp, synthetic construct
  source 1..20: mol_type = other DNA
gggatattcgcacgactaca

SEQ ID NO: 7392 - DNA, 20 bp, synthetic construct
  source 1..20: mol_type = other DNA
acggcaatcgttgcacgcaa

SEQ ID NO: 7393 - DNA, 20 bp, synthetic construct
  source 1..20: mol_type = other DNA
tgagttcttcgtgacacaga

SEQ ID NO: 7394 - DNA, 20 bp, synthetic construct
  source 1..20: mol_type = other DNA
tgacttctcagcaacaatag

SEQ ID NO: 7395 - DNA, 20 bp, synthetic construct
  source 1..20: mol_type = other DNA
acaaacttattcgctcgctt

SEQ ID NO: 7396 - DNA, 20 bp, synthetic construct
  source 1..20: mol_type = other DNA
cggcgagtatgtggtacaga

SEQ ID NO: 7397 - DNA, 20 bp, synthetic construct
  source 1..20: mol_type = other DNA
attcgccgatcaaagaaccg

SEQ ID NO: 7398 - DNA, 20 bp, synthetic construct
  source 1..20: mol_type = other DNA
ccgaacacagttgcactaca

SEQ ID NO: 7399 - DNA, 20 bp, synthetic construct
  source 1..20: mol_type = other DNA
gggatagtgatcttcacaat

SEQ ID NO: 7400 - DNA, 20 bp, synthetic construct
  source 1..20: mol_type = other DNA
tagaccagtgtacttgacgt

SEQ ID NO: 7401 - DNA, 20 bp, synthetic construct
  source 1..20: mol_type = other DNA
tggtacgttgcctgcctcct

SEQ ID NO: 7402 - DNA, 20 bp, synthetic construct
  source 1..20: mol_type = other DNA
ggtcactcttgtgattcctc

SEQ ID NO: 7403 - DNA, 20 bp, synthetic construct
  source 1..20: mol_type = other DNA
tccacacgaggtgtggacaa

SEQ ID NO: 7404 - DNA, 20 bp, synthetic construct
  source 1..20: mol_type = other DNA
ccgtttgttgacaccgggtt

SEQ ID NO: 7405 - DNA, 20 bp, synthetic construct
  source 1..20: mol_type = other DNA
tgcggtacagagcgtaccat

SEQ ID NO: 7406 - DNA, 20 bp, synthetic construct
  source 1..20: mol_type = other DNA
gcacgcaaggaagaggataa

SEQ ID NO: 7407 - DNA, 20 bp, synthetic construct
  source 1..20: mol_type = other DNA
gcctggagactactaaatca

SEQ ID NO: 7408 - DNA, 20 bp, synthetic construct
  source 1..20: mol_type = other DNA
ggtatctacgtcttggacta

SEQ ID NO: 7409 - DNA, 20 bp, synthetic construct
  source 1..20: mol_type = other DNA
acggcgtcatctgccatcaa

SEQ ID NO: 7410 - DNA, 20 bp, synthetic construct
  source 1..20: mol_type = other DNA
ttacatgatgcagagggacc

SEQ ID NO: 7411 - DNA, 20 bp, synthetic construct
  source 1..20: mol_type = other DNA
tagagttataacctaacgga

SEQ ID NO: 7412 - DNA, 20 bp, synthetic construct
  source 1..20: mol_type = other DNA
aacaccgtcttaattagcac

SEQ ID NO: 7413 - DNA, 20 bp, synthetic construct
  source 1..20: mol_type = other DNA
tatgtcaactaccgtaacta

SEQ ID NO: 7414 - DNA, 20 bp, synthetic construct
  source 1..20: mol_type = other DNA
ggccaccaataaccatgagc

SEQ ID NO: 7415 - DNA, 20 bp, synthetic construct
  source 1..20: mol_type = other DNA
tagcacattagcatctagga

SEQ ID NO: 7416 - DNA, 20 bp, synthetic construct
  source 1..20: mol_type = other DNA
aaactgaatgacacgatttg

SEQ ID NO: 7417 - DNA, 20 bp, synthetic construct
  source 1..20: mol_type = other DNA
gcgcacctcaatgatgtggc

SEQ ID NO: 7418 - DNA, 20 bp, synthetic construct
  source 1..20: mol_type = other DNA
tgtacgtctctatcgctcca

SEQ ID NO: 7419 - DNA, 20 bp, synthetic construct
  source 1..20: mol_type = other DNA
gactaagtaacgtacagtca

SEQ ID NO: 7420 - DNA, 20 bp, synthetic construct
  source 1..20: mol_type = other DNA
gactcttaaccctagtgagt

SEQ ID NO: 7421 - DNA, 20 bp, synthetic construct
  source 1..20: mol_type = other DNA
gttgcaattagaggtggctt

SEQ ID NO: 7422 - DNA, 20 bp, synthetic construct
  source 1..20: mol_type = other DNA
cgcacgcgcgattagtttcg

SEQ ID NO: 7423 - DNA, 20 bp, synthetic construct
  source 1..20: mol_type = other DNA
tccgaagtagatggacccgc

SEQ ID NO: 7424 - DNA, 20 bp, synthetic construct
  source 1..20: mol_type = other DNA
aaactctggatgtcgcaaac

SEQ ID NO: 7425 - DNA, 20 bp, synthetic construct
  source 1..20: mol_type = other DNA
gggctcagtgacgtatgtga

SEQ ID NO: 7426 - DNA, 20 bp, synthetic construct
  source 1..20: mol_type = other DNA
atttgcgtcaaagggacggg

SEQ ID NO: 7427 - DNA, 20 bp, synthetic construct
  source 1..20: mol_type = other DNA
agacactggacggtagagcc

SEQ ID NO: 7428 - DNA, 20 bp, synthetic construct
  source 1..20: mol_type = other DNA
gcaaccatactctatgagtg

SEQ ID NO: 7429 - DNA, 20 bp, synthetic construct
  source 1..20: mol_type = other DNA
atcgggcacaaactaaatca

SEQ ID NO: 7430 - DNA, 20 bp, synthetic construct
  source 1..20: mol_type = other DNA
atgatagggctcgataatac

SEQ ID NO: 7431 - DNA, 20 bp, synthetic construct
  source 1..20: mol_type = other DNA
tccctcgacgcctgactcac

SEQ ID NO: 7432 - DNA, 20 bp, synthetic construct
  source 1..20: mol_type = other DNA
tcagttcttaccgaatgccg

SEQ ID NO: 7433 - DNA, 20 bp, synthetic construct
  source 1..20: mol_type = other DNA
tcaaccgccagattacgtct

SEQ ID NO: 7434 - DNA, 20 bp, synthetic construct
  source 1..20: mol_type = other DNA
cttggtgtcacgcttcagat

SEQ ID NO: 7435 - DNA, 20 bp, synthetic construct
  source 1..20: mol_type = other DNA
gggacagattgaaatgatac

SEQ ID NO: 7436 - DNA, 20 bp, synthetic construct
  source 1..20: mol_type = other DNA
ctgaattggcctgactcgcc

SEQ ID NO: 7437 - DNA, 20 bp, synthetic construct
  source 1..20: mol_type = other DNA
taaccaccggtccgtatgcc

SEQ ID NO: 7438 - DNA, 20 bp, synthetic construct
  source 1..20: mol_type = other DNA
gtgtggtggcgatcgcagtt

SEQ ID NO: 7439 - DNA, 20 bp, synthetic construct
  source 1..20: mol_type = other DNA
gataaagacctttcgcagcg

SEQ ID NO: 7440 - DNA, 20 bp, synthetic construct
  source 1..20: mol_type = other DNA
ggatctgccacgtgtgtgcg

SEQ ID NO: 7441 - DNA, 20 bp, synthetic construct
  source 1..20: mol_type = other DNA
aagatcggaataaactagtg

SEQ ID NO: 7442 - DNA, 20 bp, synthetic construct
  source 1..20: mol_type = other DNA
gttacgacaatccggtcagt

SEQ ID NO: 7443 - DNA, 20 bp, synthetic construct
  source 1..20: mol_type = other DNA
cgcactgttggtagattagg

SEQ ID NO: 7444 - DNA, 20 bp, synthetic construct
  source 1..20: mol_type = other DNA
acgtcttcgtattgcccgtc

SEQ ID NO: 7445 - DNA, 20 bp, synthetic construct
  source 1..20: mol_type = other DNA
gacccgcatccaatattctt

SEQ ID NO: 7446 - DNA, 20 bp, synthetic construct
  source 1..20: mol_type = other DNA
cgttcggagttctcgtgtag

SEQ ID NO: 7447 - DNA, 20 bp, synthetic construct
  source 1..20: mol_type = other DNA
tagggtgatgacgtatgtta

SEQ ID NO: 7448 - DNA, 20 bp, synthetic construct
  source 1..20: mol_type = other DNA
atcatacgatgcatctctga

SEQ ID NO: 7449 - DNA, 20 bp, synthetic construct
  source 1..20: mol_type = other DNA
agaaattgccaggatcaggg

SEQ ID NO: 7450 - DNA, 20 bp, synthetic construct
  source 1..20: mol_type = other DNA
ctaacctggtcttagccgtt

SEQ ID NO: 7451 - DNA, 20 bp, synthetic construct
  source 1..20: mol_type = other DNA
gcagacttgagtataatacc

SEQ ID NO: 7452 - DNA, 20 bp, synthetic construct
  source 1..20: mol_type = other DNA
ccgtcttaaggtctattgtt

SEQ ID NO: 7453 - DNA, 20 bp, synthetic construct
  source 1..20: mol_type = other DNA
tctaacgatttctccgtcgc

SEQ ID NO: 7454 - DNA, 20 bp, synthetic construct
  source 1..20: mol_type = other DNA
ttgtttacgggcttatgaag

SEQ ID NO: 7455 - DNA, 20 bp, synthetic construct
  source 1..20: mol_type = other DNA
accgaaacagctgcgtgtaa

SEQ ID NO: 7456 - DNA, 20 bp, synthetic construct
  source 1..20: mol_type = other DNA
atgctttcggctgcacctca

SEQ ID NO: 7457 - DNA, 20 bp, synthetic construct
  source 1..20: mol_type = other DNA
taacatagagcagtggcagt

SEQ ID NO: 7458 - DNA, 20 bp, synthetic construct
  source 1..20: mol_type = other DNA
gcaatgtgaacatagggtac

SEQ ID NO: 7459 - DNA, 20 bp, synthetic construct
  source 1..20: mol_type = other DNA
gtgacgacacggacgggttg

SEQ ID NO: 7460 - DNA, 20 bp, synthetic construct
  source 1..20: mol_type = other DNA
cccgtgcctttgtttgtgta

SEQ ID NO: 7461 - DNA, 20 bp, synthetic construct
  source 1..20: mol_type = other DNA
taggacatgcgcaactataa

SEQ ID NO: 7462 - DNA, 20 bp, synthetic construct
  source 1..20: mol_type = other DNA
ccggagatgatcggccttgg

SEQ ID NO: 7463 - DNA, 20 bp, synthetic construct
  source 1..20: mol_type = other DNA
tctgtttgcccgattaaatt

SEQ ID NO: 7464 - DNA, 20 bp, synthetic construct
  source 1..20: mol_type = other DNA
gaatattgatgtcgtgttac

SEQ ID NO: 7465 - DNA, 20 bp, synthetic construct
  source 1..20: mol_type = other DNA
tagaaacagtgttgtgccta

SEQ ID NO: 7466 - DNA, 20 bp, synthetic construct
  source 1..20: mol_type = other DNA
ttatctgattgttgtactcg

SEQ ID NO: 7467 - DNA, 20 bp, synthetic construct
  source 1..20: mol_type = other DNA
tgagtcgtattgggccacgt

SEQ ID NO: 7468 - DNA, 20 bp, synthetic construct
  source 1..20: mol_type = other DNA
tcgcgttctgtcactgttgt

SEQ ID NO: 7469 - DNA, 20 bp, synthetic construct
  source 1..20: mol_type = other DNA
tcaaggaaggcttgtcttag

SEQ ID NO: 7470 - DNA, 20 bp, synthetic construct
  source 1..20: mol_type = other DNA
agcaatatacaggtgcaacc

SEQ ID NO: 7471 - DNA, 20 bp, synthetic construct
  source 1..20: mol_type = other DNA
aagttggacaaggccgaact

SEQ ID NO: 7472 - DNA, 20 bp, synthetic construct
  source 1..20: mol_type = other DNA
cgcaagttagtagaggcatt

SEQ ID NO: 7473 - DNA, 20 bp, synthetic construct
  source 1..20: mol_type = other DNA
tttgtgcaggcttccactat

SEQ ID NO: 7474 - DNA, 20 bp, synthetic construct
  source 1..20: mol_type = other DNA
gacgagagagtcctaaatcc

SEQ ID NO: 7475 - DNA, 20 bp, synthetic construct
  source 1..20: mol_type = other DNA
acattacttcacggctggtc

SEQ ID NO: 7476 - DNA, 20 bp, synthetic construct
  source 1..20: mol_type = other DNA
tatctaagctcccgcgatgg

SEQ ID NO: 7477 - DNA, 20 bp, synthetic construct
  source 1..20: mol_type = other DNA
aatttgtcggcctgacatca

SEQ ID NO: 7478 - DNA, 20 bp, synthetic construct
  source 1..20: mol_type = other DNA
ggcgtaaacacgaggatcat

SEQ ID NO: 7479 - DNA, 20 bp, synthetic construct
  source 1..20: mol_type = other DNA
taccacgctactcctaagac

SEQ ID NO: 7480 - DNA, 20 bp, synthetic construct
  source 1..20: mol_type = other DNA
aatgctcttccagaaccttc

SEQ ID NO: 7481 - DNA, 20 bp, synthetic construct
  source 1..20: mol_type = other DNA
cagaatccagcaggaggtat

SEQ ID NO: 7482 - DNA, 20 bp, synthetic construct
  source 1..20: mol_type = other DNA
aatgaggcgccaggcttaga

SEQ ID NO: 7483 - DNA, 20 bp, synthetic construct
  source 1..20: mol_type = other DNA
gatcatcgattgccctttgc

SEQ ID NO: 7484 - DNA, 20 bp, synthetic construct
  source 1..20: mol_type = other DNA
cgtgctatcgagtcatgtta

SEQ ID NO: 7485 - DNA, 20 bp, synthetic construct
  source 1..20: mol_type = other DNA
agccgggaattatcacggca

SEQ ID NO: 7486 - DNA, 20 bp, synthetic construct
  source 1..20: mol_type = other DNA
cactgcgctcttaactatag

SEQ ID NO: 7487 - DNA, 20 bp, synthetic construct
  source 1..20: mol_type = other DNA
ggagacccagaggcgtttgt

SEQ ID NO: 7488 - DNA, 20 bp, synthetic construct
  source 1..20: mol_type = other DNA
gtggcgtaatgattattgcg

SEQ ID NO: 7489 - DNA, 20 bp, synthetic construct
  source 1..20: mol_type = other DNA
ttacagctcagtaatcgtca

SEQ ID NO: 7490 - DNA, 20 bp, synthetic construct
  source 1..20: mol_type = other DNA
gcctagcgatacaaactacg

SEQ ID NO: 7491 - DNA, 20 bp, synthetic construct
  source 1..20: mol_type = other DNA
atactaaccggtgacctact

SEQ ID NO: 7492 - DNA, 20 bp, synthetic construct
  source 1..20: mol_type = other DNA
tccgcccagtacattgatcc

SEQ ID NO: 7493 - DNA, 20 bp, synthetic construct
  source 1..20: mol_type = other DNA
atgcgtggcgtatttgccca

SEQ ID NO: 7494 - DNA, 20 bp, synthetic construct
  source 1..20: mol_type = other DNA
gctggctaagatctttgtaa

SEQ ID NO: 7495 - DNA, 20 bp, synthetic construct
  source 1..20: mol_type = other DNA
aaggcgttccaagggccgag

SEQ ID NO: 7496 - DNA, 20 bp, synthetic construct
  source 1..20: mol_type = other DNA
gtgtatagtggcactcccgg

SEQ ID NO: 7497 - DNA, 20 bp, synthetic construct
  source 1..20: mol_type = other DNA
tagtagaattagtccgggtc

SEQ ID NO: 7498 - DNA, 20 bp, synthetic construct
  source 1..20: mol_type = other DNA
caactggacctaagagtttg

SEQ ID NO: 7499 - DNA, 20 bp, synthetic construct
  source 1..20: mol_type = other DNA
tgactagatctacatagtgc

SEQ ID NO: 7500 - DNA, 20 bp, synthetic construct
  source 1..20: mol_type = other DNA
cagtcattcttgttccctgc

SEQ ID NO: 7501 - DNA, 20 bp, synthetic construct
  source 1..20: mol_type = other DNA
gacacctagtcctgccgcga

SEQ ID NO: 7502 - DNA, 20 bp, synthetic construct
  source 1..20: mol_type = other DNA
aactcgatcggtcatctctg

SEQ ID NO: 7503 - DNA, 20 bp, synthetic construct
  source 1..20: mol_type = other DNA
tacggcctcccaattgtgat

SEQ ID NO: 7504 - DNA, 20 bp, synthetic construct
  source 1..20: mol_type = other DNA
catccagctttaaacattac

SEQ ID NO: 7505 - DNA, 20 bp, synthetic construct
  source 1..20: mol_type = other DNA
ccgaggccgcctcatagtac

SEQ ID NO: 7506 - DNA, 20 bp, synthetic construct
  source 1..20: mol_type = other DNA
catcctcgggtaaacgctca

SEQ ID NO: 7507 - DNA, 20 bp, synthetic construct
  source 1..20: mol_type = other DNA
tgctcgtgacaggtacacaa

SEQ ID NO: 7508 - DNA, 20 bp, synthetic construct
  source 1..20: mol_type = other DNA
gtagactcagcctcttaact

SEQ ID NO: 7509 - DNA, 20 bp, synthetic construct
  source 1..20: mol_type = other DNA
gtataaacctcttgcagacg

SEQ ID NO: 7510 - DNA, 20 bp, synthetic construct
  source 1..20: mol_type = other DNA
aactgcgagaatgatatggc

SEQ ID NO: 7511 - DNA, 20 bp, synthetic construct
  source 1..20: mol_type = other DNA
cggttcgatcttgcgctcag

SEQ ID NO: 7512 - DNA, 20 bp, synthetic construct
  source 1..20: mol_type = other DNA
atggcgaccaatatcagctc

SEQ ID NO: 7513 - DNA, 20 bp, synthetic construct
  source 1..20: mol_type = other DNA
taccttaaagattcccgttc

SEQ ID NO: 7514 - DNA, 20 bp, synthetic construct
  source 1..20: mol_type = other DNA
agcatccgcgtggagccgat

SEQ ID NO: 7515 - DNA, 20 bp, synthetic construct
  source 1..20: mol_type = other DNA
agcgtattcagtccggaaca

SEQ ID NO: 7516 - DNA, 20 bp, synthetic construct
  source 1..20: mol_type = other DNA
cctttcgctttcctattctg

SEQ ID NO: 7517 - DNA, 20 bp, synthetic construct
  source 1..20: mol_type = other DNA
gaaagtaataaccctgtaca

SEQ ID NO: 7518 - DNA, 20 bp, synthetic construct
  source 1..20: mol_type = other DNA
cggaatctgcacagctgaat

SEQ ID NO: 7519 - DNA, 20 bp, synthetic construct
  source 1..20: mol_type = other DNA
gcggacgcgattgcatgcag

SEQ ID NO: 7520 - DNA, 20 bp, synthetic construct
  source 1..20: mol_type = other DNA
gatcctagcgttcgagcgaa

SEQ ID NO: 7521 - DNA, 20 bp, synthetic construct
  source 1..20: mol_type = other DNA
cacacgtcctgtccttggtc

SEQ ID NO: 7522 - DNA, 20 bp, synthetic construct
  source 1..20: mol_type = other DNA
ccaagagcatattcttgttt

SEQ ID NO: 7523 - DNA, 20 bp, synthetic construct
  source 1..20: mol_type = other DNA
cggatgggcctaaccacgta

SEQ ID NO: 7524 - DNA, 20 bp, synthetic construct
  source 1..20: mol_type = other DNA
ggagttgagcgctggtttac

SEQ ID NO: 7525 - DNA, 20 bp, synthetic construct
  source 1..20: mol_type = other DNA
gttatctcggacttaggttt

SEQ ID NO: 7526 - DNA, 20 bp, synthetic construct
  source 1..20: mol_type = other DNA
ctaattccatggtcacacag

SEQ ID NO: 7527 - DNA, 20 bp, synthetic construct
  source 1..20: mol_type = other DNA
tgcgccatacgtttagaaca

SEQ ID NO: 7528 - DNA, 20 bp, synthetic construct
  source 1..20: mol_type = other DNA
caccctcctccgtttagatt

SEQ ID NO: 7529 - DNA, 20 bp, synthetic construct
  source 1..20: mol_type = other DNA
agcacctaccctggtgacgc

SEQ ID NO: 7530 - DNA, 20 bp, synthetic construct
  source 1..20: mol_type = other DNA
ataatgatgttggacgctag

SEQ ID NO: 7531 - DNA, 20 bp, synthetic construct
  source 1..20: mol_type = other DNA
ggtcccggaaagagtaattg

SEQ ID NO: 7532 - DNA, 20 bp, synthetic construct
  source 1..20: mol_type = other DNA
acgctacatcggacccaatt

SEQ ID NO: 7533 - DNA, 20 bp, synthetic construct
  source 1..20: mol_type = other DNA
gatacagtgccttggcctag

SEQ ID NO: 7534 - DNA, 20 bp, synthetic construct
  source 1..20: mol_type = other DNA
tgtattcacagccatggctt

SEQ ID NO: 7535 - DNA, 20 bp, synthetic construct
  source 1..20: mol_type = other DNA
attaatattagcactcgacg

SEQ ID NO: 7536 - DNA, 20 bp, synthetic construct
  source 1..20: mol_type = other DNA
cttgattaggccgccagaat

SEQ ID NO: 7537 - DNA, 20 bp, synthetic construct
  source 1..20: mol_type = other DNA
aatttctaatctacgaccgt

SEQ ID NO: 7538 - DNA, 20 bp, synthetic construct
  source 1..20: mol_type = other DNA
gactcaatgcgagtggacac

SEQ ID NO: 7539 - DNA, 20 bp, synthetic construct
  source 1..20: mol_type = other DNA
cgaatttggccagaaacggc

SEQ ID NO: 7540 - DNA, 20 bp, synthetic construct
  source 1..20: mol_type = other DNA
acatgcatacgaccgtaagc

SEQ ID NO: 7541 - DNA, 20 bp, synthetic construct
  source 1..20: mol_type = other DNA
gcttacaatggatcttgact

SEQ ID NO: 7542 - DNA, 20 bp, synthetic construct
  source 1..20: mol_type = other DNA
gtcatagtttagtccactat

SEQ ID NO: 7543 - DNA, 20 bp, synthetic construct
  source 1..20: mol_type = other DNA
ctgaatggtgtaacggagtt

SEQ ID NO: 7544 - DNA, 20 bp, synthetic construct
  source 1..20: mol_type = other DNA
atactcagatcccgtgcatg

SEQ ID NO: 7545 - DNA, 20 bp, synthetic construct
  source 1..20: mol_type = other DNA
ggacgtcgtcaaactgcttt

SEQ ID NO: 7546 - DNA, 20 bp, synthetic construct
  source 1..20: mol_type = other DNA
gctacatcggttacgcccaa

SEQ ID NO: 7547 - DNA, 20 bp, synthetic construct
  source 1..20: mol_type = other DNA
cattcctagcgagttaagct

SEQ ID NO: 7548 - DNA, 20 bp, synthetic construct
  source 1..20: mol_type = other DNA
agaccctcagttactttaac

SEQ ID NO: 7549 - DNA, 20 bp, synthetic construct
  source 1..20: mol_type = other DNA
gtatgagtgctaagtcttaa

SEQ ID NO: 7550 - DNA, 20 bp, synthetic construct
  source 1..20: mol_type = other DNA
catatgggtaatcgacatcg

SEQ ID NO: 7551 - DNA, 20 bp, synthetic construct
  source 1..20: mol_type = other DNA
agacatgattgcatctacct

SEQ ID NO: 7552 - DNA, 20 bp, synthetic construct
  source 1..20: mol_type = other DNA
gcgcttaactcgattagaca

SEQ ID NO: 7553 - DNA, 20 bp, synthetic construct
  source 1..20: mol_type = other DNA
aattagacggtggagccatc

SEQ ID NO: 7554 - DNA, 20 bp, synthetic construct
  source 1..20: mol_type = other DNA
gcgcttctagtagagttagc

SEQ ID NO: 7555 - DNA, 20 bp, synthetic construct
  source 1..20: mol_type = other DNA
caacggtgtatctatgtact

SEQ ID NO: 7556 - DNA, 20 bp, synthetic construct
  source 1..20: mol_type = other DNA
catcgaatgcgggcggttgc

SEQ ID NO: 7557 - DNA, 20 bp, synthetic construct
  source 1..20: mol_type = other DNA
atataaccctgtgaggagtg

SEQ ID NO: 7558 - DNA, 20 bp, synthetic construct
  source 1..20: mol_type = other DNA
ttaacagacttacaggcttc

SEQ ID NO: 7559 - DNA, 20 bp, synthetic construct
  source 1..20: mol_type = other DNA
gtgccgttgatcgtcgtgtt

SEQ ID NO: 7560 - DNA, 20 bp, synthetic construct
  source 1..20: mol_type = other DNA
tagagtactctgaaggattt

SEQ ID NO: 7561 - DNA, 20 bp, synthetic construct
  source 1..20: mol_type = other DNA
ttaccgtccacggcgtcgta

SEQ ID NO: 7562 - DNA, 20 bp, synthetic construct
  source 1..20: mol_type = other DNA
aatgcgactatcagaaagca

SEQ ID NO: 7563 - DNA, 20 bp, synthetic construct
  source 1..20: mol_type = other DNA
ccctaggcttctcatgggtc

SEQ ID NO: 7564 - DNA, 20 bp, synthetic construct
  source 1..20: mol_type = other DNA
caggcctgccgtttccttgc

SEQ ID NO: 7565 - DNA, 20 bp, synthetic construct
  source 1..20: mol_type = other DNA
ataggtagggtagcacagtg

SEQ ID NO: 7566 - DNA, 20 bp, synthetic construct
  source 1..20: mol_type = other DNA
gcactttgtttcaggccact

SEQ ID NO: 7567 - DNA, 20 bp, synthetic construct
  source 1..20: mol_type = other DNA
tctcgcggcggaaggactat

SEQ ID NO: 7568 - DNA, 20 bp, synthetic construct
  source 1..20: mol_type = other DNA
gctgcagcctatctgctctt

SEQ ID NO: 7569 - DNA, 20 bp, synthetic construct
  source 1..20: mol_type = other DNA
cactcgatcccttgtttcag

SEQ ID NO: 7570 - DNA, 20 bp, synthetic construct
  source 1..20: mol_type = other DNA
gaacgtcaagctgaaataac

SEQ ID NO: 7571 - DNA, 20 bp, synthetic construct
  source 1..20: mol_type = other DNA
ttccacacccattccaaagt

SEQ ID NO: 7572 - DNA, 20 bp, synthetic construct
  source 1..20: mol_type = other DNA
gatcggttgtccgaataaca

SEQ ID NO: 7573 - DNA, 20 bp, synthetic construct
  source 1..20: mol_type = other DNA
actacggatatttcgctagg

SEQ ID NO: 7574 - DNA, 20 bp, synthetic construct
  source 1..20: mol_type = other DNA
cctggcgtgaagagtctctc

SEQ ID NO: 7575 - DNA, 20 bp, synthetic construct
  source 1..20: mol_type = other DNA
ttagagagtcgtcgtaattc

SEQ ID NO: 7576 - DNA, 20 bp, synthetic construct
  source 1..20: mol_type = other DNA
atacgggtggttatcatgga

SEQ ID NO: 7577 - DNA, 20 bp, synthetic construct
  source 1..20: mol_type = other DNA
ccattcgcagacaactccgt

SEQ ID NO: 7578 - DNA, 20 bp, synthetic construct
  source 1..20: mol_type = other DNA
cccgtgaactggatcgccct

SEQ ID NO: 7579 - DNA, 20 bp, synthetic construct
  source 1..20: mol_type = other DNA
taatctacacggttgtccgt

SEQ ID NO: 7580 - DNA, 20 bp, synthetic construct
  source 1..20: mol_type = other DNA
cgaaacgcgctgactctgat

SEQ ID NO: 7581 - DNA, 20 bp, synthetic construct
  source 1..20: mol_type = other DNA
tgcaccaactacgaagccaa

SEQ ID NO: 7582 - DNA, 20 bp, synthetic construct
  source 1..20: mol_type = other DNA
gtggaccttgtattcatata

SEQ ID NO: 7583 - DNA, 20 bp, synthetic construct
  source 1..20: mol_type = other DNA
ttactgcttacttggactgg

SEQ ID NO: 7584 - DNA, 20 bp, synthetic construct
  source 1..20: mol_type = other DNA
aagtaaacgtatcagaagaa

SEQ ID NO: 7585 - DNA, 20 bp, synthetic construct
  source 1..20: mol_type = other DNA
catctatatggcatctcgcg

SEQ ID NO: 7586 - DNA, 20 bp, synthetic construct
  source 1..20: mol_type = other DNA
gtgtaactcatctttagatc

SEQ ID NO: 7587 - DNA, 20 bp, synthetic construct
  source 1..20: mol_type = other DNA
tacaagccgtcacctcttat

SEQ ID NO: 7588 - DNA, 20 bp, synthetic construct
  source 1..20: mol_type = other DNA
gtacgagaccgctgtaggta

SEQ ID NO: 7589 - DNA, 20 bp, synthetic construct
  source 1..20: mol_type = other DNA
agaaaccgtatcgcgtggct

SEQ ID NO: 7590 - DNA, 20 bp, synthetic construct
  source 1..20: mol_type = other DNA
catcttcacctgtcaccctg

SEQ ID NO: 7591 - DNA, 20 bp, synthetic construct
  source 1..20: mol_type = other DNA
ctcggacgtagcgtcttatc

SEQ ID NO: 7592 - DNA, 20 bp, synthetic construct
  source 1..20: mol_type = other DNA
actcatctatctgtcctact

SEQ ID NO: 7593 - DNA, 20 bp, synthetic construct
  source 1..20: mol_type = other DNA
cttcgcaacatagtggccgg

SEQ ID NO: 7594 - DNA, 20 bp, synthetic construct
  source 1..20: mol_type = other DNA
gtgcacacaacatagctctc

SEQ ID NO: 7595 - DNA, 20 bp, synthetic construct
  source 1..20: mol_type = other DNA
aaccactcgctcacctatag

SEQ ID NO: 7596 - DNA, 20 bp, synthetic construct
  source 1..20: mol_type = other DNA
gcgtcggaacgacgtcgata

SEQ ID NO: 7597 - DNA, 20 bp, synthetic construct
  source 1..20: mol_type = other DNA
accacgtaaccggtaaccaa

SEQ ID NO: 7598 - DNA, 20 bp, synthetic construct
  source 1..20: mol_type = other DNA
tcctactccacaagtcgaag

SEQ ID NO: 7599 - DNA, 20 bp, synthetic construct
  source 1..20: mol_type = other DNA
aagaagctgaatgaaatccg

SEQ ID NO: 7600 - DNA, 20 bp, synthetic construct
  source 1..20: mol_type = other DNA
gaatcgtcatgcatttcatg

SEQ ID NO: 7601 - DNA, 20 bp, synthetic construct
  source 1..20: mol_type = other DNA
gggtgataccagtgacccgt

SEQ ID NO: 7602 - DNA, 20 bp, synthetic construct
  source 1..20: mol_type = other DNA
gaggatcgcaatcatccaat

SEQ ID NO: 7603 - DNA, 20 bp, synthetic construct
  source 1..20: mol_type = other DNA
ctcaccctacaatccaccaa

SEQ ID NO: 7604 - DNA, 20 bp, synthetic construct
  source 1..20: mol_type = other DNA
cccaggcacagatgttcgta

SEQ ID NO: 7605 - DNA, 20 bp, synthetic construct
  source 1..20: mol_type = other DNA
tctacagaactcgctactgt

SEQ ID NO: 7606 - DNA, 20 bp, synthetic construct
  source 1..20: mol_type = other DNA
acgtcaatgctatcctcggc

SEQ ID NO: 7607 - DNA, 20 bp, synthetic construct
  source 1..20: mol_type = other DNA
tagtgctcggaccctcacgc

SEQ ID NO: 7608 - DNA, 20 bp, synthetic construct
  source 1..20: mol_type = other DNA
aggtctgcaatttaatccgg

SEQ ID NO: 7609 - DNA, 20 bp, synthetic construct
  source 1..20: mol_type = other DNA
tatcgaacccgcgaatagta

SEQ ID NO: 7610 - DNA, 20 bp, synthetic construct
  source 1..20: mol_type = other DNA
caggtttggagctagtagtg

SEQ ID NO: 7611 - DNA, 20 bp, synthetic construct
  source 1..20: mol_type = other DNA
gacctactagttctgttacc

SEQ ID NO: 7612 - DNA, 20 bp, synthetic construct
  source 1..20: mol_type = other DNA
tcatagctcatatatctcag

SEQ ID NO: 7613 - DNA, 20 bp, synthetic construct
  source 1..20: mol_type = other DNA
gtcggcgaatacgaacggct

SEQ ID NO: 7614 - DNA, 20 bp, synthetic construct
  source 1..20: mol_type = other DNA
acactgggcggttaccacgc

SEQ ID NO: 7615 - DNA, 20 bp, synthetic construct
  source 1..20: mol_type = other DNA
agggcaatggatcgaccact

SEQ ID NO: 7616 - DNA, 20 bp, synthetic construct
  source 1..20: mol_type = other DNA
tgttcttcctcaaccgaggc

SEQ ID NO: 7617 - DNA, 20 bp, synthetic construct
  source 1..20: mol_type = other DNA
atccctaccgtcatagtcat

SEQ ID NO: 7618 - DNA, 20 bp, synthetic construct
  source 1..20: mol_type = other DNA
gaaatctactaatcgaatgg

SEQ ID NO: 7619 - DNA, 20 bp, synthetic construct
  source 1..20: mol_type = other DNA
cgctgattcggccgtcatat

SEQ ID NO: 7620 - DNA, 20 bp, synthetic construct
  source 1..20: mol_type = other DNA
attgtgcatgctacgtacgc

SEQ ID NO: 7621 - DNA, 20 bp, synthetic construct
  source 1..20: mol_type = other DNA
gcgagaatcagggttatctc

SEQ ID NO: 7622 - DNA, 20 bp, synthetic construct
  source 1..20: mol_type = other DNA
tggctcgaaccaggttcaaa

SEQ ID NO: 7623 - DNA, 20 bp, synthetic construct
  source 1..20: mol_type = other DNA
tctggtttgccaattcgatg

SEQ ID NO: 7624 - DNA, 20 bp, synthetic construct
  source 1..20: mol_type = other DNA
cgacattaaccctactgagg

SEQ ID NO: 7625 - DNA, 20 bp, synthetic construct
  source 1..20: mol_type = other DNA
gaatacctggtcaatccaga

SEQ ID NO: 7626 - DNA, 20 bp, synthetic construct
  source 1..20: mol_type = other DNA
gtgtttagggcgtcgggaga

SEQ ID NO: 7627 - DNA, 20 bp, synthetic construct
  source 1..20: mol_type = other DNA
tgcacaatcctaaatgccgc

SEQ ID NO: 7628 - DNA, 20 bp, synthetic construct
  source 1..20: mol_type = other DNA
gcatctgattgctttctcaa

SEQ ID NO: 7629 - DNA, 20 bp, synthetic construct
  source 1..20: mol_type = other DNA
tattgtaagcataatggctg

SEQ ID NO: 7630 - DNA, 20 bp, synthetic construct
  source 1..20: mol_type = other DNA
taaagcatggtagacacttc

SEQ ID NO: 7631 - DNA, 20 bp, synthetic construct
  source 1..20: mol_type = other DNA
tgaagtacagcttggatcgc

SEQ ID NO: 7632 - DNA, 20 bp, synthetic construct
  source 1..20: mol_type = other DNA
ctagggacggcagaggttta

SEQ ID NO: 7633 - DNA, 20 bp, synthetic construct
  source 1..20: mol_type = other DNA
agcgcatttcctgggttggt

SEQ ID NO: 7634 - DNA, 20 bp, synthetic construct
  source 1..20: mol_type = other DNA
acaaataagctaaccggtcc

SEQ ID NO: 7635 - DNA, 20 bp, synthetic construct
  source 1..20: mol_type = other DNA
gacggtaaagagcactgagt

SEQ ID NO: 7636 - DNA, 20 bp, synthetic construct
  source 1..20: mol_type = other DNA
agtcgcagtgcaggctcgta

SEQ ID NO: 7637 - DNA, 20 bp, synthetic construct
  source 1..20: mol_type = other DNA
cttgtatcaatcgtatcggg

SEQ ID NO: 7638 - DNA, 20 bp, synthetic construct
  source 1..20: mol_type = other DNA
cttaggcatacgtagcctcc

SEQ ID NO: 7639 - DNA, 20 bp, synthetic construct
  source 1..20: mol_type = other DNA
tatcaggtaacctgagtatg

SEQ ID NO: 7640 - DNA, 20 bp, synthetic construct
  source 1..20: mol_type = other DNA
tgctactcaagctgaacgcg

SEQ ID NO: 7641 - DNA, 20 bp, synthetic construct
  source 1..20: mol_type = other DNA
cctgttgctagcaaggttgg

SEQ ID NO: 7642 - DNA, 20 bp, synthetic construct
  source 1..20: mol_type = other DNA
ttacttgcctcactttacaa

SEQ ID NO: 7643 - DNA, 20 bp, synthetic construct
  source 1..20: mol_type = other DNA
cgtgtcgcacgcatataagg

SEQ ID NO: 7644 - DNA, 20 bp, synthetic construct
  source 1..20: mol_type = other DNA
cgggtggtggagtatcgcgt

SEQ ID NO: 7645 - DNA, 20 bp, synthetic construct
  source 1..20: mol_type = other DNA
aaagtatgcttgcagatcta

SEQ ID NO: 7646 - DNA, 20 bp, synthetic construct
  source 1..20: mol_type = other DNA
aataaattgcggagcatcta

SEQ ID NO: 7647 - DNA, 20 bp, synthetic construct
  source 1..20: mol_type = other DNA
ggatgcctaacatgtgatct

SEQ ID NO: 7648 - DNA, 20 bp, synthetic construct
  source 1..20: mol_type = other DNA
tggatacaaaccctctagta

SEQ ID NO: 7649 - DNA, 20 bp, synthetic construct
  source 1..20: mol_type = other DNA
tgatggcttcaattgttcga

SEQ ID NO: 7650 - DNA, 20 bp, synthetic construct
  source 1..20: mol_type = other DNA
gctcgtctttgctctgtcgt

SEQ ID NO: 7651 - DNA, 20 bp, synthetic construct
  source 1..20: mol_type = other DNA
ccaaagtttcttacgctgtg

SEQ ID NO: 7652 - DNA, 20 bp, synthetic construct
  source 1..20: mol_type = other DNA
ttcctcgcaggatgtatgaa

SEQ ID NO: 7653 - DNA, 20 bp, synthetic construct
  source 1..20: mol_type = other DNA
gtggcgagtcacttacctta

SEQ ID NO: 7654 - DNA, 20 bp, synthetic construct
  source 1..20: mol_type = other DNA
gggtaagcatctcagcctga

SEQ ID NO: 7655 - DNA, 20 bp, synthetic construct
  source 1..20: mol_type = other DNA
tgtaacccgtgttgtaggag

SEQ ID NO: 7656 - DNA, 20 bp, synthetic construct
  source 1..20: mol_type = other DNA
tcaccaattgcactgaacag

SEQ ID NO: 7657 - DNA, 20 bp, synthetic construct
  source 1..20: mol_type = other DNA
tactgtacggtgacagaaat

SEQ ID NO: 7658 - DNA, 20 bp, synthetic construct
  source 1..20: mol_type = other DNA
aacagacgcggaacctccag

SEQ ID NO: 7659 - DNA, 20 bp, synthetic construct
  source 1..20: mol_type = other DNA
cagggccctaatcacggtcc

SEQ ID NO: 7660 - DNA, 20 bp, synthetic construct
  source 1..20: mol_type = other DNA
aacaagacccatataccatt

SEQ ID NO: 7661 - DNA, 20 bp, synthetic construct
  source 1..20: mol_type = other DNA
gaaggaatgcacaaccagca

SEQ ID NO: 7662 - DNA, 20 bp, synthetic construct
  source 1..20: mol_type = other DNA
atatcttgcgacacgcgtct

SEQ ID NO: 7663 - DNA, 20 bp, synthetic construct
  source 1..20: mol_type = other DNA
gtcgagataaattaacgagt

SEQ ID NO: 7664 - DNA, 20 bp, synthetic construct
  source 1..20: mol_type = other DNA
aatagcaaggcattatgatg

SEQ ID NO: 7665 - DNA, 20 bp, synthetic construct
  source 1..20: mol_type = other DNA
atatggattcccatctgctt

SEQ ID NO: 7666 - DNA, 20 bp, synthetic construct
  source 1..20: mol_type = other DNA
agtaaggcccttggatacaa

SEQ ID NO: 7667 - DNA, 20 bp, synthetic construct
  source 1..20: mol_type = other DNA
ggcatcgggtttcttaacgc

SEQ ID NO: 7668 - DNA, 20 bp, synthetic construct
  source 1..20: mol_type = other DNA
aatagaacctcctatcctcg

SEQ ID NO: 7669 - DNA, 20 bp, synthetic construct
  source 1..20: mol_type = other DNA
gtgagactacgggctggtgc

SEQ ID NO: 7670 - DNA, 20 bp, synthetic construct
  source 1..20: mol_type = other DNA
tccgagaagcagtaacgcac

SEQ ID NO: 7671 - DNA, 20 bp, synthetic construct
  source 1..20: mol_type = other DNA
gggcatgtagatttatcttg

SEQ ID NO: 7672 - DNA, 20 bp, synthetic construct
  source 1..20: mol_type = other DNA
ggtcctagtaatcacaaatc

SEQ ID NO: 7673 - DNA, 20 bp, synthetic construct
  source 1..20: mol_type = other DNA
accagggtcaggtcattctg

SEQ ID NO: 7674 - DNA, 20 bp, synthetic construct
  source 1..20: mol_type = other DNA
aagccgtaacatgagtccaa

SEQ ID NO: 7675 - DNA, 20 bp, synthetic construct
  source 1..20: mol_type = other DNA
cacatctcactattcggccg

SEQ ID NO: 7676 - DNA, 20 bp, synthetic construct
  source 1..20: mol_type = other DNA
gtctgtccggtgaagcggtt

SEQ ID NO: 7677 - DNA, 20 bp, synthetic construct
  source 1..20: mol_type = other DNA
tgtcaggttagcagccgcca

SEQ ID NO: 7678 - DNA, 20 bp, synthetic construct
  source 1..20: mol_type = other DNA
ccgttacgtaggaaggccct

SEQ ID NO: 7679 - DNA, 20 bp, synthetic construct
  source 1..20: mol_type = other DNA
aggagtgagcgtagtgccgc

SEQ ID NO: 7680 - DNA, 20 bp, synthetic construct
  source 1..20: mol_type = other DNA
tgaccgtaagggctcaatga

SEQ ID NO: 7681 - DNA, 20 bp, synthetic construct
  source 1..20: mol_type = other DNA
cgttgcgtctgtaagcggtg

SEQ ID NO: 7682 - DNA, 20 bp, synthetic construct
  source 1..20: mol_type = other DNA
acatgaaagcgcgcggtcat

SEQ ID NO: 7683 - DNA, 20 bp, synthetic construct
  source 1..20: mol_type = other DNA
aagtgcgctatgctgtggaa

SEQ ID NO: 7684 - DNA, 20 bp, synthetic construct
  source 1..20: mol_type = other DNA
gcgtaatataagtcttggca

SEQ ID NO: 7685 - DNA, 20 bp, synthetic construct
  source 1..20: mol_type = other DNA
ggaggaggcctatatttgta

SEQ ID NO: 7686 - DNA, 20 bp, synthetic construct
  source 1..20: mol_type = other DNA
aggtttacactgagacatcc

SEQ ID NO: 7687 - DNA, 20 bp, synthetic construct
  source 1..20: mol_type = other DNA
tcggcgtcactgcaaaccac

SEQ ID NO: 7688 - DNA, 20 bp, synthetic construct
  source 1..20: mol_type = other DNA
tttccaggtcgcaagtacgc

SEQ ID NO: 7689 - DNA, 20 bp, synthetic construct
  source 1..20: mol_type = other DNA
tagtatgaaacgatcatcga

SEQ ID NO: 7690 - DNA, 20 bp, synthetic construct
  source 1..20: mol_type = other DNA
tgatgcgtgcaattgttaat

SEQ ID NO: 7691 - DNA, 20 bp, synthetic construct
  source 1..20: mol_type = other DNA
gaagttactcggtcctcgga

SEQ ID NO: 7692 - DNA, 20 bp, synthetic construct
  source 1..20: mol_type = other DNA
gaaggtactatagggtgatt

SEQ ID NO: 7693 - DNA, 20 bp, synthetic construct
  source 1..20: mol_type = other DNA
tactagcctgtcacgatgat

SEQ ID NO: 7694 - DNA, 20 bp, synthetic construct
  source 1..20: mol_type = other DNA
acaagtggtataccacctct

SEQ ID NO: 7695 - DNA, 20 bp, synthetic construct
  source 1..20: mol_type = other DNA
gtcagtccttaacttatctc

SEQ ID NO: 7696 - DNA, 20 bp, synthetic construct
  source 1..20: mol_type = other DNA
tttgttacgagaggtgtccc

SEQ ID NO: 7697 - DNA, 20 bp, synthetic construct
  source 1..20: mol_type = other DNA
ctgggataggtcttagacgc

SEQ ID NO: 7698 - DNA, 20 bp, synthetic construct
  source 1..20: mol_type = other DNA
ctaaatgtacggtctagctt

SEQ ID NO: 7699 - DNA, 20 bp, synthetic construct
  source 1..20: mol_type = other DNA
cttattgggtggcctcggcc

SEQ ID NO: 7700 - DNA, 20 bp, synthetic construct
  source 1..20: mol_type = other DNA
gaaagccacgtagatttaca

SEQ ID NO: 7701 - DNA, 20 bp, synthetic construct
  source 1..20: mol_type = other DNA
tgcggctagcgggctatgtt

SEQ ID NO: 7702 - DNA, 20 bp, synthetic construct
  source 1..20: mol_type = other DNA
actctcgacttctaaagaaa

SEQ ID NO: 7703 - DNA, 20 bp, synthetic construct
  source 1..20: mol_type = other DNA
aaacgctctggcgagggtgc

SEQ ID NO: 7704 - DNA, 20 bp, synthetic construct
  source 1..20: mol_type = other DNA
attaaacgcgaccatttgga

SEQ ID NO: 7705 - DNA, 20 bp, synthetic construct
  source 1..20: mol_type = other DNA
actgcgtatacgagggcgca

SEQ ID NO: 7706 - DNA, 20 bp, synthetic construct
  source 1..20: mol_type = other DNA
atacagctagtgccataagg

SEQ ID NO: 7707 - DNA, 20 bp, synthetic construct
  source 1..20: mol_type = other DNA
attctgagcattaaatagcg

SEQ ID NO: 7708 - DNA, 20 bp, synthetic construct
  source 1..20: mol_type = other DNA
tccgtacggctaaggcacct

SEQ ID NO: 7709 - DNA, 20 bp, synthetic construct
  source 1..20: mol_type = other DNA
cagtatggacatgccagaca

SEQ ID NO: 7710 - DNA, 20 bp, synthetic construct
  source 1..20: mol_type = other DNA
ggtcgcggttcctattcatg

SEQ ID NO: 7711 - DNA, 20 bp, synthetic construct
  source 1..20: mol_type = other DNA
tgacatacaaatgcttgcat

SEQ ID NO: 7712 - DNA, 20 bp, synthetic construct
  source 1..20: mol_type = other DNA
atcaccgaatcgctagcata

SEQ ID NO: 7713 - DNA, 20 bp, synthetic construct
  source 1..20: mol_type = other DNA
aataaacttgaagtgagtgc

SEQ ID NO: 7714 - DNA, 20 bp, synthetic construct
  source 1..20: mol_type = other DNA
ttattggagaccgccgttgt

SEQ ID NO: 7715 - DNA, 20 bp, synthetic construct
  source 1..20: mol_type = other DNA
gcgccatgatacagttctac

SEQ ID NO: 7716 - DNA, 20 bp, synthetic construct
  source 1..20: mol_type = other DNA
ggctcttcctgtaatacgca

SEQ ID NO: 7717 - DNA, 20 bp, synthetic construct
  source 1..20: mol_type = other DNA
tgatgtcccattgattctcc

SEQ ID NO: 7718 - DNA, 20 bp, synthetic construct
  source 1..20: mol_type = other DNA
actgtgtgattgtacgatat

SEQ ID NO: 7719 - DNA, 20 bp, synthetic construct
  source 1..20: mol_type = other DNA
tccaaatgttcggaaggtag

SEQ ID NO: 7720 - DNA, 20 bp, synthetic construct
  source 1..20: mol_type = other DNA
gatgtagatcaggatgatcg

SEQ ID NO: 7721 - DNA, 20 bp, synthetic construct
  source 1..20: mol_type = other DNA
cgcatcagacttgaggagct

SEQ ID NO: 7722 - DNA, 20 bp, synthetic construct
  source 1..20: mol_type = other DNA
ctcgggagtggctctaccct

SEQ ID NO: 7723 - DNA, 20 bp, synthetic construct
  source 1..20: mol_type = other DNA
agggtgtaagaacctaaaca

SEQ ID NO: 7724 - DNA, 20 bp, synthetic construct
  source 1..20: mol_type = other DNA
tagacgaaccggaaggcttc

SEQ ID NO: 7725 - DNA, 20 bp, synthetic construct
  source 1..20: mol_type = other DNA
ccacccatgaggacctgatt

SEQ ID NO: 7726 - DNA, 20 bp, synthetic construct
  source 1..20: mol_type = other DNA
gttgacgcacagctaggtag

SEQ ID NO: 7727 - DNA, 20 bp, synthetic construct
  source 1..20: mol_type = other DNA
atgttctccgcgtatcgatt

SEQ ID NO: 7728 - DNA, 20 bp, synthetic construct
  source 1..20: mol_type = other DNA
tagactgctatcaatcccgc

SEQ ID NO: 7729 - DNA, 20 bp, synthetic construct
  source 1..20: mol_type = other DNA
cacacaactaagtatcaaca

SEQ ID NO: 7730 - DNA, 20 bp, synthetic construct
  source 1..20: mol_type = other DNA
tagttgttgcccacggctgg

SEQ ID NO: 7731 - DNA, 20 bp, synthetic construct
  source 1..20: mol_type = other DNA
gttgaacggacgccgagacc

SEQ ID NO: 7732 - DNA, 20 bp, synthetic construct
  source 1..20: mol_type = other DNA
ggacattgccgccaacggtc

SEQ ID NO: 7733 - DNA, 20 bp, synthetic construct
  source 1..20: mol_type = other DNA
catatgcctcgccttgtcat

SEQ ID NO: 7734 - DNA, 20 bp, synthetic construct
  source 1..20: mol_type = other DNA
cttctagcgcatatgctggt

SEQ ID NO: 7735 - DNA, 20 bp, synthetic construct
  source 1..20: mol_type = other DNA
aaatacgtgcgccagtacgt

SEQ ID NO: 7736 - DNA, 20 bp, synthetic construct
  source 1..20: mol_type = other DNA
ccgtatgcaaggtataaacc

SEQ ID NO: 7737 - DNA, 20 bp, synthetic construct
  source 1..20: mol_type = other DNA
tgcagacattcggagaaacc

SEQ ID NO: 7738 - DNA, 20 bp, synthetic construct
  source 1..20: mol_type = other DNA
actctactagaatactgtac

SEQ ID NO: 7739 - DNA, 20 bp, synthetic construct
  source 1..20: mol_type = other DNA
tttacacacgcctacgacat

SEQ ID NO: 7740 - DNA, 20 bp, synthetic construct
  source 1..20: mol_type = other DNA
cttgagctcacgtaatgata

SEQ ID NO: 7741 - DNA, 20 bp, synthetic construct
  source 1..20: mol_type = other DNA
tcgtctaattcatataggca

SEQ ID NO: 7742 - DNA, 20 bp, synthetic construct
  source 1..20: mol_type = other DNA
agtgtcatagcatttatggg

SEQ ID NO: 7743 - DNA, 20 bp, synthetic construct
  source 1..20: mol_type = other DNA
ctgcttacgaccttgtggaa

SEQ ID NO: 7744 - DNA, 20 bp, synthetic construct
  source 1..20: mol_type = other DNA
tatcacaggtcccgattacc

SEQ ID NO: 7745 - DNA, 20 bp, synthetic construct
  source 1..20: mol_type = other DNA
ggttgtgtgtatgtgcagta

SEQ ID NO: 7746 - DNA, 20 bp, synthetic construct
  source 1..20: mol_type = other DNA
ctacaggcgctctgtagggc

SEQ ID NO: 7747 - DNA, 20 bp, synthetic construct
  source 1..20: mol_type = other DNA
ccaagatcctccacaggatt

SEQ ID NO: 7748 - DNA, 20 bp, synthetic construct
  source 1..20: mol_type = other DNA
acgccatctagccgaatcct

SEQ ID NO: 7749 - DNA, 20 bp, synthetic construct
  source 1..20: mol_type = other DNA
caccgacgaaggtcacgaag

SEQ ID NO: 7750 - DNA, 20 bp, synthetic construct
  source 1..20: mol_type = other DNA
agacacactagacaccacat

SEQ ID NO: 7751 - DNA, 20 bp, synthetic construct
  source 1..20: mol_type = other DNA
cgaagatcatactcacgcac

SEQ ID NO: 7752 - DNA, 20 bp, synthetic construct
  source 1..20: mol_type = other DNA
ttgcgaatcggtacatggtg

SEQ ID NO: 7753 - DNA, 20 bp, synthetic construct
  source 1..20: mol_type = other DNA
aggttcacctgatcgtagtt

SEQ ID NO: 7754 - DNA, 20 bp, synthetic construct
  source 1..20: mol_type = other DNA
ctcctccttgaatgatgcgg

SEQ ID NO: 7755 - DNA, 20 bp, synthetic construct
  source 1..20: mol_type = other DNA
gcggacgtcctattggtgta

SEQ ID NO: 7756 - DNA, 20 bp, synthetic construct
  source 1..20: mol_type = other DNA
tgttacatgccagcctactc

SEQ ID NO: 7757 - DNA, 20 bp, synthetic construct
  source 1..20: mol_type = other DNA
gtctccataaggctaacagc

SEQ ID NO: 7758 - DNA, 20 bp, synthetic construct
  source 1..20: mol_type = other DNA
cagcaaacagtttagagagg

SEQ ID NO: 7759 - DNA, 20 bp, synthetic construct
  source 1..20: mol_type = other DNA
cgcgaagtacgaatagggtt

SEQ ID NO: 7760 - DNA, 20 bp, synthetic construct
  source 1..20: mol_type = other DNA
agttgggagtgcctgagcgg

SEQ ID NO: 7761 - DNA, 20 bp, synthetic construct
  source 1..20: mol_type = other DNA
caccctgcactcgacggtct

SEQ ID NO: 7762 - DNA, 20 bp, synthetic construct
  source 1..20: mol_type = other DNA
gtgactttctgtaatggcta

SEQ ID NO: 7763 - DNA, 20 bp, synthetic construct
  source 1..20: mol_type = other DNA
tatcggtggtatagacccag

SEQ ID NO: 7764 - DNA, 20 bp, synthetic construct
  source 1..20: mol_type = other DNA
cgtgcgttctccacaagttt

SEQ ID NO: 7765 - DNA, 20 bp, synthetic construct
  source 1..20: mol_type = other DNA
ttgcgccgaccgagcatcat

SEQ ID NO: 7766 - DNA, 20 bp, synthetic construct
  source 1..20: mol_type = other DNA
tctcgattgatcaacgctga

SEQ ID NO: 7767 - DNA, 20 bp, synthetic construct
  source 1..20: mol_type = other DNA
tcgtgtctgcatagaacgtc

SEQ ID NO: 7768 - DNA, 20 bp, synthetic construct
  source 1..20: mol_type = other DNA
gttccgatcacctcctactg

SEQ ID NO: 7769 - DNA, 20 bp, synthetic construct
  source 1..20: mol_type = other DNA
cagatattcgagacttatct

SEQ ID NO: 7770 - DNA, 20 bp, synthetic construct
  source 1..20: mol_type = other DNA
agcagggccgatatatttgt

SEQ ID NO: 7771 - DNA, 20 bp, synthetic construct
  source 1..20: mol_type = other DNA
cttacgccgatttaagtgta

SEQ ID NO: 7772 - DNA, 20 bp, synthetic construct
  source 1..20: mol_type = other DNA
ccgggattgtaatcaagtag

SEQ ID NO: 7773 - DNA, 20 bp, synthetic construct
  source 1..20: mol_type = other DNA
tagctttcgacacgttgcca

SEQ ID NO: 7774 - DNA, 20 bp, synthetic construct
  source 1..20: mol_type = other DNA
gtttaattcgatgacggttg

SEQ ID NO: 7775 - DNA, 20 bp, synthetic construct
  source 1..20: mol_type = other DNA
aacaatctcttcttccagtg

SEQ ID NO: 7776 - DNA, 20 bp, synthetic construct
  source 1..20: mol_type = other DNA
cgagctatgcgaggcaccta

SEQ ID NO: 7777 - DNA, 20 bp, synthetic construct
  source 1..20: mol_type = other DNA
gactgaacgtttgtatcacc

SEQ ID NO: 7778 - DNA, 20 bp, synthetic construct
  source 1..20: mol_type = other DNA
gtcacgttcaggcacagaaa

SEQ ID NO: 7779 - DNA, 20 bp, synthetic construct
  source 1..20: mol_type = other DNA
gctgttgctcaatgattggc

SEQ ID NO: 7780 - DNA, 20 bp, synthetic construct
  source 1..20: mol_type = other DNA
agaagaggtcatctaataag

SEQ ID NO: 7781 - DNA, 20 bp, synthetic construct
  source 1..20: mol_type = other DNA
tccgagaattgtgcaggtgc

SEQ ID NO: 7782 - DNA, 20 bp, synthetic construct
  source 1..20: mol_type = other DNA
gtcttatgataccacgtaaa

SEQ ID NO: 7783 - DNA, 20 bp, synthetic construct
  source 1..20: mol_type = other DNA
taagtcgagggttggatcct

SEQ ID NO: 7784 - DNA, 20 bp, synthetic construct
  source 1..20: mol_type = other DNA
taccgcgcggtttagttgtg

SEQ ID NO: 7785 - DNA, 20 bp, synthetic construct
  source 1..20: mol_type = other DNA
gggcccattcgttgaacccg

SEQ ID NO: 7786 - DNA, 20 bp, synthetic construct
  source 1..20: mol_type = other DNA
tctaacctgcacctacacaa

SEQ ID NO: 7787 - DNA, 20 bp, synthetic construct
  source 1..20: mol_type = other DNA
tactcctcttagctgcccag

SEQ ID NO: 7788 - DNA, 20 bp, synthetic construct
  source 1..20: mol_type = other DNA
caggtaagtcggcgcctgtc

SEQ ID NO: 7789 - DNA, 20 bp, synthetic construct
  source 1..20: mol_type = other DNA
gtagtaactgctcggctggg

SEQ ID NO: 7790 - DNA, 20 bp, synthetic construct
  source 1..20: mol_type = other DNA
tacaacttgtcgtcaaccca

SEQ ID NO: 7791 - DNA, 20 bp, synthetic construct
  source 1..20: mol_type = other DNA
agcgctaacgtggtttcact

SEQ ID NO: 7792 - DNA, 20 bp, synthetic construct
  source 1..20: mol_type = other DNA
cacgacttcaccagtaggat

SEQ ID NO: 7793 - DNA, 20 bp, synthetic construct
  source 1..20: mol_type = other DNA
tcgaagtagggtctgtggtt

SEQ ID NO: 7794 - DNA, 20 bp, synthetic construct
  source 1..20: mol_type = other DNA
ggtggtgcattgcaaattta

SEQ ID NO: 7795 - DNA, 20 bp, synthetic construct
  source 1..20: mol_type = other DNA
tcgaatggccgggtctttcc

SEQ ID NO: 7796 - DNA, 20 bp, synthetic construct
  source 1..20: mol_type = other DNA
agctgttacggtacccgtca

SEQ ID NO: 7797 - DNA, 20 bp, synthetic construct
  source 1..20: mol_type = other DNA
atgtttgggacaatttgagg

SEQ ID NO: 7798 - DNA, 20 bp, synthetic construct
  source 1..20: mol_type = other DNA
tgaatgtacccgttccagta

SEQ ID NO: 7799 - DNA, 20 bp, synthetic construct
  source 1..20: mol_type = other DNA
gcatatgtagcctggaatcg

SEQ ID NO: 7800 - DNA, 20 bp, synthetic construct
  source 1..20: mol_type = other DNA
gagctaagggtccggtatga

SEQ ID NO: 7801 - DNA, 20 bp, synthetic construct
  source 1..20: mol_type = other DNA
ggagtccgtgacatacgatc

SEQ ID NO: 7802 - DNA, 20 bp, synthetic construct
  source 1..20: mol_type = other DNA
gattgccttcttattggcgc

SEQ ID NO: 7803 - DNA, 20 bp, synthetic construct
  source 1..20: mol_type = other DNA
ccgacaacattggaggagaa

SEQ ID NO: 7804 - DNA, 20 bp, synthetic construct
  source 1..20: mol_type = other DNA
gctttccatccatgatatag

SEQ ID NO: 7805 - DNA, 20 bp, synthetic construct
  source 1..20: mol_type = other DNA
aggtgcactccgtagttggg

SEQ ID NO: 7806 - DNA, 20 bp, synthetic construct
  source 1..20: mol_type = other DNA
agagggacagccttagtgtg

SEQ ID NO: 7807 - DNA, 20 bp, synthetic construct
  source 1..20: mol_type = other DNA
tagacgcggtctgattagcc

SEQ ID NO: 7808 - DNA, 20 bp, synthetic construct
  source 1..20: mol_type = other DNA
gactttcatatgaccgaaca

SEQ ID NO: 7809 - DNA, 20 bp, synthetic construct
  source 1..20: mol_type = other DNA
gcggatttagaccaggacga

SEQ ID NO: 7810 - DNA, 20 bp, synthetic construct
  source 1..20: mol_type = other DNA
tctgaatggcgtttcattgc

SEQ ID NO: 7811 - DNA, 20 bp, synthetic construct
  source 1..20: mol_type = other DNA
cgggagctcacacccgacaa

SEQ ID NO: 7812 - DNA, 20 bp, synthetic construct
  source 1..20: mol_type = other DNA
gcactaggctcaattgaagc

SEQ ID NO: 7813 - DNA, 20 bp, synthetic construct
  source 1..20: mol_type = other DNA
atgtaatgcctagcaaacgt

SEQ ID NO: 7814 - DNA, 20 bp, synthetic construct
  source 1..20: mol_type = other DNA
atggcctccgtggaaattaa

SEQ ID NO: 7815 - DNA, 20 bp, synthetic construct
  source 1..20: mol_type = other DNA
acgtgcagataggttccact

SEQ ID NO: 7816 - DNA, 20 bp, synthetic construct
  source 1..20: mol_type = other DNA
ctactctccgtgctccggtc

SEQ ID NO: 7817 - DNA, 20 bp, synthetic construct
  source 1..20: mol_type = other DNA
cgggcccagccgattataag

SEQ ID NO: 7818 - DNA, 20 bp, synthetic construct
  source 1..20: mol_type = other DNA
tttctaaggtgttacgcttc

SEQ ID NO: 7819 - DNA, 20 bp, synthetic construct
  source 1..20: mol_type = other DNA
atggttagatgactcgaatg

SEQ ID NO: 7820 - DNA, 20 bp, synthetic construct
  source 1..20: mol_type = other DNA
aagagcaagcgacactacag

SEQ ID NO: 7821 - DNA, 20 bp, synthetic construct
  source 1..20: mol_type = other DNA
gtgcgatcgcacttacagca

SEQ ID NO: 7822 - DNA, 20 bp, synthetic construct
  source 1..20: mol_type = other DNA
aatggctttggataggagct

SEQ ID NO: 7823 - DNA, 20 bp, synthetic construct
  source 1..20: mol_type = other DNA
cgtgatatgcgccatgtacc

SEQ ID NO: 7824 - DNA, 20 bp, synthetic construct
  source 1..20: mol_type = other DNA
ctaacgcggacctcaacctg

SEQ ID NO: 7825 - DNA, 20 bp, synthetic construct
  source 1..20: mol_type = other DNA
aaaccacgaataccgcactg

SEQ ID NO: 7826 - DNA, 20 bp, synthetic construct
  source 1..20: mol_type = other DNA
ccgggcgaaattgggtttcc

SEQ ID NO: 7827 - DNA, 20 bp, synthetic construct
  source 1..20: mol_type = other DNA
caacgacgcttatcgaccac

SEQ ID NO: 7828 - DNA, 20 bp, synthetic construct
  source 1..20: mol_type = other DNA
tcagcccaacctcttaaagg

SEQ ID NO: 7829 - DNA, 20 bp, synthetic construct
  source 1..20: mol_type = other DNA
gagatggttcatgttctgga

SEQ ID NO: 7830 - DNA, 20 bp, synthetic construct
  source 1..20: mol_type = other DNA
taatgaggcgctgggtccca

SEQ ID NO: 7831 - DNA, 20 bp, synthetic construct
  source 1..20: mol_type = other DNA
attaagatcgtgggcttatg

SEQ ID NO: 7832 - DNA, 20 bp, synthetic construct
  source 1..20: mol_type = other DNA
tagaacttgctgggccattg

SEQ ID NO: 7833 - DNA, 20 bp, synthetic construct
  source 1..20: mol_type = other DNA
cagaaccgttgttattcgcg

SEQ ID NO: 7834 - DNA, 20 bp, synthetic construct
  source 1..20: mol_type = other DNA
ccagggcctatgactcggct

SEQ ID NO: 7835 - DNA, 20 bp, synthetic construct
  source 1..20: mol_type = other DNA
acgttctccgtaattgcacg

SEQ ID NO: 7836 - DNA, 20 bp, synthetic construct
  source 1..20: mol_type = other DNA
cttgggcgcggtaaataaat

SEQ ID NO: 7837 - DNA, 20 bp, synthetic construct
  source 1..20: mol_type = other DNA
aaggtcagccatgacgtcaa

SEQ ID NO: 7838 - DNA, 20 bp, synthetic construct
  source 1..20: mol_type = other DNA
tcggtgcatgtacctgtttc

SEQ ID NO: 7839 - DNA, 20 bp, synthetic construct
  source 1..20: mol_type = other DNA
ggaactagaagtaaagatga

SEQ ID NO: 7840 - DNA, 20 bp, synthetic construct
  source 1..20: mol_type = other DNA
atacatactcccatcatcca

SEQ ID NO: 7841 - DNA, 20 bp, synthetic construct
  source 1..20: mol_type = other DNA
aacagggctacagcaactaa

SEQ ID NO: 7842 - DNA, 20 bp, synthetic construct
  source 1..20: mol_type = other DNA
gctatatcggcagcgttgtc

SEQ ID NO: 7843 - DNA, 20 bp, synthetic construct
  source 1..20: mol_type = other DNA
caggacgagctccagccttt

SEQ ID NO: 7844 - DNA, 20 bp, synthetic construct
  source 1..20: mol_type = other DNA
acccgactagcaacgcctac

SEQ ID NO: 7845 - DNA, 20 bp, synthetic construct
  source 1..20: mol_type = other DNA
tacgtatgaactctaggtag

SEQ ID NO: 7846 - DNA, 20 bp, synthetic construct
  source 1..20: mol_type = other DNA
atcagcaaggtgtgtcagac

SEQ ID NO: 7847 - DNA, 20 bp, synthetic construct
  source 1..20: mol_type = other DNA
gaacggctatttccgactaa

SEQ ID NO: 7848 - DNA, 20 bp, synthetic construct
  source 1..20: mol_type = other DNA
acgagcatgacgtaacaaga

SEQ ID NO: 7849 - DNA, 20 bp, synthetic construct
  source 1..20: mol_type = other DNA
accggcatcaaggctttcgg

SEQ ID NO: 7850 - DNA, 20 bp, synthetic construct
  source 1..20: mol_type = other DNA
taggtctccgtgacgtacat

SEQ ID NO: 7851 - DNA, 20 bp, synthetic construct
  source 1..20: mol_type = other DNA
ccataaggtgtcgagcactc

SEQ ID NO: 7852 - DNA, 20 bp, synthetic construct
  source 1..20: mol_type = other DNA
gccgtgtatagtggccgcat

SEQ ID NO: 7853 - DNA, 20 bp, synthetic construct
  source 1..20: mol_type = other DNA
cgtattcgtccatttgaaca

SEQ ID NO: 7854 - DNA, 20 bp, synthetic construct
  source 1..20: mol_type = other DNA
aacatctttcaccctcaaca

SEQ ID NO: 7855 - DNA, 20 bp, synthetic construct
  source 1..20: mol_type = other DNA
ctccgggttgctcaagttga

SEQ ID NO: 7856 - DNA, 20 bp, synthetic construct
  source 1..20: mol_type = other DNA
catccacttcgaagggctga

SEQ ID NO: 7857 - DNA, 20 bp, synthetic construct
  source 1..20: mol_type = other DNA
gcctcatagtcagagaagat

SEQ ID NO: 7858 - DNA, 20 bp, synthetic construct
  source 1..20: mol_type = other DNA
acacacatccgaggcgtaca

SEQ ID NO: 7859 - DNA, 20 bp, synthetic construct
  source 1..20: mol_type = other DNA
cagaatcagtctgatatgat

SEQ ID NO: 7860 - DNA, 20 bp, synthetic construct
  source 1..20: mol_type = other DNA
caatggaagtgctctaccag

SEQ ID NO: 7861 - DNA, 20 bp, synthetic construct
  source 1..20: mol_type = other DNA
cagcgcattatccaaggaat

SEQ ID NO: 7862 - DNA, 20 bp, synthetic construct
  source 1..20: mol_type = other DNA
ctgaatggttagattgcttt

SEQ ID NO: 7863 - DNA, 20 bp, synthetic construct
  source 1..20: mol_type = other DNA
ttggttcacgatgtgctagt

SEQ ID NO: 7864 - DNA, 20 bp, synthetic construct
  source 1..20: mol_type = other DNA
tgtactacccataacggctt

SEQ ID NO: 7865 - DNA, 20 bp, synthetic construct
  source 1..20: mol_type = other DNA
atatccctgtcaagcatcga

SEQ ID NO: 7866 - DNA, 20 bp, synthetic construct
  source 1..20: mol_type = other DNA
tcacggcaccgctatgtgat

SEQ ID NO: 7867 - DNA, 20 bp, synthetic construct
  source 1..20: mol_type = other DNA
tgagagatacccgtttattc

SEQ ID NO: 7868 - DNA, 20 bp, synthetic construct
  source 1..20: mol_type = other DNA
agtgtactgacgtattgaac

SEQ ID NO: 7869 - DNA, 20 bp, synthetic construct
  source 1..20: mol_type = other DNA
acgtgcgagagaccggaagg

SEQ ID NO: 7870 - DNA, 20 bp, synthetic construct
  source 1..20: mol_type = other DNA
tttatacgtcgcgaagggtt

SEQ ID NO: 7871 - DNA, 20 bp, synthetic construct
  source 1..20: mol_type = other DNA
actacacgtggtgcatattc

SEQ ID NO: 7872 - DNA, 20 bp, synthetic construct
  source 1..20: mol_type = other DNA
cagcatatgacccagaagat

SEQ ID NO: 7873 - DNA, 20 bp, synthetic construct
  source 1..20: mol_type = other DNA
tattcgctgccgtccggtcg

SEQ ID NO: 7874 - DNA, 20 bp, synthetic construct
  source 1..20: mol_type = other DNA
gatttgatgtagtcttccat

SEQ ID NO: 7875 - DNA, 20 bp, synthetic construct
  source 1..20: mol_type = other DNA
cgatgcctaatctgtaataa

SEQ ID NO: 7876 - DNA, 20 bp, synthetic construct
  source 1..20: mol_type = other DNA
cggagggctttaaagacctt

SEQ ID NO: 7877 - DNA, 20 bp, synthetic construct
  source 1..20: mol_type = other DNA
gcgagcgttgattgttctag

SEQ ID NO: 7878 - DNA, 20 bp, synthetic construct
  source 1..20: mol_type = other DNA
acaaatgtgtggaccggcgt

SEQ ID NO: 7879 - DNA, 20 bp, synthetic construct
  source 1..20: mol_type = other DNA
ctacggatggatgcagaagc

SEQ ID NO: 7880 - DNA, 20 bp, synthetic construct
  source 1..20: mol_type = other DNA
cccgcgtctcctgcaatttg

SEQ ID NO: 7881 - DNA, 20 bp, synthetic construct
  source 1..20: mol_type = other DNA
gcgaaacgatttcgcttgaa

SEQ ID NO: 7882 - DNA, 20 bp, synthetic construct
  source 1..20: mol_type = other DNA
catagaactttgcagagtgt

SEQ ID NO: 7883 - DNA, 20 bp, synthetic construct
  source 1..20: mol_type = other DNA
agtagtccattatccagtac

SEQ ID NO: 7884 - DNA, 20 bp, synthetic construct
  source 1..20: mol_type = other DNA
tttgtcgtttacacacctag

SEQ ID NO: 7885 - DNA, 20 bp, synthetic construct
  source 1..20: mol_type = other DNA
agtacacagtggccctagac

SEQ ID NO: 7886 - DNA, 20 bp, synthetic construct
  source 1..20: mol_type = other DNA
gtaggcccattaccgagaac

SEQ ID NO: 7887 - DNA, 20 bp, synthetic construct
  source 1..20: mol_type = other DNA
acgcgaatcaattaaacaga

SEQ ID NO: 7888 - DNA, 20 bp, synthetic construct
  source 1..20: mol_type = other DNA
gtagtgcggcgtttctccgt

SEQ ID NO: 7889 - DNA, 20 bp, synthetic construct
  source 1..20: mol_type = other DNA
tataagtccgcgatgtggat

SEQ ID NO: 7890 - DNA, 20 bp, synthetic construct
  source 1..20: mol_type = other DNA
tgcacctgcagttagttggg

SEQ ID NO: 7891 - DNA, 20 bp, synthetic construct
  source 1..20: mol_type = other DNA
tgtctggcgggtttatcgaa

SEQ ID NO: 7892 - DNA, 20 bp, synthetic construct
  source 1..20: mol_type = other DNA
caaatcccttctacaggatt

SEQ ID NO: 7893 - DNA, 20 bp, synthetic construct
  source 1..20: mol_type = other DNA
tgtctttgtcagggcgtagc

SEQ ID NO: 7894 - DNA, 20 bp, synthetic construct
  source 1..20: mol_type = other DNA
acctgtgaatagctttacca

SEQ ID NO: 7895 - DNA, 20 bp, synthetic construct
  source 1..20: mol_type = other DNA
agaccagataattcgggtct

SEQ ID NO: 7896 - DNA, 20 bp, synthetic construct
  source 1..20: mol_type = other DNA
ctcctatacgaaatctttgc

SEQ ID NO: 7897 - DNA, 20 bp, synthetic construct
  source 1..20: mol_type = other DNA
accagaataaagattgcggc

SEQ ID NO: 7898 - DNA, 20 bp, synthetic construct
  source 1..20: mol_type = other DNA
acatccgcggatggcttaag

SEQ ID NO: 7899 - DNA, 20 bp, synthetic construct
  source 1..20: mol_type = other DNA
agatacgcgtcattctaggg

SEQ ID NO: 7900 - DNA, 20 bp, synthetic construct
  source 1..20: mol_type = other DNA
tcccgtttacaggtcgagtt

SEQ ID NO: 7901 - DNA, 20 bp, synthetic construct
  source 1..20: mol_type = other DNA
ttacgaacaagccggaattt

SEQ ID NO: 7902 - DNA, 20 bp, synthetic construct
  source 1..20: mol_type = other DNA
tagagaacacaatgcagcca

SEQ ID NO: 7903 - DNA, 20 bp, synthetic construct
  source 1..20: mol_type = other DNA
gtgtactggacgtcttacag

SEQ ID NO: 7904 - DNA, 20 bp, synthetic construct
  source 1..20: mol_type = other DNA
aattataccatctgccagtc

SEQ ID NO: 7905 - DNA, 20 bp, synthetic construct
  source 1..20: mol_type = other DNA
aatgggttccctgctctccg

SEQ ID NO: 7906 - DNA, 20 bp, synthetic construct
  source 1..20: mol_type = other DNA
ataatacagatccggaagtc

SEQ ID NO: 7907 - DNA, 20 bp, synthetic construct
  source 1..20: mol_type = other DNA
gtcagttgttgcacacactg

SEQ ID NO: 7908 - DNA, 20 bp, synthetic construct
  source 1..20: mol_type = other DNA
tacatatccacgccgaagta

SEQ ID NO: 7909 - DNA, 20 bp, synthetic construct
  source 1..20: mol_type = other DNA
agacagtaacttactaccac

SEQ ID NO: 7910 - DNA, 20 bp, synthetic construct
  source 1..20: mol_type = other DNA
gtcaacactggcttagagtt

SEQ ID NO: 7911 - DNA, 20 bp, synthetic construct
  source 1..20: mol_type = other DNA
tgattctagcggagcacacc

SEQ ID NO: 7912 - DNA, 20 bp, synthetic construct
  source 1..20: mol_type = other DNA
gagaagcccgcctatccagg

SEQ ID NO: 7913 - DNA, 20 bp, synthetic construct
  source 1..20: mol_type = other DNA
aacctagtcgcatatgagac

SEQ ID NO: 7914 - DNA, 20 bp, synthetic construct
  source 1..20: mol_type = other DNA
attccttctctgcacacttg

SEQ ID NO: 7915 - DNA, 20 bp, synthetic construct
  source 1..20: mol_type = other DNA
agagtcaatagaaatggagt

SEQ ID NO: 7916 - DNA, 20 bp, synthetic construct
  source 1..20: mol_type = other DNA
tttaacgctgcggtggaggc

SEQ ID NO: 7917 - DNA, 20 bp, synthetic construct
  source 1..20: mol_type = other DNA
cagctgttcacgatgatttc

SEQ ID NO: 7918 - DNA, 20 bp, synthetic construct
  source 1..20: mol_type = other DNA
ttcgatgccgttaccatgaa

SEQ ID NO: 7919 - DNA, 20 bp, synthetic construct
  source 1..20: mol_type = other DNA
cccatatatgttcctcatga

SEQ ID NO: 7920 - DNA, 20 bp, synthetic construct
  source 1..20: mol_type = other DNA
agtgtgtgcagtcggtgagg

SEQ ID NO: 7921 - DNA, 20 bp, synthetic construct
  source 1..20: mol_type = other DNA
gtggtgatctctaacgtgaa

SEQ ID NO: 7922 - DNA, 20 bp, synthetic construct
  source 1..20: mol_type = other DNA
gctgctgctgtgttcacaga

SEQ ID NO: 7923 - DNA, 20 bp, synthetic construct
  source 1..20: mol_type = other DNA
ccctaagctgattgtaatga

SEQ ID NO: 7924 - DNA, 20 bp, synthetic construct
  source 1..20: mol_type = other DNA
ccttgttcctttgcgggtcc

SEQ ID NO: 7925 - DNA, 20 bp, synthetic construct
  source 1..20: mol_type = other DNA
tgtagaagaggtcttggcga

SEQ ID NO: 7926 - DNA, 20 bp, synthetic construct
  source 1..20: mol_type = other DNA
agggctcttatagactagcg

SEQ ID NO: 7927 - DNA, 20 bp, synthetic construct
  source 1..20: mol_type = other DNA
cgaatgcatcgcggtacgcg

SEQ ID NO: 7928 - DNA, 20 bp, synthetic construct
  source 1..20: mol_type = other DNA
aagagccttaaggagatagt

SEQ ID NO: 7929 - DNA, 20 bp, synthetic construct
  source 1..20: mol_type = other DNA
atactatgcggcgtcgtgac

SEQ ID NO: 7930 - DNA, 20 bp, synthetic construct
  source 1..20: mol_type = other DNA
ccttaggcgtatccgtattg

SEQ ID NO: 7931 - DNA, 20 bp, synthetic construct
  source 1..20: mol_type = other DNA
gctccctcgtaattcaatgc

SEQ ID NO: 7932 - DNA, 20 bp, synthetic construct
  source 1..20: mol_type = other DNA
agcaattattctgtctctca

SEQ ID NO: 7933 - DNA, 20 bp, synthetic construct
  source 1..20: mol_type = other DNA
atgcgtcaagaatggttggc

SEQ ID NO: 7934 - DNA, 20 bp, synthetic construct
  source 1..20: mol_type = other DNA
ggcgacttaaagagtgtaac

SEQ ID NO: 7935 - DNA, 20 bp, synthetic construct
  source 1..20: mol_type = other DNA
ccgacgtcgtatgtatcttc

SEQ ID NO: 7936 - DNA, 20 bp, synthetic construct
  source 1..20: mol_type = other DNA
cagtataggagttggaacct

SEQ ID NO: 7937 - DNA, 20 bp, synthetic construct
  source 1..20: mol_type = other DNA
accctgatatagcggtcagc

SEQ ID NO: 7938 - DNA, 20 bp, synthetic construct
  source 1..20: mol_type = other DNA
gttgaatgggaatgattctt

SEQ ID NO: 7939 - DNA, 20 bp, synthetic construct
  source 1..20: mol_type = other DNA
acccacgacgcaagggtcac

SEQ ID NO: 7940 - DNA, 20 bp, synthetic construct
  source 1..20: mol_type = other DNA
atccatattcgatcctagaa

SEQ ID NO: 7941 - DNA, 20 bp, synthetic construct
  source 1..20: mol_type = other DNA
ttgatgacctcgttatacca

SEQ ID NO: 7942 - DNA, 20 bp, synthetic construct
  source 1..20: mol_type = other DNA
gaatgaatctgtgtagtggt

SEQ ID NO: 7943 - DNA, 20 bp, synthetic construct
  source 1..20: mol_type = other DNA
gtttgatggcgtgaacagac

SEQ ID NO: 7944 - DNA, 20 bp, synthetic construct
  source 1..20: mol_type = other DNA
gatcccataacagaatcggc

SEQ ID NO: 7945 - DNA, 20 bp, synthetic construct
  source 1..20: mol_type = other DNA
ttgaaagctgagtgtcttgg

SEQ ID NO: 7946 - DNA, 20 bp, synthetic construct
  source 1..20: mol_type = other DNA
gaaggcgggtaagtcgctta

SEQ ID NO: 7947 - DNA, 20 bp, synthetic construct
  source 1..20: mol_type = other DNA
tcactatcgccgccagagat

SEQ ID NO: 7948 - DNA, 20 bp, synthetic construct
  source 1..20: mol_type = other DNA
tcgctgtggcctaccatctc

SEQ ID NO: 7949 - DNA, 20 bp, synthetic construct
  source 1..20: mol_type = other DNA
tccctcatcagtagccatgc

SEQ ID NO: 7950 - DNA, 20 bp, synthetic construct
  source 1..20: mol_type = other DNA
gcttgtgtgaacgcctgcat

SEQ ID NO: 7951 - DNA, 20 bp, synthetic construct
  source 1..20: mol_type = other DNA
tcccggcgagtcagttgtct

SEQ ID NO: 7952 - DNA, 20 bp, synthetic construct
  source 1..20: mol_type = other DNA
aataacactggcacctttcc

SEQ ID NO: 7953 - DNA, 20 bp, synthetic construct
  source 1..20: mol_type = other DNA
ggttaaatacgtgacgggct

SEQ ID NO: 7954 - DNA, 20 bp, synthetic construct
  source 1..20: mol_type = other DNA
agtcagaacgctcagatttg

SEQ ID NO: 7955 - DNA, 20 bp, synthetic construct
  source 1..20: mol_type = other DNA
tttgtaaccatcccgctgtg

SEQ ID NO: 7956 - DNA, 20 bp, synthetic construct
  source 1..20: mol_type = other DNA
tacctaagccctgtagcctt

SEQ ID NO: 7957 - DNA, 20 bp, synthetic construct
  source 1..20: mol_type = other DNA
cgtgccgaaacgtgccgtaa

SEQ ID NO: 7958 - DNA, 20 bp, synthetic construct
  source 1..20: mol_type = other DNA
attcttggtcacttcgcatg

SEQ ID NO: 7959 - DNA, 20 bp, synthetic construct
  source 1..20: mol_type = other DNA
agtaaagggacttataacag

SEQ ID NO: 7960 - DNA, 20 bp, synthetic construct
  source 1..20: mol_type = other DNA
acaacctgcaatcgctcgac

SEQ ID NO: 7961 - DNA, 20 bp, synthetic construct
  source 1..20: mol_type = other DNA
gtagtacccaggcgcaaact

SEQ ID NO: 7962 - DNA, 20 bp, synthetic construct
  source 1..20: mol_type = other DNA
ccacaggtactagaaccatg

SEQ ID NO: 7963 - DNA, 20 bp, synthetic construct
  source 1..20: mol_type = other DNA
tcggatagcgtaatgttctg

SEQ ID NO: 7964 - DNA, 20 bp, synthetic construct
  source 1..20: mol_type = other DNA
actggatcgatttgcggtga

SEQ ID NO: 7965 - DNA, 20 bp, synthetic construct
  source 1..20: mol_type = other DNA
aacttgagaaggaaccgggc

SEQ ID NO: 7966 - DNA, 20 bp, synthetic construct
  source 1..20: mol_type = other DNA
ttaagaacgggtgtactttc

SEQ ID NO: 7967 - DNA, 20 bp, synthetic construct
  source 1..20: mol_type = other DNA
cgtgtacggcacaaacgatg

SEQ ID NO: 7968 - DNA, 20 bp, synthetic construct
  source 1..20: mol_type = other DNA
tcaaacaggcgagcaattct

SEQ ID NO: 7969 - DNA, 20 bp, synthetic construct
  source 1..20: mol_type = other DNA
tgtacttctgaaagtgttac

SEQ ID NO: 7970 - DNA, 20 bp, synthetic construct
  source 1..20: mol_type = other DNA
tggactgctcagttctcttt

SEQ ID NO: 7971 - DNA, 20 bp, synthetic construct
  source 1..20: mol_type = other DNA
cgatagatgtagcatgcgtt

SEQ ID NO: 7972 - DNA, 20 bp, synthetic construct
  source 1..20: mol_type = other DNA
gcagctttagcgtcgcggta

SEQ ID NO: 7973 - DNA, 20 bp, synthetic construct
  source 1..20: mol_type = other DNA
gagtggttgagctaagtcgc

SEQ ID NO: 7974 - DNA, 20 bp, synthetic construct
  source 1..20: mol_type = other DNA
agcccttagaggctagttgc

SEQ ID NO: 7975 - DNA, 20 bp, synthetic construct
  source 1..20: mol_type = other DNA
aaagcacattgtcaccagag

SEQ ID NO: 7976 - DNA, 20 bp, synthetic construct
  source 1..20: mol_type = other DNA
tcaggaatgattaatggttg

SEQ ID NO: 7977 - DNA, 20 bp, synthetic construct
  source 1..20: mol_type = other DNA
caaccgcctatcaatttctc

SEQ ID NO: 7978 - DNA, 20 bp, synthetic construct
  source 1..20: mol_type = other DNA
accgcctgcctgattattgc

SEQ ID NO: 7979 - DNA, 20 bp, synthetic construct
  source 1..20: mol_type = other DNA
gagtagaacccacaaactaa

SEQ ID NO: 7980 - DNA, 20 bp, synthetic construct
  source 1..20: mol_type = other DNA
cgtatgccatgctaattccc

SEQ ID NO: 7981 - DNA, 20 bp, synthetic construct
  source 1..20: mol_type = other DNA
agttgcctcggtcctttgat

SEQ ID NO: 7982 - DNA, 20 bp, synthetic construct
  source 1..20: mol_type = other DNA
accctgaaatccaggaatat

SEQ ID NO: 7983 - DNA, 20 bp, synthetic construct
  source 1..20: mol_type = other DNA
tgggtcagtctctgacatag

SEQ ID NO: 7984 - DNA, 20 bp, synthetic construct
  source 1..20: mol_type = other DNA
atcacaaagttcggagctgg

SEQ ID NO: 7985 - DNA, 20 bp, synthetic construct
  source 1..20: mol_type = other DNA
acagagtttgtggtcagatt

SEQ ID NO: 7986 - DNA, 20 bp, synthetic construct
  source 1..20: mol_type = other DNA
gcgaacctcttaactctaac

SEQ ID NO: 7987 - DNA, 20 bp, synthetic construct
  source 1..20: mol_type = other DNA
cggattatgaatgcagcacg

SEQ ID NO: 7988 - DNA, 20 bp, synthetic construct
  source 1..20: mol_type = other DNA
tatacgcagtgggaccacca

SEQ ID NO: 7989 - DNA, 20 bp, synthetic construct
  source 1..20: mol_type = other DNA
ggtaatatattgtctctaac

SEQ ID NO: 7990 - DNA, 20 bp, synthetic construct
  source 1..20: mol_type = other DNA
gcgtgtatcggccgttcacg

SEQ ID NO: 7991 - DNA, 20 bp, synthetic construct
  source 1..20: mol_type = other DNA
tcaacctggtggcaaaggaa

SEQ ID NO: 7992 - DNA, 20 bp, synthetic construct
  source 1..20: mol_type = other DNA
agacccgacaccgatacgag

SEQ ID NO: 7993 - DNA, 20 bp, synthetic construct
  source 1..20: mol_type = other DNA
atgacttcctcacacttgga

SEQ ID NO: 7994 - DNA, 20 bp, synthetic construct
  source 1..20: mol_type = other DNA
aacaacagttgccacctaaa

SEQ ID NO: 7995 - DNA, 20 bp, synthetic construct
  source 1..20: mol_type = other DNA
ccattactacggctaatctt

SEQ ID NO: 7996 - DNA, 20 bp, synthetic construct
  source 1..20: mol_type = other DNA
gtaggtatagctgcttgata

SEQ ID NO: 7997 - DNA, 20 bp, synthetic construct
  source 1..20: mol_type = other DNA
tgagggttgggagcacatgt

SEQ ID NO: 7998 - DNA, 20 bp, synthetic construct
  source 1..20: mol_type = other DNA
aattgctttgaagggcccat

SEQ ID NO: 7999 - DNA, 20 bp, synthetic construct
  source 1..20: mol_type = other DNA
acaggtcagtaggcgtaacc

SEQ ID NO: 8000 - DNA, 20 bp, synthetic construct
  source 1..20: mol_type = other DNA
tttcccgtgcttctcgcacc

SEQ ID NO: 8001 - DNA, 20 bp, synthetic construct
  source 1..20: mol_type = other DNA
gggacattcctccttacgaa

SEQ ID NO: 8002 - DNA, 20 bp, synthetic construct
  source 1..20: mol_type = other DNA
ctggcgtaatttgacacacg

SEQ ID NO: 8003 - DNA, 20 bp, synthetic construct
  source 1..20: mol_type = other DNA
ttgttatctgcatagggttc

SEQ ID NO: 8004 - DNA, 20 bp, synthetic construct
  source 1..20: mol_type = other DNA
gggccgtattagtacttctc

SEQ ID NO: 8005 - DNA, 20 bp, synthetic construct
  source 1..20: mol_type = other DNA
aaagcgggataacaacttca

SEQ ID NO: 8006 - DNA, 20 bp, synthetic construct
  source 1..20: mol_type = other DNA
cgctagcaggacaatatcga

SEQ ID NO: 8007 - DNA, 20 bp, synthetic construct
  source 1..20: mol_type = other DNA
catcccggcacagattacat

SEQ ID NO: 8008 - DNA, 20 bp, synthetic construct
  source 1..20: mol_type = other DNA
gcgcaccctgcaaattaaat

SEQ ID NO: 8009 - DNA, 20 bp, synthetic construct
  source 1..20: mol_type = other DNA
cgaccatccatgcgcagaca

SEQ ID NO: 8010 - DNA, 20 bp, synthetic construct
  source 1..20: mol_type = other DNA
cttaccaagtgtgagcccat

SEQ ID NO: 8011 - DNA, 20 bp, synthetic construct
  source 1..20: mol_type = other DNA
ggagatgcgttaaagtcgct

SEQ ID NO: 8012 - DNA, 20 bp, synthetic construct
  source 1..20: mol_type = other DNA
tacgataacccaaaccgggc

SEQ ID NO: 8013 - DNA, 20 bp, synthetic construct
  source 1..20: mol_type = other DNA
cggcgtgaagttgcttagtt

SEQ ID NO: 8014 - DNA, 20 bp, synthetic construct
  source 1..20: mol_type = other DNA
cttggcctgtattctactta

SEQ ID NO: 8015 - DNA, 20 bp, synthetic construct
  source 1..20: mol_type = other DNA
aaacaggcgggaatgtggct

SEQ ID NO: 8016 - DNA, 20 bp, synthetic construct
  source 1..20: mol_type = other DNA
agtctagctgcgtctattta

SEQ ID NO: 8017 - DNA, 20 bp, synthetic construct
  source 1..20: mol_type = other DNA
ctggttcctgcgtacaacgg

SEQ ID NO: 8018 - DNA, 20 bp, synthetic construct
  source 1..20: mol_type = other DNA
tagtattcataggagcacga

SEQ ID NO: 8019 - DNA, 20 bp, synthetic construct
  source 1..20: mol_type = other DNA
gtgtttccaagtcccttacc

SEQ ID NO: 8020 - DNA, 20 bp, synthetic construct
  source 1..20: mol_type = other DNA
ggtcagcagttatataacga

SEQ ID NO: 8021 - DNA, 20 bp, synthetic construct
  source 1..20: mol_type = other DNA
gttactaggtatactctcaa

SEQ ID NO: 8022 - DNA, 20 bp, synthetic construct
  source 1..20: mol_type = other DNA
ctttaaggatagtcatgacc

SEQ ID NO: 8023 - DNA, 20 bp, synthetic construct
  source 1..20: mol_type = other DNA
ggtagtcgttacttgatgtt

SEQ ID NO: 8024 - DNA, 20 bp, synthetic construct
  source 1..20: mol_type = other DNA
gcgatgagccacctagttca

SEQ ID NO: 8025 - DNA, 20 bp, synthetic construct
  source 1..20: mol_type = other DNA
acacaggtggcgatttatat

SEQ ID NO: 8026 - DNA, 20 bp, synthetic construct
  source 1..20: mol_type = other DNA
agtaagctaagggacaccgc

SEQ ID NO: 8027 - DNA, 20 bp, synthetic construct
  source 1..20: mol_type = other DNA
ttccgggaagtgcttgtgta

SEQ ID NO: 8028 - DNA, 20 bp, synthetic construct
  source 1..20: mol_type = other DNA
ctcaatcatctaacaacgcc

SEQ ID NO: 8029 - DNA, 20 bp, synthetic construct
  source 1..20: mol_type = other DNA
ctcgcgatattcgaaggcta

SEQ ID NO: 8030 - DNA, 20 bp, synthetic construct
  source 1..20: mol_type = other DNA
tcccatggtcatcgagcaag

SEQ ID NO: 8031 - DNA, 20 bp, synthetic construct
  source 1..20: mol_type = other DNA
aggtttgatggtacttgaag

SEQ ID NO: 8032 - DNA, 20 bp, synthetic construct
  source 1..20: mol_type = other DNA
cggtttctggaattgaacca

SEQ ID NO: 8033 - DNA, 20 bp, synthetic construct
  source 1..20: mol_type = other DNA
acaaccaagacccggcgatt

SEQ ID NO: 8034 - DNA, 20 bp, synthetic construct
  source 1..20: mol_type = other DNA
cctccagaacattgctagga

SEQ ID NO: 8035 - DNA, 20 bp, synthetic construct
  source 1..20: mol_type = other DNA
ggtttatacggtctaggtaa

SEQ ID NO: 8036 - DNA, 20 bp, synthetic construct
  source 1..20: mol_type = other DNA
agtgcgtccaagtctggtgg

SEQ ID NO: 8037 - DNA, 20 bp, synthetic construct
  source 1..20: mol_type = other DNA
aggatttgagcgccaagcgt

SEQ ID NO: 8038 - DNA, 20 bp, synthetic construct
  source 1..20: mol_type = other DNA
agattgtcttacttacgtgt

SEQ ID NO: 8039 - DNA, 20 bp, synthetic construct
  source 1..20: mol_type = other DNA
atcttagtcatcttggacct

SEQ ID NO: 8040 - DNA, 20 bp, synthetic construct
  source 1..20: mol_type = other DNA
ctagccaatcctcttgtact

SEQ ID NO: 8041 - DNA, 20 bp, synthetic construct
  source 1..20: mol_type = other DNA
atgcaaagccaacccagagg

SEQ ID NO: 8042 - DNA, 20 bp, synthetic construct
  source 1..20: mol_type = other DNA
tgtagacctttgacaactca

SEQ ID NO: 8043 - DNA, 20 bp, synthetic construct
  source 1..20: mol_type = other DNA
gacgtaggtacggctgcgag

SEQ ID NO: 8044 - DNA, 20 bp, synthetic construct
  source 1..20: mol_type = other DNA
cagggcgtattatcactagt

SEQ ID NO: 8045 - DNA, 20 bp, synthetic construct
  source 1..20: mol_type = other DNA
cccagcctacactgactagg

SEQ ID NO: 8046 - DNA, 20 bp, synthetic construct
  source 1..20: mol_type = other DNA
tcccagcctgctaggaacct

SEQ ID NO: 8047 - DNA, 20 bp, synthetic construct
  source 1..20: mol_type = other DNA
cgttatgcatccaaacagaa

SEQ ID NO: 8048 - DNA, 20 bp, synthetic construct
  source 1..20: mol_type = other DNA
cttacggaaactaaagccga

SEQ ID NO: 8049 - DNA, 20 bp, synthetic construct
  source 1..20: mol_type = other DNA
ctaatgtctgttgtgccgga

SEQ ID NO: 8050 - DNA, 20 bp, synthetic construct
  source 1..20: mol_type = other DNA
tgcgaccgagatgcgttatc

SEQ ID NO: 8051 - DNA, 20 bp, synthetic construct
  source 1..20: mol_type = other DNA
gacaggattagcccatgcat

SEQ ID NO: 8052 - DNA, 20 bp, synthetic construct
  source 1..20: mol_type = other DNA
ccacacaagtgggtaagatc

SEQ ID NO: 8053 - DNA, 20 bp, synthetic construct
  source 1..20: mol_type = other DNA
tcggatacgtttcttgattc

SEQ ID NO: 8054 - DNA, 20 bp, synthetic construct
  source 1..20: mol_type = other DNA
gtttccagttgttaacggac

SEQ ID NO: 8055 - DNA, 20 bp, synthetic construct
  source 1..20: mol_type = other DNA
agtttgtgacgtcggttgaa

SEQ ID NO: 8056 - DNA, 20 bp, synthetic construct
  source 1..20: mol_type = other DNA
ttcactgacgggcagattcc

SEQ ID NO: 8057 - DNA, 20 bp, synthetic construct
  source 1..20: mol_type = other DNA
atgtgggtaatgagacgtct

SEQ ID NO: 8058 - DNA, 20 bp, synthetic construct
  source 1..20: mol_type = other DNA
tataggacggacccgtatag

SEQ ID NO: 8059 - DNA, 20 bp, synthetic construct
  source 1..20: mol_type = other DNA
cttaccaaagtgagcactga

SEQ ID NO: 8060 - DNA, 20 bp, synthetic construct
  source 1..20: mol_type = other DNA
tagttagacttaaagaggcg

SEQ ID NO: 8061 - DNA, 20 bp, synthetic construct
  source 1..20: mol_type = other DNA
aacatttcaacgccgccgag

SEQ ID NO: 8062 - DNA, 20 bp, synthetic construct
  source 1..20: mol_type = other DNA
tattatcgttgtgtggcaag

SEQ ID NO: 8063 - DNA, 20 bp, synthetic construct
  source 1..20: mol_type = other DNA
ctaagagggtacaggaatgt

SEQ ID NO: 8064 - DNA, 20 bp, synthetic construct
  source 1..20: mol_type = other DNA
atcgggcgtcatagtgatga

SEQ ID NO: 8065 - DNA, 20 bp, synthetic construct
  source 1..20: mol_type = other DNA
gctaagaggaagtgttagtg

SEQ ID NO: 8066 - DNA, 20 bp, synthetic construct
  source 1..20: mol_type = other DNA
cagccaggcccttcaataag

SEQ ID NO: 8067 - DNA, 20 bp, synthetic construct
  source 1..20: mol_type = other DNA
gtccataagtccgaattggc

SEQ ID NO: 8068 - DNA, 20 bp, synthetic construct
  source 1..20: mol_type = other DNA
gcgacttcattacgtagagc

SEQ ID NO: 8069 - DNA, 20 bp, synthetic construct
  source 1..20: mol_type = other DNA
gtcaagcagcgtgactgtct

SEQ ID NO: 8070 - DNA, 20 bp, synthetic construct
  source 1..20: mol_type = other DNA
gactgttacccgttgggagt

SEQ ID NO: 8071 - DNA, 20 bp, synthetic construct
  source 1..20: mol_type = other DNA
gtcgtgctcagtgggtgaac

SEQ ID NO: 8072 - DNA, 20 bp, synthetic construct
  source 1..20: mol_type = other DNA
tcggtgtcaggcctcacctt

SEQ ID NO: 8073 - DNA, 20 bp, synthetic construct
  source 1..20: mol_type = other DNA
acaggattcaaagttacttg

SEQ ID NO: 8074 - DNA, 20 bp, synthetic construct
  source 1..20: mol_type = other DNA
ttctttagtttcgatgtcct

SEQ ID NO: 8075 - DNA, 20 bp, synthetic construct
  source 1..20: mol_type = other DNA
ggaattgtgtccgcacctaa

SEQ ID NO: 8076 - DNA, 20 bp, synthetic construct
  source 1..20: mol_type = other DNA
gtcaaaccaataccgcgggt

SEQ ID NO: 8077 - DNA, 20 bp, synthetic construct
  source 1..20: mol_type = other DNA
aggtacagtcagcttaatac

SEQ ID NO: 8078 - DNA, 20 bp, synthetic construct
  source 1..20: mol_type = other DNA
ctcaacaacatcgtaccact

SEQ ID NO: 8079 - DNA, 20 bp, synthetic construct
  source 1..20: mol_type = other DNA
atccacggtccctcttccga

SEQ ID NO: 8080 - DNA, 20 bp, synthetic construct
  source 1..20: mol_type = other DNA
ctcggccgaagcaacagtgc

SEQ ID NO: 8081 - DNA, 20 bp, synthetic construct
  source 1..20: mol_type = other DNA
ggccgatgaatacaatggat

SEQ ID NO: 8082 - DNA, 20 bp, synthetic construct
  source 1..20: mol_type = other DNA
tgatagtgtttccatcgtac

SEQ ID NO: 8083 - DNA, 20 bp, synthetic construct
  source 1..20: mol_type = other DNA
tcctcgcttcatttgtcgag

SEQ ID NO: 8084 - DNA, 20 bp, synthetic construct
  source 1..20: mol_type = other DNA
gtgtaatgcattcaatagtc

SEQ ID NO: 8085 - DNA, 20 bp, synthetic construct
  source 1..20: mol_type = other DNA
cccttgttaacatgacgacc

SEQ ID NO: 8086 - DNA, 20 bp, synthetic construct
  source 1..20: mol_type = other DNA
cgtaaccaacataaacatga

SEQ ID NO: 8087 - DNA, 20 bp, synthetic construct
  source 1..20: mol_type = other DNA
ttgctgcatggttcaacctc

SEQ ID NO: 8088 - DNA, 20 bp, synthetic construct
  source 1..20: mol_type = other DNA
ccgactatacgtccgttaca

SEQ ID NO: 8089 - DNA, 20 bp, synthetic construct
  source 1..20: mol_type = other DNA
atggttataatttccgccta

SEQ ID NO: 8090 - DNA, 20 bp, synthetic construct
  source 1..20: mol_type = other DNA
agcgcaacgccagaaacgct

SEQ ID NO: 8091 - DNA, 20 bp, synthetic construct
  source 1..20: mol_type = other DNA
tataaacgtgggcagattat

SEQ ID NO: 8092 - DNA, 20 bp, synthetic construct
  source 1..20: mol_type = other DNA
cggtagttactagagagggc

SEQ ID NO: 8093 - DNA, 20 bp, synthetic construct
  source 1..20: mol_type = other DNA
gttcttgattggttctgatt

SEQ ID NO: 8094 - DNA, 20 bp, synthetic construct
  source 1..20: mol_type = other DNA
cggctgagttccactatcta

SEQ ID NO: 8095 - DNA, 20 bp, synthetic construct
  source 1..20: mol_type = other DNA
ctcgtttctccttactacag

SEQ ID NO: 8096 - DNA, 20 bp, synthetic construct
  source 1..20: mol_type = other DNA
gacgttcttagcgaagtgtt

SEQ ID NO: 8097 - DNA, 20 bp, synthetic construct
  source 1..20: mol_type = other DNA
acacccttgtccggctgtac

SEQ ID NO: 8098 - DNA, 20 bp, synthetic construct
  source 1..20: mol_type = other DNA
tcgatcatgtagtctttcaa

SEQ ID NO: 8099 - DNA, 20 bp, synthetic construct
  source 1..20: mol_type = other DNA
agctaacaacgcagtgttta

SEQ ID NO: 8100 - DNA, 20 bp, synthetic construct
  source 1..20: mol_type = other DNA
gtcagaaagtaattcatcgg

SEQ ID NO: 8101 - DNA, 20 bp, synthetic construct
  source 1..20: mol_type = other DNA
agacgtgttgacacatcgat

SEQ ID NO: 8102 - DNA, 20 bp, synthetic construct
  source 1..20: mol_type = other DNA
gatctcgcttgtacaccatg

SEQ ID NO: 8103 - DNA, 20 bp, synthetic construct
  source 1..20: mol_type = other DNA
tggaaattacctacgttata

SEQ ID NO: 8104 - DNA, 20 bp, synthetic construct
  source 1..20: mol_type = other DNA
ctcagccctacctattaggc

SEQ ID NO: 8105 - DNA, 20 bp, synthetic construct
  source 1..20: mol_type = other DNA
gtacctaaattgtgtcgtta

SEQ ID NO: 8106 - DNA, 20 bp, synthetic construct
  source 1..20: mol_type = other DNA
aattctactggcctttgtgc

SEQ ID NO: 8107 - DNA, 20 bp, synthetic construct
  source 1..20: mol_type = other DNA
accttaacggcctgtagatc

SEQ ID NO: 8108 - DNA, 20 bp, synthetic construct
  source 1..20: mol_type = other DNA
tcaacgttgacctacacggt

SEQ ID NO: 8109 - DNA, 20 bp, synthetic construct
  source 1..20: mol_type = other DNA
atggagcggacattagaatt

SEQ ID NO: 8110 - DNA, 20 bp, synthetic construct
  source 1..20: mol_type = other DNA
cgccgaaataacagcgtcga

SEQ ID NO: 8111 - DNA, 20 bp, synthetic construct
  source 1..20: mol_type = other DNA
tttatttctacgcacgccaa

SEQ ID NO: 8112 - DNA, 20 bp, synthetic construct
  source 1..20: mol_type = other DNA
tttgaggcgaaccgaaccta

SEQ ID NO: 8113 - DNA, 20 bp, synthetic construct
  source 1..20: mol_type = other DNA
atagttagctgggctcgtcg

SEQ ID NO: 8114 - DNA, 20 bp, synthetic construct
  source 1..20: mol_type = other DNA
aagagttgaagggatggtaa

SEQ ID NO: 8115 - DNA, 20 bp, synthetic construct
  source 1..20: mol_type = other DNA
gacaaagctggaaatttgct

SEQ ID NO: 8116 - DNA, 20 bp, synthetic construct
  source 1..20: mol_type = other DNA
ggaggtctaggagactaata

SEQ ID NO: 8117 - DNA, 20 bp, synthetic construct
  source 1..20: mol_type = other DNA
accgttccaggacaccactc

SEQ ID NO: 8118 - DNA, 20 bp, synthetic construct
  source 1..20: mol_type = other DNA
cggactctaataagcctgta

SEQ ID NO: 8119 - DNA, 20 bp, synthetic construct
  source 1..20: mol_type = other DNA
cgtactcccagcaattctga

SEQ ID NO: 8120 - DNA, 20 bp, synthetic construct
  source 1..20: mol_type = other DNA
atccgacgagctgagggagc

SEQ ID NO: 8121 - DNA, 20 bp, synthetic construct
  source 1..20: mol_type = other DNA
gatgcatttggctacggcgt

SEQ ID NO: 8122 - DNA, 20 bp, synthetic construct
  source 1..20: mol_type = other DNA
acaacactggccagcgtgag

SEQ ID NO: 8123 - DNA, 20 bp, synthetic construct
  source 1..20: mol_type = other DNA
cagcacgaactacctcggat

SEQ ID NO: 8124 - DNA, 20 bp, synthetic construct
  source 1..20: mol_type = other DNA
taaatgctcatgagcgaaat

SEQ ID NO: 8125 - DNA, 20 bp, synthetic construct
  source 1..20: mol_type = other DNA
acgaggcgctgcgaaggtca

SEQ ID NO: 8126 - DNA, 20 bp, synthetic construct
  source 1..20: mol_type = other DNA
tcaaatacacatgtagctca

SEQ ID NO: 8127 - DNA, 20 bp, synthetic construct
  source 1..20: mol_type = other DNA
ctaggcgtttctaacctcaa

SEQ ID NO: 8128 - DNA, 20 bp, synthetic construct
  source 1..20: mol_type = other DNA
actcaaactgtgccaggccg

SEQ ID NO: 8129 - DNA, 20 bp, synthetic construct
  source 1..20: mol_type = other DNA
tggcacaaccgtaactcttt

SEQ ID NO: 8130 - DNA, 20 bp, synthetic construct
  source 1..20: mol_type = other DNA
ccgaagatacctaagggaac

SEQ ID NO: 8131 - DNA, 20 bp, synthetic construct
  source 1..20: mol_type = other DNA
gtatgcgtccactgatgtta

SEQ ID NO: 8132 - DNA, 20 bp, synthetic construct
  source 1..20: mol_type = other DNA
gactccgacaagatcgagag

SEQ ID NO: 8133 - DNA, 20 bp, synthetic construct
  source 1..20: mol_type = other DNA
catctcccagactaatcaat

SEQ ID NO: 8134 - DNA, 20 bp, synthetic construct
  source 1..20: mol_type = other DNA
cggtgatctacagcgggaac

SEQ ID NO: 8135 - DNA, 20 bp, synthetic construct
  source 1..20: mol_type = other DNA
gcctattccaacaatctcat

SEQ ID NO: 8136 - DNA, 20 bp, synthetic construct
  source 1..20: mol_type = other DNA
cgagatggtacgtaggttcg

SEQ ID NO: 8137 - DNA, 20 bp, synthetic construct
  source 1..20: mol_type = other DNA
agtcgtgtctgacaacttct

SEQ ID NO: 8138 - DNA, 20 bp, synthetic construct
  source 1..20: mol_type = other DNA
cctgcgcaccaacacgggtc

SEQ ID NO: 8139 - DNA, 20 bp, synthetic construct
  source 1..20: mol_type = other DNA
ctgattaggacatagactac

SEQ ID NO: 8140 - DNA, 20 bp, synthetic construct
  source 1..20: mol_type = other DNA
gcagttctgaggctcttggt

SEQ ID NO: 8141 - DNA, 20 bp, synthetic construct
  source 1..20: mol_type = other DNA
gattcgtcgatggccacggt

SEQ ID NO: 8142 - DNA, 20 bp, synthetic construct
  source 1..20: mol_type = other DNA
ccgtgtacccatggttgtca

SEQ ID NO: 8143 - DNA, 20 bp, synthetic construct
  source 1..20: mol_type = other DNA
tagcatttgcataggaccag

SEQ ID NO: 8144 - DNA, 20 bp, synthetic construct
  source 1..20: mol_type = other DNA
tcaatcgtttgtcttgagtc

SEQ ID NO: 8145 - DNA, 20 bp, synthetic construct
  source 1..20: mol_type = other DNA
gactacatggatcacagggt

SEQ ID NO: 8146 - DNA, 20 bp, synthetic construct
  source 1..20: mol_type = other DNA
ggcttctgtggcactactac

SEQ ID NO: 8147 - DNA, 20 bp, synthetic construct
  source 1..20: mol_type = other DNA
gcctatcggtaaggtcagca

SEQ ID NO: 8148 - DNA, 20 bp, synthetic construct
  source 1..20: mol_type = other DNA
gcgttgcaagagttcaggct

SEQ ID NO: 8149 - DNA, 20 bp, synthetic construct
  source 1..20: mol_type = other DNA
tagccaagcccaacgtggcg

SEQ ID NO: 8150 - DNA, 20 bp, synthetic construct
  source 1..20: mol_type = other DNA
cctcctaccctatgaggccc

SEQ ID NO: 8151 - DNA, 20 bp, synthetic construct
  source 1..20: mol_type = other DNA
agagtgtacaggctcggtag

SEQ ID NO: 8152 - DNA, 20 bp, synthetic construct
  source 1..20: mol_type = other DNA
tttcattgtctgccctcgca

SEQ ID NO: 8153 - DNA, 20 bp, synthetic construct
  source 1..20: mol_type = other DNA
tgagcgtagtgctggaggca

SEQ ID NO: 8154 - DNA, 20 bp, synthetic construct
  source 1..20: mol_type = other DNA
acccaagagcaagccgtagt

SEQ ID NO: 8155 - DNA, 20 bp, synthetic construct
  source 1..20: mol_type = other DNA
ccgtcgtgcgtggatgctga

SEQ ID NO: 8156 - DNA, 20 bp, synthetic construct
  source 1..20: mol_type = other DNA
gaaggataccgggaattgcc

SEQ ID NO: 8157 - DNA, 20 bp, synthetic construct
  source 1..20: mol_type = other DNA
tcggtggcatatggcatgac

SEQ ID NO: 8158 - DNA, 20 bp, synthetic construct
  source 1..20: mol_type = other DNA
ccgttcatcatcgtcccgag

SEQ ID NO: 8159 - DNA, 20 bp, synthetic construct
  source 1..20: mol_type = other DNA
aacgaccatgttgaccgtct

SEQ ID NO: 8160 - DNA, 20 bp, synthetic construct
  source 1..20: mol_type = other DNA
caatcacccaaggctttacc

SEQ ID NO: 8161 - DNA, 20 bp, synthetic construct
  source 1..20: mol_type = other DNA
cctgtccgacgttgctcacg

SEQ ID NO: 8162 - DNA, 20 bp, synthetic construct
  source 1..20: mol_type = other DNA
cttgccattgcggttcccgc

SEQ ID NO: 8163 - DNA, 20 bp, synthetic construct
  source 1..20: mol_type = other DNA
ggcgctggtacacacataat

SEQ ID NO: 8164 - DNA, 20 bp, synthetic construct
  source 1..20: mol_type = other DNA
accatgtggcttacgggtgc

SEQ ID NO: 8165 - DNA, 20 bp, synthetic construct
  source 1..20: mol_type = other DNA
acgctgcgggtagcaagcta

SEQ ID NO: 8166 - DNA, 20 bp, synthetic construct
  source 1..20: mol_type = other DNA
ccacgcacataacagcacgg

SEQ ID NO: 8167 - DNA, 20 bp, synthetic construct
  source 1..20: mol_type = other DNA
atgtacgtcagacctgtcag

SEQ ID NO: 8168 - DNA, 20 bp, synthetic construct
  source 1..20: mol_type = other DNA
ctgtagcacaagtttgcaac

SEQ ID NO: 8169 - DNA, 20 bp, synthetic construct
  source 1..20: mol_type = other DNA
tgaaagcggctattaatgta

SEQ ID NO: 8170 - DNA, 20 bp, synthetic construct
  source 1..20: mol_type = other DNA
gagaacaaatagtggctctg

SEQ ID NO: 8171 - DNA, 20 bp, synthetic construct
  source 1..20: mol_type = other DNA
tgcgcccgcaatgactgcca

SEQ ID NO: 8172 - DNA, 20 bp, synthetic construct
  source 1..20: mol_type = other DNA
tccgacgctgatctggagat

SEQ ID NO: 8173 - DNA, 20 bp, synthetic construct
  source 1..20: mol_type = other DNA
ctgccgcacaatccctagag

SEQ ID NO: 8174 - DNA, 20 bp, synthetic construct
  source 1..20: mol_type = other DNA
ctagatgcttagtgacactg

SEQ ID NO: 8175 - DNA, 20 bp, synthetic construct
  source 1..20: mol_type = other DNA
agaaccattgcattccgttc

SEQ ID NO: 8176 - DNA, 20 bp, synthetic construct
  source 1..20: mol_type = other DNA
gcggataaacacacctcaat

SEQ ID NO: 8177 - DNA, 20 bp, synthetic construct
  source 1..20: mol_type = other DNA
ggaggcgcttcttattgagc

SEQ ID NO: 8178 - DNA, 20 bp, synthetic construct
  source 1..20: mol_type = other DNA
acaagacagaccctactgga

SEQ ID NO: 8179 - DNA, 20 bp, synthetic construct
  source 1..20: mol_type = other DNA
acaaatgtcgctcctggagg

SEQ ID NO: 8180 - DNA, 20 bp, synthetic construct
  source 1..20: mol_type = other DNA
catggtgggttccgcaccat

SEQ ID NO: 8181 - DNA, 20 bp, synthetic construct
  source 1..20: mol_type = other DNA
aagttgtcgcaagatcggtc

SEQ ID NO: 8182 - DNA, 20 bp, synthetic construct
  source 1..20: mol_type = other DNA
catcaaatatttgtctacct

SEQ ID NO: 8183 - DNA, 20 bp, synthetic construct
  source 1..20: mol_type = other DNA
cgacggtccctagtttccaa

SEQ ID NO: 8184 - DNA, 20 bp, synthetic construct
  source 1..20: mol_type = other DNA
cgaatcccggtattagagat

SEQ ID NO: 8185 - DNA, 20 bp, synthetic construct
  source 1..20: mol_type = other DNA
aggtatatatggtctgggcc

SEQ ID NO: 8186 - DNA, 20 bp, synthetic construct
  source 1..20: mol_type = other DNA
cgggtgttgtactctacagt

SEQ ID NO: 8187 - DNA, 20 bp, synthetic construct
  source 1..20: mol_type = other DNA
tcgctgctataagcaaatac

SEQ ID NO: 8188 - DNA, 20 bp, synthetic construct
  source 1..20: mol_type = other DNA
accttacgtaaatcgattga

SEQ ID NO: 8189 - DNA, 20 bp, synthetic construct
  source 1..20: mol_type = other DNA
ttgctggagtcagcaaccca

SEQ ID NO: 8190 - DNA, 20 bp, synthetic construct
  source 1..20: mol_type = other DNA
tctcgttgttggtcgggttg

SEQ ID NO: 8191 - DNA, 20 bp, synthetic construct
  source 1..20: mol_type = other DNA
actgctactccacagccgga

SEQ ID NO: 8192 - DNA, 20 bp, synthetic construct
  source 1..20: mol_type = other DNA
aaaggtatgctctcggctgc

SEQ ID NO: 8193 - DNA, 20 bp, synthetic construct
  source 1..20: mol_type = other DNA
caggttggtacgcgatagga

SEQ ID NO: 8194 - DNA, 20 bp, synthetic construct
  source 1..20: mol_type = other DNA
ataccacgatgttatgactt

SEQ ID NO: 8195 - DNA, 20 bp, synthetic construct
  source 1..20: mol_type = other DNA
tttacagccgccctcaatag

SEQ ID NO: 8196 - DNA, 20 bp, synthetic construct
  source 1..20: mol_type = other DNA
ctatagcccagtcgcatctt

SEQ ID NO: 8197 - DNA, 20 bp, synthetic construct
  source 1..20: mol_type = other DNA
aagttcgaagcctacagcca

SEQ ID NO: 8198 - DNA, 20 bp, synthetic construct
  source 1..20: mol_type = other DNA
aactttgaatgcatgtaccc

SEQ ID NO: 8199 - DNA, 20 bp, synthetic construct
  source 1..20: mol_type = other DNA
gacaagcgtcatccagtacg

SEQ ID NO: 8200 - DNA, 20 bp, synthetic construct
  source 1..20: mol_type = other DNA
gcttgtcatgcaatagtcaa

SEQ ID NO: 8201 - DNA, 20 bp, synthetic construct
  source 1..20: mol_type = other DNA
gcatgggagacgggcatcgg

SEQ ID NO: 8202 - DNA, 20 bp, synthetic construct
  source 1..20: mol_type = other DNA
gttgagcaccgtgaatcggg

SEQ ID NO: 8203 - DNA, 20 bp, synthetic construct
  source 1..20: mol_type = other DNA
gcttagacgataacgctgaa

SEQ ID NO: 8204 - DNA, 20 bp, synthetic construct
  source 1..20: mol_type = other DNA
ggctgatgcccttctatacc

SEQ ID NO: 8205 - DNA, 20 bp, synthetic construct
  source 1..20: mol_type = other DNA
ggaggatgatagggacactt

SEQ ID NO: 8206 - DNA, 20 bp, synthetic construct
  source 1..20: mol_type = other DNA
ttctggtggtcatgcaatca

SEQ ID NO: 8207 - DNA, 20 bp, synthetic construct
  source 1..20: mol_type = other DNA
gatccagtagagccacatta

SEQ ID NO: 8208 - DNA, 20 bp, synthetic construct
  source 1..20: mol_type = other DNA
gcagaacgggctagtaggta

SEQ ID NO: 8209 - DNA, 20 bp, synthetic construct
  source 1..20: mol_type = other DNA
gtgcaagggtcagcagatga

SEQ ID NO: 8210 - DNA, 20 bp, synthetic construct
  source 1..20: mol_type = other DNA
tctcacgccgagccgttgta

SEQ ID NO: 8211 - DNA, 20 bp, synthetic construct
  source 1..20: mol_type = other DNA
acagtcattaccttctctat

SEQ ID NO: 8212 - DNA, 20 bp, synthetic construct
  source 1..20: mol_type = other DNA
ttataagatgaggtaccgtt

SEQ ID NO: 8213 - DNA, 20 bp, synthetic construct
  source 1..20: mol_type = other DNA
catccgataattcaacgtgc

SEQ ID NO: 8214 - DNA, 20 bp, synthetic construct
  source 1..20: mol_type = other DNA
gaacaccaccgacatctggg

SEQ ID NO: 8215 - DNA, 20 bp, synthetic construct
  source 1..20: mol_type = other DNA
gcccaacggaagtctagctg

SEQ ID NO: 8216 - DNA, 20 bp, synthetic construct
  source 1..20: mol_type = other DNA
atccaggagtccaatgtctc

SEQ ID NO: 8217 - DNA, 20 bp, synthetic construct
  source 1..20: mol_type = other DNA
ggtcagaatgctagcgtgac

SEQ ID NO: 8218 - DNA, 20 bp, synthetic construct
  source 1..20: mol_type = other DNA
atgtagatccttccgtaagt

SEQ ID NO: 8219 - DNA, 20 bp, synthetic construct
  source 1..20: mol_type = other DNA
accctgaaacaccgtctttg

SEQ ID NO: 8220 - DNA, 20 bp, synthetic construct
  source 1..20: mol_type = other DNA
tcgattattgcatcgagtct

SEQ ID NO: 8221 - DNA, 20 bp, synthetic construct
  source 1..20: mol_type = other DNA
cccgtcaccatataggccgg

SEQ ID NO: 8222 - DNA, 20 bp, synthetic construct
  source 1..20: mol_type = other DNA
tcctcagtcttagcaatcat

SEQ ID NO: 8223 - DNA, 20 bp, synthetic construct
  source 1..20: mol_type = other DNA
attatcaagttcttccgtag

SEQ ID NO: 8224 - DNA, 20 bp, synthetic construct
  source 1..20: mol_type = other DNA
ggtgacagttcttcacgacc

SEQ ID NO: 8225 - DNA, 20 bp, synthetic construct
  source 1..20: mol_type = other DNA
gttccagcgactacctaagt

SEQ ID NO: 8226 - DNA, 20 bp, synthetic construct
  source 1..20: mol_type = other DNA
gtcggcatgagaccattgcg

SEQ ID NO: 8227 - DNA, 20 bp, synthetic construct
  source 1..20: mol_type = other DNA
tcagatagagcttatcgatc

SEQ ID NO: 8228 - DNA, 20 bp, synthetic construct
  source 1..20: mol_type = other DNA
tctctctataagacccagga

SEQ ID NO: 8229 - DNA, 20 bp, synthetic construct
  source 1..20: mol_type = other DNA
ggtatgtctggactacatag

SEQ ID NO: 8230 - DNA, 20 bp, synthetic construct
  source 1..20: mol_type = other DNA
ctacatcatgacaggcaaat

SEQ ID NO: 8231 - DNA, 20 bp, synthetic construct
  source 1..20: mol_type = other DNA
tgatgagcttgttcgaccac

SEQ ID NO: 8232 - DNA, 20 bp, synthetic construct
  source 1..20: mol_type = other DNA
cacacgctccgaccgctcga

SEQ ID NO: 8233 - DNA, 20 bp, synthetic construct
  source 1..20: mol_type = other DNA
gagaaaggcccgtgctcttg

SEQ ID NO: 8234 - DNA, 20 bp, synthetic construct
  source 1..20: mol_type = other DNA
gctagaaaccagtaggtaca

SEQ ID NO: 8235 - DNA, 20 bp, synthetic construct
  source 1..20: mol_type = other DNA
ttccaatggcgatgtgtatg

SEQ ID NO: 8236 - DNA, 20 bp, synthetic construct
  source 1..20: mol_type = other DNA
cgtgctaggccgtagatacc

SEQ ID NO: 8237 - DNA, 20 bp, synthetic construct
  source 1..20: mol_type = other DNA
gttccctgttatgctagcag

SEQ ID NO: 8238 - DNA, 20 bp, synthetic construct
  source 1..20: mol_type = other DNA
ccgagggctgataaagagat

SEQ ID NO: 8239 - DNA, 20 bp, synthetic construct
  source 1..20: mol_type = other DNA
tggcgctcaaagctaaacta

SEQ ID NO: 8240 - DNA, 20 bp, synthetic construct
  source 1..20: mol_type = other DNA
atcctaggacctaaggcctg

SEQ ID NO: 8241 - DNA, 20 bp, synthetic construct
  source 1..20: mol_type = other DNA
cgaaatacgcgagcctaagg

SEQ ID NO: 8242 - DNA, 20 bp, synthetic construct
  source 1..20: mol_type = other DNA
ctgttgaacgagatactggg

SEQ ID NO: 8243 - DNA, 20 bp, synthetic construct
  source 1..20: mol_type = other DNA
gatttacgcagaaaccgagc

SEQ ID NO: 8244 - DNA, 20 bp, synthetic construct
  source 1..20: mol_type = other DNA
ggccttacctttccctgacc

SEQ ID NO: 8245 - DNA, 20 bp, synthetic construct
  source 1..20: mol_type = other DNA
ctgggcgcttctgtgatcct

SEQ ID NO: 8246 - DNA, 20 bp, synthetic construct
  source 1..20: mol_type = other DNA
taagattatggatgtgtgtc

SEQ ID NO: 8247 - DNA, 20 bp, synthetic construct
  source 1..20: mol_type = other DNA
gtctggtgacatcgtagtgg

SEQ ID NO: 8248 - DNA, 20 bp, synthetic construct
  source 1..20: mol_type = other DNA
aggtccgggtgataggccat

SEQ ID NO: 8249 - DNA, 20 bp, synthetic construct
  source 1..20: mol_type = other DNA
agaccgtagtatccatatcg

SEQ ID NO: 8250 - DNA, 20 bp, synthetic construct
  source 1..20: mol_type = other DNA
gtgaactgccaccgtttatc

SEQ ID NO: 8251 - DNA, 20 bp, synthetic construct
  source 1..20: mol_type = other DNA
tgttaatagcacagctatag

SEQ ID NO: 8252 - DNA, 20 bp, synthetic construct
  source 1..20: mol_type = other DNA
ctggacttcgctgtcgccaa

SEQ ID NO: 8253 - DNA, 20 bp, synthetic construct
  source 1..20: mol_type = other DNA
ttctgggccgaagctcacca

SEQ ID NO: 8254 - DNA, 20 bp, synthetic construct
  source 1..20: mol_type = other DNA
atttgctccaaagaaaccac

SEQ ID NO: 8255 - DNA, 20 bp, synthetic construct
  source 1..20: mol_type = other DNA
ccgactactccgtgctctcc

SEQ ID NO: 8256 - DNA, 20 bp, synthetic construct
  source 1..20: mol_type = other DNA
tcttcgggcctgacgtatct

SEQ ID NO: 8257 - DNA, 20 bp, synthetic construct
  source 1..20: mol_type = other DNA
cgcaccttctttgtgttgac

SEQ ID NO: 8258 - DNA, 20 bp, synthetic construct
  source 1..20: mol_type = other DNA
gggcatcttgtaaggtgatc

SEQ ID NO: 8259 - DNA, 20 bp, synthetic construct
  source 1..20: mol_type = other DNA
gttcagccacctatcttgcg

SEQ ID NO: 8260 - DNA, 20 bp, synthetic construct
  source 1..20: mol_type = other DNA
ggttcgaaataatgcggaga

SEQ ID NO: 8261 - DNA, 20 bp, synthetic construct
  source 1..20: mol_type = other DNA
aggctctactctaaagtggg

SEQ ID NO: 8262 - DNA, 20 bp, synthetic construct
  source 1..20: mol_type = other DNA
aactcaggccttgcgcccac

SEQ ID NO: 8263 - DNA, 20 bp, synthetic construct
  source 1..20: mol_type = other DNA
ttataagaatcggaggcggg

SEQ ID NO: 8264 - DNA, 20 bp, synthetic construct
  source 1..20: mol_type = other DNA
ttagacacttgagtaagttg

SEQ ID NO: 8265 - DNA, 20 bp, synthetic construct
  source 1..20: mol_type = other DNA
aagtactgttaagttagcca

SEQ ID NO: 8266 - DNA, 20 bp, synthetic construct
  source 1..20: mol_type = other DNA
gcccatgagatcgtgcgaat

SEQ ID NO: 8267 - DNA, 20 bp, synthetic construct
  source 1..20: mol_type = other DNA
gtccacgactaaatcccaag

SEQ ID NO: 8268 - DNA, 20 bp, synthetic construct
  source 1..20: mol_type = other DNA
cgctggcatgccttagttgt

SEQ ID NO: 8269 - DNA, 20 bp, synthetic construct
  source 1..20: mol_type = other DNA
ccacgcataaagtggccatc

SEQ ID NO: 8270 - DNA, 20 bp, synthetic construct
  source 1..20: mol_type = other DNA
ttcagatgaaccacctaacg

SEQ ID NO: 8271 - DNA, 20 bp, synthetic construct
  source 1..20: mol_type = other DNA
tcagtcctgttgttgcagtg

SEQ ID NO: 8272 - DNA, 20 bp, synthetic construct
  source 1..20: mol_type = other DNA
gttggcgtgaatgaggtgta

SEQ ID NO: 8273 - DNA, 20 bp, synthetic construct
  source 1..20: mol_type = other DNA
gggaccacctagccagagac

SEQ ID NO: 8274 - DNA, 20 bp, synthetic construct
  source 1..20: mol_type = other DNA
tgcgatcataacggatactt

SEQ ID NO: 8275 - DNA, 20 bp, synthetic construct
  source 1..20: mol_type = other DNA
aaattagggtcgtgtgtaga

SEQ ID NO: 8276 - DNA, 20 bp, synthetic construct
  source 1..20: mol_type = other DNA
atttagagcgtgcgcagagt

SEQ ID NO: 8277 - DNA, 20 bp, synthetic construct
  source 1..20: mol_type = other DNA
tggcgctgtcgtctcttcac

SEQ ID NO: 8278 - DNA, 20 bp, synthetic construct
  source 1..20: mol_type = other DNA
gcgacaattctttgaatcta

SEQ ID NO: 8279 - DNA, 20 bp, synthetic construct
  source 1..20: mol_type = other DNA
gctgtctcgcactaacggca

SEQ ID NO: 8280 - DNA, 20 bp, synthetic construct
  source 1..20: mol_type = other DNA
tggactgacttatttccagg

SEQ ID NO: 8281 - DNA, 20 bp, synthetic construct
  source 1..20: mol_type = other DNA
ctcgcgcaataattgtcatc

SEQ ID NO: 8282 - DNA, 20 bp, synthetic construct
  source 1..20: mol_type = other DNA
aaccttgatagcagtgaatc

SEQ ID NO: 8283 - DNA, 20 bp, synthetic construct
  source 1..20: mol_type = other DNA
ccagaaagcaaggttcgtac

SEQ ID NO: 8284 - DNA, 20 bp, synthetic construct
  source 1..20: mol_type = other DNA
cagatccagttgctgatcgg

SEQ ID NO: 8285 - DNA, 20 bp, synthetic construct
  source 1..20: mol_type = other DNA
cagcgacgtcgtggactcct

SEQ ID NO: 8286 - DNA, 20 bp, synthetic construct
  source 1..20: mol_type = other DNA
gttcgtgcggtcggcttgtg

SEQ ID NO: 8287 - DNA, 20 bp, synthetic construct
  source 1..20: mol_type = other DNA
tggcatagtggagaggacat

SEQ ID NO: 8288 - DNA, 20 bp, synthetic construct
  source 1..20: mol_type = other DNA
acaagatttggttggactgc

SEQ ID NO: 8289 - DNA, 20 bp, synthetic construct
  source 1..20: mol_type = other DNA
acatcgagttagtagtaact

SEQ ID NO: 8290 - DNA, 20 bp, synthetic construct
  source 1..20: mol_type = other DNA
tggaaacacggcaacttagc

SEQ ID NO: 8291 - DNA, 20 bp, synthetic construct
  source 1..20: mol_type = other DNA
tgcacgtgcaggacggccta

SEQ ID NO: 8292 - DNA, 20 bp, synthetic construct
  source 1..20: mol_type = other DNA
ttggacaagtcctgtgtctt

SEQ ID NO: 8293 - DNA, 20 bp, synthetic construct
  source 1..20: mol_type = other DNA
tgcatgtgccggatttcgta

SEQ ID NO: 8294 - DNA, 20 bp, synthetic construct
  source 1..20: mol_type = other DNA
gctgaagtactcaagtttat

SEQ ID NO: 8295 - DNA, 20 bp, synthetic construct
  source 1..20: mol_type = other DNA
attccgcactactatatacc

SEQ ID NO: 8296 - DNA, 20 bp, synthetic construct
  source 1..20: mol_type = other DNA
aagcgtagcaccatctcgac

SEQ ID NO: 8297 - DNA, 20 bp, synthetic construct
  source 1..20: mol_type = other DNA
cgtcgagatagtttacaaat

SEQ ID NO: 8298 - DNA, 20 bp, synthetic construct
  source 1..20: mol_type = other DNA
tgcggacaattctccacaac

SEQ ID NO: 8299 - DNA, 20 bp, synthetic construct
  source 1..20: mol_type = other DNA
actcatacgcaacctgagcg

SEQ ID NO: 8300 - DNA, 20 bp, synthetic construct
  source 1..20: mol_type = other DNA
atagttggcgggcctgccta

SEQ ID NO: 8301 - DNA, 20 bp, synthetic construct
  source 1..20: mol_type = other DNA
gtctaagtcagttggcatag

SEQ ID NO: 8302 - DNA, 20 bp, synthetic construct
  source 1..20: mol_type = other DNA
ccgtcttcgcatctcctccc

SEQ ID NO: 8303 - DNA, 20 bp, synthetic construct
  source 1..20: mol_type = other DNA
ttgtactcccggactcagca

SEQ ID NO: 8304 - DNA, 20 bp, synthetic construct
  source 1..20: mol_type = other DNA
tagatggtgactctaactga

SEQ ID NO: 8305 - DNA, 20 bp, synthetic construct
  source 1..20: mol_type = other DNA
acggaatgtagcaccggact

SEQ ID NO: 8306 - DNA, 20 bp, synthetic construct
  source 1..20: mol_type = other DNA
ctgagcgactatctcaatgg

SEQ ID NO: 8307 - DNA, 20 bp, synthetic construct
  source 1..20: mol_type = other DNA
cactctgatgcacgttgaga

SEQ ID NO: 8308 - DNA, 20 bp, synthetic construct
  source 1..20: mol_type = other DNA
gtggctatgacgccagtgtg

SEQ ID NO: 8309 - DNA, 20 bp, synthetic construct
  source 1..20: mol_type = other DNA
atcatttcgcaacggatatt

SEQ ID NO: 8310 - DNA, 20 bp, synthetic construct
  source 1..20: mol_type = other DNA
tacgcgatctatatgattcc

SEQ ID NO: 8311 - DNA, 20 bp, synthetic construct
  source 1..20: mol_type = other DNA
agagacccatcgatacgtta

SEQ ID NO: 8312 - DNA, 20 bp, synthetic construct
  source 1..20: mol_type = other DNA
tgtttcatgtgcttggcacg

SEQ ID NO: 8313 - DNA, 20 bp, synthetic construct
  source 1..20: mol_type = other DNA
tctgaatggcttggagaggt

SEQ ID NO: 8314 - DNA, 20 bp, synthetic construct
  source 1..20: mol_type = other DNA
tgcagatccgggtgaaatgt

SEQ ID NO: 8315 - DNA, 20 bp, synthetic construct
  source 1..20: mol_type = other DNA
gcgggtgcactctatgtggt

SEQ ID NO: 8316 - DNA, 20 bp, synthetic construct
  source 1..20: mol_type = other DNA
ttctccctgccgctctgctc

SEQ ID NO: 8317 - DNA, 20 bp, synthetic construct
  source 1..20: mol_type = other DNA
agtactatgttgtccctaac

SEQ ID NO: 8318 - DNA, 20 bp, synthetic construct
  source 1..20: mol_type = other DNA
tgtaagtctcttccgtgggt

SEQ ID NO: 8319 - DNA, 20 bp, synthetic construct
  source 1..20: mol_type = other DNA
gtaccgtcggattaactccg

SEQ ID NO: 8320 - DNA, 20 bp, synthetic construct
  source 1..20: mol_type = other DNA
tggcattcgtcctcggtgtt

SEQ ID NO: 8321 - DNA, 20 bp, synthetic construct
  source 1..20: mol_type = other DNA
cttaagcgttccgccgtctc

SEQ ID NO: 8322 - DNA, 20 bp, synthetic construct
  source 1..20: mol_type = other DNA
gaaatgtgaggtatgtctag

SEQ ID NO: 8323 - DNA, 20 bp, synthetic construct
  source 1..20: mol_type = other DNA
gaggaatctcgtttcgatcg

SEQ ID NO: 8324 - DNA, 20 bp, synthetic construct
  source 1..20: mol_type = other DNA
ggaatacggacgcagcataa

SEQ ID NO: 8325 - DNA, 20 bp, synthetic construct
  source 1..20: mol_type = other DNA
tggaagatcgtcaagggaaa

SEQ ID NO: 8326 - DNA, 20 bp, synthetic construct
  source 1..20: mol_type = other DNA
ctatcgtaaagctgatttct

SEQ ID NO: 8327 - DNA, 20 bp, synthetic construct
  source 1..20: mol_type = other DNA
accacgtcgcgactcggaac

SEQ ID NO: 8328 - DNA, 20 bp, synthetic construct
  source 1..20: mol_type = other DNA
tgtcttcgcgactgattctt

SEQ ID NO: 8329 - DNA, 20 bp, synthetic construct
  source 1..20: mol_type = other DNA
acttaaactcgggataggac

SEQ ID NO: 8330 - DNA, 20 bp, synthetic construct
  source 1..20: mol_type = other DNA
gcgttccacagtcttagttc

SEQ ID NO: 8331 - DNA, 20 bp, synthetic construct
  source 1..20: mol_type = other DNA
tttgaaacggtggtcgcttg

SEQ ID NO: 8332 - DNA, 20 bp, synthetic construct
  source 1..20: mol_type = other DNA
acattgcccaccgggtgaac

SEQ ID NO: 8333 - DNA, 20 bp, synthetic construct
  source 1..20: mol_type = other DNA
tgcctccatctttggctatc

SEQ ID NO: 8334 - DNA, 20 bp, synthetic construct
  source 1..20: mol_type = other DNA
caactgcgccgcaaaccgtg

SEQ ID NO: 8335 - DNA, 20 bp, synthetic construct
  source 1..20: mol_type = other DNA
catgacgtgaagctactcca

SEQ ID NO: 8336 - DNA, 20 bp, synthetic construct
  source 1..20: mol_type = other DNA
gacccggagttaaactgcga

SEQ ID NO: 8337 - DNA, 20 bp, synthetic construct
  source 1..20: mol_type = other DNA
gtattcggcccaccacggac

SEQ ID NO: 8338 - DNA, 20 bp, synthetic construct
  source 1..20: mol_type = other DNA
cttcagatgtaaactgagcg

SEQ ID NO: 8339 - DNA, 20 bp, synthetic construct
  source 1..20: mol_type = other DNA
cgataccgtagggttcttgt

SEQ ID NO: 8340 - DNA, 20 bp, synthetic construct
  source 1..20: mol_type = other DNA
cttcttctgctgacccgttc

SEQ ID NO: 8341 - DNA, 20 bp, synthetic construct
  source 1..20: mol_type = other DNA
gatggtgagctggcacctca

SEQ ID NO: 8342 - DNA, 20 bp, synthetic construct
  source 1..20: mol_type = other DNA
acacgttgaatctttgaaat

SEQ ID NO: 8343 - DNA, 20 bp, synthetic construct
  source 1..20: mol_type = other DNA
gcataacgcgagtgcggctc

SEQ ID NO: 8344 - DNA, 20 bp, synthetic construct
  source 1..20: mol_type = other DNA
accgctaaatcgaacggtgc

SEQ ID NO: 8345 - DNA, 20 bp, synthetic construct
  source 1..20: mol_type = other DNA
aaacatcaaggtgtgagctc

SEQ ID NO: 8346 - DNA, 20 bp, synthetic construct
  source 1..20: mol_type = other DNA
cgggagataatagtgaggtt

SEQ ID NO: 8347 - DNA, 20 bp, synthetic construct
  source 1..20: mol_type = other DNA
acgactctacaggctggttg

SEQ ID NO: 8348 - DNA, 20 bp, synthetic construct
  source 1..20: mol_type = other DNA
cattacgcaaatccagtgga

SEQ ID NO: 8349 - DNA, 20 bp, synthetic construct
  source 1..20: mol_type = other DNA
gttagccagatttctatcac

SEQ ID NO: 8350 - DNA, 20 bp, synthetic construct
  source 1..20: mol_type = other DNA
agacgcggtctaagaaacgg

SEQ ID NO: 8351 - DNA, 20 bp, synthetic construct
  source 1..20: mol_type = other DNA
tatctgtcggcaatttcatg

SEQ ID NO: 8352 - DNA, 20 bp, synthetic construct
  source 1..20: mol_type = other DNA
tttgtagtcaatgtactggc

SEQ ID NO: 8353 - DNA, 20 bp, synthetic construct
  source 1..20: mol_type = other DNA
cgtgactgagataagcgcga

SEQ ID NO: 8354 - DNA, 20 bp, synthetic construct
  source 1..20: mol_type = other DNA
ttgaataaggcggcatcagc

SEQ ID NO: 8355 - DNA, 20 bp, synthetic construct
  source 1..20: mol_type = other DNA
actgtcgaattgttaggcac

SEQ ID NO: 8356 - DNA, 20 bp, synthetic construct
  source 1..20: mol_type = other DNA
cttaatgcattgtggtccgt

SEQ ID NO: 8357 - DNA, 20 bp, synthetic construct
  source 1..20: mol_type = other DNA
tggatcctgggatagcgtct

SEQ ID NO: 8358 - DNA, 20 bp, synthetic construct
  source 1..20: mol_type = other DNA
ctttctttacgcacattaat

SEQ ID NO: 8359 - DNA, 20 bp, synthetic construct
  source 1..20: mol_type = other DNA
ttaaatgtacacagccgtac

SEQ ID NO: 8360 - DNA, 20 bp, synthetic construct
  source 1..20: mol_type = other DNA
tttcaagcactaaggcacaa

SEQ ID NO: 8361 - DNA, 20 bp, synthetic construct
  source 1..20: mol_type = other DNA
cataagaaagggcgcgtgaa

SEQ ID NO: 8362 - DNA, 20 bp, synthetic construct
  source 1..20: mol_type = other DNA
actattctcaaagtccagat

SEQ ID NO: 8363 - DNA, 20 bp, synthetic construct
  source 1..20: mol_type = other DNA
ggcacaccgttacggaagga

SEQ ID NO: 8364 - DNA, 20 bp, synthetic construct
  source 1..20: mol_type = other DNA
ccgtgaactagcgcaatgta

SEQ ID NO: 8365 - DNA, 20 bp, synthetic construct
  source 1..20: mol_type = other DNA
tatctcaacccaccctgaat

SEQ ID NO: 8366 - DNA, 20 bp, synthetic construct
  source 1..20: mol_type = other DNA
tccgagacaatacttcagga

SEQ ID NO: 8367 - DNA, 20 bp, synthetic construct
  source 1..20: mol_type = other DNA
ttaaacgatttgaaactcgc

SEQ ID NO: 8368 - DNA, 20 bp, synthetic construct
  source 1..20: mol_type = other DNA
tagagcatcgggttagtcgc

SEQ ID NO: 8369 - DNA, 20 bp, synthetic construct
  source 1..20: mol_type = other DNA
gcaatacgtataagggtctt

SEQ ID NO: 8370 - DNA, 20 bp, synthetic construct
  source 1..20: mol_type = other DNA
taggaaggaggcgtgtttgg

SEQ ID NO: 8371 - DNA, 20 bp, synthetic construct
  source 1..20: mol_type = other DNA
ccaatcgatgtcgtaagcca

SEQ ID NO: 8372 - DNA, 20 bp, synthetic construct
  source 1..20: mol_type = other DNA
tagtcttcattcgggcgaaa

SEQ ID NO: 8373 - DNA, 20 bp, synthetic construct
  source 1..20: mol_type = other DNA
gttcgctggtacctctatcg

SEQ ID NO: 8374 - DNA, 20 bp, synthetic construct
  source 1..20: mol_type = other DNA
gggtgtacagcacgggataa

SEQ ID NO: 8375 - DNA, 20 bp, synthetic construct
  source 1..20: mol_type = other DNA
tgcgctgtccgatacactag

SEQ ID NO: 8376 - DNA, 20 bp, synthetic construct
  source 1..20: mol_type = other DNA
cgaagataaccttatcggct

SEQ ID NO: 8377 - DNA, 20 bp, synthetic construct
  source 1..20: mol_type = other DNA
tccatagctgcgtcaacgta

SEQ ID NO: 8378 - DNA, 20 bp, synthetic construct
  source 1..20: mol_type = other DNA
gacaagccaggaatagacgg

SEQ ID NO: 8379 - DNA, 20 bp, synthetic construct
  source 1..20: mol_type = other DNA
gaacgtagcggctacactac

SEQ ID NO: 8380 - DNA, 20 bp, synthetic construct
  source 1..20: mol_type = other DNA
gactgaaaccaatacattag

SEQ ID NO: 8381 - DNA, 20 bp, synthetic construct
  source 1..20: mol_type = other DNA
atgatttaggactagactct

SEQ ID NO: 8382 - DNA, 20 bp, synthetic construct
  source 1..20: mol_type = other DNA
ctcagctgatgtggatgctc

SEQ ID NO: 8383 - DNA, 20 bp, synthetic construct
  source 1..20: mol_type = other DNA
gacgtgtctgtggcacccgt

SEQ ID NO: 8384 - DNA, 20 bp, synthetic construct
  source 1..20: mol_type = other DNA
ctcgtggaccaaacggcaca

SEQ ID NO: 8385 - DNA, 20 bp, synthetic construct
  source 1..20: mol_type = other DNA
tccgtacaggctctgatacc

SEQ ID NO: 8386 - DNA, 20 bp, synthetic construct
  source 1..20: mol_type = other DNA
tacgtcgagcggagtacact

SEQ ID NO: 8387 - DNA, 20 bp, synthetic construct
  source 1..20: mol_type = other DNA
atctactaggcattgtagga

SEQ ID NO: 8388 - DNA, 20 bp, synthetic construct
  source 1..20: mol_type = other DNA
tcctaagttctgtagttcac

SEQ ID NO: 8389 - DNA, 20 bp, synthetic construct
  source 1..20: mol_type = other DNA
ataagaccgagtcctatgtt

SEQ ID NO: 8390 - DNA, 20 bp, synthetic construct
  source 1..20: mol_type = other DNA
atatctggcaatcgtatgtt

SEQ ID NO: 8391 - DNA, 20 bp, synthetic construct
  source 1..20: mol_type = other DNA
tatactgtccgcctcctttc

SEQ ID NO: 8392 - DNA, 20 bp, synthetic construct
  source 1..20: mol_type = other DNA
gaatatgccacgacgctatg

SEQ ID NO: 8393 - DNA, 20 bp, synthetic construct
  source 1..20: mol_type = other DNA
caagtagcaccgagctcgct

SEQ ID NO: 8394 - DNA, 20 bp, synthetic construct
  source 1..20: mol_type = other DNA
taactcatacttgttagtac

SEQ ID NO: 8395 - DNA, 20 bp, synthetic construct
  source 1..20: mol_type = other DNA
aacagggagcatcaagggcg

SEQ ID NO: 8396 - DNA, 20 bp, synthetic construct
  source 1..20: mol_type = other DNA
gaatggtcgtcccgaactcg

SEQ ID NO: 8397 - DNA, 20 bp, synthetic construct
  source 1..20: mol_type = other DNA
tagcttggacccttaagaca

SEQ ID NO: 8398 - DNA, 20 bp, synthetic construct
  source 1..20: mol_type = other DNA
aagtagctgccctcgttcgt

SEQ ID NO: 8399 - DNA, 20 bp, synthetic construct
  source 1..20: mol_type = other DNA
ctatctttcacgccgtcaca

SEQ ID NO: 8400 - DNA, 20 bp, synthetic construct
  source 1..20: mol_type = other DNA
gaagagctatccaaatggct

SEQ ID NO: 8401 - DNA, 20 bp, synthetic construct
  source 1..20: mol_type = other DNA
agtccctgattaggctgtag

SEQ ID NO: 8402 - DNA, 20 bp, synthetic construct
  source 1..20: mol_type = other DNA
atctagcaatctcaccctgt

SEQ ID NO: 8403 - DNA, 20 bp, synthetic construct
  source 1..20: mol_type = other DNA
cgcttcaatgagagtcactc

SEQ ID NO: 8404 - DNA, 20 bp, synthetic construct
  source 1..20: mol_type = other DNA
ttccactccacaagaaacgc

SEQ ID NO: 8405 - DNA, 20 bp, synthetic construct
  source 1..20: mol_type = other DNA
accagtgtggttagtaatgt

SEQ ID NO: 8406 - DNA, 20 bp, synthetic construct
  source 1..20: mol_type = other DNA
tcccagaaatgtgatactga

SEQ ID NO: 8407 - DNA, 20 bp, synthetic construct
  source 1..20: mol_type = other DNA
aaagttcgcgactcatactt

SEQ ID NO: 8408 - DNA, 20 bp, synthetic construct
  source 1..20: mol_type = other DNA
acaatccacaaaggttcacc

SEQ ID NO: 8409 - DNA, 20 bp, synthetic construct
  source 1..20: mol_type = other DNA
ctacgatcttgagctgcatt

SEQ ID NO: 8410 - DNA, 20 bp, synthetic construct
  source 1..20: mol_type = other DNA
agacggcgttcatgtttaga

SEQ ID NO: 8411 - DNA, 20 bp, synthetic construct
  source 1..20: mol_type = other DNA
agtgggtacataggttctga

SEQ ID NO: 8412 - DNA, 20 bp, synthetic construct
  source 1..20: mol_type = other DNA
cgacaaatacgacacacgca

SEQ ID NO: 8413 - DNA, 20 bp, synthetic construct
  source 1..20: mol_type = other DNA
ctcggatatgcaagctagtc

SEQ ID NO: 8414 - DNA, 20 bp, synthetic construct
  source 1..20: mol_type = other DNA
gaaggtgtattgcatgacaa

SEQ ID NO: 8415 - DNA, 20 bp, synthetic construct
  source 1..20: mol_type = other DNA
tcttcagcactatccctgtt

SEQ ID NO: 8416 - DNA, 20 bp, synthetic construct
  source 1..20: mol_type = other DNA
ctgatgacctacgtaaggaa

SEQ ID NO: 8417 - DNA, 20 bp, synthetic construct
  source 1..20: mol_type = other DNA
ggtataaattaggcctaaac

SEQ ID NO: 8418 - DNA, 20 bp, synthetic construct
  source 1..20: mol_type = other DNA
tcattccggacccttctacg

SEQ ID NO: 8419 - DNA, 20 bp, synthetic construct
  source 1..20: mol_type = other DNA
tcttacgtgtcttcattgtg

SEQ ID NO: 8420 - DNA, 20 bp, synthetic construct
  source 1..20: mol_type = other DNA
aagcatttcggagtaaacca

SEQ ID NO: 8421 - DNA, 20 bp, synthetic construct
  source 1..20: mol_type = other DNA
tcagctttcgccaaagattt

SEQ ID NO: 8422 - DNA, 20 bp, synthetic construct
  source 1..20: mol_type = other DNA
cactggatatagccctcaac

SEQ ID NO: 8423 - DNA, 20 bp, synthetic construct
  source 1..20: mol_type = other DNA
tctgttgaactgctttattg

SEQ ID NO: 8424 - DNA, 20 bp, synthetic construct
  source 1..20: mol_type = other DNA
gagtgaccagccactcgaat

SEQ ID NO: 8425 - DNA, 20 bp, synthetic construct
  source 1..20: mol_type = other DNA
tgaaagggtggtattcagca

SEQ ID NO: 8426 - DNA, 20 bp, synthetic construct
  source 1..20: mol_type = other DNA
taccgggtacagtagcagta

SEQ ID NO: 8427 - DNA, 20 bp, synthetic construct
  source 1..20: mol_type = other DNA
gaaacctgcgttacatcact

SEQ ID NO: 8428 - DNA, 20 bp, synthetic construct
  source 1..20: mol_type = other DNA
taggtggcctcgtatgacca

SEQ ID NO: 8429 - DNA, 20 bp, synthetic construct
  source 1..20: mol_type = other DNA
aagatgcaggcgagggcgag

SEQ ID NO: 8430 - DNA, 20 bp, synthetic construct
  source 1..20: mol_type = other DNA
tcggaccgccattctaatct

SEQ ID NO: 8431 - DNA, 20 bp, synthetic construct
  source 1..20: mol_type = other DNA
caggaaatgacaaatggaac

SEQ ID NO: 8432 - DNA, 20 bp, synthetic construct
  source 1..20: mol_type = other DNA
gagtcattgtttctgcctac

SEQ ID NO: 8433 - DNA, 20 bp, synthetic construct
  source 1..20: mol_type = other DNA
cctaccactaggcgttcacc

SEQ ID NO: 8434 - DNA, 20 bp, synthetic construct
  source 1..20: mol_type = other DNA
gtggtatcaagggccgaatc

SEQ ID NO: 8435 - DNA, 20 bp, synthetic construct
  source 1..20: mol_type = other DNA
tgaatagatggcctaagagc

SEQ ID NO: 8436 - DNA, 20 bp, synthetic construct
  source 1..20: mol_type = other DNA
tagacctatgataacacgtg

SEQ ID NO: 8437 - DNA, 20 bp, synthetic construct
  source 1..20: mol_type = other DNA
cctataacgttcgtaagatt

SEQ ID NO: 8438 - DNA, 20 bp, synthetic construct
  source 1..20: mol_type = other DNA
gtccgagagaatgtcgtcac

SEQ ID NO: 8439 - DNA, 20 bp, synthetic construct
  source 1..20: mol_type = other DNA
cttaggatccacagagcgcg

SEQ ID NO: 8440 - DNA, 20 bp, synthetic construct
  source 1..20: mol_type = other DNA
gaaacgactggaccatacca

SEQ ID NO: 8441 - DNA, 20 bp, synthetic construct
  source 1..20: mol_type = other DNA
cattgatgtacattccctcc

SEQ ID NO: 8442 - DNA, 20 bp, synthetic construct
  source 1..20: mol_type = other DNA
attcgcgcacatagggatgt

SEQ ID NO: 8443 - DNA, 20 bp, synthetic construct
  source 1..20: mol_type = other DNA
ggccggtcgatcagctcttt

SEQ ID NO: 8444 - DNA, 20 bp, synthetic construct
  source 1..20: mol_type = other DNA
agcaattcgcgggtgggtgg

SEQ ID NO: 8445 - DNA, 20 bp, synthetic construct
  source 1..20: mol_type = other DNA
tcccaacagctgggattgga

SEQ ID NO: 8446 - DNA, 20 bp, synthetic construct
  source 1..20: mol_type = other DNA
actacgtctgcacgtagatt

SEQ ID NO: 8447 - DNA, 20 bp, synthetic construct
  source 1..20: mol_type = other DNA
atacggtaagaccgtagtgt

SEQ ID NO: 8448 - DNA, 20 bp, synthetic construct
  source 1..20: mol_type = other DNA
cagcgcgcccttccttaaga

SEQ ID NO: 8449 - DNA, 20 bp, synthetic construct
  source 1..20: mol_type = other DNA
cgaactgctcacgagtcgat

SEQ ID NO: 8450 - DNA, 20 bp, synthetic construct
  source 1..20: mol_type = other DNA
atttaatatctcccgcgtat

SEQ ID NO: 8451 - DNA, 20 bp, synthetic construct
  source 1..20: mol_type = other DNA
actttcaggtggatggtcaa

SEQ ID NO: 8452 - DNA, 20 bp, synthetic construct
  source 1..20: mol_type = other DNA
gcctttgcatccgaacggta

SEQ ID NO: 8453 - DNA, 20 bp, synthetic construct
  source 1..20: mol_type = other DNA
cttacaccacacacgagtct

SEQ ID NO: 8454 - DNA, 20 bp, synthetic construct
  source 1..20: mol_type = other DNA
cggattctgaggcgatgaaa

SEQ ID NO: 8455 - DNA, 20 bp, synthetic construct
  source 1..20: mol_type = other DNA
cgctaaacggtttcagatcg

SEQ ID NO: 8456 - DNA, 20 bp, synthetic construct
  source 1..20: mol_type = other DNA
acgccgaaagatgctccagg

SEQ ID NO: 8457 - DNA, 20 bp, synthetic construct
  source 1..20: mol_type = other DNA
cgcggatgtgccattcacta

SEQ ID NO: 8458 - DNA, 20 bp, synthetic construct
  source 1..20: mol_type = other DNA
atgtgctatcctgagatccc

SEQ ID NO: 8459 - DNA, 20 bp, synthetic construct
  source 1..20: mol_type = other DNA
cccgcaaatctcggcttgac

SEQ ID NO: 8460 - DNA, 20 bp, synthetic construct
  source 1..20: mol_type = other DNA
gtcctctaatgtactagctg

SEQ ID NO: 8461 - DNA, 20 bp, synthetic construct
  source 1..20: mol_type = other DNA
ttagcggcaacctacctgaa

SEQ ID NO: 8462 - DNA, 20 bp, synthetic construct
  source 1..20: mol_type = other DNA
gcttagcgcatacgtgcgat

SEQ ID NO: 8463 - DNA, 20 bp, synthetic construct
  source 1..20: mol_type = other DNA
agtcttatcacgaccacggg

SEQ ID NO: 8464 - DNA, 20 bp, synthetic construct
  source 1..20: mol_type = other DNA
gtcggtttgatagtacctcc

SEQ ID NO: 8465 - DNA, 20 bp, synthetic construct
  source 1..20: mol_type = other DNA
gtccatctttgaacatgggt

SEQ ID NO: 8466 - DNA, 20 bp, synthetic construct
  source 1..20: mol_type = other DNA
gtgaagtgtcctgacctaaa

SEQ ID NO: 8467 - DNA, 20 bp, synthetic construct
  source 1..20: mol_type = other DNA
acagcgctcccagtcttgag

SEQ ID NO: 8468 - DNA, 20 bp, synthetic construct
  source 1..20: mol_type = other DNA
atagcgccgaacaatcatgt

SEQ ID NO: 8469 - DNA, 20 bp, synthetic construct
  source 1..20: mol_type = other DNA
taattcggtcaatcaccgat

SEQ ID NO: 8470 - DNA, 20 bp, synthetic construct
  source 1..20: mol_type = other DNA
aactgtacgctcaatgattt

SEQ ID NO: 8471 - DNA, 20 bp, synthetic construct
  source 1..20: mol_type = other DNA
tatgcgaccgccttgcacct

SEQ ID NO: 8472 - DNA, 20 bp, synthetic construct
  source 1..20: mol_type = other DNA
ccatccactatcacttgggc

SEQ ID NO: 8473 - DNA, 20 bp, synthetic construct
  source 1..20: mol_type = other DNA
acataagataagtgcttact

SEQ ID NO: 8474 - DNA, 20 bp, synthetic construct
  source 1..20: mol_type = other DNA
ggtcggcgcctgtgttaacg

SEQ ID NO: 8475 - DNA, 20 bp, synthetic construct
  source 1..20: mol_type = other DNA
cctatgtatccggaggcgaa

SEQ ID NO: 8476 - DNA, 20 bp, synthetic construct
  source 1..20: mol_type = other DNA
gtgatacgcccgtgagcgtc

SEQ ID NO: 8477 - DNA, 20 bp, synthetic construct
  source 1..20: mol_type = other DNA
tgaaccaccagagattctgg

SEQ ID NO: 8478 - DNA, 20 bp, synthetic construct
  source 1..20: mol_type = other DNA
tggtagcccttcggatcctc

SEQ ID NO: 8479 - DNA, 20 bp, synthetic construct
  source 1..20: mol_type = other DNA
gcctgaatttatctatcgtc

SEQ ID NO: 8480 - DNA, 20 bp, synthetic construct
  source 1..20: mol_type = other DNA
ccttgcaattgtgttggacg

SEQ ID NO: 8481 - DNA, 20 bp, synthetic construct
  source 1..20: mol_type = other DNA
ccgcatcttggctacaaccg

SEQ ID NO: 8482 - DNA, 20 bp, synthetic construct
  source 1..20: mol_type = other DNA
cacgcccacgtttcactaag

SEQ ID NO: 8483 - DNA, 20 bp, synthetic construct
  source 1..20: mol_type = other DNA
aaggaccaattccaatgtac

SEQ ID NO: 8484 - DNA, 20 bp, synthetic construct
  source 1..20: mol_type = other DNA
agctcctcacctacgagcgc

SEQ ID NO: 8485 - DNA, 20 bp, synthetic construct
  source 1..20: mol_type = other DNA
tgaagccgagatttgactag

SEQ ID NO: 8486 - DNA, 20 bp, synthetic construct
  source 1..20: mol_type = other DNA
atcataaagctagttgtacc

SEQ ID NO: 8487 - DNA, 20 bp, synthetic construct
  source 1..20: mol_type = other DNA
catactactttggatctact

SEQ ID NO: 8488 - DNA, 20 bp, synthetic construct
  source 1..20: mol_type = other DNA
taatcataagatactgcgca

SEQ ID NO: 8489 - DNA, 20 bp, synthetic construct
  source 1..20: mol_type = other DNA
gagacctaccggatggtagg

SEQ ID NO: 8490 - DNA, 20 bp, synthetic construct
  source 1..20: mol_type = other DNA
agggttgataagtctgatct

SEQ ID NO: 8491 - DNA, 20 bp, synthetic construct
  source 1..20: mol_type = other DNA
acgcatccgaaccattgcct

SEQ ID NO: 8492 - DNA, 20 bp, synthetic construct
  source 1..20: mol_type = other DNA
gcagcctacctgcttatgcc

SEQ ID NO: 8493 - DNA, 20 bp, synthetic construct
  source 1..20: mol_type = other DNA
tgcgcgacttgagaaaccgc

SEQ ID NO: 8494 - DNA, 20 bp, synthetic construct
  source 1..20: mol_type = other DNA
tagacaatatcctaagtgcc

SEQ ID NO: 8495 - DNA, 20 bp, synthetic construct
  source 1..20: mol_type = other DNA
ctgcatggctgtccggatgg

SEQ ID NO: 8496 - DNA, 20 bp, synthetic construct
  source 1..20: mol_type = other DNA
gatataagaggtaaccggct

SEQ ID NO: 8497 - DNA, 20 bp, synthetic construct
  source 1..20: mol_type = other DNA
cgtgctatttcctaacattg

SEQ ID NO: 8498 - DNA, 20 bp, synthetic construct
  source 1..20: mol_type = other DNA
acataagagcttgaggcacc

SEQ ID NO: 8499 - DNA, 20 bp, synthetic construct
  source 1..20: mol_type = other DNA
ggaagccggaaagaaggcgg

SEQ ID NO: 8500 - DNA, 20 bp, synthetic construct
  source 1..20: mol_type = other DNA
gacgatagtaacctggcgat

SEQ ID NO: 8501 - DNA, 20 bp, synthetic construct
  source 1..20: mol_type = other DNA
gtatcacagcgaacatcctg

SEQ ID NO: 8502 - DNA, 20 bp, synthetic construct
  source 1..20: mol_type = other DNA
tcacaattgagccctccatc

SEQ ID NO: 8503 - DNA, 20 bp, synthetic construct
  source 1..20: mol_type = other DNA
cggtggacgatcataaaggt

SEQ ID NO: 8504 - DNA, 20 bp, synthetic construct
  source 1..20: mol_type = other DNA
catgggaggtatgagaggcg

SEQ ID NO: 8505 - DNA, 20 bp, synthetic construct
  source 1..20: mol_type = other DNA
ggacgaaactcttccgccca

SEQ ID NO: 8506 - DNA, 20 bp, synthetic construct
  source 1..20: mol_type = other DNA
ccctactatggctaatgctt

SEQ ID NO: 8507 - DNA, 20 bp, synthetic construct
  source 1..20: mol_type = other DNA
cgcaagcgtctagctgctct

SEQ ID NO: 8508 - DNA, 20 bp, synthetic construct
  source 1..20: mol_type = other DNA
ttgatactctgttcttcagg

SEQ ID NO: 8509 - DNA, 20 bp, synthetic construct
  source 1..20: mol_type = other DNA
tgaaacagctagtcggcgat

SEQ ID NO: 8510 - DNA, 20 bp, synthetic construct
  source 1..20: mol_type = other DNA
tatcctgactcgataaccct

SEQ ID NO: 8511 - DNA, 20 bp, synthetic construct
  source 1..20: mol_type = other DNA
agatttgtgtccactggcct

SEQ ID NO: 8512 - DNA, 20 bp, synthetic construct
  source 1..20: mol_type = other DNA
ggcatgcagcacatatctct

SEQ ID NO: 8513 - DNA, 20 bp, synthetic construct
  source 1..20: mol_type = other DNA
gtaacgggatattacgcgag

SEQ ID NO: 8514 - DNA, 20 bp, synthetic construct
  source 1..20: mol_type = other DNA
ggacagacttaggtggtctc

SEQ ID NO: 8515 - DNA, 20 bp, synthetic construct
  source 1..20: mol_type = other DNA
ctacatgtcttccgactgtt

SEQ ID NO: 8516 - DNA, 20 bp, synthetic construct
  source 1..20: mol_type = other DNA
cgctatagtcgctgtcagat

SEQ ID NO: 8517 - DNA, 20 bp, synthetic construct
  source 1..20: mol_type = other DNA
catacgggctgacgtactaa

SEQ ID NO: 8518 - DNA, 20 bp, synthetic construct
  source 1..20: mol_type = other DNA
ggatcatactagcaacttca

SEQ ID NO: 8519 - DNA, 20 bp, synthetic construct
  source 1..20: mol_type = other DNA
caatggacaggtagggcgtt

SEQ ID NO: 8520 - DNA, 20 bp, synthetic construct
  source 1..20: mol_type = other DNA
ggaagagacttaaactgatg

SEQ ID NO: 8521 - DNA, 20 bp, synthetic construct
  source 1..20: mol_type = other DNA
aaatcgcggcggcttatccg

SEQ ID NO: 8522 - DNA, 20 bp, synthetic construct
  source 1..20: mol_type = other DNA
aatcctgtacttgtgcgccg

SEQ ID NO: 8523 - DNA, 20 bp, synthetic construct
  source 1..20: mol_type = other DNA
atgccggttaaatcctgtaa

SEQ ID NO: 8524 - DNA, 20 bp, synthetic construct
  source 1..20: mol_type = other DNA
tcggtgctattgtcatacgc

SEQ ID NO: 8525 - DNA, 20 bp, synthetic construct
  source 1..20: mol_type = other DNA
ctagtacctcggccttaaat

SEQ ID NO: 8526 - DNA, 20 bp, synthetic construct
  source 1..20: mol_type = other DNA
tacgaatccagcatacacga

SEQ ID NO: 8527 - DNA, 20 bp, synthetic construct
  source 1..20: mol_type = other DNA
cgcgccgttaacgcttgtga

SEQ ID NO: 8528 - DNA, 20 bp, synthetic construct
  source 1..20: mol_type = other DNA
tttggtgtagcgcaaattcg

SEQ ID NO: 8529 - DNA, 20 bp, synthetic construct
  source 1..20: mol_type = other DNA
gtataatacgaggtacctcg

SEQ ID NO: 8530 - DNA, 20 bp, synthetic construct
  source 1..20: mol_type = other DNA
actgagatgtaccagattac

SEQ ID NO: 8531 - DNA, 20 bp, synthetic construct
  source 1..20: mol_type = other DNA
tgatcacaattgcagcatca

SEQ ID NO: 8532 - DNA, 20 bp, synthetic construct
  source 1..20: mol_type = other DNA
gttcggtggtaagggcgcaa

SEQ ID NO: 8533 - DNA, 20 bp, synthetic construct
  source 1..20: mol_type = other DNA
ataggcgataagtggtcttg

SEQ ID NO: 8534 - DNA, 20 bp, synthetic construct
  source 1..20: mol_type = other DNA
tagggacgaggagatcacta

SEQ ID NO: 8535 - DNA, 20 bp, synthetic construct
  source 1..20: mol_type = other DNA
actgtgagtattgctacgtg

SEQ ID NO: 8536 - DNA, 20 bp, synthetic construct
  source 1..20: mol_type = other DNA
gccttggatgcgcaacaaat

SEQ ID NO: 8537 - DNA, 20 bp, synthetic construct
  source 1..20: mol_type = other DNA
gttctactcccaggtgatac

SEQ ID NO: 8538 - DNA, 20 bp, synthetic construct
  source 1..20: mol_type = other DNA
cctactacatccggtcacgc

SEQ ID NO: 8539 - DNA, 20 bp, synthetic construct
  source 1..20: mol_type = other DNA
ctcatatataaccggtccgt

SEQ ID NO: 8540 - DNA, 20 bp, synthetic construct
  source 1..20: mol_type = other DNA
gctccaaagtggtgcgcagt

SEQ ID NO: 8541 - DNA, 20 bp, synthetic construct
  source 1..20: mol_type = other DNA
cccgccaaatctccgatcag

SEQ ID NO: 8542 - DNA, 20 bp, synthetic construct
  source 1..20: mol_type = other DNA
tattgggcaagctactaaag

SEQ ID NO: 8543 - DNA, 20 bp, synthetic construct
  source 1..20: mol_type = other DNA
taggcatatcttaaggagga

SEQ ID NO: 8544 - DNA, 20 bp, synthetic construct
  source 1..20: mol_type = other DNA
tatcaactgcgtctgaggaa

SEQ ID NO: 8545 - DNA, 20 bp, synthetic construct
  source 1..20: mol_type = other DNA
tgctcgcagcttaacacccg

SEQ ID NO: 8546 - DNA, 20 bp, synthetic construct
  source 1..20: mol_type = other DNA
agattgtggtctttccttgg

SEQ ID NO: 8547 - DNA, 20 bp, synthetic construct
  source 1..20: mol_type = other DNA
aggcaaagggtccatccaac

SEQ ID NO: 8548 - DNA, 20 bp, synthetic construct
  source 1..20: mol_type = other DNA
aaggtcgctgttattctcag

SEQ ID NO: 8549 - DNA, 20 bp, synthetic construct
  source 1..20: mol_type = other DNA
gggtggatagatcttcgatg

SEQ ID NO: 8550 - DNA, 20 bp, synthetic construct
  source 1..20: mol_type = other DNA
atgagcctatgtagtcagat

SEQ ID NO: 8551 - DNA, 20 bp, synthetic construct
  source 1..20: mol_type = other DNA
ttggaataggcgattacaag

SEQ ID NO: 8552 - DNA, 20 bp, synthetic construct
  source 1..20: mol_type = other DNA
gcgagtacggctatcactac

SEQ ID NO: 8553 - DNA, 20 bp, synthetic construct
  source 1..20: mol_type = other DNA
atctggcgttgactggttaa

SEQ ID NO: 8554 - DNA, 20 bp, synthetic construct
  source 1..20: mol_type = other DNA
gattcttactcagtccacta

SEQ ID NO: 8555 - DNA, 20 bp, synthetic construct
  source 1..20: mol_type = other DNA
cgacgtttgatactacctta

SEQ ID NO: 8556 - DNA, 20 bp, synthetic construct
  source 1..20: mol_type = other DNA
cggcgatttgagagactttg

SEQ ID NO: 8557 - DNA, 20 bp, synthetic construct
  source 1..20: mol_type = other DNA
gagcatctatgcgattgtag

SEQ ID NO: 8558 - DNA, 20 bp, synthetic construct
  source 1..20: mol_type = other DNA
tgcaataaggatagggaggg

SEQ ID NO: 8559 - DNA, 20 bp, synthetic construct
  source 1..20: mol_type = other DNA
aagtgcccttagtctcttgc

SEQ ID NO: 8560 - DNA, 20 bp, synthetic construct
  source 1..20: mol_type = other DNA
ggttagataccgcccatggg

SEQ ID NO: 8561 - DNA, 20 bp, synthetic construct
  source 1..20: mol_type = other DNA
atctcattcaggcggagtaa

SEQ ID NO: 8562 - DNA, 20 bp, synthetic construct
  source 1..20: mol_type = other DNA
gtggaaggcccattcacagc

SEQ ID NO: 8563 - DNA, 20 bp, synthetic construct
  source 1..20: mol_type = other DNA
tggcccacaagatccattgc

SEQ ID NO: 8564 - DNA, 20 bp, synthetic construct
  source 1..20: mol_type = other DNA
tggaatcagccatcggactt

SEQ ID NO: 8565 - DNA, 20 bp, synthetic construct
  source 1..20: mol_type = other DNA
gtgcttgcatgtaccaggcg

SEQ ID NO: 8566 - DNA, 20 bp, synthetic construct
  source 1..20: mol_type = other DNA
tttgcgaatagctggagtat

SEQ ID NO: 8567 - DNA, 20 bp, synthetic construct
  source 1..20: mol_type = other DNA
tcgacgccactctaacgacg

SEQ ID NO: 8568 - DNA, 20 bp, synthetic construct
  source 1..20: mol_type = other DNA
accgtcgggcaactatgggc

SEQ ID NO: 8569 - DNA, 20 bp, synthetic construct
  source 1..20: mol_type = other DNA
gttcggagcacagactatag

SEQ ID NO: 8570 - DNA, 20 bp, synthetic construct
  source 1..20: mol_type = other DNA
atatagctgttattcagccg

SEQ ID NO: 8571 - DNA, 20 bp, synthetic construct
  source 1..20: mol_type = other DNA
cgaacgtaccgcaagcgagt

SEQ ID NO: 8572 - DNA, 20 bp, synthetic construct
  source 1..20: mol_type = other DNA
gatttctcccttcacaatat

SEQ ID NO: 8573 - DNA, 20 bp, synthetic construct
  source 1..20: mol_type = other DNA
ctaatggtcttcactgctta

SEQ ID NO: 8574 - DNA, 20 bp, synthetic construct
  source 1..20: mol_type = other DNA
tcgggacactttggtgtggt

SEQ ID NO: 8575 - DNA, 20 bp, synthetic construct
  source 1..20: mol_type = other DNA
ggtgtggcatgcatagattc

SEQ ID NO: 8576 - DNA, 20 bp, synthetic construct
  source 1..20: mol_type = other DNA
tggaatcgaatctgggcggc

SEQ ID NO: 8577 - DNA, 20 bp, synthetic construct
  source 1..20: mol_type = other DNA
attaatgctcagtgagctct

SEQ ID NO: 8578 - DNA, 20 bp, synthetic construct
  source 1..20: mol_type = other DNA
cgccgtcgaaccagatctaa

SEQ ID NO: 8579 - DNA, 20 bp, synthetic construct
  source 1..20: mol_type = other DNA
gacacagtgaatggcgagtg

SEQ ID NO: 8580 - DNA, 20 bp, synthetic construct
  source 1..20: mol_type = other DNA
tgccatttccatgatcgaga

SEQ ID NO: 8581 - DNA, 20 bp, synthetic construct
  source 1..20: mol_type = other DNA
acgagtcttatacatcctgg

SEQ ID NO: 8582 - DNA, 20 bp, synthetic construct
  source 1..20: mol_type = other DNA
acttcaattcgaatcgccat

SEQ ID NO: 8583 - DNA, 20 bp, synthetic construct
  source 1..20: mol_type = other DNA
tgataccctttggcatccgc

SEQ ID NO: 8584 - DNA, 20 bp, synthetic construct
  source 1..20: mol_type = other DNA
accacctctgcggtttgtat

SEQ ID NO: 8585 - DNA, 20 bp, synthetic construct
  source 1..20: mol_type = other DNA
aagggtagaacgcaaacgtc

SEQ ID NO: 8586 - DNA, 20 bp, synthetic construct
  source 1..20: mol_type = other DNA
gggcctaagctatggttcag

SEQ ID NO: 8587 - DNA, 20 bp, synthetic construct
  source 1..20: mol_type = other DNA
tacatagcatcggtcgtttg

SEQ ID NO: 8588 - DNA, 20 bp, synthetic construct
  source 1..20: mol_type = other DNA
tacggcatgtacggcttaaa

SEQ ID NO: 8589 - DNA, 20 bp, synthetic construct
  source 1..20: mol_type = other DNA
ctacgcagcactgcctctct

SEQ ID NO: 8590 - DNA, 20 bp, synthetic construct
  source 1..20: mol_type = other DNA
tgggcgcctatcttagagca

SEQ ID NO: 8591 - DNA, 20 bp, synthetic construct
  source 1..20: mol_type = other DNA
cgtttaactcccacccgacg

SEQ ID NO: 8592 - DNA, 20 bp, synthetic construct
  source 1..20: mol_type = other DNA
cccggatgacttgcgcgcat

SEQ ID NO: 8593 - DNA, 20 bp, synthetic construct
  source 1..20: mol_type = other DNA
gtgtcaagggaaagtttcgt

SEQ ID NO: 8594 - DNA, 20 bp, synthetic construct
  source 1..20: mol_type = other DNA
cgaatctcaaacatctatta

SEQ ID NO: 8595 - DNA, 20 bp, synthetic construct
  source 1..20: mol_type = other DNA
cgttggtcgtcggcaataat

SEQ ID NO: 8596 - DNA, 20 bp, synthetic construct
  source 1..20: mol_type = other DNA
aatcatgacgtgaccagtta

SEQ ID NO: 8597 - DNA, 20 bp, synthetic construct
  source 1..20: mol_type = other DNA
agtagcagtgcttacggcgc

SEQ ID NO: 8598 - DNA, 20 bp, synthetic construct
  source 1..20: mol_type = other DNA
tcatacagtaggactgtacc

SEQ ID NO: 8599 - DNA, 20 bp, synthetic construct
  source 1..20: mol_type = other DNA
aagcccgagccagtacaact

SEQ ID NO: 8600 - DNA, 20 bp, synthetic construct
  source 1..20: mol_type = other DNA
tctcgcttgctgtcatcagg

SEQ ID NO: 8601 - DNA, 20 bp, synthetic construct
  source 1..20: mol_type = other DNA
ttggacgacgggctcttcaa

SEQ ID NO: 8602 - DNA, 20 bp, synthetic construct
  source 1..20: mol_type = other DNA
ccattgaagggtgggacact

SEQ ID NO: 8603 - DNA, 20 bp, synthetic construct
  source 1..20: mol_type = other DNA
gattcgatttaccattgtgt

SEQ ID NO: 8604 - DNA, 20 bp, synthetic construct
  source 1..20: mol_type = other DNA
cctgaatctgctggtataag

SEQ ID NO: 8605 - DNA, 20 bp, synthetic construct
  source 1..20: mol_type = other DNA
acaaccttgtgcaccgagaa

SEQ ID NO: 8606 - DNA, 20 bp, synthetic construct
  source 1..20: mol_type = other DNA
attcctgacgtagtactatc

SEQ ID NO: 8607 - DNA, 20 bp, synthetic construct
  source 1..20: mol_type = other DNA
acacctgctattctcagatt

SEQ ID NO: 8608 - DNA, 20 bp, synthetic construct
  source 1..20: mol_type = other DNA
ccgccttattaatagctgct

SEQ ID NO: 8609 - DNA, 20 bp, synthetic construct
  source 1..20: mol_type = other DNA
gccgagtttactcccggacc

SEQ ID NO: 8610 - DNA, 20 bp, synthetic construct
  source 1..20: mol_type = other DNA
ctcaatggttcgactctact

SEQ ID NO: 8611 - DNA, 20 bp, synthetic construct
  source 1..20: mol_type = other DNA
agaggatttcacttcaggcc

SEQ ID NO: 8612 - DNA, 20 bp, synthetic construct
  source 1..20: mol_type = other DNA
gcctcgttgttctagcccga

SEQ ID NO: 8613 - DNA, 20 bp, synthetic construct
  source 1..20: mol_type = other DNA
ccttggaacattcctgccag

SEQ ID NO: 8614 - DNA, 20 bp, synthetic construct
  source 1..20: mol_type = other DNA
tgtcggtcgttgaccattat

SEQ ID NO: 8615 - DNA, 20 bp, synthetic construct
  source 1..20: mol_type = other DNA
tcctgtggcgagtccgtctg

SEQ ID NO: 8616 - DNA, 20 bp, synthetic construct
  source 1..20: mol_type = other DNA
actgatctagggaccctatg

SEQ ID NO: 8617 - DNA, 20 bp, synthetic construct
  source 1..20: mol_type = other DNA
tgctaccttgctctcatagg

SEQ ID NO: 8618 - DNA, 20 bp, synthetic construct
  source 1..20: mol_type = other DNA
tgcccagataattacaatga

SEQ ID NO: 8619 - DNA, 20 bp, synthetic construct
  source 1..20: mol_type = other DNA
cgggtaaatgatagagccac

SEQ ID NO: 8620 - DNA, 20 bp, synthetic construct
  source 1..20: mol_type = other DNA
gagtatgccatcgcgcaggg

SEQ ID NO: 8621 - DNA, 20 bp, synthetic construct
  source 1..20: mol_type = other DNA
atgcggcgcactcatcgcag

SEQ ID NO: 8622 - DNA, 20 bp, synthetic construct
  source 1..20: mol_type = other DNA
taccgtcagaagaaagccca

SEQ ID NO: 8623 - DNA, 20 bp, synthetic construct
  source 1..20: mol_type = other DNA
gtctacgacatgaagatact

SEQ ID NO: 8624 - DNA, 20 bp, synthetic construct
  source 1..20: mol_type = other DNA
atacttagctaggttcagac

SEQ ID NO: 8625 - DNA, 20 bp, synthetic construct
  source 1..20: mol_type = other DNA
ctaatgtcacggtcatggta

SEQ ID NO: 8626 - DNA, 20 bp, synthetic construct
  source 1..20: mol_type = other DNA
ggtcggtagttggctcgtaa

SEQ ID NO: 8627 - DNA, 20 bp, synthetic construct
  source 1..20: mol_type = other DNA
cgcggatgccaatccctcta

SEQ ID NO: 8628 - DNA, 20 bp, synthetic construct
  source 1..20: mol_type = other DNA
tcagctatagcttgtgggta

SEQ ID NO: 8629 - DNA, 20 bp, synthetic construct
  source 1..20: mol_type = other DNA
gtcaactacctgatagggcc

SEQ ID NO: 8630 - DNA, 20 bp, synthetic construct
  source 1..20: mol_type = other DNA
gtgaatatgcctcgtgcgac

SEQ ID NO: 8631 - DNA, 20 bp, synthetic construct
  source 1..20: mol_type = other DNA
aagcgcagggaagtttggcc

SEQ ID NO: 8632 - DNA, 20 bp, synthetic construct
  source 1..20: mol_type = other DNA
tcgattaacagaatgaggca

SEQ ID NO: 8633 - DNA, 20 bp, synthetic construct
  source 1..20: mol_type = other DNA
tcaatggtctactccatcct

SEQ ID NO: 8634 - DNA, 20 bp, synthetic construct
  source 1..20: mol_type = other DNA
acaagcaaagccaatgctcc

SEQ ID NO: 8635 - DNA, 20 bp, synthetic construct
  source 1..20: mol_type = other DNA
catgaactgatcacaagggc

SEQ ID NO: 8636 - DNA, 20 bp, synthetic construct
  source 1..20: mol_type = other DNA
tcgttctgtcctgtcgtcgc

SEQ ID NO: 8637 - DNA, 20 bp, synthetic construct
  source 1..20: mol_type = other DNA
aaacacccttggtcttaata

SEQ ID NO: 8638 - DNA, 20 bp, synthetic construct
  source 1..20: mol_type = other DNA
atggtcctcattctcaccat

SEQ ID NO: 8639 - DNA, 20 bp, synthetic construct
  source 1..20: mol_type = other DNA
gatccagcgtgagccttctc

SEQ ID NO: 8640 - DNA, 20 bp, synthetic construct
  source 1..20: mol_type = other DNA
cctaattgtcgtgcataagc

SEQ ID NO: 8641 - DNA, 20 bp, synthetic construct
  source 1..20: mol_type = other DNA
ccggtagcaggtaggcttta

SEQ ID NO: 8642 - DNA, 20 bp, synthetic construct
  source 1..20: mol_type = other DNA
ttggtctaacatgggagtcc

SEQ ID NO: 8643 - DNA, 20 bp, synthetic construct
  source 1..20: mol_type = other DNA
gggcctgtgcattgtttaac

SEQ ID NO: 8644 - DNA, 20 bp, synthetic construct
  source 1..20: mol_type = other DNA
tgacaactgggcacataata

SEQ ID NO: 8645 - DNA, 20 bp, synthetic construct
  source 1..20: mol_type = other DNA
caaactcagattgtcccaag

SEQ ID NO: 8646 - DNA, 20 bp, synthetic construct
  source 1..20: mol_type = other DNA
tatgaggaactgtctaacag

SEQ ID NO: 8647 - DNA, 20 bp, synthetic construct
  source 1..20: mol_type = other DNA
caacctagtatatcatccta

SEQ ID NO: 8648 - DNA, 20 bp, synthetic construct
  source 1..20: mol_type = other DNA
actaatgacctttaccgagt

SEQ ID NO: 8649 - DNA, 20 bp, synthetic construct
  source 1..20: mol_type = other DNA
acgttaagacgcccacatta

SEQ ID NO: 8650 - DNA, 20 bp, synthetic construct
  source 1..20: mol_type = other DNA
gtcgcgttatgctctttgct

SEQ ID NO: 8651 - DNA, 20 bp, synthetic construct
  source 1..20: mol_type = other DNA
acggatactcctctccctct

SEQ ID NO: 8652 - DNA, 20 bp, synthetic construct
  source 1..20: mol_type = other DNA
tagaactttctcggaacttg

SEQ ID NO: 8653 - DNA, 20 bp, synthetic construct
  source 1..20: mol_type = other DNA
gcgttgaccgccattggatg

SEQ ID NO: 8654 - DNA, 20 bp, synthetic construct
  source 1..20: mol_type = other DNA
gggaacgctgtggataggat

SEQ ID NO: 8655 - DNA, 20 bp, synthetic construct
  source 1..20: mol_type = other DNA
tcattggtccttccagcttg

SEQ ID NO: 8656 - DNA, 20 bp, synthetic construct
  source 1..20: mol_type = other DNA
caatacgtgggtattccacc

SEQ ID NO: 8657 - DNA, 20 bp, synthetic construct
  source 1..20: mol_type = other DNA
ctcattgtttgggtctcatg

SEQ ID NO: 8658 - DNA, 20 bp, synthetic construct
  source 1..20: mol_type = other DNA
ccaggagtctttatacacgg

SEQ ID NO: 8659 - DNA, 20 bp, synthetic construct
  source 1..20: mol_type = other DNA
gtgcacagatgaagtgctaa

SEQ ID NO: 8660 - DNA, 20 bp, synthetic construct
  source 1..20: mol_type = other DNA
ttctacaactgtattacaac

SEQ ID NO: 8661 - DNA, 20 bp, synthetic construct
  source 1..20: mol_type = other DNA
agctgctccatggagttcag

SEQ ID NO: 8662 - DNA, 20 bp, synthetic construct
  source 1..20: mol_type = other DNA
atgaccagcggacagcccaa

SEQ ID NO: 8663 - DNA, 20 bp, synthetic construct
  source 1..20: mol_type = other DNA
tattatcgtggatttaggcc

SEQ ID NO: 8664 - DNA, 20 bp, synthetic construct
  source 1..20: mol_type = other DNA
tgagcctaagacttgggcat

SEQ ID NO: 8665 - DNA, 20 bp, synthetic construct
  source 1..20: mol_type = other DNA
caaatcccattatctggtag

SEQ ID NO: 8666 - DNA, 20 bp, synthetic construct
  source 1..20: mol_type = other DNA
ggtgcaccagttacgtctga

SEQ ID NO: 8667 - DNA, 20 bp, synthetic construct
  source 1..20: mol_type = other DNA
cactttagtgcccagccctg

SEQ ID NO: 8668 - DNA, 20 bp, synthetic construct
  source 1..20: mol_type = other DNA
tacgatggcagtagggtgtg

SEQ ID NO: 8669 - DNA, 20 bp, synthetic construct
  source 1..20: mol_type = other DNA
tcactgcgcccgtctaccct

SEQ ID NO: 8670 - DNA, 20 bp, synthetic construct
  source 1..20: mol_type = other DNA
aatgcttatcttccaccgga

SEQ ID NO: 8671 - DNA, 20 bp, synthetic construct
  source 1..20: mol_type = other DNA
agtcgtgtatcactttaagg

SEQ ID NO: 8672 - DNA, 20 bp, synthetic construct
  source 1..20: mol_type = other DNA
ggttggtggtgtcagaaacg

SEQ ID NO: 8673 - DNA, 20 bp, synthetic construct
  source 1..20: mol_type = other DNA
atgactgttatatagtctcg

SEQ ID NO: 8674 - DNA, 20 bp, synthetic construct
  source 1..20: mol_type = other DNA
gggattaatacgcgcgggta

SEQ ID NO: 8675 - DNA, 20 bp, synthetic construct
  source 1..20: mol_type = other DNA
tctccgcgttaatagttgag

SEQ ID NO: 8676 - DNA, 20 bp, synthetic construct
  source 1..20: mol_type = other DNA
gatcaccttattagtgtacg

SEQ ID NO: 8677 - DNA, 20 bp, synthetic construct
  source 1..20: mol_type = other DNA
gcatacactaaatacccgtt

SEQ ID NO: 8678 - DNA, 20 bp, synthetic construct
  source 1..20: mol_type = other DNA
cgtcgcacgaccttacgaaa

SEQ ID NO: 8679 - DNA, 20 bp, synthetic construct
  source 1..20: mol_type = other DNA
cgagatggaagtcttaatca

SEQ ID NO: 8680 - DNA, 20 bp, synthetic construct
  source 1..20: mol_type = other DNA
gatcttccagttcaagagcg

SEQ ID NO: 8681 - DNA, 20 bp, synthetic construct
  source 1..20: mol_type = other DNA
tggaacgtgttaatgccacg

SEQ ID NO: 8682 - DNA, 20 bp, synthetic construct
  source 1..20: mol_type = other DNA
gtccactgagacatcttact

SEQ ID NO: 8683 - DNA, 20 bp, synthetic construct
  source 1..20: mol_type = other DNA
gcgacgggctttggtgatcc

SEQ ID NO: 8684 - DNA, 20 bp, synthetic construct
  source 1..20: mol_type = other DNA
gtcagctcgcccgcattact

SEQ ID NO: 8685 - DNA, 20 bp, synthetic construct
  source 1..20: mol_type = other DNA
gccagtatgccagaactaat

SEQ ID NO: 8686 - DNA, 20 bp, synthetic construct
  source 1..20: mol_type = other DNA
cgagataggaacaaagagtg

SEQ ID NO: 8687 - DNA, 20 bp, synthetic construct
  source 1..20: mol_type = other DNA
cgtctcaggcgtaaacagac

SEQ ID NO: 8688 - DNA, 20 bp, synthetic construct
  source 1..20: mol_type = other DNA
tcgtatcggccgatattcgc

SEQ ID NO: 8689 - DNA, 20 bp, synthetic construct
  source 1..20: mol_type = other DNA
agcagcaaaggaactgctag

SEQ ID NO: 8690 - DNA, 20 bp, synthetic construct
  source 1..20: mol_type = other DNA
gtcagttcgccgtgagaaac

SEQ ID NO: 8691 - DNA, 20 bp, synthetic construct
  source 1..20: mol_type = other DNA
ctttccttgtcgggtactct

SEQ ID NO: 8692 - DNA, 20 bp, synthetic construct
  source 1..20: mol_type = other DNA
tccagaactccaagccgttt

SEQ ID NO: 8693 - DNA, 20 bp, synthetic construct
  source 1..20: mol_type = other DNA
cagatgagggcagcttcacc

SEQ ID NO: 8694 - DNA, 20 bp, synthetic construct
  source 1..20: mol_type = other DNA
agggcccgatagtaaagtct

SEQ ID NO: 8695 - DNA, 20 bp, synthetic construct
  source 1..20: mol_type = other DNA
attggtttcgaggaaagatc

SEQ ID NO: 8696 - DNA, 20 bp, synthetic construct
  source 1..20: mol_type = other DNA
atctctccaggagtaattgg

SEQ ID NO: 8697 - DNA, 20 bp, synthetic construct
  source 1..20: mol_type = other DNA
ggtgcattcgacaagcgcgt

SEQ ID NO: 8698 - DNA, 20 bp, synthetic construct
  source 1..20: mol_type = other DNA
cggacctagtaaagaggact

SEQ ID NO: 8699 - DNA, 20 bp, synthetic construct
  source 1..20: mol_type = other DNA
gggtctctcgggacctgtac

SEQ ID NO: 8700 - DNA, 20 bp, synthetic construct
  source 1..20: mol_type = other DNA
aatcttcctaaggtccgtat

SEQ ID NO: 8701 - DNA, 20 bp, synthetic construct
  source 1..20: mol_type = other DNA
taccgccggaatagaagggt

SEQ ID NO: 8702 - DNA, 20 bp, synthetic construct
  source 1..20: mol_type = other DNA
acgcgatctggagcgaacgc

SEQ ID NO: 8703 - DNA, 20 bp, synthetic construct
  source 1..20: mol_type = other DNA
ataacttcacccgagccctg

SEQ ID NO: 8704 - DNA, 20 bp, synthetic construct
  source 1..20: mol_type = other DNA
cactgagcgagaggagatgc

SEQ ID NO: 8705 - DNA, 20 bp, synthetic construct
  source 1..20: mol_type = other DNA
gatcctgcgcccgaactgga

SEQ ID NO: 8706 - DNA, 20 bp, synthetic construct
  source 1..20: mol_type = other DNA
tgcaagtaacgctgagtctt

SEQ ID NO: 8707 - DNA, 20 bp, synthetic construct
  source 1..20: mol_type = other DNA
attattaatacaggaaccga

SEQ ID NO: 8708 - DNA, 20 bp, synthetic construct
  source 1..20: mol_type = other DNA
cctagcagagaccgtgattc

SEQ ID NO: 8709 - DNA, 20 bp, synthetic construct
  source 1..20: mol_type = other DNA
accaaacttggctggtattt

SEQ ID NO: 8710 - DNA, 20 bp, synthetic construct
  source 1..20: mol_type = other DNA
ttaagcggaagtcctgccta

SEQ ID NO: 8711 - DNA, 20 bp, synthetic construct
  source 1..20: mol_type = other DNA
taccgatttacgacacatga

SEQ ID NO: 8712 - DNA, 20 bp, synthetic construct
  source 1..20: mol_type = other DNA
ataactagccatgcctgttc

SEQ ID NO: 8713 - DNA, 20 bp, synthetic construct
  source 1..20: mol_type = other DNA
atttcacttggatagtcctc

SEQ ID NO: 8714 - DNA, 20 bp, synthetic construct
  source 1..20: mol_type = other DNA
catacgtacttagcaattag

SEQ ID NO: 8715 - DNA, 20 bp, synthetic construct
  source 1..20: mol_type = other DNA
agtatcgacctccgaggcac

SEQ ID NO: 8716 - DNA, 20 bp, synthetic construct
  source 1..20: mol_type = other DNA
cattgctctcggcagaccat

SEQ ID NO: 8717 - DNA, 20 bp, synthetic construct
  source 1..20: mol_type = other DNA
aacaaaggtaggctgagtgt

SEQ ID NO: 8718 - DNA, 20 bp, synthetic construct
  source 1..20: mol_type = other DNA
atccctctacccgccgctag

SEQ ID NO: 8719 - DNA, 20 bp, synthetic construct
  source 1..20: mol_type = other DNA
cacccaatcgcactgttcag

SEQ ID NO: 8720 - DNA, 20 bp, synthetic construct
  source 1..20: mol_type = other DNA
ggatcacgtcccgataaaga

SEQ ID NO: 8721 - DNA, 20 bp, synthetic construct
  source 1..20: mol_type = other DNA
taatggactgactacagaca

SEQ ID NO: 8722 - DNA, 20 bp, synthetic construct
  source 1..20: mol_type = other DNA
gtatcatcgcccggttcaca

SEQ ID NO: 8723 - DNA, 20 bp, synthetic construct
  source 1..20: mol_type = other DNA
ggcatatctttaatatctca

SEQ ID NO: 8724 - DNA, 20 bp, synthetic construct
  source 1..20: mol_type = other DNA
gtagtttctgtcagttcaaa

SEQ ID NO: 8725 - DNA, 20 bp, synthetic construct
  source 1..20: mol_type = other DNA
tcagactaagcgcagaggac

SEQ ID NO: 8726 - DNA, 20 bp, synthetic construct
  source 1..20: mol_type = other DNA
cgtataggcggtatgataag

SEQ ID NO: 8727 - DNA, 20 bp, synthetic construct
  source 1..20: mol_type = other DNA
tctcagctcctattatttgg

SEQ ID NO: 8728 - DNA, 20 bp, synthetic construct
  source 1..20: mol_type = other DNA
aggcaatgtgtgattggagg

SEQ ID NO: 8729 - DNA, 20 bp, synthetic construct
  source 1..20: mol_type = other DNA
gtgcgaacgttcagggttac

SEQ ID NO: 8730 - DNA, 20 bp, synthetic construct
  source 1..20: mol_type = other DNA
aagtatttagttccgtactt

SEQ ID NO: 8731 - DNA, 20 bp, synthetic construct
  source 1..20: mol_type = other DNA
gatcagctatatgctagaac

SEQ ID NO: 8732 - DNA, 20 bp, synthetic construct
  source 1..20: mol_type = other DNA
aagactacgaatatgaggtt

SEQ ID NO: 8733 - DNA, 20 bp, synthetic construct
  source 1..20: mol_type = other DNA
aaggtcgcgatctctctgtc

SEQ ID NO: 8734 - DNA, 20 bp, synthetic construct
  source 1..20: mol_type = other DNA
cactatgtatgctaccacct

SEQ ID NO: 8735 - DNA, 20 bp, synthetic construct
  source 1..20: mol_type = other DNA
gatgagatagcatacgcgct

SEQ ID NO: 8736 - DNA, 20 bp, synthetic construct
  source 1..20: mol_type = other DNA
agcgcgacttgtgaaacaat

SEQ ID NO: 8737 - DNA, 20 bp, synthetic construct
  source 1..20: mol_type = other DNA
gtcgtcaactaatcggcggt

SEQ ID NO: 8738 - DNA, 20 bp, synthetic construct
  source 1..20: mol_type = other DNA
ggagagagttctcttaatct

SEQ ID NO: 8739 - DNA, 20 bp, synthetic construct
  source 1..20: mol_type = other DNA
cgtcgcacgccctcaattaa

SEQ ID NO: 8740 - DNA, 20 bp, synthetic construct
  source 1..20: mol_type = other DNA
gatgacaatgaaagatagct

SEQ ID NO: 8741 - DNA, 20 bp, synthetic construct
  source 1..20: mol_type = other DNA
ccgctagattcgggcagcat

SEQ ID NO: 8742 - DNA, 20 bp, synthetic construct
  source 1..20: mol_type = other DNA
acggatccgtctcatgtaac

SEQ ID NO: 8743 - DNA, 20 bp, synthetic construct
  source 1..20: mol_type = other DNA
agaccggatgtcgaatcgaa

SEQ ID NO: 8744 - DNA, 20 bp, synthetic construct
  source 1..20: mol_type = other DNA
attcaggctatgcttatctc

SEQ ID NO: 8745 - DNA, 20 bp, synthetic construct
  source 1..20: mol_type = other DNA
tttcgaagtacgtgaggtga

SEQ ID NO: 8746 - DNA, 20 bp, synthetic construct
  source 1..20: mol_type = other DNA
tctgtccctctgttacgata

SEQ ID NO: 8747 - DNA, 20 bp, synthetic construct
  source 1..20: mol_type = other DNA
tgtcacacgattatacttga

SEQ ID NO: 8748 - DNA, 20 bp, synthetic construct
  source 1..20: mol_type = other DNA
cgggcctctttagcaaagtc

SEQ ID NO: 8749 - DNA, 20 bp, synthetic construct
  source 1..20: mol_type = other DNA
ccgaccaatccatggcagca

SEQ ID NO: 8750 - DNA, 20 bp, synthetic construct
  source 1..20: mol_type = other DNA
gtgcttgtagcagcggtaac

SEQ ID NO: 8751 - DNA, 20 bp, synthetic construct
  source 1..20: mol_type = other DNA
tgcactgctcggtttgttgt

SEQ ID NO: 8752 - DNA, 20 bp, synthetic construct
  source 1..20: mol_type = other DNA
aatgtgggcggtttgtcaat

SEQ ID NO: 8753 - DNA, 20 bp, synthetic construct
  source 1..20: mol_type = other DNA
tctcacaggtcataattcgt

SEQ ID NO: 8754 - DNA, 20 bp, synthetic construct
  source 1..20: mol_type = other DNA
cagcgcggtgagaccaaatg

SEQ ID NO: 8755 - DNA, 20 bp, synthetic construct
  source 1..20: mol_type = other DNA
ggttccagaggagcgagacc

SEQ ID NO: 8756 - DNA, 20 bp, synthetic construct
  source 1..20: mol_type = other DNA
gagtgcgaacataacgtggt

SEQ ID NO: 8757 - DNA, 20 bp, synthetic construct
  source 1..20: mol_type = other DNA
acgcatgcgatttctaatca

SEQ ID NO: 8758 - DNA, 20 bp, synthetic construct
  source 1..20: mol_type = other DNA
tggctgtttctccgtggctg

SEQ ID NO: 8759 - DNA, 20 bp, synthetic construct
  source 1..20: mol_type = other DNA
aattacttccgagacacaca

SEQ ID NO: 8760 - DNA, 20 bp, synthetic construct
  source 1..20: mol_type = other DNA
cgaatgacttacgctttaag

SEQ ID NO: 8761 - DNA, 20 bp, synthetic construct
  source 1..20: mol_type = other DNA
agaagtattggatcatggct

SEQ ID NO: 8762 - DNA, 20 bp, synthetic construct
  source 1..20: mol_type = other DNA
ggtaatagcaacaggaccag

SEQ ID NO: 8763 - DNA, 20 bp, synthetic construct
  source 1..20: mol_type = other DNA
cgttaaacggacctccctca

SEQ ID NO: 8764 - DNA, 20 bp, synthetic construct
  source 1..20: mol_type = other DNA
aaatgtaaggagggatcgat

SEQ ID NO: 8765 - DNA, 20 bp, synthetic construct
  source 1..20: mol_type = other DNA
ctctaaatcggccgagtact

SEQ ID NO: 8766 - DNA, 20 bp, synthetic construct
  source 1..20: mol_type = other DNA
ataacctctgctggagaggt

SEQ ID NO: 8767 - DNA, 20 bp, synthetic construct
  source 1..20: mol_type = other DNA
tagcgccgaagaacctccca

SEQ ID NO: 8768 - DNA, 20 bp, synthetic construct
  source 1..20: mol_type = other DNA
ccgtagctctactggcgttg

SEQ ID NO: 8769 - DNA, 20 bp, synthetic construct
  source 1..20: mol_type = other DNA
aagggatcttccactgatgt

SEQ ID NO: 8770 - DNA, 20 bp, synthetic construct
  source 1..20: mol_type = other DNA
agtcgtcccgtaggtgatga

SEQ ID NO: 8771 - DNA, 20 bp, synthetic construct
  source 1..20: mol_type = other DNA
acggaggtacacgcgctgat

SEQ ID NO: 8772 - DNA, 20 bp, synthetic construct
  source 1..20: mol_type = other DNA
caaaggattacaggttagtg

SEQ ID NO: 8773 - DNA, 20 bp, synthetic construct
  source 1..20: mol_type = other DNA
ggccctgacatcaaagtggg

SEQ ID NO: 8774 - DNA, 20 bp, synthetic construct
  source 1..20: mol_type = other DNA
gaggttgatgcgtgtgcaga

SEQ ID NO: 8775 - DNA, 20 bp, synthetic construct
  source 1..20: mol_type = other DNA
tctcccgtggcttgaggagc

SEQ ID NO: 8776 - DNA, 20 bp, synthetic construct
  source 1..20: mol_type = other DNA
ccacaggagtttgtcagctg

SEQ ID NO: 8777 - DNA, 20 bp, synthetic construct
  source 1..20: mol_type = other DNA
agatgcgacctaggtgaccg

SEQ ID NO: 8778 - DNA, 20 bp, synthetic construct
  source 1..20: mol_type = other DNA
gggaacgaaggacgactgcc

SEQ ID NO: 8779 - DNA, 20 bp, synthetic construct
  source 1..20: mol_type = other DNA
gttgtgccacgcctgctgct

SEQ ID NO: 8780 - DNA, 20 bp, synthetic construct
  source 1..20: mol_type = other DNA
cttatgcggcatcaacctga

SEQ ID NO: 8781 - DNA, 20 bp, synthetic construct
  source 1..20: mol_type = other DNA
taagactctaatgtagagcc

SEQ ID NO: 8782 - DNA, 20 bp, synthetic construct
  source 1..20: mol_type = other DNA
tagtagcaaacattcctttg

SEQ ID NO: 8783 - DNA, 20 bp, synthetic construct
  source 1..20: mol_type = other DNA
acacccatgtgcgtggcatt

SEQ ID NO: 8784 - DNA, 20 bp, synthetic construct
  source 1..20: mol_type = other DNA
cttgaggcgcttgacggtaa

SEQ ID NO: 8785 - DNA, 20 bp, synthetic construct
  source 1..20: mol_type = other DNA
ataattagtaccgcggcggg

SEQ ID NO: 8786 - DNA, 20 bp, synthetic construct
  source 1..20: mol_type = other DNA
gtagtcaccctcgaccggcc

SEQ ID NO: 8787 - DNA, 20 bp, synthetic construct
  source 1..20: mol_type = other DNA
tcgacccaacctgaccgatt

SEQ ID NO: 8788 - DNA, 20 bp, synthetic construct
  source 1..20: mol_type = other DNA
gtatccatgcagtagtcacc

SEQ ID NO: 8789 - DNA, 20 bp, synthetic construct
  source 1..20: mol_type = other DNA
aggaacaactcaacatggtt

SEQ ID NO: 8790 - DNA, 20 bp, synthetic construct
  source 1..20: mol_type = other DNA
tacgatccaggttcgtcgga

SEQ ID NO: 8791 - DNA, 20 bp, synthetic construct
  source 1..20: mol_type = other DNA
cgttgatacctaatagagat

SEQ ID NO: 8792 - DNA, 20 bp, synthetic construct
  source 1..20: mol_type = other DNA
cgtactgacaggttctgtaa

SEQ ID NO: 8793 - DNA, 20 bp, synthetic construct
  source 1..20: mol_type = other DNA
ctgcaaatctcttgtcgtat

SEQ ID NO: 8794 - DNA, 20 bp, synthetic construct
  source 1..20: mol_type = other DNA
ggacgccacggcatgatatt

SEQ ID NO: 8795 - DNA, 20 bp, synthetic construct
  source 1..20: mol_type = other DNA
cttggcaccgtttggctact

SEQ ID NO: 8796 - DNA, 20 bp, synthetic construct
  source 1..20: mol_type = other DNA
ctctatattaagacgaggaa

SEQ ID NO: 8797 - DNA, 20 bp, synthetic construct
  source 1..20: mol_type = other DNA
gccttctttgccttccgtgt

SEQ ID NO: 8798 - DNA, 20 bp, synthetic construct
  source 1..20: mol_type = other DNA
tcatgcgacaagttggcacg

SEQ ID NO: 8799 - DNA, 20 bp, synthetic construct
  source 1..20: mol_type = other DNA
tatctcgccattctcgggct

SEQ ID NO: 8800 - DNA, 20 bp, synthetic construct
  source 1..20: mol_type = other DNA
tgtgtcattctattcgtagg

SEQ ID NO: 8801 - DNA, 20 bp, synthetic construct
  source 1..20: mol_type = other DNA
atcaagatcgtctctcctgc

SEQ ID NO: 8802 - DNA, 20 bp, synthetic construct
  source 1..20: mol_type = other DNA
cgccatcgccggaaagtgac

SEQ ID NO: 8803 - DNA, 20 bp, synthetic construct
  source 1..20: mol_type = other DNA
acgagtggacgaatatcttc

SEQ ID NO: 8804 - DNA, 20 bp, synthetic construct
  source 1..20: mol_type = other DNA
ggctactgagatcccgcgga

SEQ ID NO: 8805 - DNA, 20 bp, synthetic construct
  source 1..20: mol_type = other DNA
ggtgccataaagcagctctt

SEQ ID NO: 8806 - DNA, 20 bp, synthetic construct
  source 1..20: mol_type = other DNA
gaacgtaacccgtcgtgaac

SEQ ID NO: 8807 - DNA, 20 bp, synthetic construct
  source 1..20: mol_type = other DNA
tcgtgtatgacaagggcgct

SEQ ID NO: 8808 - DNA, 20 bp, synthetic construct
  source 1..20: mol_type = other DNA
catcggtgagaaattgggaa

SEQ ID NO: 8809 - DNA, 20 bp, synthetic construct
  source 1..20: mol_type = other DNA
gtggcgttatcaggttacta

SEQ ID NO: 8810 - DNA, 20 bp, synthetic construct
  source 1..20: mol_type = other DNA
cggccgaaaggctcttagct

SEQ ID NO: 8811 - DNA, 20 bp, synthetic construct
  source 1..20: mol_type = other DNA
ataggcctgagggcatttac

SEQ ID NO: 8812 - DNA, 20 bp, synthetic construct
  source 1..20: mol_type = other DNA
gactggttacagtggtctct

SEQ ID NO: 8813 - DNA, 20 bp, synthetic construct
  source 1..20: mol_type = other DNA
ttcataacacctgcacccgg

SEQ ID NO: 8814 - DNA, 20 bp, synthetic construct
  source 1..20: mol_type = other DNA
taataggtactagcgtacgt

SEQ ID NO: 8815 - DNA, 20 bp, synthetic construct
  source 1..20: mol_type = other DNA
ttggtagtttgtcgtcatta

SEQ ID NO: 8816 - DNA, 20 bp, synthetic construct
  source 1..20: mol_type = other DNA
actccttgagccttctctgc

SEQ ID NO: 8817 - DNA, 20 bp, synthetic construct
  source 1..20: mol_type = other DNA
gattgcacctacttaatatt

SEQ ID NO: 8818 - DNA, 20 bp, synthetic construct
  source 1..20: mol_type = other DNA
ttctcatcatccgacaacat

SEQ ID NO: 8819 - DNA, 20 bp, synthetic construct
  source 1..20: mol_type = other DNA
gtgatacagaaactgcgcaa

SEQ ID NO: 8820 - DNA, 20 bp, synthetic construct
  source 1..20: mol_type = other DNA
ttaaccacgggaggctgttg

SEQ ID NO: 8821 - DNA, 20 bp, synthetic construct
  source 1..20: mol_type = other DNA
gtagctaaatgtgcttacaa

SEQ ID NO: 8822 - DNA, 20 bp, synthetic construct
  source 1..20: mol_type = other DNA
tttatgagatcagacgtgtg

SEQ ID NO: 8823 - DNA, 20 bp, synthetic construct
  source 1..20: mol_type = other DNA
cgcgtggatcgatggagtgc

SEQ ID NO: 8824 - DNA, 20 bp, synthetic construct
  source 1..20: mol_type = other DNA
gatgtaagcctttgacgcgc

SEQ ID NO: 8825 - DNA, 20 bp, synthetic construct
  source 1..20: mol_type = other DNA
attatatactcgggtccttg

SEQ ID NO: 8826 - DNA, 20 bp, synthetic construct
  source 1..20: mol_type = other DNA
ggcagtggtgctcacgagat

SEQ ID NO: 8827 - DNA, 20 bp, synthetic construct
  source 1..20: mol_type = other DNA
ggctgaagttcagtttcagc

SEQ ID NO: 8828 - DNA, 20 bp, synthetic construct
  source 1..20: mol_type = other DNA
gatctgtccgttaatgagcc

SEQ ID NO: 8829 - DNA, 20 bp, synthetic construct
  source 1..20: mol_type = other DNA
gaaccatagtaggcgcgagg

SEQ ID NO: 8830 - DNA, 20 bp, synthetic construct
  source 1..20: mol_type = other DNA
cagttcagcgtaggctattt

SEQ ID NO: 8831 - DNA, 20 bp, synthetic construct
  source 1..20: mol_type = other DNA
tttgttcctttgtcgcaatg

SEQ ID NO: 8832 - DNA, 20 bp, synthetic construct
  source 1..20: mol_type = other DNA
ccggactaccaacctataac

SEQ ID NO: 8833 - DNA, 20 bp, synthetic construct
  source 1..20: mol_type = other DNA
gaggttacgcagagaacagg

SEQ ID NO: 8834 - DNA, 20 bp, synthetic construct
  source 1..20: mol_type = other DNA
agctgtagaccactaatact

SEQ ID NO: 8835 - DNA, 20 bp, synthetic construct
  source 1..20: mol_type = other DNA
tggacctactggttgctatc

SEQ ID NO: 8836 - DNA, 20 bp, synthetic construct
  source 1..20: mol_type = other DNA
cgaacatagatgcgcgctgg

SEQ ID NO: 8837 - DNA, 20 bp, synthetic construct
  source 1..20: mol_type = other DNA
actctacaagtaacctcgcg

SEQ ID NO: 8838 - DNA, 20 bp, synthetic construct
  source 1..20: mol_type = other DNA
acctactattcctctaggga

SEQ ID NO: 8839 - DNA, 20 bp, synthetic construct
  source 1..20: mol_type = other DNA
gccagtgggatctaccatct

SEQ ID NO: 8840 - DNA, 20 bp, synthetic construct
  source 1..20: mol_type = other DNA
ctaatttcttgggttggact

SEQ ID NO: 8841 - DNA, 20 bp, synthetic construct
  source 1..20: mol_type = other DNA
gtacaggctaggagggtcta

SEQ ID NO: 8842 - DNA, 20 bp, synthetic construct
  source 1..20: mol_type = other DNA
gattaccgcatacgccattt

SEQ ID NO: 8843 - DNA, 20 bp, synthetic construct
  source 1..20: mol_type = other DNA
gcacatagaagcctatagag

SEQ ID NO: 8844 - DNA, 20 bp, synthetic construct
  source 1..20: mol_type = other DNA
gagttagcccatatgaccac

SEQ ID NO: 8845 - DNA, 20 bp, synthetic construct
  source 1..20: mol_type = other DNA
acacactcttacacgatctc

SEQ ID NO: 8846 - DNA, 20 bp, synthetic construct
  source 1..20: mol_type = other DNA
taggtaccgcaccgacgctt

SEQ ID NO: 8847 - DNA, 20 bp, synthetic construct
  source 1..20: mol_type = other DNA
gagtctgccgtcgttctctc

SEQ ID NO: 8848 - DNA, 20 bp, synthetic construct
  source 1..20: mol_type = other DNA
tggagtattccacggttgaa

SEQ ID NO: 8849 - DNA, 20 bp, synthetic construct
  source 1..20: mol_type = other DNA
acatagatagtcccggtcta

SEQ ID NO: 8850 - DNA, 20 bp, synthetic construct
  source 1..20: mol_type = other DNA
agactactcggtatattgca

SEQ ID NO: 8851 - DNA, 20 bp, synthetic construct
  source 1..20: mol_type = other DNA
acttagagtagtatcagccg

SEQ ID NO: 8852 - DNA, 20 bp, synthetic construct
  source 1..20: mol_type = other DNA
tagacgcggctgcgccataa

SEQ ID NO: 8853 - DNA, 20 bp, synthetic construct
  source 1..20: mol_type = other DNA
aaactgcaacaacattgtcg

SEQ ID NO: 8854 - DNA, 20 bp, synthetic construct
  source 1..20: mol_type = other DNA
attaatatcctccatccgac

SEQ ID NO: 8855 - DNA, 20 bp, synthetic construct
  source 1..20: mol_type = other DNA
aaccatagctagtgccgcag

SEQ ID NO: 8856 - DNA, 20 bp, synthetic construct
  source 1..20: mol_type = other DNA
caattagcgtatccttagcg

SEQ ID NO: 8857 - DNA, 20 bp, synthetic construct
  source 1..20: mol_type = other DNA
cttacttggtagttctcagg

SEQ ID NO: 8858 - DNA, 20 bp, synthetic construct
  source 1..20: mol_type = other DNA
acttgagagaattagatcat

SEQ ID NO: 8859 - DNA, 20 bp, synthetic construct
  source 1..20: mol_type = other DNA
ttagcgctttatgcgtgttg

SEQ ID NO: 8860 - DNA, 20 bp, synthetic construct
  source 1..20: mol_type = other DNA
ccgctactggagcaacccat

SEQ ID NO: 8861 - DNA, 20 bp, synthetic construct
  source 1..20: mol_type = other DNA
gaaccctttaggtttgtatc

SEQ ID NO: 8862 - DNA, 20 bp, synthetic construct
  source 1..20: mol_type = other DNA
tcgggaagggactcacgctg

SEQ ID NO: 8863 - DNA, 20 bp, synthetic construct
  source 1..20: mol_type = other DNA
gcgtggtgttagccggcgta

SEQ ID NO: 8864 - DNA, 20 bp, synthetic construct
  source 1..20: mol_type = other DNA
ctcagtacgctactatttaa

SEQ ID NO: 8865 - DNA, 20 bp, synthetic construct
  source 1..20: mol_type = other DNA
tagtgattccaacagctatc

SEQ ID NO: 8866 - DNA, 20 bp, synthetic construct
  source 1..20: mol_type = other DNA
tatcaatagtctcagggcat

SEQ ID NO: 8867 - DNA, 20 bp, synthetic construct
  source 1..20: mol_type = other DNA
gtctcaaggtcaatgtgtgg

SEQ ID NO: 8868 - DNA, 20 bp, synthetic construct
  source 1..20: mol_type = other DNA
ccaccacatcagtattatgc

SEQ ID NO: 8869 - DNA, 20 bp, synthetic construct
  source 1..20: mol_type = other DNA
gaactgggcactaatgtgat

SEQ ID NO: 8870 - DNA, 20 bp, synthetic construct
  source 1..20: mol_type = other DNA
aggcagccgcagtattgatg

SEQ ID NO: 8871 - DNA, 20 bp, synthetic construct
  source 1..20: mol_type = other DNA
ttagacagctgcgcccacca

SEQ ID NO: 8872 - DNA, 20 bp, synthetic construct
  source 1..20: mol_type = other DNA
tcagggatgcccaggatcga

SEQ ID NO: 8873 - DNA, 20 bp, synthetic construct
  source 1..20: mol_type = other DNA
ctaaggacccgacgtgtcag

SEQ ID NO: 8874 - DNA, 20 bp, synthetic construct
  source 1..20: mol_type = other DNA
gttatctcccaacgtatcac

SEQ ID NO: 8875 - DNA, 20 bp, synthetic construct
  source 1..20: mol_type = other DNA
gcgcaatacttcagtatgtt

SEQ ID NO: 8876 - DNA, 20 bp, synthetic construct
  source 1..20: mol_type = other DNA
acatgaacacttgcacttgg

SEQ ID NO: 8877 - DNA, 20 bp, synthetic construct
  source 1..20: mol_type = other DNA
accagcacctgatggcagcg

SEQ ID NO: 8878 - DNA, 20 bp, synthetic construct
  source 1..20: mol_type = other DNA
agatttacctacctgacatg

SEQ ID NO: 8879 - DNA, 20 bp, synthetic construct
  source 1..20: mol_type = other DNA
atgttggtcgcacgcgatat

SEQ ID NO: 8880 - DNA, 20 bp, synthetic construct
  source 1..20: mol_type = other DNA
ggcgtccgagcttgacgaga

SEQ ID NO: 8881 - DNA, 20 bp, synthetic construct
  source 1..20: mol_type = other DNA
gagctctgtcgggcgagaaa

SEQ ID NO: 8882 - DNA, 20 bp, synthetic construct
  source 1..20: mol_type = other DNA
aacagatccagctgggagac

SEQ ID NO: 8883 - DNA, 20 bp, synthetic construct
  source 1..20: mol_type = other DNA
gatttcgtcacaacacgttg

SEQ ID NO: 8884 - DNA, 20 bp, synthetic construct
  source 1..20: mol_type = other DNA
tactggaccgcagaggaaga

SEQ ID NO: 8885 - DNA, 20 bp, synthetic construct
  source 1..20: mol_type = other DNA
cgtttcaactttgctaccta

SEQ ID NO: 8886 - DNA, 20 bp, synthetic construct
  source 1..20: mol_type = other DNA
caacgctaaccaggaggttc

SEQ ID NO: 8887 - DNA, 20 bp, synthetic construct
  source 1..20: mol_type = other DNA
ggatcccgcattggcctgca

SEQ ID NO: 8888 - DNA, 20 bp, synthetic construct
  source 1..20: mol_type = other DNA
atactggacgtgtgtgtccc

SEQ ID NO: 8889 - DNA, 20 bp, synthetic construct
  source 1..20: mol_type = other DNA
cagcggaggcatcccataaa

SEQ ID NO: 8890 - DNA, 20 bp, synthetic construct
  source 1..20: mol_type = other DNA
atcagcggttccgtccttct

SEQ ID NO: 8891 - DNA, 20 bp, synthetic construct
  source 1..20: mol_type = other DNA
ttcacggcctgtatcagcta

SEQ ID NO: 8892 - DNA, 20 bp, synthetic construct
  source 1..20: mol_type = other DNA
gaataagaagcggttgcggg

SEQ ID NO: 8893 - DNA, 20 bp, synthetic construct
  source 1..20: mol_type = other DNA
gggaatcttgaactcgtcta

SEQ ID NO: 8894 - DNA, 20 bp, synthetic construct
  source 1..20: mol_type = other DNA
acagtacctaaagtgttcgc

SEQ ID NO: 8895 - DNA, 20 bp, synthetic construct
  source 1..20: mol_type = other DNA
acagagcaccatgcatagcg

SEQ ID NO: 8896 - DNA, 20 bp, synthetic construct
  source 1..20: mol_type = other DNA
tgagtctcttggctagtgta

SEQ ID NO: 8897 - DNA, 20 bp, synthetic construct
  source 1..20: mol_type = other DNA
tctaagaggcgtctcgctaa

SEQ ID NO: 8898 - DNA, 20 bp, synthetic construct
  source 1..20: mol_type = other DNA
atgttattatcggcatatgg

SEQ ID NO: 8899 - DNA, 20 bp, synthetic construct
  source 1..20: mol_type = other DNA
gcggcaagcatcacgcttta

SEQ ID NO: 8900 - DNA, 20 bp, synthetic construct
  source 1..20: mol_type = other DNA
ggcgttggatcaaacctcgc

SEQ ID NO: 8901 - DNA, 20 bp, synthetic construct
  source 1..20: mol_type = other DNA
ggtaagcagcttctgagcgt

SEQ ID NO: 8902 - DNA, 20 bp, synthetic construct
  source 1..20: mol_type = other DNA
ccgaccggactctagcgcaa

SEQ ID NO: 8903 - DNA, 20 bp, synthetic construct
  source 1..20: mol_type = other DNA
acgagaggttagggagagac

SEQ ID NO: 8904 - DNA, 20 bp, synthetic construct
  source 1..20: mol_type = other DNA
ctaaacttcgggtgttgtgt

SEQ ID NO: 8905 - DNA, 20 bp, synthetic construct
  source 1..20: mol_type = other DNA
cgatgatacatgaggttgag

SEQ ID NO: 8906 - DNA, 20 bp, synthetic construct
  source 1..20: mol_type = other DNA
atccgacagagcgatcgccg

SEQ ID NO: 8907 - DNA, 20 bp, synthetic construct
  source 1..20: mol_type = other DNA
cgaccattactcgtcatcag

SEQ ID NO: 8908 - DNA, 20 bp, synthetic construct
  source 1..20: mol_type = other DNA
gtcgatagacagtatgttaa

SEQ ID NO: 8909 - DNA, 20 bp, synthetic construct
  source 1..20: mol_type = other DNA
aatgtgcgagtttgatctgc

SEQ ID NO: 8910 - DNA, 20 bp, synthetic construct
  source 1..20: mol_type = other DNA
gggagaagccgatcaccgct

SEQ ID NO: 8911 - DNA, 20 bp, synthetic construct
  source 1..20: mol_type = other DNA
tgaaactcggatggtaatag

SEQ ID NO: 8912 - DNA, 20 bp, synthetic construct
  source 1..20: mol_type = other DNA
ccttggccacccatcgcata

SEQ ID NO: 8913 - DNA, 20 bp, synthetic construct
  source 1..20: mol_type = other DNA
aaccgttctattggctttag

SEQ ID NO: 8914 - DNA, 20 bp, synthetic construct
  source 1..20: mol_type = other DNA
gacgcgtgcaacagcttaag

SEQ ID NO: 8915 - DNA, 20 bp, synthetic construct
  source 1..20: mol_type = other DNA
aaggtggcgcgcatctcatg

SEQ ID NO: 8916 - DNA, 20 bp, synthetic construct
  source 1..20: mol_type = other DNA
atcccgagagttattactat

SEQ ID NO: 8917 - DNA, 20 bp, synthetic construct
  source 1..20: mol_type = other DNA
tcccacgcgtgctagctttg

SEQ ID NO: 8918 - DNA, 20 bp, synthetic construct
  source 1..20: mol_type = other DNA
gcaaagaacgttgtctacgg

SEQ ID NO: 8919 - DNA, 20 bp, synthetic construct
  source 1..20: mol_type = other DNA
gcaatatctggcacgtagct

SEQ ID NO: 8920 - DNA, 20 bp, synthetic construct
  source 1..20: mol_type = other DNA
agactcttgcggtaattagg

SEQ ID NO: 8921 - DNA, 20 bp, synthetic construct
  source 1..20: mol_type = other DNA
accgttatccgtatgcgacc

SEQ ID NO: 8922 - DNA, 20 bp, synthetic construct
  source 1..20: mol_type = other DNA
ctgaatgcgttgggtatcct

SEQ ID NO: 8923 - DNA, 20 bp, synthetic construct
  source 1..20: mol_type = other DNA
gcgtgtgctagtctcgttct

SEQ ID NO: 8924 - DNA, 20 bp, synthetic construct
  source 1..20: mol_type = other DNA
atatgccagaagaagcctgt

SEQ ID NO: 8925 - DNA, 20 bp, synthetic construct
  source 1..20: mol_type = other DNA
gcgtaagaactcgaactcgt

SEQ ID NO: 8926 - DNA, 20 bp, synthetic construct
  source 1..20: mol_type = other DNA
gacgcctagatgtcactcca

SEQ ID NO: 8927 - DNA, 20 bp, synthetic construct
  source 1..20: mol_type = other DNA
accgatctgggtggatagag

SEQ ID NO: 8928 - DNA, 20 bp, synthetic construct
  source 1..20: mol_type = other DNA
agcaccaattcgaaccgcga

SEQ ID NO: 8929 - DNA, 20 bp, synthetic construct
  source 1..20: mol_type = other DNA
tattcaggagatgtcagcgg

SEQ ID NO: 8930 - DNA, 20 bp, synthetic construct
  source 1..20: mol_type = other DNA
gcaaccgacttgaatgaacg

SEQ ID NO: 8931 - DNA, 20 bp, synthetic construct
  source 1..20: mol_type = other DNA
tcataccgaattgacctgtc

SEQ ID NO: 8932 - DNA, 20 bp, synthetic construct
  source 1..20: mol_type = other DNA
ggtcctataggcatccgtgc

SEQ ID NO: 8933 - DNA, 20 bp, synthetic construct
  source 1..20: mol_type = other DNA
ctggcatctccctcgttata

SEQ ID NO: 8934 - DNA, 20 bp, synthetic construct
  source 1..20: mol_type = other DNA
gctgagcaatccacggtcct

SEQ ID NO: 8935 - DNA, 20 bp, synthetic construct
  source 1..20: mol_type = other DNA
agcgagcggtctgctaagaa

SEQ ID NO: 8936 - DNA, 20 bp, synthetic construct
  source 1..20: mol_type = other DNA
tgcgaatctgacgtggtcag

SEQ ID NO: 8937 - DNA, 20 bp, synthetic construct
  source 1..20: mol_type = other DNA
gaatcgacgtgagctgctct

SEQ ID NO: 8938 - DNA, 20 bp, synthetic construct
  source 1..20: mol_type = other DNA
caccacattaactggttgcc

SEQ ID NO: 8939 - DNA, 20 bp, synthetic construct
  source 1..20: mol_type = other DNA
acagctatcgaacagcgaat

SEQ ID NO: 8940 - DNA, 20 bp, synthetic construct
  source 1..20: mol_type = other DNA
ttgttgacagagatcgcggg

SEQ ID NO: 8941 - DNA, 20 bp, synthetic construct
  source 1..20: mol_type = other DNA
tgtgcttccttctcgatgcc

SEQ ID NO: 8942 - DNA, 20 bp, synthetic construct
  source 1..20: mol_type = other DNA
gcgtcaaccgtgaaatccat

SEQ ID NO: 8943 - DNA, 20 bp, synthetic construct
  source 1..20: mol_type = other DNA
cgtcatggcaatcgctgtcg

SEQ ID NO: 8944 - DNA, 20 bp, synthetic construct
  source 1..20: mol_type = other DNA
cagaggtgggtcgggtcgtt

SEQ ID NO: 8945 - DNA, 20 bp, synthetic construct
  source 1..20: mol_type = other DNA
actagtgctaccatgccaca

SEQ ID NO: 8946 - DNA, 20 bp, synthetic construct
  source 1..20: mol_type = other DNA
cgtacctgtgccatactagc

SEQ ID NO: 8947 - DNA, 20 bp, synthetic construct
  source 1..20: mol_type = other DNA
tatcgtagacgagcacgtgc

SEQ ID NO: 8948 - DNA, 20 bp, synthetic construct
  source 1..20: mol_type = other DNA
ttatcagtccgaatgggatg

SEQ ID NO: 8949 - DNA, 20 bp, synthetic construct
  source 1..20: mol_type = other DNA
taaagctcgcggtaaccatg

SEQ ID NO: 8950 - DNA, 20 bp, synthetic construct
  source 1..20: mol_type = other DNA
cgagggtatcaaggcgctga

SEQ ID NO: 8951 - DNA, 20 bp, synthetic construct
  source 1..20: mol_type = other DNA
agactcggacgtgctgttgg

SEQ ID NO: 8952 - DNA, 20 bp, synthetic construct
  source 1..20: mol_type = other DNA
cgtgggaatcactcccggcc

SEQ ID NO: 8953 - DNA, 20 bp, synthetic construct
  source 1..20: mol_type = other DNA
ccgtaattaacttcgcggtt

SEQ ID NO: 8954 - DNA, 20 bp, synthetic construct
  source 1..20: mol_type = other DNA
tgcggactggttcctcagcc

SEQ ID NO: 8955 - DNA, 20 bp, synthetic construct
  source 1..20: mol_type = other DNA
ttccggcacggcgtcactaa

SEQ ID NO: 8956 - DNA, 20 bp, synthetic construct
  source 1..20: mol_type = other DNA
tcatctttgcttctccgaca

SEQ ID NO: 8957 - DNA, 20 bp, synthetic construct
  source 1..20: mol_type = other DNA
aatctccgagatggccagtt

SEQ ID NO: 8958 - DNA, 20 bp, synthetic construct
  source 1..20: mol_type = other DNA
agaaactaggtagccagatc

SEQ ID NO: 8959 - DNA, 20 bp, synthetic construct
  source 1..20: mol_type = other DNA
cccaagagatggctttcctg

SEQ ID NO: 8960 - DNA, 20 bp, synthetic construct
  source 1..20: mol_type = other DNA
ttcggctctcgccattgcgc

SEQ ID NO: 8961 - DNA, 20 bp, synthetic construct
  source 1..20: mol_type = other DNA
ccctctatacgtgggccttg

SEQ ID NO: 8962 - DNA, 20 bp, synthetic construct
  source 1..20: mol_type = other DNA
atgataacgggcctattaga

SEQ ID NO: 8963 - DNA, 20 bp, synthetic construct
  source 1..20: mol_type = other DNA
tgtgatgtttagaaccgtag

SEQ ID NO: 8964 - DNA, 20 bp, synthetic construct
  source 1..20: mol_type = other DNA
gtaggcttattggtcgagga

SEQ ID NO: 8965 - DNA, 20 bp, synthetic construct
  source 1..20: mol_type = other DNA
gacatgcggatctgtcttgg

SEQ ID NO: 8966 - DNA, 20 bp, synthetic construct
  source 1..20: mol_type = other DNA
gtccgtgtatctcaacgcaa

SEQ ID NO: 8967 - DNA, 20 bp, synthetic construct
  source 1..20: mol_type = other DNA
attaacagggctatctgaga

SEQ ID NO: 8968 - DNA, 20 bp, synthetic construct
  source 1..20: mol_type = other DNA
ctataagacggtggattaca

SEQ ID NO: 8969 - DNA, 20 bp, synthetic construct
  source 1..20: mol_type = other DNA
ttagctgctctacacagatg

SEQ ID NO: 8970 - DNA, 20 bp, synthetic construct
  source 1..20: mol_type = other DNA
acatgcaaagcattgttcgc

SEQ ID NO: 8971 - DNA, 20 bp, synthetic construct
  source 1..20: mol_type = other DNA
gcaaagttgatcccgcgctg

SEQ ID NO: 8972 - DNA, 20 bp, synthetic construct
  source 1..20: mol_type = other DNA
cacgacgacgcaggtagaac

SEQ ID NO: 8973 - DNA, 20 bp, synthetic construct
  source 1..20: mol_type = other DNA
gtacacgatctgattctacg

SEQ ID NO: 8974 - DNA, 20 bp, synthetic construct
  source 1..20: mol_type = other DNA
attaagctccattccatgct

SEQ ID NO: 8975 - DNA, 20 bp, synthetic construct
  source 1..20: mol_type = other DNA
cataggacggtcctatcaca

SEQ ID NO: 8976 - DNA, 20 bp, synthetic construct
  source 1..20: mol_type = other DNA
agtaaatgagagatagtgca

SEQ ID NO: 8977 - DNA, 20 bp, synthetic construct
  source 1..20: mol_type = other DNA
ctccatctaccgacggagca

SEQ ID NO: 8978 - DNA, 20 bp, synthetic construct
  source 1..20: mol_type = other DNA
ggaagcggcagtttattgac

SEQ ID NO: 8979 - DNA, 20 bp, synthetic construct
  source 1..20: mol_type = other DNA
acaaacaaccaatacccaag

SEQ ID NO: 8980 - DNA, 20 bp, synthetic construct
  source 1..20: mol_type = other DNA
aaacacggtccggctcaagc

SEQ ID NO: 8981 - DNA, 20 bp, synthetic construct
  source 1..20: mol_type = other DNA
cttgcgctagtggtctatta

SEQ ID NO: 8982 - DNA, 20 bp, synthetic construct
  source 1..20: mol_type = other DNA
caaacgtcctctgcgagggt

SEQ ID NO: 8983 - DNA, 20 bp, synthetic construct
  source 1..20: mol_type = other DNA
cgcgtttatggcacaatgaa

SEQ ID NO: 8984 - DNA, 20 bp, synthetic construct
  source 1..20: mol_type = other DNA
atttactgaccaggcctgaa

SEQ ID NO: 8985 - DNA, 20 bp, synthetic construct
  source 1..20: mol_type = other DNA
aatcctgtacgcttattgtt

SEQ ID NO: 8986 - DNA, 20 bp, synthetic construct
  source 1..20: mol_type = other DNA
tatggtggagaatgcgcctg

SEQ ID NO: 8987 - DNA, 20 bp, synthetic construct
  source 1..20: mol_type = other DNA
gttcggtgtactagcgagta

SEQ ID NO: 8988 - DNA, 20 bp, synthetic construct
  source 1..20: mol_type = other DNA
tgacgggtaaattgtggacg

SEQ ID NO: 8989 - DNA, 20 bp, synthetic construct
  source 1..20: mol_type = other DNA
ccggacccgaatcaaacgac

SEQ ID NO: 8990 - DNA, 20 bp, synthetic construct
  source 1..20: mol_type = other DNA
gattccgccggtgttcaagt

SEQ ID NO: 8991 - DNA, 20 bp, synthetic construct
  source 1..20: mol_type = other DNA
gaagtcgccaggtgggtaag

SEQ ID NO: 8992 - DNA, 20 bp, synthetic construct
  source 1..20: mol_type = other DNA
tcgcatccggcggttccaag

SEQ ID NO: 8993 - DNA, 20 bp, synthetic construct
  source 1..20: mol_type = other DNA
aacgggtctttgattaacgc

SEQ ID NO: 8994 - DNA, 20 bp, synthetic construct
  source 1..20: mol_type = other DNA
ctcaggaaagttcctctggt

SEQ ID NO: 8995 - DNA, 20 bp, synthetic construct
  source 1..20: mol_type = other DNA
attgcgagaaagcgtctggc

SEQ ID NO: 8996 - DNA, 20 bp, synthetic construct
  source 1..20: mol_type = other DNA
ctgaaacagacgtctaccag

SEQ ID NO: 8997 - DNA, 20 bp, synthetic construct
  source 1..20: mol_type = other DNA
gactgccgtgtgtggtatga

SEQ ID NO: 8998 - DNA, 20 bp, synthetic construct
  source 1..20: mol_type = other DNA
gctaaagagcgtatccgtat

SEQ ID NO: 8999 - DNA, 20 bp, synthetic construct
  source 1..20: mol_type = other DNA
aacgccacctcgttctactt

SEQ ID NO: 9000 - DNA, 20 bp, synthetic construct
  source 1..20: mol_type = other DNA
gcgcgcgctagtttaagacc

SEQ ID NO: 9001 - DNA, 20 bp, synthetic construct
  source 1..20: mol_type = other DNA
tcgccggaaggacatgttcg

SEQ ID NO: 9002 - DNA, 20 bp, synthetic construct
  source 1..20: mol_type = other DNA
tgccgctactcgcatgaaga

SEQ ID NO: 9003 - DNA, 20 bp, synthetic construct
  source 1..20: mol_type = other DNA
agtagcccatcacatgtcca

SEQ ID NO: 9004 - DNA, 20 bp, synthetic construct
  source 1..20: mol_type = other DNA
tagagtggaatagcacagtg

SEQ ID NO: 9005 - DNA, 20 bp, synthetic construct
  source 1..20: mol_type = other DNA
acgttagtgcactgcacagc

SEQ ID NO: 9006 - DNA, 20 bp, synthetic construct
  source 1..20: mol_type = other DNA
gggcgtatgaaacagtaccc

SEQ ID NO: 9007 - DNA, 20 bp, synthetic construct
  source 1..20: mol_type = other DNA
ttcgcaatatcagtgggatc

SEQ ID NO: 9008 - DNA, 20 bp, synthetic construct
  source 1..20: mol_type = other DNA
tcttaatctgcccatgcagg

SEQ ID NO: 9009 - DNA, 20 bp, synthetic construct
  source 1..20: mol_type = other DNA
ggaacgaagttctgagcctt

SEQ ID NO: 9010 - DNA, 20 bp, synthetic construct
  source 1..20: mol_type = other DNA
taccttgtaagctacggaac

SEQ ID NO: 9011 - DNA, 20 bp, synthetic construct
  source 1..20: mol_type = other DNA
tacaccacaatagtgttgtg

SEQ ID NO: 9012 - DNA, 20 bp, synthetic construct
  source 1..20: mol_type = other DNA
atgcggaccacccttgcgtg

SEQ ID NO: 9013 - DNA, 20 bp, synthetic construct
  source 1..20: mol_type = other DNA
agacatgggcttgtgtttgg

SEQ ID NO: 9014 - DNA, 20 bp, synthetic construct
  source 1..20: mol_type = other DNA
tgtacgtctatagtttgtaa

SEQ ID NO: 9015 - DNA, 20 bp, synthetic construct
  source 1..20: mol_type = other DNA
agttcttagtcgaaagtagg

SEQ ID NO: 9016 - DNA, 20 bp, synthetic construct
  source 1..20: mol_type = other DNA
aagcacgatgaggttggccc

SEQ ID NO: 9017 - DNA, 20 bp, synthetic construct
  source 1..20: mol_type = other DNA
ctaacagtcgtaccagttac

SEQ ID NO: 9018 - DNA, 20 bp, synthetic construct
  source 1..20: mol_type = other DNA
tacgcttatgcgtcgtatta

SEQ ID NO: 9019 - DNA, 20 bp, synthetic construct
  source 1..20: mol_type = other DNA
atcggtccgcacagtagctg

SEQ ID NO: 9020 - DNA, 20 bp, synthetic construct
  source 1..20: mol_type = other DNA
cgtatggtggtcgcaaatgt

SEQ ID NO: 9021 - DNA, 20 bp, synthetic construct
  source 1..20: mol_type = other DNA
ggtgaacgccgataactatt

SEQ ID NO: 9022 - DNA, 20 bp, synthetic construct
  source 1..20: mol_type = other DNA
gatgcctaagagaacacggc

SEQ ID NO: 9023 - DNA, 20 bp, synthetic construct
  source 1..20: mol_type = other DNA
agtgtaacataggacataga

SEQ ID NO: 9024 - DNA, 20 bp, synthetic construct
  source 1..20: mol_type = other DNA
tcatacgtggccactcgcga

SEQ ID NO: 9025 - DNA, 20 bp, synthetic construct
  source 1..20: mol_type = other DNA
tcgtccagggttcacagcag

SEQ ID NO: 9026 - DNA, 20 bp, synthetic construct
  source 1..20: mol_type = other DNA
ctgactgacttgtacaaggc

SEQ ID NO: 9027 - DNA, 20 bp, synthetic construct
  source 1..20: mol_type = other DNA
gttgtcaacagcggtgggta

SEQ ID NO: 9028 - DNA, 20 bp, synthetic construct
  source 1..20: mol_type = other DNA
gaaactctcccgtcgagatc

SEQ ID NO: 9029 - DNA, 20 bp, synthetic construct
  source 1..20: mol_type = other DNA
tcagcgagataaggtaccca

SEQ ID NO: 9030 - DNA, 20 bp, synthetic construct
  source 1..20: mol_type = other DNA
tgcgaatcaccacccatcca

SEQ ID NO: 9031 - DNA, 20 bp, synthetic construct
  source 1..20: mol_type = other DNA
gggcagcgtaccgatgatca

SEQ ID NO: 9032 - DNA, 20 bp, synthetic construct
  source 1..20: mol_type = other DNA
atactaatagacacgctggc

SEQ ID NO: 9033 - DNA, 20 bp, synthetic construct
  source 1..20: mol_type = other DNA
attgcctagtgtcttggctt

SEQ ID NO: 9034 - DNA, 20 bp, synthetic construct
  source 1..20: mol_type = other DNA
atctcatacagatagagcca

SEQ ID NO: 9035 - DNA, 20 bp, synthetic construct
  source 1..20: mol_type = other DNA
cactatggaccgcccgcact

SEQ ID NO: 9036 - DNA, 20 bp, synthetic construct
  source 1..20: mol_type = other DNA
ggtcgcacgattatactatt

SEQ ID NO: 9037 - DNA, 20 bp, synthetic construct
  source 1..20: mol_type = other DNA
acgagtgtttcgtgtactcc

SEQ ID NO: 9038 - DNA, 20 bp, synthetic construct
  source 1..20: mol_type = other DNA
gtgtgaaataccgccataat

SEQ ID NO: 9039 - DNA, 20 bp, synthetic construct
  source 1..20: mol_type = other DNA
ctgaccacaagataacgtct

SEQ ID NO: 9040 - DNA, 20 bp, synthetic construct
  source 1..20: mol_type = other DNA
tgggcttgttctgtacgtga

SEQ ID NO: 9041 - DNA, 20 bp, synthetic construct
  source 1..20: mol_type = other DNA
gtaccgagacaaccgatagg

SEQ ID NO: 9042 - DNA, 20 bp, synthetic construct
  source 1..20: mol_type = other DNA
ggttaatctatggtccgggc

SEQ ID NO: 9043 - DNA, 20 bp, synthetic construct
  source 1..20: mol_type = other DNA
caccagctcacacttgtcat

SEQ ID NO: 9044 - DNA, 20 bp, synthetic construct
  source 1..20: mol_type = other DNA
aactttaatgagccgagaca

SEQ ID NO: 9045 - DNA, 20 bp, synthetic construct
  source 1..20: mol_type = other DNA
ctaagaacttacatgagtag

SEQ ID NO: 9046 - DNA, 20 bp, synthetic construct
  source 1..20: mol_type = other DNA
tctcaactactcatcatcgt

SEQ ID NO: 9047 - DNA, 20 bp, synthetic construct
  source 1..20: mol_type = other DNA
gtcctaatgaccgagcataa

SEQ ID NO: 9048 - DNA, 20 bp, synthetic construct
  source 1..20: mol_type = other DNA
atcgagagcgatactactcg

SEQ ID NO: 9049 - DNA, 20 bp, synthetic construct
  source 1..20: mol_type = other DNA
atgcggtattgggcgcagtg

SEQ ID NO: 9050 - DNA, 20 bp, synthetic construct
  source 1..20: mol_type = other DNA
taacgttaagagacctaacc

SEQ ID NO: 9051 - DNA, 20 bp, synthetic construct
  source 1..20: mol_type = other DNA
tggcagtaaagcaggcttgt

SEQ ID NO: 9052 - DNA, 20 bp, synthetic construct
  source 1..20: mol_type = other DNA
catgtgtcgaggagcaccaa

SEQ ID NO: 9053 - DNA, 20 bp, synthetic construct
  source 1..20: mol_type = other DNA
gaatatcgccgagagccctg

SEQ ID NO: 9054 - DNA, 20 bp, synthetic construct
  source 1..20: mol_type = other DNA
tcttgtttcgactcagttag

SEQ ID NO: 9055 - DNA, 20 bp, synthetic construct
  source 1..20: mol_type = other DNA
agggcagacttgtaagaggt

SEQ ID NO: 9056 - DNA, 20 bp, synthetic construct
  source 1..20: mol_type = other DNA
atcgcttccggatactggaa

SEQ ID NO: 9057 - DNA, 20 bp, synthetic construct
  source 1..20: mol_type = other DNA
tagtcgcattcgtcggagta

SEQ ID NO: 9058 - DNA, 20 bp, synthetic construct
  source 1..20: mol_type = other DNA
cgatctgcctgtcacttagg

SEQ ID NO: 9059 - DNA, 20 bp, synthetic construct
  source 1..20: mol_type = other DNA
ccgcgcgtttcctagcgact

SEQ ID NO: 9060 - DNA, 20 bp, synthetic construct
  source 1..20: mol_type = other DNA
actacccattaagatggcct

SEQ ID NO: 9061 - DNA, 20 bp, synthetic construct
  source 1..20: mol_type = other DNA
actcttagttgtcagcttga

SEQ ID NO: 9062 - DNA, 20 bp, synthetic construct
  source 1..20: mol_type = other DNA
cggcctacaaagtgctaaga

SEQ ID NO: 9063 - DNA, 20 bp, synthetic construct
  source 1..20: mol_type = other DNA
gaggagactaggagatagca

SEQ ID NO: 9064 - DNA, 20 bp, synthetic construct
  source 1..20: mol_type = other DNA
tgacaggttgtgtatcgttg

SEQ ID NO: 9065 - DNA, 20 bp, synthetic construct
  source 1..20: mol_type = other DNA
agtcagcggaagctgcgcta

SEQ ID NO: 9066 - DNA, 20 bp, synthetic construct
  source 1..20: mol_type = other DNA
cataacaaggtctaatacgg

SEQ ID NO: 9067 - DNA, 20 bp, synthetic construct
  source 1..20: mol_type = other DNA
tcgctcatacgacctgatgt

SEQ ID NO: 9068 - DNA, 20 bp, synthetic construct
  source 1..20: mol_type = other DNA
atttgagatgtaatcggcgc

SEQ ID NO: 9069 - DNA, 20 bp, synthetic construct
  source 1..20: mol_type = other DNA
ctcgacctggatttgccgat

SEQ ID NO: 9070 - DNA, 20 bp, synthetic construct
  source 1..20: mol_type = other DNA
atccgagtacacacctgcgg

SEQ ID NO: 9071 - DNA, 20 bp, synthetic construct
  source 1..20: mol_type = other DNA
gaaactttgctaccttactg

SEQ ID NO: 9072 - DNA, 20 bp, synthetic construct
  source 1..20: mol_type = other DNA
aggatcaatcgcaagataaa

SEQ ID NO: 9073 - DNA, 20 bp, synthetic construct
  source 1..20: mol_type = other DNA
aacggattgcctccatatat

SEQ ID NO: 9074 - DNA, 20 bp, synthetic construct
  source 1..20: mol_type = other DNA
gatgcgggcctgtatcgcaa

SEQ ID NO: 9075 - DNA, 20 bp, synthetic construct
  source 1..20: mol_type = other DNA
tctaagtgccctcatgttcc

SEQ ID NO: 9076 - DNA, 20 bp, synthetic construct
  source 1..20: mol_type = other DNA
agcagagcccaagtaaggtg

SEQ ID NO: 9077 - DNA, 20 bp, synthetic construct
  source 1..20: mol_type = other DNA
gaaactatggatttgacacg

SEQ ID NO: 9078 - DNA, 20 bp, synthetic construct
  source 1..20: mol_type = other DNA
tagctgtattgggaaccaaa

SEQ ID NO: 9079 - DNA, 20 bp, synthetic construct
  source 1..20: mol_type = other DNA
tgtttgacttggtacggacc

SEQ ID NO: 9080 - DNA, 20 bp, synthetic construct
  source 1..20: mol_type = other DNA
ccatggtctcgtcacttagc

SEQ ID NO: 9081 - DNA, 20 bp, synthetic construct
  source 1..20: mol_type = other DNA
tgccacaggtgataattgag

SEQ ID NO: 9082 - DNA, 20 bp, synthetic construct
  source 1..20: mol_type = other DNA
aagagaaaggattcgtatgg

SEQ ID NO: 9083 - DNA, 20 bp, synthetic construct
  source 1..20: mol_type = other DNA
cttaggaacaactcagagaa

SEQ ID NO: 9084 - DNA, 20 bp, synthetic construct
  source 1..20: mol_type = other DNA
ttcgagagaaatgcatcttc

SEQ ID NO: 9085 - DNA, 20 bp, synthetic construct
  source 1..20: mol_type = other DNA
ggattccagaaacccacgag

SEQ ID NO: 9086 - DNA, 20 bp, synthetic construct
  source 1..20: mol_type = other DNA
ggtaccaccgctagcattga

SEQ ID NO: 9087 - DNA, 20 bp, synthetic construct
  source 1..20: mol_type = other DNA
cggagtaagatgtagagtta

SEQ ID NO: 9088 - DNA, 20 bp, synthetic construct
  source 1..20: mol_type = other DNA
agggcgttagattaaggccc

SEQ ID NO: 9089 - DNA, 20 bp, synthetic construct
  source 1..20: mol_type = other DNA
ccaggctatctagcttgaat

SEQ ID NO: 9090 - DNA, 20 bp, synthetic construct
  source 1..20: mol_type = other DNA
aatttaacaggcaggttcca

SEQ ID NO: 9091 - DNA, 20 bp, synthetic construct
  source 1..20: mol_type = other DNA
aaccagggtgggttagtaag

SEQ ID NO: 9092 - DNA, 20 bp, synthetic construct
  source 1..20: mol_type = other DNA
ggtggtcatgagcgcacgta

SEQ ID NO: 9093 - DNA, 20 bp, synthetic construct
  source 1..20: mol_type = other DNA
aaggtagatccaactaaccg

SEQ ID NO: 9094 - DNA, 20 bp, synthetic construct
  source 1..20: mol_type = other DNA
agtgcccgctcagctacgtt

SEQ ID NO: 9095 - DNA, 20 bp, synthetic construct
  source 1..20: mol_type = other DNA
agaattacttcatacacgtc

SEQ ID NO: 9096 - DNA, 20 bp, synthetic construct
  source 1..20: mol_type = other DNA
cggacataagatcgaatcga

SEQ ID NO: 9097 - DNA, 20 bp, synthetic construct
  source 1..20: mol_type = other DNA
gagtaggctggcctatgttg

SEQ ID NO: 9098 - DNA, 20 bp, synthetic construct
  source 1..20: mol_type = other DNA
ccagattaccttgtcacatt

SEQ ID NO: 9099 - DNA, 20 bp, synthetic construct
  source 1..20: mol_type = other DNA
ggaatgagctcttgtcggaa

SEQ ID NO: 9100 - DNA, 20 bp, synthetic construct
  source 1..20: mol_type = other DNA
tgaataactcgggctactta

SEQ ID NO: 9101 - DNA, 20 bp, synthetic construct
  source 1..20: mol_type = other DNA
agaccgcgagtcggcgtgat

SEQ ID NO: 9102 - DNA, 20 bp, synthetic construct
  source 1..20: mol_type = other DNA
acctcaccaagcggatgcgc

SEQ ID NO: 9103 - DNA, 20 bp, synthetic construct
  source 1..20: mol_type = other DNA
cggttggctttctgagaatg

SEQ ID NO: 9104 - DNA, 20 bp, synthetic construct
  source 1..20: mol_type = other DNA
tgtatttacgtatgtgtcgg

SEQ ID NO: 9105 - DNA, 20 bp, synthetic construct
  source 1..20: mol_type = other DNA
gaggatcattagtgggcttt

SEQ ID NO: 9106 - DNA, 20 bp, synthetic construct
  source 1..20: mol_type = other DNA
tgtaaacaggcttgatcgtc

SEQ ID NO: 9107 - DNA, 20 bp, synthetic construct
  source 1..20: mol_type = other DNA
acccgcaacgcgaagcagta

SEQ ID NO: 9108 - DNA, 20 bp, synthetic construct
  source 1..20: mol_type = other DNA
ggcttaccgaatatgaccag

SEQ ID NO: 9109 - DNA, 20 bp, synthetic construct
  source 1..20: mol_type = other DNA
atgtaacactatatgcagtg

SEQ ID NO: 9110 - DNA, 20 bp, synthetic construct
  source 1..20: mol_type = other DNA
accatggcattaattggtag

SEQ ID NO: 9111 - DNA, 20 bp, synthetic construct
  source 1..20: mol_type = other DNA
atctgcgttggagagtcaat

SEQ ID NO: 9112 - DNA, 20 bp, synthetic construct
  source 1..20: mol_type = other DNA
gggttgagttggttccgact

SEQ ID NO: 9113 - DNA, 20 bp, synthetic construct
  source 1..20: mol_type = other DNA
gctgcatcttgtcagacttt

SEQ ID NO: 9114 - DNA, 20 bp, synthetic construct
  source 1..20: mol_type = other DNA
ttactgtcgtagtccgcgac

SEQ ID NO: 9115 - DNA, 20 bp, synthetic construct
  source 1..20: mol_type = other DNA
gcacgagtcattacgtaggt

SEQ ID NO: 9116 - DNA, 20 bp, synthetic construct
  source 1..20: mol_type = other DNA
ggatttgtagatcctgcgca

SEQ ID NO: 9117 - DNA, 20 bp, synthetic construct
  source 1..20: mol_type = other DNA
ggacgagctaaacctgcctc

SEQ ID NO: 9118 - DNA, 20 bp, synthetic construct
  source 1..20: mol_type = other DNA
tcggatggcacgacctcctt

SEQ ID NO: 9119 - DNA, 20 bp, synthetic construct
  source 1..20: mol_type = other DNA
ctgggtctgtgttaatcctc

SEQ ID NO: 9120 - DNA, 20 bp, synthetic construct
  source 1..20: mol_type = other DNA
gcccactcggtattgctgtg

SEQ ID NO: 9121 - DNA, 20 bp, synthetic construct
  source 1..20: mol_type = other DNA
caagctcactcacttgtacg

SEQ ID NO: 9122 - DNA, 20 bp, synthetic construct
  source 1..20: mol_type = other DNA
atcgttctattgtcctgttt

SEQ ID NO: 9123 - DNA, 20 bp, synthetic construct
  source 1..20: mol_type = other DNA
agtcagacgcattgcggatt

SEQ ID NO: 9124 - DNA, 20 bp, synthetic construct
  source 1..20: mol_type = other DNA
gttgttaacatgactaggtc

SEQ ID NO: 9125 - DNA, 20 bp, synthetic construct
  source 1..20: mol_type = other DNA
ctatagttgctgtctgcggg

SEQ ID NO: 9126 - DNA, 20 bp, synthetic construct
  source 1..20: mol_type = other DNA
ttgttctgagtcggcttacc

SEQ ID NO: 9127 - DNA, 20 bp, synthetic construct
  source 1..20: mol_type = other DNA
tgtggttcccatcagggtct

SEQ ID NO: 9128 - DNA, 20 bp, synthetic construct
  source 1..20: mol_type = other DNA
ccagaacgttcggtcgtgta

SEQ ID NO: 9129 - DNA, 20 bp, synthetic construct
  source 1..20: mol_type = other DNA
gcgtcaatgtgaacactgaa

SEQ ID NO: 9130 - DNA, 20 bp, synthetic construct
  source 1..20: mol_type = other DNA
tcgccttgataaagatcgaa

SEQ ID NO: 9131 - DNA, 20 bp, synthetic construct
  source 1..20: mol_type = other DNA
gaggtatagaagaggagaat

SEQ ID NO: 9132 - DNA, 20 bp, synthetic construct
  source 1..20: mol_type = other DNA
tagcgaataggtgaccacgg

SEQ ID NO: 9133 - DNA, 20 bp, synthetic construct
  source 1..20: mol_type = other DNA
tgctcttcggagtttcacca

SEQ ID NO: 9134 - DNA, 20 bp, synthetic construct
  source 1..20: mol_type = other DNA
gtatgtagcccgaagtgtag

SEQ ID NO: 9135 - DNA, 20 bp, synthetic construct
  source 1..20: mol_type = other DNA
tatttgccttggtgcaatta

SEQ ID NO: 9136 - DNA, 20 bp, synthetic construct
  source 1..20: mol_type = other DNA
cattgagcatggttgtcggc

SEQ ID NO: 9137 - DNA, 20 bp, synthetic construct
  source 1..20: mol_type = other DNA
cttgacaggcattgtgtcgc

SEQ ID NO: 9138 - DNA, 20 bp, synthetic construct
  source 1..20: mol_type = other DNA
acgagtcaacctggcgttat

SEQ ID NO: 9139 - DNA, 20 bp, synthetic construct
  source 1..20: mol_type = other DNA
aatatgagcggcacatgtgc

SEQ ID NO: 9140 - DNA, 20 bp, synthetic construct
  source 1..20: mol_type = other DNA
cttattgcatgactggtaat

SEQ ID NO: 9141 - DNA, 20 bp, synthetic construct
  source 1..20: mol_type = other DNA
cccaagatttcttaagggac

SEQ ID NO: 9142 - DNA, 20 bp, synthetic construct
  source 1..20: mol_type = other DNA
tcaccaacgcacgatcccgt

SEQ ID NO: 9143 - DNA, 20 bp, synthetic construct
  source 1..20: mol_type = other DNA
gatagtcatgacgcctctag

SEQ ID NO: 9144 - DNA, 20 bp, synthetic construct
  source 1..20: mol_type = other DNA
acctattgcagagacacggg

SEQ ID NO: 9145 - DNA, 20 bp, synthetic construct
  source 1..20: mol_type = other DNA
ttcaagatgcggctgtacga

SEQ ID NO: 9146 - DNA, 20 bp, synthetic construct
  source 1..20: mol_type = other DNA
tagtattgcgccatgataac

SEQ ID NO: 9147 - DNA, 20 bp, synthetic construct
  source 1..20: mol_type = other DNA
tctcggcggccattgtccat

SEQ ID NO: 9148 - DNA, 20 bp, synthetic construct
  source 1..20: mol_type = other DNA
accggcctagtagcaggagc

SEQ ID NO: 9149 - DNA, 20 bp, synthetic construct
  source 1..20: mol_type = other DNA
gagtggcatgcccgtgcatt

SEQ ID NO: 9150 - DNA, 20 bp, synthetic construct
  source 1..20: mol_type = other DNA
gtagaggaattgttgggcta

SEQ ID NO: 9151 - DNA, 20 bp, synthetic construct
  source 1..20: mol_type = other DNA
gagggacaagtcgccttggt

SEQ ID NO: 9152 - DNA, 20 bp, synthetic construct
  source 1..20: mol_type = other DNA
atcgtgtgcaaacatctacg

SEQ ID NO: 9153 - DNA, 20 bp, synthetic construct
  source 1..20: mol_type = other DNA
ctatcgtttgtcacggacaa

SEQ ID NO: 9154 - DNA, 20 bp, synthetic construct
  source 1..20: mol_type = other DNA
agttcacgacaagctacgcc

SEQ ID NO: 9155 - DNA, 20 bp, synthetic construct
  source 1..20: mol_type = other DNA
cttgcgtgaaattagtccaa

SEQ ID NO: 9156 - DNA, 20 bp, synthetic construct
  source 1..20: mol_type = other DNA
taagccgtgattaggatacg

SEQ ID NO: 9157 - DNA, 20 bp, synthetic construct
  source 1..20: mol_type = other DNA
aagtccctacaactagtatc

SEQ ID NO: 9158 - DNA, 20 bp, synthetic construct
  source 1..20: mol_type = other DNA
gccgctttcagcggaatgtc

SEQ ID NO: 9159 - DNA, 20 bp, synthetic construct
  source 1..20: mol_type = other DNA
gtctgaggtttgtggctaca

SEQ ID NO: 9160 - DNA, 20 bp, synthetic construct
  source 1..20: mol_type = other DNA
ccgatgttaacttccgagtc

SEQ ID NO: 9161 - DNA, 20 bp, synthetic construct
  source 1..20: mol_type = other DNA
aacaccagtgaggagcaaat

SEQ ID NO: 9162 - DNA, 20 bp, synthetic construct
  source 1..20: mol_type = other DNA
atcaacgtaattgctctatg

SEQ ID NO: 9163 - DNA, 20 bp, synthetic construct
  source 1..20: mol_type = other DNA
gtacctttaggactatgctg

SEQ ID NO: 9164 - DNA, 20 bp, synthetic construct
  source 1..20: mol_type = other DNA
cgaaactcccacaggtaagc

SEQ ID NO: 9165 - DNA, 20 bp, synthetic construct
  source 1..20: mol_type = other DNA
gtgaatcgacttacttcaag

SEQ ID NO: 9166 - DNA, 20 bp, synthetic construct
  source 1..20: mol_type = other DNA
ccttacacttcgactgcatg

SEQ ID NO: 9167 - DNA, 20 bp, synthetic construct
  source 1..20: mol_type = other DNA
ctacctgactactagagtgg

SEQ ID NO: 9168 - DNA, 20 bp, synthetic construct
  source 1..20: mol_type = other DNA
tcgagaggtaaagttgctag

SEQ ID NO: 9169 - DNA, 20 bp, synthetic construct
  source 1..20: mol_type = other DNA
agtacttattgagaggctcc

SEQ ID NO: 9170 - DNA, 20 bp, synthetic construct
  source 1..20: mol_type = other DNA
tattggagagctccgacatg

SEQ ID NO: 9171 - DNA, 20 bp, synthetic construct
  source 1..20: mol_type = other DNA
tgaggacgcgcttagaatat

SEQ ID NO: 9172 - DNA, 20 bp, synthetic construct
  source 1..20: mol_type = other DNA
agagtcaatgtaaatactcc

SEQ ID NO: 9173 - DNA, 20 bp, synthetic construct
  source 1..20: mol_type = other DNA
tattcgcttctcatctgtag

SEQ ID NO: 9174 - DNA, 20 bp, synthetic construct
  source 1..20: mol_type = other DNA
ctctacacccgtcagtgctg

SEQ ID NO: 9175 - DNA, 20 bp, synthetic construct
  source 1..20: mol_type = other DNA
taagcgtacaacccaccgaa

SEQ ID NO: 9176 - DNA, 20 bp, synthetic construct
  source 1..20: mol_type = other DNA
atgccgagggcccgctacta

SEQ ID NO: 9177 - DNA, 20 bp, synthetic construct
  source 1..20: mol_type = other DNA
ggtccgaacaatgtcttggc

SEQ ID NO: 9178 - DNA, 20 bp, synthetic construct
  source 1..20: mol_type = other DNA
ccgcttaacggagaacagcc

SEQ ID NO: 9179 - DNA, 20 bp, synthetic construct
  source 1..20: mol_type = other DNA
gtaagcgttgtcccttgccg

SEQ ID NO: 9180 - DNA, 20 bp, synthetic construct
  source 1..20: mol_type = other DNA
tttggtcctagaataccctc

SEQ ID NO: 9181 - DNA, 20 bp, synthetic construct
  source 1..20: mol_type = other DNA
gctgacggatttgggacagg

SEQ ID NO: 9182 - DNA, 20 bp, synthetic construct
  source 1..20: mol_type = other DNA
gactgagtcaatatgcctgc

SEQ ID NO: 9183 - DNA, 20 bp, synthetic construct
  source 1..20: mol_type = other DNA
acctcgcgcctaatatcatg

SEQ ID NO: 9184 - DNA, 20 bp, synthetic construct
  source 1..20: mol_type = other DNA
agtcgagtgaaagcacagaa

SEQ ID NO: 9185 - DNA, 20 bp, synthetic construct
  source 1..20: mol_type = other DNA
tatcttccgtccgcttattt

SEQ ID NO: 9186 - DNA, 20 bp, synthetic construct
  source 1..20: mol_type = other DNA
gaaattcagagcggtaacgc

SEQ ID NO: 9187 - DNA, 20 bp, synthetic construct
  source 1..20: mol_type = other DNA
gttgcgtgaatcggtcaggt

SEQ ID NO: 9188 - DNA, 20 bp, synthetic construct
  source 1..20: mol_type = other DNA
ccgtgctggtgtctaatcgc

SEQ ID NO: 9189 - DNA, 20 bp, synthetic construct
  source 1..20: mol_type = other DNA
ataatcactgctcctggcca

SEQ ID NO: 9190 - DNA, 20 bp, synthetic construct
  source 1..20: mol_type = other DNA
ttgctcggttatcagttcta

SEQ ID NO: 9191 - DNA, 20 bp, synthetic construct
  source 1..20: mol_type = other DNA
ctcgcgatagatccagatca

SEQ ID NO: 9192 - DNA, 20 bp, synthetic construct
  source 1..20: mol_type = other DNA
agccgcaactggacaacaga

SEQ ID NO: 9193 - DNA, 20 bp, synthetic construct
  source 1..20: mol_type = other DNA
attgcgcaccgcaaagatgc

SEQ ID NO: 9194 - DNA, 20 bp, synthetic construct
  source 1..20: mol_type = other DNA
cgtcgtggcaggtaatccgt

SEQ ID NO: 9195 - DNA, 20 bp, synthetic construct
  source 1..20: mol_type = other DNA
tttccgtgccttcgcctgtg

SEQ ID NO: 9196 - DNA, 20 bp, synthetic construct
  source 1..20: mol_type = other DNA
gacttataatgagggcgtac

SEQ ID NO: 9197 - DNA, 20 bp, synthetic construct
  source 1..20: mol_type = other DNA
agcacgatgaatgacaagga

SEQ ID NO: 9198 - DNA, 20 bp, synthetic construct
  source 1..20: mol_type = other DNA
aagctccctgtcgatacgat

SEQ ID NO: 9199 - DNA, 20 bp, synthetic construct
  source 1..20: mol_type = other DNA
acatataccgcgagcgaggt

SEQ ID NO: 9200 - DNA, 20 bp, synthetic construct
  source 1..20: mol_type = other DNA
atctcgatggccattccatg

SEQ ID NO: 9201 - DNA, 20 bp, synthetic construct
  source 1..20: mol_type = other DNA
agttgtcccaatactaatgc

SEQ ID NO: 9202 - DNA, 20 bp, synthetic construct
  source 1..20: mol_type = other DNA
gcaactcaccaggaacctcg

SEQ ID NO: 9203 - DNA, 20 bp, synthetic construct
  source 1..20: mol_type = other DNA
ggtcatggcttaggaagggc

SEQ ID NO: 9204 - DNA, 20 bp, synthetic construct
  source 1..20: mol_type = other DNA
gcacgatactgtatgatatg

SEQ ID NO: 9205 - DNA, 20 bp, synthetic construct
  source 1..20: mol_type = other DNA
ctccacttctcggtaacaca

SEQ ID NO: 9206 - DNA, 20 bp, synthetic construct
  source 1..20: mol_type = other DNA
cattacccgctcccagtttg

SEQ ID NO: 9207 - DNA, 20 bp, synthetic construct
  source 1..20: mol_type = other DNA
acagcgtagccaagtatgct

SEQ ID NO: 9208 - DNA, 20 bp, synthetic construct
  source 1..20: mol_type = other DNA
ggatacgggacagctgtgca

SEQ ID NO: 9209 - DNA, 20 bp, synthetic construct
  source 1..20: mol_type = other DNA
acaggcaaactcgggtcaga

SEQ ID NO: 9210 - DNA, 20 bp, synthetic construct
  source 1..20: mol_type = other DNA
tgccatgcgtgtgatctgcc

SEQ ID NO: 9211 - DNA, 20 bp, synthetic construct
  source 1..20: mol_type = other DNA
cgtatcgcaggcaggtgcgt

SEQ ID NO: 9212 - DNA, 20 bp, synthetic construct
  source 1..20: mol_type = other DNA
cttgcgaggcttctagcacc

SEQ ID NO: 9213 - DNA, 20 bp, synthetic construct
  source 1..20: mol_type = other DNA
tggtactagccggtttcttc

SEQ ID NO: 9214 - DNA, 20 bp, synthetic construct
  source 1..20: mol_type = other DNA
gtggacatcaacacttaata

SEQ ID NO: 9215 - DNA, 20 bp, synthetic construct
  source 1..20: mol_type = other DNA
gggagtagagatacgcgagg

SEQ ID NO: 9216 - DNA, 20 bp, synthetic construct
  source 1..20: mol_type = other DNA
tagaacagatccttgccgtg

SEQ ID NO: 9217 - DNA, 20 bp, synthetic construct
  source 1..20: mol_type = other DNA
tttggacgagcagacaccca

SEQ ID NO: 9218 - DNA, 20 bp, synthetic construct
  source 1..20: mol_type = other DNA
atgtgcgccgacatgaacac

SEQ ID NO: 9219 - DNA, 20 bp, synthetic construct
  source 1..20: mol_type = other DNA
gttcaggacttcagtccgga

SEQ ID NO: 9220 - DNA, 20 bp, synthetic construct
  source 1..20: mol_type = other DNA
aactcataagtcggttctat

SEQ ID NO: 9221 - DNA, 20 bp, synthetic construct
  source 1..20: mol_type = other DNA
aagaccacggtatggtgtat

SEQ ID NO: 9222 - DNA, 20 bp, synthetic construct
  source 1..20: mol_type = other DNA
gtaattcctcgataatcatg

SEQ ID NO: 9223 - DNA, 20 bp, synthetic construct
  source 1..20: mol_type = other DNA
aacgaggatacaatcgcgcc

SEQ ID NO: 9224 - DNA, 20 bp, synthetic construct
  source 1..20: mol_type = other DNA
atcagggtaccaaaccgaat

SEQ ID NO: 9225 - DNA, 20 bp, synthetic construct
  source 1..20: mol_type = other DNA
ccttaacttaaccgccgtgt

SEQ ID NO: 9226 - DNA, 20 bp, synthetic construct
  source 1..20: mol_type = other DNA
attaggaaggaacggatccc

SEQ ID NO: 9227 - DNA, 20 bp, synthetic construct
  source 1..20: mol_type = other DNA
aatcgacagcagccaaagta

SEQ ID NO: 9228 - DNA, 20 bp, synthetic construct
  source 1..20: mol_type = other DNA
cagttggtgggtgtggttca

SEQ ID NO: 9229 - DNA, 20 bp, synthetic construct
  source 1..20: mol_type = other DNA
tggaggaggatacgttaggt

SEQ ID NO: 9230 - DNA, 20 bp, synthetic construct
  source 1..20: mol_type = other DNA
gcaaaggacctctcttgtcc

SEQ ID NO: 9231 - DNA, 20 bp, synthetic construct
  source 1..20: mol_type = other DNA
caggttcggatccacgatgt

SEQ ID NO: 9232 - DNA, 20 bp, synthetic construct
  source 1..20: mol_type = other DNA
tgcacagacaatttgcgcat

SEQ ID NO: 9233 - DNA, 20 bp, synthetic construct
  source 1..20: mol_type = other DNA
gttattaccctactaaccaa

SEQ ID NO: 9234 - DNA, 20 bp, synthetic construct
  source 1..20: mol_type = other DNA
cgtgtagtaagagttgacat

SEQ ID NO: 9235 - DNA, 20 bp, synthetic construct
  source 1..20: mol_type = other DNA
gctctagctgtcaaatgcta

SEQ ID NO: 9236 - DNA, 20 bp, synthetic construct
  source 1..20: mol_type = other DNA
cgatctttgtcaaataccgt

SEQ ID NO: 9237 - DNA, 20 bp, synthetic construct
  source 1..20: mol_type = other DNA
cgtagctagctattcgagga

SEQ ID NO: 9238 - DNA, 20 bp, synthetic construct
  source 1..20: mol_type = other DNA
cgactatcacgtgatcaaga

SEQ ID NO: 9239 - DNA, 20 bp, synthetic construct
  source 1..20: mol_type = other DNA
cggatcggtccaccactatt

SEQ ID NO: 9240 - DNA, 20 bp, synthetic construct
  source 1..20: mol_type = other DNA
ccatacctaatgctgagttc

SEQ ID NO: 9241 - DNA, 20 bp, synthetic construct
  source 1..20: mol_type = other DNA
tgctgctccactattggttc

SEQ ID NO: 9242 - DNA, 20 bp, synthetic construct
  source 1..20: mol_type = other DNA
agtggacaggctcataccca

SEQ ID NO: 9243 - DNA, 20 bp, synthetic construct
  source 1..20: mol_type = other DNA
agcagggcacgcttgagcaa

SEQ ID NO: 9244 - DNA, 20 bp, synthetic construct
  source 1..20: mol_type = other DNA
gaataccgcgtcgcctatgc

SEQ ID NO: 9245 - DNA, 20 bp, synthetic construct
  source 1..20: mol_type = other DNA
cagtcccggcgtatggcatc

SEQ ID NO: 9246 - DNA, 20 bp, synthetic construct
  source 1..20: mol_type = other DNA
acaattggacgtccgctgcc

SEQ ID NO: 9247 - DNA, 20 bp, synthetic construct
  source 1..20: mol_type = other DNA
cccgaaggcgcctgtttact

SEQ ID NO: 9248 - DNA, 20 bp, synthetic construct
  source 1..20: mol_type = other DNA
ggacctgccgtgtcgcaaac

SEQ ID NO: 9249 - DNA, 20 bp, synthetic construct
  source 1..20: mol_type = other DNA
cggacaatcgagcactttaa

SEQ ID NO: 9250 - DNA, 20 bp, synthetic construct
  source 1..20: mol_type = other DNA
tatttgccttcagctgggat

SEQ ID NO: 9251 - DNA, 20 bp, synthetic construct
  source 1..20: mol_type = other DNA
cttcaggcgagtattccggt

SEQ ID NO: 9252 - DNA, 20 bp, synthetic construct
  source 1..20: mol_type = other DNA
tcggcagctttgcaacttta

SEQ ID NO: 9253 - DNA, 20 bp, synthetic construct
  source 1..20: mol_type = other DNA
ttacaggagaacctccgcca

SEQ ID NO: 9254 - DNA, 20 bp, synthetic construct
  source 1..20: mol_type = other DNA
cctctgatgtataccagaaa

SEQ ID NO: 9255 - DNA, 20 bp, synthetic construct
  source 1..20: mol_type = other DNA
tctaagtgctcgggtaacga

SEQ ID NO: 9256 - DNA, 20 bp, synthetic construct
  source 1..20: mol_type = other DNA
cctatagagtgcgatcttag

SEQ ID NO: 9257 - DNA, 20 bp, synthetic construct
  source 1..20: mol_type = other DNA
cgtaacacacgtacgctcca

SEQ ID NO: 9258 - DNA, 20 bp, synthetic construct
  source 1..20: mol_type = other DNA
accctcactccaagggcttg

SEQ ID NO: 9259 - DNA, 20 bp, synthetic construct
  source 1..20: mol_type = other DNA
atatctacaccacatccaca

SEQ ID NO: 9260 - DNA, 20 bp, synthetic construct
  source 1..20: mol_type = other DNA
ccttcgctgagccaaacaga

SEQ ID NO: 9261 - DNA, 20 bp, synthetic construct
  source 1..20: mol_type = other DNA
cattgaacggcctcacgtaa

SEQ ID NO: 9262 - DNA, 20 bp, synthetic construct
  source 1..20: mol_type = other DNA
gtactccgcagtaatgactc

SEQ ID NO: 9263 - DNA, 20 bp, synthetic construct
  source 1..20: mol_type = other DNA
aatccgtaatcggcctttgc

SEQ ID NO: 9264 - DNA, 20 bp, synthetic construct
  source 1..20: mol_type = other DNA
ggtaccctcgttgtacaggg

SEQ ID NO: 9265 - DNA, 20 bp, synthetic construct
  source 1..20: mol_type = other DNA
gttcgtaactgcgggacaac

SEQ ID NO: 9266 - DNA, 20 bp, synthetic construct
  source 1..20: mol_type = other DNA
taccggatgtgggcctacat

SEQ ID NO: 9267 - DNA, 20 bp, synthetic construct
  source 1..20: mol_type = other DNA
agaagtggcaaagagacatg

SEQ ID NO: 9268 - DNA, 20 bp, synthetic construct
  source 1..20: mol_type = other DNA
taggtgtgactgcgttcatg

SEQ ID NO: 9269 - DNA, 20 bp, synthetic construct
  source 1..20: mol_type = other DNA
ctcgataactcgggtttccg

SEQ ID NO: 9270 - DNA, 20 bp, synthetic construct
  source 1..20: mol_type = other DNA
ggaagaatattaagctcgaa

SEQ ID NO: 9271 - DNA, 20 bp, synthetic construct
  source 1..20: mol_type = other DNA
ctaatttcagtttactccgc

SEQ ID NO: 9272 - DNA, 20 bp, synthetic construct
  source 1..20: mol_type = other DNA
atagaattggattcgcgtag

SEQ ID NO: 9273 - DNA, 20 bp, synthetic construct
  source 1..20: mol_type = other DNA
atagacgctcaagtcatcca

SEQ ID NO: 9274 - DNA, 20 bp, synthetic construct
  source 1..20: mol_type = other DNA
ggcacatttctacgaagcca

SEQ ID NO: 9275 - DNA, 20 bp, synthetic construct
  source 1..20: mol_type = other DNA
aagcgaccgaagatacgagt

SEQ ID NO: 9276 - DNA, 20 bp, synthetic construct
  source 1..20: mol_type = other DNA
atcgatgttgtaaccgggca

SEQ ID NO: 9277 - DNA, 20 bp, synthetic construct
  source 1..20: mol_type = other DNA
cagtgatggagtgtctaggc

SEQ ID NO: 9278 - DNA, 20 bp, synthetic construct
  source 1..20: mol_type = other DNA
ccagactagtcccagtccct

SEQ ID NO: 9279 - DNA, 20 bp, synthetic construct
  source 1..20: mol_type = other DNA
gtgcttatgatgcaattgct

SEQ ID NO: 9280 - DNA, 20 bp, synthetic construct
  source 1..20: mol_type = other DNA
ctggttagtttcttctgggt

SEQ ID NO: 9281 - DNA, 20 bp, synthetic construct
  source 1..20: mol_type = other DNA
ctttagatagaataccttcc

SEQ ID NO: 9282 - DNA, 20 bp, synthetic construct
  source 1..20: mol_type = other DNA
tgtcgagacgccagtttacc

SEQ ID NO: 9283 - DNA, 20 bp, synthetic construct
  source 1..20: mol_type = other DNA
atacttgcacccaatccacg

SEQ ID NO: 9284 - DNA, 20 bp, synthetic construct
  source 1..20: mol_type = other DNA
tacagctcagagtattaagc

SEQ ID NO: 9285 - DNA, 20 bp, synthetic construct
  source 1..20: mol_type = other DNA
aacatcaaactatctgtcac

SEQ ID NO: 9286 - DNA, 20 bp, synthetic construct
  source 1..20: mol_type = other DNA
tcgcctaaccacacaagact

SEQ ID NO: 9287 - DNA, 20 bp, synthetic construct
  source 1..20: mol_type = other DNA
tcaactcgccgttgtgatgt

SEQ ID NO: 9288 - DNA, 20 bp, synthetic construct
  source 1..20: mol_type = other DNA
agtggtagtgatagaactat

SEQ ID NO: 9289 - DNA, 20 bp, synthetic construct
  source 1..20: mol_type = other DNA
gtgcaagattaaaggcgccc

SEQ ID NO: 9290 - DNA, 20 bp, synthetic construct
  source 1..20: mol_type = other DNA
cttatctttcatgtatccgg

SEQ ID NO: 9291 - DNA, 20 bp, synthetic construct
  source 1..20: mol_type = other DNA
cacagccggcgatcagcatt

SEQ ID NO: 9292 - DNA, 20 bp, synthetic construct
  source 1..20: mol_type = other DNA
gactagataactcagtcttc

SEQ ID NO: 9293 - DNA, 20 bp, synthetic construct
  source 1..20: mol_type = other DNA
agtagtcggatgcctgactc

SEQ ID NO: 9294 - DNA, 20 bp, synthetic construct
  source 1..20: mol_type = other DNA
atgttatcggctcgtaaatt

SEQ ID NO: 9295 - DNA, 20 bp, synthetic construct
  source 1..20: mol_type = other DNA
agtacctgggttcgagtacc

SEQ ID NO: 9296 - DNA, 20 bp, synthetic construct
  source 1..20: mol_type = other DNA
aggcgcctagattcaggagc

SEQ ID NO: 9297 - DNA, 20 bp, synthetic construct
  source 1..20: mol_type = other DNA
gcaacggcctgctggttcaa

SEQ ID NO: 9298 - DNA, 20 bp, synthetic construct
  source 1..20: mol_type = other DNA
cggcccgttggtcaacttgg

SEQ ID NO: 9299 - DNA, 20 bp, synthetic construct
  source 1..20: mol_type = other DNA
tacacggtacatcttaccat

SEQ ID NO: 9300 - DNA, 20 bp, synthetic construct
  source 1..20: mol_type = other DNA
caacagcgtggagtaggtat

SEQ ID NO: 9301 - DNA, 20 bp, synthetic construct
  source 1..20: mol_type = other DNA
actacgtatcgtgctaactg

SEQ ID NO: 9302 - DNA, 20 bp, synthetic construct
  source 1..20: mol_type = other DNA
gcagaccctgcgttagagta

SEQ ID NO: 9303 - DNA, 20 bp, synthetic construct
  source 1..20: mol_type = other DNA
gactaggtttccatttgaaa

SEQ ID NO: 9304 - DNA, 20 bp, synthetic construct
  source 1..20: mol_type = other DNA
accgtaacggaatgacaatg

SEQ ID NO: 9305 - DNA, 20 bp, synthetic construct
  source 1..20: mol_type = other DNA
agacgcggactgcaggcata

SEQ ID NO: 9306 - DNA, 20 bp, synthetic construct
  source 1..20: mol_type = other DNA
ggaagggtgtagttcggtag

SEQ ID NO: 9307 - DNA, 20 bp, synthetic construct
  source 1..20: mol_type = other DNA
agaatcgatgcccgaatgtc

SEQ ID NO: 9308 - DNA, 20 bp, synthetic construct
  source 1..20: mol_type = other DNA
gtgggcgctagtagtctgcc

SEQ ID NO: 9309 - DNA, 20 bp, synthetic construct
  source 1..20: mol_type = other DNA
atcaacatggcaacgccgga

SEQ ID NO: 9310 - DNA, 20 bp, synthetic construct
  source 1..20: mol_type = other DNA
gtattagttgattgcagacc

SEQ ID NO: 9311 - DNA, 20 bp, synthetic construct
  source 1..20: mol_type = other DNA
agagtggtttatcttcgtct

SEQ ID NO: 9312 - DNA, 20 bp, synthetic construct
  source 1..20: mol_type = other DNA
ccagacccacaacacggcag

SEQ ID NO: 9313 - DNA, 20 bp, synthetic construct
  source 1..20: mol_type = other DNA
gtggcgctcatatatgatgc

SEQ ID NO: 9314 - DNA, 20 bp, synthetic construct
  source 1..20: mol_type = other DNA
tcccaacatcgctactcctt

SEQ ID NO: 9315 - DNA, 20 bp, synthetic construct
  source 1..20: mol_type = other DNA
acaccacgagcgtcctcaga

SEQ ID NO: 9316 - DNA, 20 bp, synthetic construct
  source 1..20: mol_type = other DNA
acactcttcaccagtccgat

SEQ ID NO: 9317 - DNA, 20 bp, synthetic construct
  source 1..20: mol_type = other DNA
ttgctcgacactgtcaattt

SEQ ID NO: 9318 - DNA, 20 bp, synthetic construct
  source 1..20: mol_type = other DNA
gaggacgggctacatcaact

SEQ ID NO: 9319 - DNA, 20 bp, synthetic construct
  source 1..20: mol_type = other DNA
gtgatctccttagagttcaa

SEQ ID NO: 9320 - DNA, 20 bp, synthetic construct
  source 1..20: mol_type = other DNA
ccgatcgtgcttgtggaaga

SEQ ID NO: 9321 - DNA, 20 bp, synthetic construct
  source 1..20: mol_type = other DNA
gactgatctcgtgtatctac

SEQ ID NO: 9322 - DNA, 20 bp, synthetic construct
  source 1..20: mol_type = other DNA
atatccagtttctgccagta

SEQ ID NO: 9323 - DNA, 20 bp, synthetic construct
  source 1..20: mol_type = other DNA
caaacctcacgcctatgcac

SEQ ID NO: 9324 - DNA, 20 bp, synthetic construct
  source 1..20: mol_type = other DNA
gtttgcgagccgaaagctca

SEQ ID NO: 9325 - DNA, 20 bp, synthetic construct
  source 1..20: mol_type = other DNA
tgtgtataacatgctttgcg

SEQ ID NO: 9326 - DNA, 20 bp, synthetic construct
  source 1..20: mol_type = other DNA
tgaagcgcttgcgcatcctg

SEQ ID NO: 9327 - DNA, 20 bp, synthetic construct
  source 1..20: mol_type = other DNA
ggctttatagacccacgaac

SEQ ID NO: 9328 - DNA, 20 bp, synthetic construct
  source 1..20: mol_type = other DNA
catgccgaggaaagttgcga

SEQ ID NO: 9329 - DNA, 20 bp, synthetic construct
  source 1..20: mol_type = other DNA
tgacgtttgatcggagggcc

SEQ ID NO: 9330 - DNA, 20 bp, synthetic construct
  source 1..20: mol_type = other DNA
tcacggtatttggctcagaa

SEQ ID NO: 9331 - DNA, 20 bp, synthetic construct
  source 1..20: mol_type = other DNA
agacacggaaggtgcgaatt

SEQ ID NO: 9332 - DNA, 20 bp, synthetic construct
  source 1..20: mol_type = other DNA
tcagagcgccagcgttgagc

SEQ ID NO: 9333 - DNA, 20 bp, synthetic construct
  source 1..20: mol_type = other DNA
acatagcccacccgatgcac

SEQ ID NO: 9334 - DNA, 20 bp, synthetic construct
  source 1..20: mol_type = other DNA
tagttagggaaagcaagacg

SEQ ID NO: 9335 - DNA, 20 bp, synthetic construct
  source 1..20: mol_type = other DNA
gcgagtgtaagtaactagat

SEQ ID NO: 9336 - DNA, 20 bp, synthetic construct
  source 1..20: mol_type = other DNA
cgagcacccaacattgcaag

SEQ ID NO: 9337 - DNA, 20 bp, synthetic construct
  source 1..20: mol_type = other DNA
aggcatctgctagttctgac

SEQ ID NO: 9338 - DNA, 20 bp, synthetic construct
  source 1..20: mol_type = other DNA
catcagccaacgggatggtt

SEQ ID NO: 9339 - DNA, 20 bp, synthetic construct
  source 1..20: mol_type = other DNA
cagttggtggaggtgtttac

SEQ ID NO: 9340 - DNA, 20 bp, synthetic construct
  source 1..20: mol_type = other DNA
accaaccatggagttgtctt

SEQ ID NO: 9341 - DNA, 20 bp, synthetic construct
  source 1..20: mol_type = other DNA
atcctccgccaaacgcgaaa

SEQ ID NO: 9342 - DNA, 20 bp, synthetic construct
  source 1..20: mol_type = other DNA
aatcactctccagtaacaac

SEQ ID NO: 9343 - DNA, 20 bp, synthetic construct
  source 1..20: mol_type = other DNA
gtagacgtgaataatcgtga

SEQ ID NO: 9344 - DNA, 20 bp, synthetic construct
  source 1..20: mol_type = other DNA
aactcccgagggttcccagg

SEQ ID NO: 9345 - DNA, 20 bp, synthetic construct
  source 1..20: mol_type = other DNA
cgaagcaagcgaaccctact

SEQ ID NO: 9346 - DNA, 20 bp, synthetic construct
  source 1..20: mol_type = other DNA
gcgaagatagccctcttgac

SEQ ID NO: 9347 - DNA, 20 bp, synthetic construct
  source 1..20: mol_type = other DNA
ccacccttgcaagacctcca

SEQ ID NO: 9348 - DNA, 20 bp, synthetic construct
  source 1..20: mol_type = other DNA
agtggcagatgctagcccag

SEQ ID NO: 9349 - DNA, 20 bp, synthetic construct
  source 1..20: mol_type = other DNA
cgtacttcccatatactgag

SEQ ID NO: 9350 - DNA, 20 bp, synthetic construct
  source 1..20: mol_type = other DNA
tagcgattccttccctcaag

SEQ ID NO: 9351 - DNA, 20 bp, synthetic construct
  source 1..20: mol_type = other DNA
aaatgcgagcatatccgatt

SEQ ID NO: 9352 - DNA, 20 bp, synthetic construct
  source 1..20: mol_type = other DNA
cggataggcgcgtgtaattg

SEQ ID NO: 9353 - DNA, 20 bp, synthetic construct
  source 1..20: mol_type = other DNA
gcggtagcgctcagttatgt

SEQ ID NO: 9354 - DNA, 20 bp, synthetic construct
  source 1..20: mol_type = other DNA
gattaactagaatagcctcg

SEQ ID NO: 9355 - DNA, 20 bp, synthetic construct
  source 1..20: mol_type = other DNA
gccatgtgaagcgagtgaac

SEQ ID NO: 9356 - DNA, 20 bp, synthetic construct
  source 1..20: mol_type = other DNA
cccatagttgctaggctgca

SEQ ID NO: 9357 - DNA, 20 bp, synthetic construct
  source 1..20: mol_type = other DNA
gttggtctaagctaacagaa

SEQ ID NO: 9358 - DNA, 20 bp, synthetic construct
  source 1..20: mol_type = other DNA
cacgtttgtgtaggctgtat

SEQ ID NO: 9359 - DNA, 20 bp, synthetic construct
  source 1..20: mol_type = other DNA
ggatgctactctttacttgg

SEQ ID NO: 9360 - DNA, 20 bp, synthetic construct
  source 1..20: mol_type = other DNA
gtcctactttaccgcgcaga

SEQ ID NO: 9361 - DNA, 20 bp, synthetic construct
  source 1..20: mol_type = other DNA
gagatgaatgcgtatcggtt

SEQ ID NO: 9362 - DNA, 20 bp, synthetic construct
  source 1..20: mol_type = other DNA
caaccacgcaagtacatgac

SEQ ID NO: 9363 - DNA, 20 bp, synthetic construct
  source 1..20: mol_type = other DNA
gtactctaacatacacccgc

SEQ ID NO: 9364 - DNA, 20 bp, synthetic construct
  source 1..20: mol_type = other DNA
actgtaggactgaatcacaa

SEQ ID NO: 9365 - DNA, 20 bp, synthetic construct
  source 1..20: mol_type = other DNA
gcatagtttctgtcgtcatt

SEQ ID NO: 9366 - DNA, 20 bp, synthetic construct
  source 1..20: mol_type = other DNA
atggttgagagacaggcgca

SEQ ID NO: 9367 - DNA, 20 bp, synthetic construct
  source 1..20: mol_type = other DNA
ttgggccgacgaactctgtg

SEQ ID NO: 9368 - DNA, 20 bp, synthetic construct
  source 1..20: mol_type = other DNA
tgtagcgatgatccaagtac

SEQ ID NO: 9369 - DNA, 20 bp, synthetic construct
  source 1..20: mol_type = other DNA
aacgagactcggacgtttcg

SEQ ID NO: 9370 - DNA, 20 bp, synthetic construct
  source 1..20: mol_type = other DNA
actgctactgcatggaccgc

SEQ ID NO: 9371 - DNA, 20 bp, synthetic construct
  source 1..20: mol_type = other DNA
tgagtccgtctaatcgttac

SEQ ID NO: 9372 - DNA, 20 bp, synthetic construct
  source 1..20: mol_type = other DNA
cagacacttgaaaccactcg

SEQ ID NO: 9373 - DNA, 20 bp, synthetic construct
  source 1..20: mol_type = other DNA
agtggttagatagcacgact

SEQ ID NO: 9374 - DNA, 20 bp, synthetic construct
  source 1..20: mol_type = other DNA
tggaatccaacaggtccgcg

SEQ ID NO: 9375 - DNA, 20 bp, synthetic construct
  source 1..20: mol_type = other DNA
ccacatgactcgtgcgctgc

SEQ ID NO: 9376 - DNA, 20 bp, synthetic construct
  source 1..20: mol_type = other DNA
cagcttggctgcgtagcgct

SEQ ID NO: 9377 - DNA, 20 bp, synthetic construct
  source 1..20: mol_type = other DNA
gtcggataacggatgtacgg

SEQ ID NO: 9378 - DNA, 20 bp, synthetic construct
  source 1..20: mol_type = other DNA
agttcgaacgattctagcat

SEQ ID NO: 9379 - DNA, 20 bp, synthetic construct
  source 1..20: mol_type = other DNA
acggccgggacacactacat

SEQ ID NO: 9380 - DNA, 20 bp, synthetic construct
  source 1..20: mol_type = other DNA
tccaacgcagagcaataccc

SEQ ID NO: 9381 - DNA, 20 bp, synthetic construct
  source 1..20: mol_type = other DNA
cctttgagcactttagctat

SEQ ID NO: 9382 - DNA, 20 bp, synthetic construct
  source 1..20: mol_type = other DNA
tgatgaaattgcgtgagcac

SEQ ID NO: 9383 - DNA, 20 bp, synthetic construct
  source 1..20: mol_type = other DNA
gttaccgcgctcatcggaag

SEQ ID NO: 9384 - DNA, 20 bp, synthetic construct
  source 1..20: mol_type = other DNA
taaagatgaaaggcactttc

SEQ ID NO: 9385 - DNA, 20 bp, synthetic construct
  source 1..20: mol_type = other DNA
ggtctcatctgagcccaaca

SEQ ID NO: 9386 - DNA, 20 bp, synthetic construct
  source 1..20: mol_type = other DNA
tggatactcgggacctggcg

SEQ ID NO: 9387 - DNA, 20 bp, synthetic construct
  source 1..20: mol_type = other DNA
atgaagaggactcatgccct

SEQ ID NO: 9388 - DNA, 20 bp, synthetic construct
  source 1..20: mol_type = other DNA
gtgcgcttctcgaagcaacg

SEQ ID NO: 9389 - DNA, 20 bp, synthetic construct
  source 1..20: mol_type = other DNA
actgtgataggagacttaat

SEQ ID NO: 9390 - DNA, 20 bp, synthetic construct
  source 1..20: mol_type = other DNA
tattcgctcacaccagtgag

SEQ ID NO: 9391 - DNA, 20 bp, synthetic construct
  source 1..20: mol_type = other DNA
aggttagtccagatagtcct

SEQ ID NO: 9392 - DNA, 20 bp, synthetic construct
  source 1..20: mol_type = other DNA
cctagtgtgacagtacttcg

SEQ ID NO: 9393 - DNA, 20 bp, synthetic construct
  source 1..20: mol_type = other DNA
ctgaagtgtggctttctgcg

SEQ ID NO: 9394 - DNA, 20 bp, synthetic construct
  source 1..20: mol_type = other DNA
atgcgcgtatgcttaaggtc

SEQ ID NO: 9395 - DNA, 20 bp, synthetic construct
  source 1..20: mol_type = other DNA
atctacgctctagcaacacc

SEQ ID NO: 9396 - DNA, 20 bp, synthetic construct
  source 1..20: mol_type = other DNA
ataggtgttgcgcgctacat

SEQ ID NO: 9397 - DNA, 20 bp, synthetic construct
  source 1..20: mol_type = other DNA
cccttcaagcgtcctttccc

SEQ ID NO: 9398 - DNA, 20 bp, synthetic construct
  source 1..20: mol_type = other DNA
aatggattccttagtgcccg

SEQ ID NO: 9399 - DNA, 20 bp, synthetic construct
  source 1..20: mol_type = other DNA
acagagactactaggtggag

SEQ ID NO: 9400 - DNA, 20 bp, synthetic construct
  source 1..20: mol_type = other DNA
cctccgtactggatccatag

SEQ ID NO: 9401 - DNA, 20 bp, synthetic construct
  source 1..20: mol_type = other DNA
gtaaccgtttacgtaattgc

SEQ ID NO: 9402 - DNA, 20 bp, synthetic construct
  source 1..20: mol_type = other DNA
tgttagaacgacacgcaatt

SEQ ID NO: 9403 - DNA, 20 bp, synthetic construct
  source 1..20: mol_type = other DNA
caaagcatgtccggaactag

SEQ ID NO: 9404 - DNA, 20 bp, synthetic construct
  source 1..20: mol_type = other DNA
catcgacatcggtgtgcaag

SEQ ID NO: 9405 - DNA, 20 bp, synthetic construct
  source 1..20: mol_type = other DNA
attggaactgattgaattag

SEQ ID NO: 9406 - DNA, 20 bp, synthetic construct
  source 1..20: mol_type = other DNA
gttgaaaggccaccggattt

SEQ ID NO: 9407 - DNA, 20 bp, synthetic construct
  source 1..20: mol_type = other DNA
agcgggttcaccgatctgtt

SEQ ID NO: 9408 - DNA, 20 bp, synthetic construct
  source 1..20: mol_type = other DNA
gggctcttacgtcactgcag

SEQ ID NO: 9409 - DNA, 20 bp, synthetic construct
  source 1..20: mol_type = other DNA
gtggagtcgggatctcccaa

SEQ ID NO: 9410 - DNA, 20 bp, synthetic construct
  source 1..20: mol_type = other DNA
tgggctggtaacagcgtccc

SEQ ID NO: 9411 - DNA, 20 bp, synthetic construct
  source 1..20: mol_type = other DNA
ggataccatagtgcaaacgg

SEQ ID NO: 9412 - DNA, 20 bp, synthetic construct
  source 1..20: mol_type = other DNA
acctggtcctgcgattgaat

SEQ ID NO: 9413 - DNA, 20 bp, synthetic construct
  source 1..20: mol_type = other DNA
tggagtccctgaaagtaacc

SEQ ID NO: 9414 - DNA, 20 bp, synthetic construct
  source 1..20: mol_type = other DNA
tcccttacggatcgccagat

SEQ ID NO: 9415 - DNA, 20 bp, synthetic construct
  source 1..20: mol_type = other DNA
taaggatcacgaatctacag

SEQ ID NO: 9416 - DNA, 20 bp, synthetic construct
  source 1..20: mol_type = other DNA
cgcgtagggaatggctgagg

SEQ ID NO: 9417 - DNA, 20 bp, synthetic construct
  source 1..20: mol_type = other DNA
ggtgacgtaaggcttaactg

SEQ ID NO: 9418 - DNA, 20 bp, synthetic construct
  source 1..20: mol_type = other DNA
ataagacgttgcactctcct

SEQ ID NO: 9419 - DNA, 20 bp, synthetic construct
  source 1..20: mol_type = other DNA
ggagccgtattgatagacct

SEQ ID NO: 9420 - DNA, 20 bp, synthetic construct
  source 1..20: mol_type = other DNA
cgtaccggccagcgtatgat

SEQ ID NO: 9421 - DNA, 20 bp, synthetic construct
  source 1..20: mol_type = other DNA
tttgcctctctctatgatac

SEQ ID NO: 9422 - DNA, 20 bp, synthetic construct
  source 1..20: mol_type = other DNA
gggagccttagtgattcgtc

SEQ ID NO: 9423 - DNA, 20 bp, synthetic construct
  source 1..20: mol_type = other DNA
ttatgctcctatcgctaaac

SEQ ID NO: 9424 - DNA, 20 bp, synthetic construct
  source 1..20: mol_type = other DNA
ggagacgactacatctgtcg

SEQ ID NO: 9425 - DNA, 20 bp, synthetic construct
  source 1..20: mol_type = other DNA
acgccgtcaatgatctcact

SEQ ID NO: 9426 - DNA, 20 bp, synthetic construct
  source 1..20: mol_type = other DNA
tctgtccgtagggataccgg

SEQ ID NO: 9427 - DNA, 20 bp, synthetic construct
  source 1..20: mol_type = other DNA
cggttccttgtaatcgaaac

SEQ ID NO: 9428 - DNA, 20 bp, synthetic construct
  source 1..20: mol_type = other DNA
aactgtgaacgcaagatggt

SEQ ID NO: 9429 - DNA, 20 bp, synthetic construct
  source 1..20: mol_type = other DNA
gctgtgaatacatgattgcc

SEQ ID NO: 9430 - DNA, 20 bp, synthetic construct
  source 1..20: mol_type = other DNA
tgccactagatgatgataat

SEQ ID NO: 9431 - DNA, 20 bp, synthetic construct
  source 1..20: mol_type = other DNA
gatcattctggaaggtgaaa

SEQ ID NO: 9432 - DNA, 20 bp, synthetic construct
  source 1..20: mol_type = other DNA
acaccctgtttgttcgtagg

SEQ ID NO: 9433 - DNA, 20 bp, synthetic construct
  source 1..20: mol_type = other DNA
taccttgaggagcgggtact

SEQ ID NO: 9434 - DNA, 20 bp, synthetic construct
  source 1..20: mol_type = other DNA
cagtggttcatgtttaagtc

SEQ ID NO: 9435 - DNA, 20 bp, synthetic construct
  source 1..20: mol_type = other DNA
ctagttgcatctgtactaag

SEQ ID NO: 9436 - DNA, 20 bp, synthetic construct
  source 1..20: mol_type = other DNA
gcgattacaggcacatttga

SEQ ID NO: 9437 - DNA, 20 bp, synthetic construct
  source 1..20: mol_type = other DNA
tcgtgtaattgaccctaatt

SEQ ID NO: 9438 - DNA, 20 bp, synthetic construct
  source 1..20: mol_type = other DNA
cgcacttagtgagcttggta

SEQ ID NO: 9439 - DNA, 20 bp, synthetic construct
  source 1..20: mol_type = other DNA
ctacgactctggtgtgtacc

SEQ ID NO: 9440 - DNA, 20 bp, synthetic construct
  source 1..20: mol_type = other DNA
atgtttacaggactggtctt

SEQ ID NO: 9441 - DNA, 20 bp, synthetic construct
  source 1..20: mol_type = other DNA
caggagctttaggagagatt

SEQ ID NO: 9442 - DNA, 20 bp, synthetic construct
  source 1..20: mol_type = other DNA
tagaaattagggctgcgagc

SEQ ID NO: 9443 - DNA, 20 bp, synthetic construct
  source 1..20: mol_type = other DNA
cctggtatagtccatacaac

SEQ ID NO: 9444 - DNA, 20 bp, synthetic construct
  source 1..20: mol_type = other DNA
ccggagcctgtttgaaccac

SEQ ID NO: 9445 - DNA, 20 bp, synthetic construct
  source 1..20: mol_type = other DNA
atgagagggttgctctaagc

SEQ ID NO: 9446 - DNA, 20 bp, synthetic construct
  source 1..20: mol_type = other DNA
aaccagctggtatgtcgctc

SEQ ID NO: 9447 - DNA, 20 bp, synthetic construct
  source 1..20: mol_type = other DNA
cttgtctatgcttgggtaag

SEQ ID NO: 9448 - DNA, 20 bp, synthetic construct
  source 1..20: mol_type = other DNA
atacaattcggcctcaatcg

SEQ ID NO: 9449 - DNA, 20 bp, synthetic construct
  source 1..20: mol_type = other DNA
atttgcgaggattatgctgg

SEQ ID NO: 9450 - DNA, 20 bp, synthetic construct
  source 1..20: mol_type = other DNA
ggcaagaaggttagtgaact

SEQ ID NO: 9451 - DNA, 20 bp, synthetic construct
  source 1..20: mol_type = other DNA
gaactgtcgatttgaacttc

SEQ ID NO: 9452 - DNA, 20 bp, synthetic construct
  source 1..20: mol_type = other DNA
ccacatatacaaggtccaga

SEQ ID NO: 9453 - DNA, 20 bp, synthetic construct
  source 1..20: mol_type = other DNA
aggctttcacagtccgcggt

SEQ ID NO: 9454 - DNA, 20 bp, synthetic construct
  source 1..20: mol_type = other DNA
gtctgtatagacggcgtcgt

SEQ ID NO: 9455 - DNA, 20 bp, synthetic construct
  source 1..20: mol_type = other DNA
ggtccacggccactcgcttc

SEQ ID NO: 9456 - DNA, 20 bp, synthetic construct
  source 1..20: mol_type = other DNA
acagcctgtgtgaccgtcta

SEQ ID NO: 9457 - DNA, 20 bp, synthetic construct
  source 1..20: mol_type = other DNA
ctgagttgatcactccctat

SEQ ID NO: 9458 - DNA, 20 bp, synthetic construct
  source 1..20: mol_type = other DNA
agcgagtacctctaacacca

SEQ ID NO: 9459 - DNA, 20 bp, synthetic construct
  source 1..20: mol_type = other DNA
gacccgttacgtgaattagt

SEQ ID NO: 9460 - DNA, 20 bp, synthetic construct
  source 1..20: mol_type = other DNA
ttggctcacactacgccgac

SEQ ID NO: 9461 - DNA, 20 bp, synthetic construct
  source 1..20: mol_type = other DNA
taaatttcgtcatggaggta

SEQ ID NO: 9462 - DNA, 20 bp, synthetic construct
  source 1..20: mol_type = other DNA
ttaggctaaagccctggaat

SEQ ID NO: 9463 - DNA, 20 bp, synthetic construct
  source 1..20: mol_type = other DNA
cgcatgtgccatcgcagact

SEQ ID NO: 9464 - DNA, 20 bp, synthetic construct
  source 1..20: mol_type = other DNA
gacggacctgttagcttgcc

SEQ ID NO: 9465 - DNA, 20 bp, synthetic construct
  source 1..20: mol_type = other DNA
tcactctctttatctacgct

SEQ ID NO: 9466 - DNA, 20 bp, synthetic construct
  source 1..20: mol_type = other DNA
ttaatattaggtgatcaggt

SEQ ID NO: 9467 - DNA, 20 bp, synthetic construct
  source 1..20: mol_type = other DNA
ccttgtgatgagcctagata

SEQ ID NO: 9468 - DNA, 20 bp, synthetic construct
  source 1..20: mol_type = other DNA
ctgcccgctcatagcatgat

SEQ ID NO: 9469 - DNA, 20 bp, synthetic construct
  source 1..20: mol_type = other DNA
gccgtattggatttagcaat

SEQ ID NO: 9470 - DNA, 20 bp, synthetic construct
  source 1..20: mol_type = other DNA
catcccagacccaacgagtc

SEQ ID NO: 9471 - DNA, 20 bp, synthetic construct
  source 1..20: mol_type = other DNA
agtgcatcgccactgcagca

SEQ ID NO: 9472 - DNA, 20 bp, synthetic construct
  source 1..20: mol_type = other DNA
gtgacgcaccacatagatag

SEQ ID NO: 9473 - DNA, 20 bp, synthetic construct
  source 1..20: mol_type = other DNA
tccgctctagggcacaccct

SEQ ID NO: 9474 - DNA, 20 bp, synthetic construct
  source 1..20: mol_type = other DNA
cataaccacaatctccttcg

SEQ ID NO: 9475 - DNA, 20 bp, synthetic construct
  source 1..20: mol_type = other DNA
gcccatcggatcgtaggatg

SEQ ID NO: 9476 - DNA, 20 bp, synthetic construct
  source 1..20: mol_type = other DNA
ccacttactatggctgagtt

SEQ ID NO: 9477 - DNA, 20 bp, synthetic construct
  source 1..20: mol_type = other DNA
tggacttggttaaacctccg

SEQ ID NO: 9478 - DNA, 20 bp, synthetic construct
  source 1..20: mol_type = other DNA
gaaatgacgaactacttgcc

SEQ ID NO: 9479 - DNA, 20 bp, synthetic construct
  source 1..20: mol_type = other DNA
gtgataccaagcggcactcg

SEQ ID NO: 9480 - DNA, 20 bp, synthetic construct
  source 1..20: mol_type = other DNA
cgtcctcagaaccacacagg

SEQ ID NO: 9481 - DNA, 20 bp, synthetic construct
  source 1..20: mol_type = other DNA
tggttcaagcatttctcacg

SEQ ID NO: 9482 - DNA, 20 bp, synthetic construct
  source 1..20: mol_type = other DNA
agggtcattatagcgtggag

SEQ ID NO: 9483 - DNA, 20 bp, synthetic construct
  source 1..20: mol_type = other DNA
ggtgggcgataaccgtgtcg

SEQ ID NO: 9484 - DNA, 20 bp, synthetic construct
  source 1..20: mol_type = other DNA
gttcgtggcttgggtagtac

SEQ ID NO: 9485 - DNA, 20 bp, synthetic construct
  source 1..20: mol_type = other DNA
tggatgccgattgcgccttg

SEQ ID NO: 9486 - DNA, 20 bp, synthetic construct
  source 1..20: mol_type = other DNA
accggcctttggcaatctgg

SEQ ID NO: 9487 - DNA, 20 bp, synthetic construct
  source 1..20: mol_type = other DNA
catgcattgctttggccggt

SEQ ID NO: 9488 - DNA, 20 bp, synthetic construct
  source 1..20: mol_type = other DNA
tgatgcggacagagagctga

SEQ ID NO: 9489 - DNA, 20 bp, synthetic construct
  source 1..20: mol_type = other DNA
cgggttcacgaaacagtaca

SEQ ID NO: 9490 - DNA, 20 bp, synthetic construct
  source 1..20: mol_type = other DNA
ttggagaaccactagcgttg

SEQ ID NO: 9491 - DNA, 20 bp, synthetic construct
  source 1..20: mol_type = other DNA
gccttagtatggactaggct

SEQ ID NO: 9492 - DNA, 20 bp, synthetic construct
  source 1..20: mol_type = other DNA
cactagcatcacagattcac

SEQ ID NO: 9493 - DNA, 20 bp, synthetic construct
  source 1..20: mol_type = other DNA
ttcttggcttacggtaccgg

SEQ ID NO: 9494 - DNA, 20 bp, synthetic construct
  source 1..20: mol_type = other DNA
aacgccgacggtccagacag

SEQ ID NO: 9495 - DNA, 20 bp, synthetic construct
  source 1..20: mol_type = other DNA
tgcgcaaagggctcgttagg

SEQ ID NO: 9496 - DNA, 20 bp, synthetic construct
  source 1..20: mol_type = other DNA
tcaatatgaatgtgcttgga

SEQ ID NO: 9497 - DNA, 20 bp, synthetic construct
  source 1..20: mol_type = other DNA
tagacctaaggctaccgtca

SEQ ID NO: 9498 - DNA, 20 bp, synthetic construct
  source 1..20: mol_type = other DNA
acgcgaatatgggtccatcc

SEQ ID NO: 9499 - DNA, 20 bp, synthetic construct
  source 1..20: mol_type = other DNA
gttggactaagcctgctggt

SEQ ID NO: 9500 - DNA, 20 bp, synthetic construct
  source 1..20: mol_type = other DNA
gcactggaccgccaacgtct

SEQ ID NO: 9501 - DNA, 20 bp, synthetic construct
  source 1..20: mol_type = other DNA
gtactgactcttgcgccaca

SEQ ID NO: 9502 - DNA, 20 bp, synthetic construct
  source 1..20: mol_type = other DNA
cccgaactgattagtccaca

SEQ ID NO: 9503 - DNA, 20 bp, synthetic construct
  source 1..20: mol_type = other DNA
ttcgcgcaggtatcaagacg

SEQ ID NO: 9504 - DNA, 20 bp, synthetic construct
  source 1..20: mol_type = other DNA
ctggatgccacgggactcca

SEQ ID NO: 9505 - DNA, 20 bp, synthetic construct
  source 1..20: mol_type = other DNA
tctttcgaccttgccgaata

SEQ ID NO: 9506 - DNA, 20 bp, synthetic construct
  source 1..20: mol_type = other DNA
tgaagctagcgtcctattgg

SEQ ID NO: 9507 - DNA, 20 bp, synthetic construct
  source 1..20: mol_type = other DNA
gtgcattgtggtttcacttc

SEQ ID NO: 9508 - DNA, 20 bp, synthetic construct
  source 1..20: mol_type = other DNA
tggctcatgcgtggagacac

SEQ ID NO: 9509 - DNA, 20 bp, synthetic construct
  source 1..20: mol_type = other DNA
cgttacctaaggtcctgctc

SEQ ID NO: 9510 - DNA, 20 bp, synthetic construct
  source 1..20: mol_type = other DNA
aggtgtcgccgtgcatgtgg

SEQ ID NO: 9511 - DNA, 20 bp, synthetic construct
  source 1..20: mol_type = other DNA
tggctgtctcgaacgaattg

SEQ ID NO: 9512 - DNA, 20 bp, synthetic construct
  source 1..20: mol_type = other DNA
ggtcgagggatcggaatctg

SEQ ID NO: 9513 - DNA, 20 bp, synthetic construct
  source 1..20: mol_type = other DNA
aaggaagcccgaaacaagac

SEQ ID NO: 9514 - DNA, 20 bp, synthetic construct
  source 1..20: mol_type = other DNA
gcagggtaatctacccggaa

SEQ ID NO: 9515 - DNA, 20 bp, synthetic construct
  source 1..20: mol_type = other DNA
tctttcttctgcggttacgc

SEQ ID NO: 9516 - DNA, 20 bp, synthetic construct
  source 1..20: mol_type = other DNA
cccatctcccaactgcttta

SEQ ID NO: 9517 - DNA, 20 bp, synthetic construct
  source 1..20: mol_type = other DNA
tataactgcgtcttaaccct

SEQ ID NO: 9518 - DNA, 20 bp, synthetic construct
  source 1..20: mol_type = other DNA
gaaacaaagaggtctaggtt

SEQ ID NO: 9519 - DNA, 20 bp, synthetic construct
  source 1..20: mol_type = other DNA
cattcagcgctcattggtag

SEQ ID NO: 9520 - DNA, 20 bp, synthetic construct
  source 1..20: mol_type = other DNA
acattcccggtgaatctacc

SEQ ID NO: 9521 - DNA, 20 bp, synthetic construct
  source 1..20: mol_type = other DNA
gggcgatcgaacgttctccc

SEQ ID NO: 9522 - DNA, 20 bp, synthetic construct
  source 1..20: mol_type = other DNA
aattggacggtatgtgacgt

SEQ ID NO: 9523 - DNA, 20 bp, synthetic construct
  source 1..20: mol_type = other DNA
tgggagcgattggttcgcct

SEQ ID NO: 9524 - DNA, 20 bp, synthetic construct
  source 1..20: mol_type = other DNA
aaagctagagcgagcagatg

SEQ ID NO: 9525 - DNA, 20 bp, synthetic construct
  source 1..20: mol_type = other DNA
atgactttactgttcggtaa

SEQ ID NO: 9526 - DNA, 20 bp, synthetic construct
  source 1..20: mol_type = other DNA
ctactaggctcaccgctaca

SEQ ID NO: 9527 - DNA, 20 bp, synthetic construct
  source 1..20: mol_type = other DNA
tgcaattctgtagtgcatcg

SEQ ID NO: 9528 - DNA, 20 bp, synthetic construct
  source 1..20: mol_type = other DNA
ggagagttccagtgtcgcgt

SEQ ID NO: 9529 - DNA, 20 bp, synthetic construct
  source 1..20: mol_type = other DNA
ccaacgactcgcgtggacga

SEQ ID NO: 9530 - DNA, 20 bp, synthetic construct
  source 1..20: mol_type = other DNA
gagcaagagcgtcactttag

SEQ ID NO: 9531 - DNA, 20 bp, synthetic construct
  source 1..20: mol_type = other DNA
atgttgcccgcactagacga

SEQ ID NO: 9532 - DNA, 20 bp, synthetic construct
  source 1..20: mol_type = other DNA
tagacctgtgggtatgccag

SEQ ID NO: 9533 - DNA, 20 bp, synthetic construct
  source 1..20: mol_type = other DNA
cgcgtgccttgtccagttct

SEQ ID NO: 9534 - DNA, 20 bp, synthetic construct
  source 1..20: mol_type = other DNA
ccagggctatttaaatgcac

SEQ ID NO: 9535 - DNA, 20 bp, synthetic construct
  source 1..20: mol_type = other DNA
aaaggttccgcgcctcgtcg

SEQ ID NO: 9536 - DNA, 20 bp, synthetic construct
  source 1..20: mol_type = other DNA
atcattaaccaactcatcgc

SEQ ID NO: 9537 - DNA, 20 bp, synthetic construct
  source 1..20: mol_type = other DNA
acctttagctcccagctact

SEQ ID NO: 9538 - DNA, 20 bp, synthetic construct
  source 1..20: mol_type = other DNA
ccctgtaagtatcgcctagg

SEQ ID NO: 9539 - DNA, 20 bp, synthetic construct
  source 1..20: mol_type = other DNA
gtctgcatgatggatgactt

SEQ ID NO: 9540 - DNA, 20 bp, synthetic construct
  source 1..20: mol_type = other DNA
gttatatgggagcaccttac

SEQ ID NO: 9541 - DNA, 20 bp, synthetic construct
  source 1..20: mol_type = other DNA
actactacatccaaaccctg

SEQ ID NO: 9542 - DNA, 20 bp, synthetic construct
  source 1..20: mol_type = other DNA
gtccaatctgcgcgagccag

SEQ ID NO: 9543 - DNA, 20 bp, synthetic construct
  source 1..20: mol_type = other DNA
tcgtgaacggtgcccactga

SEQ ID NO: 9544 - DNA, 20 bp, synthetic construct
  source 1..20: mol_type = other DNA
ctcaagccacttgcactaat

SEQ ID NO: 9545 - DNA, 20 bp, synthetic construct
  source 1..20: mol_type = other DNA
gctcgcagtggaagtctctt

SEQ ID NO: 9546 - DNA, 20 bp, synthetic construct
  source 1..20: mol_type = other DNA
cgatagatgtgagcccgact

SEQ ID NO: 9547 - DNA, 20 bp, synthetic construct
  source 1..20: mol_type = other DNA
cgcctaaagagtgtacaagc

SEQ ID NO: 9548 - DNA, 20 bp, synthetic construct
  source 1..20: mol_type = other DNA
cctcaaaccattcgctacga

SEQ ID NO: 9549 - DNA, 20 bp, synthetic construct
  source 1..20: mol_type = other DNA
gtggcatcccttgtatacca

SEQ ID NO: 9550 - DNA, 20 bp, synthetic construct
  source 1..20: mol_type = other DNA
cccacaaaccgatcaccggt

SEQ ID NO: 9551 - DNA, 20 bp, synthetic construct
  source 1..20: mol_type = other DNA
tcgaggtagcgcaatttctt

SEQ ID NO: 9552 - DNA, 20 bp, synthetic construct
  source 1..20: mol_type = other DNA
tacggtaaacctgcaaccca

SEQ ID NO: 9553 - DNA, 20 bp, synthetic construct
  source 1..20: mol_type = other DNA
gcatcccaggaagtacgacg

SEQ ID NO: 9554 - DNA, 20 bp, synthetic construct
  source 1..20: mol_type = other DNA
acacacgaccctaatatcgc

SEQ ID NO: 9555 - DNA, 20 bp, synthetic construct
  source 1..20: mol_type = other DNA
tttgacaacgtacaccgtag

SEQ ID NO: 9556 - DNA, 20 bp, synthetic construct
  source 1..20: mol_type = other DNA
gaaaccgagccgagctttcc

SEQ ID NO: 9557 - DNA, 20 bp, synthetic construct
  source 1..20: mol_type = other DNA
ctcccggacgtaatatgagg

SEQ ID NO: 9558 - DNA, 20 bp, synthetic construct
  source 1..20: mol_type = other DNA
ttaggtagctagccctgatg

SEQ ID NO: 9559 - DNA, 20 bp, synthetic construct
  source 1..20: mol_type = other DNA
caacggttccacccacgctg

SEQ ID NO: 9560 - DNA, 20 bp, synthetic construct
  source 1..20: mol_type = other DNA
gaggtgttagcaggcatcag

SEQ ID NO: 9561 - DNA, 20 bp, synthetic construct
  source 1..20: mol_type = other DNA
ttcgacaggcagcagtttag

SEQ ID NO: 9562 - DNA, 20 bp, synthetic construct
  source 1..20: mol_type = other DNA
atactcgggctccctgaatc

SEQ ID NO: 9563 - DNA, 20 bp, synthetic construct
  source 1..20: mol_type = other DNA
cgcagtatgcgcgctagctc

SEQ ID NO: 9564 - DNA, 20 bp, synthetic construct
  source 1..20: mol_type = other DNA
agttgcctgtgagaagtcaa

SEQ ID NO: 9565 - DNA, 20 bp, synthetic construct
  source 1..20: mol_type = other DNA
gtagtgagagtcgggttctc

SEQ ID NO: 9566 - DNA, 20 bp, synthetic construct
  source 1..20: mol_type = other DNA
ttcaggaaaggatttatgcg

SEQ ID NO: 9567 - DNA, 20 bp, synthetic construct
  source 1..20: mol_type = other DNA
ccttacgaaccgtagtgtgg

SEQ ID NO: 9568 - DNA, 20 bp, synthetic construct
  source 1..20: mol_type = other DNA
caggtcgggtaaatggcatt

SEQ ID NO: 9569 - DNA, 20 bp, synthetic construct
  source 1..20: mol_type = other DNA
ccgggagcaactttcgaccc

SEQ ID NO: 9570 - DNA, 20 bp, synthetic construct
  source 1..20: mol_type = other DNA
ggagtgttgctgcatgccta

SEQ ID NO: 9571 - DNA, 20 bp, synthetic construct
  source 1..20: mol_type = other DNA
gatgtagagcaacacgcaaa

SEQ ID NO: 9572 - DNA, 20 bp, synthetic construct
  source 1..20: mol_type = other DNA
ggtagtgtacctacggttac

SEQ ID NO: 9573 - DNA, 20 bp, synthetic construct
  source 1..20: mol_type = other DNA
acggaagtataagctgttgt

SEQ ID NO: 9574 - DNA, 20 bp, synthetic construct
  source 1..20: mol_type = other DNA
gagaaacctgttagcttctc

SEQ ID NO: 9575 - DNA, 20 bp, synthetic construct
  source 1..20: mol_type = other DNA
ttctgggcccgtatggaatg

SEQ ID NO: 9576 - DNA, 20 bp, synthetic construct
  source 1..20: mol_type = other DNA
tgtacatgttcgtcagctgg

SEQ ID NO: 9577 - DNA, 20 bp, synthetic construct
  source 1..20: mol_type = other DNA
agtccgccgagcatgctcaa

SEQ ID NO: 9578 - DNA, 20 bp, synthetic construct
  source 1..20: mol_type = other DNA
ggaattgctgctacgtaaag

SEQ ID NO: 9579 - DNA, 20 bp, synthetic construct
  source 1..20: mol_type = other DNA
gagaaccctagtcaagcctg

SEQ ID NO: 9580 - DNA, 20 bp, synthetic construct
  source 1..20: mol_type = other DNA
tccacaagtgagcgctacga

SEQ ID NO: 9581 - DNA, 20 bp, synthetic construct
  source 1..20: mol_type = other DNA
aggtatgtatctcgtaagct

SEQ ID NO: 9582 - DNA, 20 bp, synthetic construct
  source 1..20: mol_type = other DNA
ggtggtggtacattgttcac

SEQ ID NO: 9583 - DNA, 20 bp, synthetic construct
  source 1..20: mol_type = other DNA
tagtgcacgagaagcccaat

SEQ ID NO: 9584 - DNA, 20 bp, synthetic construct
  source 1..20: mol_type = other DNA
gatggtagcggccaataccc

SEQ ID NO: 9585 - DNA, 20 bp, synthetic construct
  source 1..20: mol_type = other DNA
cataagtaactgaaggagcc

SEQ ID NO: 9586 - DNA, 20 bp, synthetic construct
  source 1..20: mol_type = other DNA
gatagtatcccacatgtagc

SEQ ID NO: 9587 - DNA, 20 bp, synthetic construct
  source 1..20: mol_type = other DNA
atcagaagaagtaagcccgg

SEQ ID NO: 9588 - DNA, 20 bp, synthetic construct
  source 1..20: mol_type = other DNA
accactagcaccaagttaca

SEQ ID NO: 9589 - DNA, 20 bp, synthetic construct
  source 1..20: mol_type = other DNA
ggtccgtcctttagggtcag

SEQ ID NO: 9590 - DNA, 20 bp, synthetic construct
  source 1..20: mol_type = other DNA
cgatccctgcttgacactgc

SEQ ID NO: 9591 - DNA, 20 bp, synthetic construct
  source 1..20: mol_type = other DNA
aacgtttagctattggcgag

SEQ ID NO: 9592 - DNA, 20 bp, synthetic construct
  source 1..20: mol_type = other DNA
tcgggcgaagaagagaatca

SEQ ID NO: 9593 - DNA, 20 bp, synthetic construct
  source 1..20: mol_type = other DNA
ctgcgagatgccacgattta

SEQ ID NO: 9594 - DNA, 20 bp, synthetic construct
  source 1..20: mol_type = other DNA
tgatacggtgttacgaaacg

SEQ ID NO: 9595 - DNA, 20 bp, synthetic construct
  source 1..20: mol_type = other DNA
cgctttaatggcgtttcgac

SEQ ID NO: 9596 - DNA, 20 bp, synthetic construct
  source 1..20: mol_type = other DNA
gtcgttggagctacaaatgg

SEQ ID NO: 9597 - DNA, 20 bp, synthetic construct
  source 1..20: mol_type = other DNA
actttggctactacccaaga

SEQ ID NO: 9598 - DNA, 20 bp, synthetic construct
  source 1..20: mol_type = other DNA
accggtggagatacagcaca

SEQ ID NO: 9599 - DNA, 20 bp, synthetic construct
  source 1..20: mol_type = other DNA
ccagtgcgtatatgctccag

SEQ ID NO: 9600 - DNA, 20 bp, synthetic construct
  source 1..20: mol_type = other DNA
cccacgatatagtcagactg

SEQ ID NO: 9601 - DNA, 20 bp, synthetic construct
  source 1..20: mol_type = other DNA
gtaactactcccagactcga

SEQ ID NO: 9602 - DNA, 20 bp, synthetic construct
  source 1..20: mol_type = other DNA
gcatgattacttggaaggtc

SEQ ID NO: 9603 - DNA, 20 bp, synthetic construct
  source 1..20: mol_type = other DNA
agagtctgtctacatgaggg

SEQ ID NO: 9604 - DNA, 20 bp, synthetic construct
  source 1..20: mol_type = other DNA
gttaggaatctccgcgaggg

SEQ ID NO: 9605 - DNA, 20 bp, synthetic construct
  source 1..20: mol_type = other DNA
cgaagatcatccgtacgccg

SEQ ID NO: 9606 - DNA, 20 bp, synthetic construct
  source 1..20: mol_type = other DNA
aggttcgttgagcacgtggt

SEQ ID NO: 9607 - DNA, 20 bp, synthetic construct
  source 1..20: mol_type = other DNA
tgctactattctgttagcta

SEQ ID NO: 9608 - DNA, 20 bp, synthetic construct
  source 1..20: mol_type = other DNA
cgcgatttctccacttaatt

SEQ ID NO: 9609 - DNA, 20 bp, synthetic construct
  source 1..20: mol_type = other DNA
gagagaacgcacttcggatc

SEQ ID NO: 9610 - DNA, 20 bp, synthetic construct
  source 1..20: mol_type = other DNA
aacctataatcgctcgatat

SEQ ID NO: 9611 - DNA, 20 bp, synthetic construct
  source 1..20: mol_type = other DNA
agccctgggagataggagtg

SEQ ID NO: 9612 - DNA, 20 bp, synthetic construct
  source 1..20: mol_type = other DNA
tacatggagggtgcgtgaaa

SEQ ID NO: 9613 - DNA, 20 bp, synthetic construct
  source 1..20: mol_type = other DNA
gcatccgcaccttagcagtg

SEQ ID NO: 9614 - DNA, 20 bp, synthetic construct
  source 1..20: mol_type = other DNA
aatgacctttaaccagcgat

SEQ ID NO: 9615 - DNA, 20 bp, synthetic construct
  source 1..20: mol_type = other DNA
atacctgacatacaccaagg

SEQ ID NO: 9616 - DNA, 20 bp, synthetic construct
  source 1..20: mol_type = other DNA
acagacggccaggcacaagt

SEQ ID NO: 9617 - DNA, 20 bp, synthetic construct
  source 1..20: mol_type = other DNA
gccggctacacaaatgagat

SEQ ID NO: 9618 - DNA, 20 bp, synthetic construct
  source 1..20: mol_type = other DNA
attccgggcgttcacattct

SEQ ID NO: 9619 - DNA, 20 bp, synthetic construct
  source 1..20: mol_type = other DNA
cctccgaacttgaatagaca

SEQ ID NO: 9620 - DNA, 20 bp, synthetic construct
  source 1..20: mol_type = other DNA
gattaagtccactgaacatc

SEQ ID NO: 9621 - DNA, 20 bp, synthetic construct
  source 1..20: mol_type = other DNA
tttctaagaacagccgagag

SEQ ID NO: 9622 - DNA, 20 bp, synthetic construct
  source 1..20: mol_type = other DNA
ggctgtaagtccgagtttgc

SEQ ID NO: 9623 - DNA, 20 bp, synthetic construct
  source 1..20: mol_type = other DNA
aacgggaataggagtaccct

SEQ ID NO: 9624 - DNA, 20 bp, synthetic construct
  source 1..20: mol_type = other DNA
cgttgcaggtacgcagagcg

SEQ ID NO: 9625 - DNA, 20 bp, synthetic construct
  source 1..20: mol_type = other DNA
ctgagggttcaatgtcattg

SEQ ID NO: 9626 - DNA, 20 bp, synthetic construct
  source 1..20: mol_type = other DNA
atccctcgcctatcaccagc

SEQ ID NO: 9627 - DNA, 20 bp, synthetic construct
  source 1..20: mol_type = other DNA
ctctgttcaacgctggagtg

SEQ ID NO: 9628 - DNA, 20 bp, synthetic construct
  source 1..20: mol_type = other DNA
cgcgcatgctgccagttact

SEQ ID NO: 9629 - DNA, 20 bp, synthetic construct
  source 1..20: mol_type = other DNA
catgtatcgccagttcagac

SEQ ID NO: 9630 - DNA, 20 bp, synthetic construct
  source 1..20: mol_type = other DNA
atggagggatctcatatggt

SEQ ID NO: 9631 - DNA, 20 bp, synthetic construct
  source 1..20: mol_type = other DNA
gagagtaatgccgatatgac

SEQ ID NO: 9632 - DNA, 20 bp, synthetic construct
  source 1..20: mol_type = other DNA
tcctttgttgtcgttctcgc

SEQ ID NO: 9633 - DNA, 20 bp, synthetic construct
  source 1..20: mol_type = other DNA
tcagtgcagagaagaataga

SEQ ID NO: 9634 - DNA, 20 bp, synthetic construct
  source 1..20: mol_type = other DNA
gcataccattcttgtagcgg

SEQ ID NO: 9635 - DNA, 20 bp, synthetic construct
  source 1..20: mol_type = other DNA
gtggagtacgtgcgcgattg

SEQ ID NO: 9636 - DNA, 20 bp, synthetic construct
  source 1..20: mol_type = other DNA
ttgcagtccctgacgtctga

SEQ ID NO: 9637 - DNA, 20 bp, synthetic construct
  source 1..20: mol_type = other DNA
ctgcgagatcctaatctata

SEQ ID NO: 9638 - DNA, 20 bp, synthetic construct
  source 1..20: mol_type = other DNA
atcggctttcaatgatccat

SEQ ID NO: 9639 - DNA, 20 bp, synthetic construct
  source 1..20: mol_type = other DNA
attacaagccataaccactc

SEQ ID NO: 9640 - DNA, 20 bp, synthetic construct
  source 1..20: mol_type = other DNA
tttggcttacgaccatgcaa

SEQ ID NO: 9641 - DNA, 20 bp, synthetic construct
  source 1..20: mol_type = other DNA
ccatgcgataagatccagtg

SEQ ID NO: 9642 - DNA, 20 bp, synthetic construct
  source 1..20: mol_type = other DNA
cgttactgggagaccaggtc

SEQ ID NO: 9643 - DNA, 20 bp, synthetic construct
  source 1..20: mol_type = other DNA
gtgaccagttctcaggttca

SEQ ID NO: 9644 - DNA, 20 bp, synthetic construct
  source 1..20: mol_type = other DNA
ataattgaggcctgatgcgt

SEQ ID NO: 9645 - DNA, 20 bp, synthetic construct
  source 1..20: mol_type = other DNA
agatgtctgagccgttataa

SEQ ID NO: 9646 - DNA, 20 bp, synthetic construct
  source 1..20: mol_type = other DNA
agatagcgacgctcacgaga

SEQ ID NO: 9647 - DNA, 20 bp, synthetic construct
  source 1..20: mol_type = other DNA
tctctgtatcgataccagta

SEQ ID NO: 9648 - DNA, 20 bp, synthetic construct
  source 1..20: mol_type = other DNA
ggtgccgattcagacgttaa

SEQ ID NO: 9649 - DNA, 20 bp, synthetic construct
  source 1..20: mol_type = other DNA
ttaagtgatccgggtaatac

SEQ ID NO: 9650 - DNA, 20 bp, synthetic construct
  source 1..20: mol_type = other DNA
ctgtaaggcttggtatcttc

SEQ ID NO: 9651 - DNA, 20 bp, synthetic construct
  source 1..20: mol_type = other DNA
cggtaactcaaatgcgcatt

SEQ ID NO: 9652 - DNA, 20 bp, synthetic construct
  source 1..20: mol_type = other DNA
gggccataattatgaaggct

SEQ ID NO: 9653 - DNA, 20 bp, synthetic construct
  source 1..20: mol_type = other DNA
caccagatttaatgcgcgaa

SEQ ID NO: 9654 - DNA, 20 bp, synthetic construct
  source 1..20: mol_type = other DNA
gcggaagcgtcgcctaacat

SEQ ID NO: 9655 - DNA, 20 bp, synthetic construct
  source 1..20: mol_type = other DNA
ctgagctgcaccaggtccgt

SEQ ID NO: 9656 - DNA, 20 bp, synthetic construct
  source 1..20: mol_type = other DNA
ttgcctcaattcatctatag

SEQ ID NO: 9657 - DNA, 20 bp, synthetic construct
  source 1..20: mol_type = other DNA
cattaatatgcctgcaggcg

SEQ ID NO: 9658 - DNA, 20 bp, synthetic construct
  source 1..20: mol_type = other DNA
caatgctgcccggcatactc

SEQ ID NO: 9659 - DNA, 20 bp, synthetic construct
  source 1..20: mol_type = other DNA
tccggcattggtgtcgtaac

SEQ ID NO: 9660 - DNA, 20 bp, synthetic construct
  source 1..20: mol_type = other DNA
ggcgtatgcgtaataggcgg

SEQ ID NO: 9661 - DNA, 20 bp, synthetic construct
  source 1..20: mol_type = other DNA
ctagccgcgttatcgccagg

SEQ ID NO: 9662 - DNA, 20 bp, synthetic construct
  source 1..20: mol_type = other DNA
tctctcgcggtaagacctga

SEQ ID NO: 9663 - DNA, 20 bp, synthetic construct
  source 1..20: mol_type = other DNA
tccgaggcgtttacgtgagg

SEQ ID NO: 9664 - DNA, 20 bp, synthetic construct
  source 1..20: mol_type = other DNA
gttacgtcgtctctgaggag

SEQ ID NO: 9665 - DNA, 20 bp, synthetic construct
  source 1..20: mol_type = other DNA
ctagccctgtcttacctggg

SEQ ID NO: 9666 - DNA, 20 bp, synthetic construct
  source 1..20: mol_type = other DNA
atcacctcgtctctgttgtg

SEQ ID NO: 9667 - DNA, 20 bp, synthetic construct
  source 1..20: mol_type = other DNA
ggttgacaatgcagcgttct

SEQ ID NO: 9668 - DNA, 20 bp, synthetic construct
  source 1..20: mol_type = other DNA
cagcagccttactagaaact

SEQ ID NO: 9669 - DNA, 20 bp, synthetic construct
  source 1..20: mol_type = other DNA
ggacaagttcattcagatta

SEQ ID NO: 9670 - DNA, 20 bp, synthetic construct
  source 1..20: mol_type = other DNA
aagtccctatttcacaagta

SEQ ID NO: 9671 - DNA, 20 bp, synthetic construct
  source 1..20: mol_type = other DNA
acgcacactgcgggctgatg

SEQ ID NO: 9672 - DNA, 20 bp, synthetic construct
  source 1..20: mol_type = other DNA
ggtgtggagtgcttagacca

SEQ ID NO: 9673 - DNA, 20 bp, synthetic construct
  source 1..20: mol_type = other DNA
gaagcaggcccgtcacttac

SEQ ID NO: 9674 - DNA, 20 bp, synthetic construct
  source 1..20: mol_type = other DNA
atagtcaccaatatctggtc

SEQ ID NO: 9675 - DNA, 20 bp, synthetic construct
  source 1..20: mol_type = other DNA
attactctccgatgcgctgc

SEQ ID NO: 9676 - DNA, 20 bp, synthetic construct
  source 1..20: mol_type = other DNA
gggttaatggaactgattac

SEQ ID NO: 9677 - DNA, 20 bp, synthetic construct
  source 1..20: mol_type = other DNA
cgtcctgtttccttagtatt

SEQ ID NO: 9678 - DNA, 20 bp, synthetic construct
  source 1..20: mol_type = other DNA
tggtcgtaccgcaagccaga

SEQ ID NO: 9679 - DNA, 20 bp, synthetic construct
  source 1..20: mol_type = other DNA
ctcgggaaggcgattacctc

SEQ ID NO: 9680 - DNA, 20 bp, synthetic construct
  source 1..20: mol_type = other DNA
tggttaactttggcggcctt

SEQ ID NO: 9681 - DNA, 20 bp, synthetic construct
  source 1..20: mol_type = other DNA
atatgttacagatgatcgcg

SEQ ID NO: 9682 - DNA, 20 bp, synthetic construct
  source 1..20: mol_type = other DNA
ttatttcggtacacagatcg

SEQ ID NO: 9683 - DNA, 20 bp, synthetic construct
  source 1..20: mol_type = other DNA
ctaatcaatattcacgtggg

SEQ ID NO: 9684 - DNA, 20 bp, synthetic construct
  source 1..20: mol_type = other DNA
ccatctgtattacctgcgcc

SEQ ID NO: 9685 - DNA, 20 bp, synthetic construct
  source 1..20: mol_type = other DNA
ccaacagctgggaatactaa

SEQ ID NO: 9686 - DNA, 20 bp, synthetic construct
  source 1..20: mol_type = other DNA
aaagtcgagaagtcaacttt

SEQ ID NO: 9687 - DNA, 20 bp, synthetic construct
  source 1..20: mol_type = other DNA
aatggctttcgataggtgat

SEQ ID NO: 9688 - DNA, 20 bp, synthetic construct
  source 1..20: mol_type = other DNA
gtatacttggtggaacaaac

SEQ ID NO: 9689 - DNA, 20 bp, synthetic construct
  source 1..20: mol_type = other DNA
gctcgcatagtctcaccctg

SEQ ID NO: 9690 - DNA, 20 bp, synthetic construct
  source 1..20: mol_type = other DNA
tttgagacacttgggagccg

SEQ ID NO: 9691 - DNA, 20 bp, synthetic construct
  source 1..20: mol_type = other DNA
tgagctgctcgtacatgcgc

SEQ ID NO: 9692 - DNA, 20 bp, synthetic construct
  source 1..20: mol_type = other DNA
gagttgaagaagcgtataaa

SEQ ID NO: 9693 - DNA, 20 bp, synthetic construct
  source 1..20: mol_type = other DNA
ctttgcttacccgcacaata

SEQ ID NO: 9694 - DNA, 20 bp, synthetic construct
  source 1..20: mol_type = other DNA
cgaagtagacgtaataggcg

SEQ ID NO: 9695 - DNA, 20 bp, synthetic construct
  source 1..20: mol_type = other DNA
gtgatcaaatctattgccgt

SEQ ID NO: 9696 - DNA, 20 bp, synthetic construct
  source 1..20: mol_type = other DNA
accagtctgttcgcctctac

SEQ ID NO: 9697 - DNA, 20 bp, synthetic construct
  source 1..20: mol_type = other DNA
gcaggctctgctataacggc

SEQ ID NO: 9698 - DNA, 20 bp, synthetic construct
  source 1..20: mol_type = other DNA
ttctggtgtcgaatgttact

SEQ ID NO: 9699 - DNA, 20 bp, synthetic construct
  source 1..20: mol_type = other DNA
cctttctcaataggcacgga

SEQ ID NO: 9700 - DNA, 20 bp, synthetic construct
  source 1..20: mol_type = other DNA
ctgagggtgtcttagggcga

SEQ ID NO: 9701 - DNA, 20 bp, synthetic construct
  source 1..20: mol_type = other DNA
ctccaaccacgtttgtcgta

SEQ ID NO: 9702 - DNA, 20 bp, synthetic construct
  source 1..20: mol_type = other DNA
cgtatcgtaagattcctgaa

SEQ ID NO: 9703 - DNA, 20 bp, synthetic construct
  source 1..20: mol_type = other DNA
gtcccaacaggcatcactga

SEQ ID NO: 9704 - DNA, 20 bp, synthetic construct
  source 1..20: mol_type = other DNA
agcaacacttcaagcgctag

SEQ ID NO: 9705 - DNA, 20 bp, synthetic construct
  source 1..20: mol_type = other DNA
tacgttggtcaggttgttag

SEQ ID NO: 9706 - DNA, 20 bp, synthetic construct
  source 1..20: mol_type = other DNA
tgtgggacgtcgtcgtctct

SEQ ID NO: 9707 - DNA, 20 bp, synthetic construct
  source 1..20: mol_type = other DNA
caaccgaattgcagttagct

SEQ ID NO: 9708 - DNA, 20 bp, synthetic construct
  source 1..20: mol_type = other DNA
ccttattgcagaggctgctt

SEQ ID NO: 9709 - DNA, 20 bp, synthetic construct
  source 1..20: mol_type = other DNA
gttaccatgtggtgagtcca

SEQ ID NO: 9710 - DNA, 20 bp, synthetic construct
  source 1..20: mol_type = other DNA
ggacgcaatacccagagatg

SEQ ID NO: 9711 - DNA, 20 bp, synthetic construct
  source 1..20: mol_type = other DNA
ttgcagcgcaatgcttacgt

SEQ ID NO: 9712 - DNA, 20 bp, synthetic construct
  source 1..20: mol_type = other DNA
taaagtttcacgggtgtaag

SEQ ID NO: 9713 - DNA, 20 bp, synthetic construct
  source 1..20: mol_type = other DNA
gccacaagcccttgatagta

SEQ ID NO: 9714 - DNA, 20 bp, synthetic construct
  source 1..20: mol_type = other DNA
cgatgtcgaatgtcttctct

SEQ ID NO: 9715 - DNA, 20 bp, synthetic construct
  source 1..20: mol_type = other DNA
acagtatggccagaaatatc

SEQ ID NO: 9716 - DNA, 20 bp, synthetic construct
  source 1..20: mol_type = other DNA
tatcggttcgatcccgaggg

SEQ ID NO: 9717 - DNA, 20 bp, synthetic construct
  source 1..20: mol_type = other DNA
gtgctagccctgcctacata

SEQ ID NO: 9718 - DNA, 20 bp, synthetic construct
  source 1..20: mol_type = other DNA
taggtccgagtgtgtctccg

SEQ ID NO: 9719 - DNA, 20 bp, synthetic construct
  source 1..20: mol_type = other DNA
ccatcgtgatgtacgcgcgc

SEQ ID NO: 9720 - DNA, 20 bp, synthetic construct
  source 1..20: mol_type = other DNA
ctgcaaatatagacgtggcc

SEQ ID NO: 9721 - DNA, 20 bp, synthetic construct
  source 1..20: mol_type = other DNA
gataagtcaggcgatgcaga

SEQ ID NO: 9722 - DNA, 20 bp, synthetic construct
  source 1..20: mol_type = other DNA
acgtataatccgacgctccg

SEQ ID NO: 9723 - DNA, 20 bp, synthetic construct
  source 1..20: mol_type = other DNA
acctcgaaccgtagaagtga

SEQ ID NO: 9724 - DNA, 20 bp, synthetic construct
  source 1..20: mol_type = other DNA
aggacaactcctggacttgg

SEQ ID NO: 9725 - DNA, 20 bp, synthetic construct
  source 1..20: mol_type = other DNA
tgatatggagcgcattgtcc

SEQ ID NO: 9726 - DNA, 20 bp, synthetic construct
  source 1..20: mol_type = other DNA
gtatccttcattagcggcac

SEQ ID NO: 9727 - DNA, 20 bp, synthetic construct
  source 1..20: mol_type = other DNA
ggagagaataaaggcaccct

SEQ ID NO: 9728 - DNA, 20 bp, synthetic construct
  source 1..20: mol_type = other DNA
cgtcaactgtatgagttggg

SEQ ID NO: 9729 - DNA, 20 bp, synthetic construct
  source 1..20: mol_type = other DNA
aaggcgcgcccatccacact

SEQ ID NO: 9730 - DNA, 20 bp, synthetic construct
  source 1..20: mol_type = other DNA
ggttacccgatgctgccgtt

SEQ ID NO: 9731 - DNA, 20 bp, synthetic construct
  source 1..20: mol_type = other DNA
cgaaatcagctggtcgaggg

SEQ ID NO: 9732 - DNA, 20 bp, synthetic construct
  source 1..20: mol_type = other DNA
ttattgcgatttccctggta

SEQ ID NO: 9733 - DNA, 20 bp, synthetic construct
  source 1..20: mol_type = other DNA
tctgccaatgggctacttta

SEQ ID NO: 9734 - DNA, 20 bp, synthetic construct
  source 1..20: mol_type = other DNA
agaggaaagtactctgggaa

SEQ ID NO: 9735 - DNA, 20 bp, synthetic construct
  source 1..20: mol_type = other DNA
agtaaccaaacctatcgtac

SEQ ID NO: 9736 - DNA, 20 bp, synthetic construct
  source 1..20: mol_type = other DNA
atttacctgttggcagtgga

SEQ ID NO: 9737 - DNA, 20 bp, synthetic construct
  source 1..20: mol_type = other DNA
gcatttcacaaaggcgtcct

SEQ ID NO: 9738 - DNA, 20 bp, synthetic construct
  source 1..20: mol_type = other DNA
tgcttggctaacctgcttat

SEQ ID NO: 9739 - DNA, 20 bp, synthetic construct
  source 1..20: mol_type = other DNA
gggagacaggtgtagacgat

SEQ ID NO: 9740 - DNA, 20 bp, synthetic construct
  source 1..20: mol_type = other DNA
actggtaggactagaacaac

SEQ ID NO: 9741 - DNA, 20 bp, synthetic construct
  source 1..20: mol_type = other DNA
tagagcctcgcgcgtaagag

SEQ ID NO: 9742 - DNA, 20 bp, synthetic construct
  source 1..20: mol_type = other DNA
gctggctgaacttacttcag

SEQ ID NO: 9743 - DNA, 20 bp, synthetic construct
  source 1..20: mol_type = other DNA
taagccagtagtaggcgcga

SEQ ID NO: 9744 - DNA, 20 bp, synthetic construct
  source 1..20: mol_type = other DNA
aagactccagggagtgtgcc

SEQ ID NO: 9745 - DNA, 20 bp, synthetic construct
  source 1..20: mol_type = other DNA
accgtgcttgcctgctacaa

SEQ ID NO: 9746 - DNA, 20 bp, synthetic construct
  source 1..20: mol_type = other DNA
caatgccagtcctgttataa

SEQ ID NO: 9747 - DNA, 20 bp, synthetic construct
  source 1..20: mol_type = other DNA
cattgcttaggataacctcg

SEQ ID NO: 9748 - DNA, 20 bp, synthetic construct
  source 1..20: mol_type = other DNA
gtaatgtatgtcgtccacgc

SEQ ID NO: 9749 - DNA, 20 bp, synthetic construct
  source 1..20: mol_type = other DNA
tgatagcagtcctaggtgtc

SEQ ID NO: 9750 - DNA, 20 bp, synthetic construct
  source 1..20: mol_type = other DNA
gtaaagctgacctgctgtga

SEQ ID NO: 9751 - DNA, 20 bp, synthetic construct
  source 1..20: mol_type = other DNA
gaacgcatgttgagtcggag

SEQ ID NO: 9752 - DNA, 20 bp, synthetic construct
  source 1..20: mol_type = other DNA
ttacttcagtgatctggcga

SEQ ID NO: 9753 - DNA, 20 bp, synthetic construct
  source 1..20: mol_type = other DNA
cagtgaatacataaacgaat

SEQ ID NO: 9754 - DNA, 20 bp, synthetic construct
  source 1..20: mol_type = other DNA
tcacaggctgtaaggatgag

SEQ ID NO: 9755 - DNA, 20 bp, synthetic construct
  source 1..20: mol_type = other DNA
agcggactaaggctcttctg

SEQ ID NO: 9756 - DNA, 20 bp, synthetic construct
  source 1..20: mol_type = other DNA
gttgatgggaacgcaaccac

SEQ ID NO: 9757 - DNA, 20 bp, synthetic construct
  source 1..20: mol_type = other DNA
atcactagtggtcgagatgt

SEQ ID NO: 9758 - DNA, 20 bp, synthetic construct
  source 1..20: mol_type = other DNA
ttagtgagctcgctcttgac

SEQ ID NO: 9759 - DNA, 20 bp, synthetic construct
  source 1..20: mol_type = other DNA
tgcacaaccagattcgccat

SEQ ID NO: 9760 - DNA, 20 bp, synthetic construct
  source 1..20: mol_type = other DNA
gctgaaagctgcacatgagc

SEQ ID NO: 9761 - DNA, 20 bp, synthetic construct
  source 1..20: mol_type = other DNA
ccctcaataccgccgatcgg

SEQ ID NO: 9762 - DNA, 20 bp, synthetic construct
  source 1..20: mol_type = other DNA
acgacgttagatttgaaacg

SEQ ID NO: 9763 - DNA, 20 bp, synthetic construct
  source 1..20: mol_type = other DNA
ccttcctgaattaagagctg

SEQ ID NO: 9764 - DNA, 20 bp, synthetic construct
  source 1..20: mol_type = other DNA
cgcagtgctaactctgtgtg

SEQ ID NO: 9765 - DNA, 20 bp, synthetic construct
  source 1..20: mol_type = other DNA
agcttaacatcaaaggaccc

SEQ ID NO: 9766 - DNA, 20 bp, synthetic construct
  source 1..20: mol_type = other DNA
aataaattgaacgggctagg

SEQ ID NO: 9767 - DNA, 20 bp, synthetic construct
  source 1..20: mol_type = other DNA
atatactggagagacaacat

SEQ ID NO: 9768 - DNA, 20 bp, synthetic construct
  source 1..20: mol_type = other DNA
tttgttgctactgcaaatga

SEQ ID NO: 9769 - DNA, 20 bp, synthetic construct
  source 1..20: mol_type = other DNA
attccatcatatcgagcgcg

SEQ ID NO: 9770 - DNA, 20 bp, synthetic construct
  source 1..20: mol_type = other DNA
acatattattgaacggtccg

SEQ ID NO: 9771 - DNA, 20 bp, synthetic construct
  source 1..20: mol_type = other DNA
agcgccattctccatgtcgc

SEQ ID NO: 9772 - DNA, 20 bp, synthetic construct
  source 1..20: mol_type = other DNA
ttctaggcagctaagccctg

SEQ ID NO: 9773 - DNA, 20 bp, synthetic construct
  source 1..20: mol_type = other DNA
cgaaggtagtgctgaatccc

SEQ ID NO: 9774 - DNA, 20 bp, synthetic construct
  source 1..20: mol_type = other DNA
catgcgatgttaatagttct

SEQ ID NO: 9775 - DNA, 20 bp, synthetic construct
  source 1..20: mol_type = other DNA
ggcaccgtgtatatagtaac

SEQ ID NO: 9776 - DNA, 20 bp, synthetic construct
  source 1..20: mol_type = other DNA
atatgcacagctcgaccgag

SEQ ID NO: 9777 - DNA, 20 bp, synthetic construct
  source 1..20: mol_type = other DNA
tcacactctccctgggagtt

SEQ ID NO: 9778 - DNA, 20 bp, synthetic construct
  source 1..20: mol_type = other DNA
gttaaattcttgggtcatgg

SEQ ID NO: 9779 - DNA, 20 bp, synthetic construct
  source 1..20: mol_type = other DNA
gctgtatgtccacctaaaca

SEQ ID NO: 9780 - DNA, 20 bp, synthetic construct
  source 1..20: mol_type = other DNA
ccgaaatcaggcagccaaat

SEQ ID NO: 9781 - DNA, 20 bp, synthetic construct
  source 1..20: mol_type = other DNA
ggaacgacgctacctttaat

SEQ ID NO: 9782 - DNA, 20 bp, synthetic construct
  source 1..20: mol_type = other DNA
cacgtgctatatgctatgct

SEQ ID NO: 9783 - DNA, 20 bp, synthetic construct
  source 1..20: mol_type = other DNA
ctctattcactcatacgtga

SEQ ID NO: 9784 - DNA, 20 bp, synthetic construct
  source 1..20: mol_type = other DNA
tacgctaacggaccgggctc

SEQ ID NO: 9785 - DNA, 20 bp, synthetic construct
  source 1..20: mol_type = other DNA
tcgagacgctgtgcttcaag

SEQ ID NO: 9786 - DNA, 20 bp, synthetic construct
  source 1..20: mol_type = other DNA
gcgatcgcgaatgttataaa

SEQ ID NO: 9787 - DNA, 20 bp, synthetic construct
  source 1..20: mol_type = other DNA
agttaggtgcttaactctta

SEQ ID NO: 9788 - DNA, 20 bp, synthetic construct
  source 1..20: mol_type = other DNA
tcgacttgaggtgcgtattt

SEQ ID NO: 9789 - DNA, 20 bp, synthetic construct
  source 1..20: mol_type = other DNA
cagcgcaaatgctgtccgcg

SEQ ID NO: 9790 - DNA, 20 bp, synthetic construct
  source 1..20: mol_type = other DNA
caagaaagaatctgcagcta

SEQ ID NO: 9791 - DNA, 20 bp, synthetic construct
  source 1..20: mol_type = other DNA
caacgaagattgcacccgag

SEQ ID NO: 9792 - DNA, 20 bp, synthetic construct
  source 1..20: mol_type = other DNA
acacagataacgcgctagcg

SEQ ID NO: 9793 - DNA, 20 bp, synthetic construct
  source 1..20: mol_type = other DNA
acgtttgcggccttaaggaa

SEQ ID NO: 9794 - DNA, 20 bp, synthetic construct
  source 1..20: mol_type = other DNA
ggtcacccggtttccgatga

SEQ ID NO: 9795 - DNA, 20 bp, synthetic construct
  source 1..20: mol_type = other DNA
catactagctatcccgaggc

SEQ ID NO: 9796 - DNA, 20 bp, synthetic construct
  source 1..20: mol_type = other DNA
gggtgtgaacttgaatccac

SEQ ID NO: 9797 - DNA, 20 bp, synthetic construct
  source 1..20: mol_type = other DNA
ggtcggtactcaaggaaatt

SEQ ID NO: 9798 - DNA, 20 bp, synthetic construct
  source 1..20: mol_type = other DNA
gagcgcgatagtagatcgcc

SEQ ID NO: 9799 - DNA, 20 bp, synthetic construct
  source 1..20: mol_type = other DNA
catgctttgagacctcttcg

SEQ ID NO: 9800 - DNA, 20 bp, synthetic construct
  source 1..20: mol_type = other DNA
ccatatcggacttcttcacc

SEQ ID NO: 9801 - DNA, 20 bp, synthetic construct
  source 1..20: mol_type = other DNA
ttgtatgttgaggctaagag

SEQ ID NO: 9802 - DNA, 20 bp, synthetic construct
  source 1..20: mol_type = other DNA
cctgacagattcggttgagg

SEQ ID NO: 9803 - DNA, 20 bp, synthetic construct
  source 1..20: mol_type = other DNA
agatgtaccggagagtccat

SEQ ID NO: 9804 - DNA, 20 bp, synthetic construct
  source 1..20: mol_type = other DNA
tgatcagcagcggacgagcc

SEQ ID NO: 9805 - DNA, 20 bp, synthetic construct
  source 1..20: mol_type = other DNA
aatgttggagcctgaagctc

SEQ ID NO: 9806 - DNA, 20 bp, synthetic construct
  source 1..20: mol_type = other DNA
aagaagtgcgtgtactcatc

SEQ ID NO: 9807 - DNA, 20 bp, synthetic construct
  source 1..20: mol_type = other DNA
gtcatttgtacctcacgctg

SEQ ID NO: 9808 - DNA, 20 bp, synthetic construct
  source 1..20: mol_type = other DNA
tctattaagaacctcggcgc

SEQ ID NO: 9809 - DNA, 20 bp, synthetic construct
  source 1..20: mol_type = other DNA
cagggtgttgaaacagtgac

SEQ ID NO: 9810 - DNA, 20 bp, synthetic construct
  source 1..20: mol_type = other DNA
cagcacgtgatattgttaaa

SEQ ID NO: 9811 - DNA, 20 bp, synthetic construct
  source 1..20: mol_type = other DNA
gtttaacgacccgtaaggaa

SEQ ID NO: 9812 - DNA, 20 bp, synthetic construct
  source 1..20: mol_type = other DNA
cttaacgatggttagatacg

SEQ ID NO: 9813 - DNA, 20 bp, synthetic construct
  source 1..20: mol_type = other DNA
cgaacgtgagcgagggattt

SEQ ID NO: 9814 - DNA, 20 bp, synthetic construct
  source 1..20: mol_type = other DNA
cctgtatactcagcggtttg

SEQ ID NO: 9815 - DNA, 20 bp, synthetic construct
  source 1..20: mol_type = other DNA
acattcccttcgtgccggat

SEQ ID NO: 9816 - DNA, 20 bp, synthetic construct
  source 1..20: mol_type = other DNA
cccatgagtctacagaggct

SEQ ID NO: 9817 - DNA, 20 bp, synthetic construct
  source 1..20: mol_type = other DNA
ttataggacgtcgtccgtat

SEQ ID NO: 9818 - DNA, 20 bp, synthetic construct
  source 1..20: mol_type = other DNA
ctgcacctagtctttgcaaa

SEQ ID NO: 9819 - DNA, 20 bp, synthetic construct
  source 1..20: mol_type = other DNA
agatatgttccgcgtgccta

SEQ ID NO: 9820 - DNA, 20 bp, synthetic construct
  source 1..20: mol_type = other DNA
ctgtgactattcgcttcgcg

SEQ ID NO: 9821 - DNA, 20 bp, synthetic construct
  source 1..20: mol_type = other DNA
atggtgtccttacgcggccg

SEQ ID NO: 9822 - DNA, 20 bp, synthetic construct
  source 1..20: mol_type = other DNA
gggaggcgtatcacacggca

SEQ ID NO: 9823 - DNA, 20 bp, synthetic construct
  source 1..20: mol_type = other DNA
cgatagcatcgtcttgactc

SEQ ID NO: 9824 - DNA, 20 bp, synthetic construct
  source 1..20: mol_type = other DNA
cttcgctgattcgatcaagt

SEQ ID NO: 9825 - DNA, 20 bp, synthetic construct
  source 1..20: mol_type = other DNA
agcgcgtcgtagatagcaaa

SEQ ID NO: 9826 - DNA, 20 bp, synthetic construct
  source 1..20: mol_type = other DNA
cctccgagggtgacgagtag

SEQ ID NO: 9827 - DNA, 20 bp, synthetic construct
  source 1..20: mol_type = other DNA
ctcaggcgatcttcatacct

SEQ ID NO: 9828 - DNA, 20 bp, synthetic construct
  source 1..20: mol_type = other DNA
gatacagttctgtcgtcaag

SEQ ID NO: 9829 - DNA, 20 bp, synthetic construct
  source 1..20: mol_type = other DNA
ttggtaagtgattacccgca

SEQ ID NO: 9830 - DNA, 20 bp, synthetic construct
  source 1..20: mol_type = other DNA
gatgctacaaccggtcctgt

SEQ ID NO: 9831 - DNA, 20 bp, synthetic construct
  source 1..20: mol_type = other DNA
caagcatgctcaaacgggag

SEQ ID NO: 9832 - DNA, 20 bp, synthetic construct
  source 1..20: mol_type = other DNA
ccttcgtctcccacacatcg

SEQ ID NO: 9833 - DNA, 20 bp, synthetic construct
  source 1..20: mol_type = other DNA
gtctctgaggctgcaaagaa

SEQ ID NO: 9834 - DNA, 20 bp, synthetic construct
  source 1..20: mol_type = other DNA
attgattgccaaagctgcgc

SEQ ID NO: 9835 - DNA, 20 bp, synthetic construct
  source 1..20: mol_type = other DNA
cctccacgcaagacagaccg

SEQ ID NO: 9836 - DNA, 20 bp, synthetic construct
  source 1..20: mol_type = other DNA
ggcgttacctggttggtatc

SEQ ID NO: 9837 - DNA, 20 bp, synthetic construct
  source 1..20: mol_type = other DNA
agaattgccgtatctactcc

SEQ ID NO: 9838 - DNA, 20 bp, synthetic construct
  source 1..20: mol_type = other DNA
cgacatttcccgtaccgcag

SEQ ID NO: 9839 - DNA, 20 bp, synthetic construct
  source 1..20: mol_type = other DNA
ggtagagaatgagagaaggg

SEQ ID NO: 9840 - DNA, 20 bp, synthetic construct
  source 1..20: mol_type = other DNA
ttcaagtactgaagtcaagc

SEQ ID NO: 9841 - DNA, 20 bp, synthetic construct
  source 1..20: mol_type = other DNA
gaatgtagcgcttagctggg

SEQ ID NO: 9842 - DNA, 20 bp, synthetic construct
  source 1..20: mol_type = other DNA
gaggtatatcaagtctccca

SEQ ID NO: 9843 - DNA, 20 bp, synthetic construct
  source 1..20: mol_type = other DNA
aagcctagaagctgcatcag

SEQ ID NO: 9844 - DNA, 20 bp, synthetic construct
  source 1..20: mol_type = other DNA
catgcgacgaagttggtatt

SEQ ID NO: 9845 - DNA, 20 bp, synthetic construct
  source 1..20: mol_type = other DNA
aatggcttggccctggcgta

SEQ ID NO: 9846 - DNA, 20 bp, synthetic construct
  source 1..20: mol_type = other DNA
acggacaaccgccatccgga

SEQ ID NO: 9847 - DNA, 20 bp, synthetic construct
  source 1..20: mol_type = other DNA
cggtgacaatcactagaacc

SEQ ID NO: 9848 - DNA, 20 bp, synthetic construct
  source 1..20: mol_type = other DNA
atcctctttaatgtcgggtt

SEQ ID NO: 9849 - DNA, 20 bp, synthetic construct
  source 1..20: mol_type = other DNA
tgcatgtctggcagcacatg

SEQ ID NO: 9850 - DNA, 20 bp, synthetic construct
  source 1..20: mol_type = other DNA
taagccgataatggtatacc

SEQ ID NO: 9851 - DNA, 20 bp, synthetic construct
  source 1..20: mol_type = other DNA
gagttcatgacacgcggcct

SEQ ID NO: 9852 - DNA, 20 bp, synthetic construct
  source 1..20: mol_type = other DNA
atccggcgctaaacagaaca

SEQ ID NO: 9853 - DNA, 20 bp, synthetic construct
  source 1..20: mol_type = other DNA
tgaactcaagtgggccagag

SEQ ID NO: 9854 - DNA, 20 bp, synthetic construct
  source 1..20: mol_type = other DNA
gttcgcttaaagcctaggca

SEQ ID NO: 9855 - DNA, 20 bp, synthetic construct
  source 1..20: mol_type = other DNA
atgagtgtgagtggtgccct

SEQ ID NO: 9856 - DNA, 20 bp, synthetic construct
  source 1..20: mol_type = other DNA
gaaagtaaacgggcgcaccg

SEQ ID NO: 9857 - DNA, 20 bp, synthetic construct
  source 1..20: mol_type = other DNA
tgtctgaagaggagtagtac

SEQ ID NO: 9858 - DNA, 20 bp, synthetic construct
  source 1..20: mol_type = other DNA
gatacgtctaggcgtttacc

SEQ ID NO: 9859 - DNA, 20 bp, synthetic construct
  source 1..20: mol_type = other DNA
gtttctcccacgcaggcctt

SEQ ID NO: 9860 - DNA, 20 bp, synthetic construct
  source 1..20: mol_type = other DNA
aatttgtctttccaccgagc

SEQ ID NO: 9861 - DNA, 20 bp, synthetic construct
  source 1..20: mol_type = other DNA
aaccgtgagtcgccgtgtgt

SEQ ID NO: 9862 - DNA, 20 bp, synthetic construct
  source 1..20: mol_type = other DNA
tctacagccattgggtcttc

SEQ ID NO: 9863 - DNA, 20 bp, synthetic construct
  source 1..20: mol_type = other DNA
aattcgagccttgtgcagac

SEQ ID NO: 9864 - DNA, 20 bp, synthetic construct
  source 1..20: mol_type = other DNA
gcggtacatatcgtaggagt

SEQ ID NO: 9865 - DNA, 20 bp, synthetic construct
  source 1..20: mol_type = other DNA
aatcttggtctgacccttaa

SEQ ID NO: 9866 - DNA, 20 bp, synthetic construct
  source 1..20: mol_type = other DNA
gcgttgtgacgtagtaggaa

SEQ ID NO: 9867 - DNA, 20 bp, synthetic construct
  source 1..20: mol_type = other DNA
cactatgctttgcacaacga

SEQ ID NO: 9868 - DNA, 20 bp, synthetic construct
  source 1..20: mol_type = other DNA
ttgtactgagtgtcaacttt

SEQ ID NO: 9869 - DNA, 20 bp, synthetic construct
  source 1..20: mol_type = other DNA
actgtctctcggctgattat

SEQ ID NO: 9870 - DNA, 20 bp, synthetic construct
  source 1..20: mol_type = other DNA
tgaatatcgcaaatatgccc

SEQ ID NO: 9871 - DNA, 20 bp, synthetic construct
  source 1..20: mol_type = other DNA
gaatcattaccatggagcag

SEQ ID NO: 9872 - DNA, 20 bp, synthetic construct
  source 1..20: mol_type = other DNA
tgagcccgagtgattccctg

SEQ ID NO: 9873 - DNA, 20 bp, synthetic construct
  source 1..20: mol_type = other DNA
tggacacgatccagtaccgt

SEQ ID NO: 9874 - DNA, 20 bp, synthetic construct
  source 1..20: mol_type = other DNA
tctatgcacctgaatattga

SEQ ID NO: 9875 - DNA, 20 bp, synthetic construct
  source 1..20: mol_type = other DNA
ttacacctataacggacaaa

SEQ ID NO: 9876 - DNA, 20 bp, synthetic construct
  source 1..20: mol_type = other DNA
gtgttaggaattatgatgct

SEQ ID NO: 9877 - DNA, 20 bp, synthetic construct
  source 1..20: mol_type = other DNA
ttagtcgtcggatgtagctg

SEQ ID NO: 9878 - DNA, 20 bp, synthetic construct
  source 1..20: mol_type = other DNA
cgtgtaccattggtgctcac

SEQ ID NO: 9879 - DNA, 20 bp, synthetic construct
  source 1..20: mol_type = other DNA
agaccgctgtgcccagtggt

SEQ ID NO: 9880 - DNA, 20 bp, synthetic construct
  source 1..20: mol_type = other DNA
gtatcagttcagaggccgcc

SEQ ID NO: 9881 - DNA, 20 bp, synthetic construct
  source 1..20: mol_type = other DNA
cggtatgtcttagactgcta

SEQ ID NO: 9882 - DNA, 20 bp, synthetic construct
  source 1..20: mol_type = other DNA
tagctcggtgtgctcgcctt

SEQ ID NO: 9883 - DNA, 20 bp, synthetic construct
  source 1..20: mol_type = other DNA
actcggttccagtgcatacc

SEQ ID NO: 9884 - DNA, 20 bp, synthetic construct
  source 1..20: mol_type = other DNA
gatgaaatagggataaggcc

SEQ ID NO: 9885 - DNA, 20 bp, synthetic construct
  source 1..20: mol_type = other DNA
gtactgtcgtcagtttgtct

SEQ ID NO: 9886 - DNA, 20 bp, synthetic construct
  source 1..20: mol_type = other DNA
gagatcccgtatcgcacaga

SEQ ID NO: 9887 - DNA, 20 bp, synthetic construct
  source 1..20: mol_type = other DNA
cactttcaactactctacag

SEQ ID NO: 9888 - DNA, 20 bp, synthetic construct
  source 1..20: mol_type = other DNA
atcagcatgtgctcagtcat

SEQ ID NO: 9889 - DNA, 20 bp, synthetic construct
  source 1..20: mol_type = other DNA
gtggtttgcatgcgttcatg

SEQ ID NO: 9890 - DNA, 20 bp, synthetic construct
  source 1..20: mol_type = other DNA
gcgctattacgggactttgt

SEQ ID NO: 9891 - DNA, 20 bp, synthetic construct
  source 1..20: mol_type = other DNA
tcacaagttgtccgtgtaga

SEQ ID NO: 9892 - DNA, 20 bp, synthetic construct
  source 1..20: mol_type = other DNA
gtcattcgcctatctatgat

SEQ ID NO: 9893 - DNA, 20 bp, synthetic construct
  source 1..20: mol_type = other DNA
ctaaggatccgcggtagtac

SEQ ID NO: 9894 - DNA, 20 bp, synthetic construct
  source 1..20: mol_type = other DNA
ccaattggacgttattagga

SEQ ID NO: 9895 - DNA, 20 bp, synthetic construct
  source 1..20: mol_type = other DNA
acgtaccaggtcaatggacc

SEQ ID NO: 9896 - DNA, 20 bp, synthetic construct
  source 1..20: mol_type = other DNA
cggaggctatatgggttctt

SEQ ID NO: 9897 - DNA, 20 bp, synthetic construct
  source 1..20: mol_type = other DNA
ggcaactcgatcagagttaa

SEQ ID NO: 9898 - DNA, 20 bp, synthetic construct
  source 1..20: mol_type = other DNA
aacgctgcagcaagtatcca

SEQ ID NO: 9899 - DNA, 20 bp, synthetic construct
  source 1..20: mol_type = other DNA
cgttactttgttgatcggcg

SEQ ID NO: 9900 - DNA, 20 bp, synthetic construct
  source 1..20: mol_type = other DNA
tgcgattaactttcttggat

SEQ ID NO: 9901 - DNA, 20 bp, synthetic construct
  source 1..20: mol_type = other DNA
taactcagtatacccactgc

SEQ ID NO: 9902 - DNA, 20 bp, synthetic construct
  source 1..20: mol_type = other DNA
agcaaccggtgtacctgacc

SEQ ID NO: 9903 - DNA, 20 bp, synthetic construct
  source 1..20: mol_type = other DNA
gtcctcctggcagaaggtcc

SEQ ID NO: 9904 - DNA, 20 bp, synthetic construct
  source 1..20: mol_type = other DNA
agaacagcagcagacgtaag

SEQ ID NO: 9905 - DNA, 20 bp, synthetic construct
  source 1..20: mol_type = other DNA
gcatccggatactcaacctc

SEQ ID NO: 9906 - DNA, 20 bp, synthetic construct
  source 1..20: mol_type = other DNA
aacgggctaaaccagactga

SEQ ID NO: 9907 - DNA, 20 bp, synthetic construct
  source 1..20: mol_type = other DNA
cgctatctgcgatgagccga

SEQ ID NO: 9908 - DNA, 20 bp, synthetic construct
  source 1..20: mol_type = other DNA
tatacaccagaatgacctcc

SEQ ID NO: 9909 - DNA, 20 bp, synthetic construct
  source 1..20: mol_type = other DNA
ccgaggaatctcggcagcgt

SEQ ID NO: 9910 - DNA, 20 bp, synthetic construct
  source 1..20: mol_type = other DNA
caagcaaatgacacgttact

SEQ ID NO: 9911 - DNA, 20 bp, synthetic construct
  source 1..20: mol_type = other DNA
gtcacttattaacacagaac

SEQ ID NO: 9912 - DNA, 20 bp, synthetic construct
  source 1..20: mol_type = other DNA
tcgtcgggcactgcttcgga

SEQ ID NO: 9913 - DNA, 20 bp, synthetic construct
  source 1..20: mol_type = other DNA
tttcatttcatctggccgct

SEQ ID NO: 9914 - DNA, 20 bp, synthetic construct
  source 1..20: mol_type = other DNA
gccatcgccagcataatgtc

SEQ ID NO: 9915 - DNA, 20 bp, synthetic construct
  source 1..20: mol_type = other DNA
cagcacagttatatgacttt

SEQ ID NO: 9916 - DNA, 20 bp, synthetic construct
  source 1..20: mol_type = other DNA
atctacattaccacaatggc

SEQ ID NO: 9917 - DNA, 20 bp, synthetic construct
  source 1..20: mol_type = other DNA
tactgactagtgggaccgtt

SEQ ID NO: 9918 - DNA, 20 bp, synthetic construct
  source 1..20: mol_type = other DNA
tgaagttgcaactcatcgcg

SEQ ID NO: 9919 - DNA, 20 bp, synthetic construct
  source 1..20: mol_type = other DNA
tggcaatgcagcggaggcaa

SEQ ID NO: 9920 - DNA, 20 bp, synthetic construct
  source 1..20: mol_type = other DNA
gcttacgtccggacgacaca

SEQ ID NO: 9921 - DNA, 20 bp, synthetic construct
  source 1..20: mol_type = other DNA
gccgtagcatatacaccctg

SEQ ID NO: 9922 - DNA, 20 bp, synthetic construct
  source 1..20: mol_type = other DNA
acttagggtcccgagtgctt

SEQ ID NO: 9923 - DNA, 20 bp, synthetic construct
  source 1..20: mol_type = other DNA
taagttatacggccgcccac

SEQ ID NO: 9924 - DNA, 20 bp, synthetic construct
  source 1..20: mol_type = other DNA
ggatacgggtatacgggctg

SEQ ID NO: 9925 - DNA, 20 bp, synthetic construct
  source 1..20: mol_type = other DNA
ccactaacagaccattgaat

SEQ ID NO: 9926 - DNA, 20 bp, synthetic construct
  source 1..20: mol_type = other DNA
ctaatccgctctctacgttc

SEQ ID NO: 9927 - DNA, 20 bp, synthetic construct
  source 1..20: mol_type = other DNA
cacgcggttgatatactggt

SEQ ID NO: 9928 - DNA, 20 bp, synthetic construct
  source 1..20: mol_type = other DNA
gtgcaccttgtctgcaaggc

SEQ ID NO: 9929 - DNA, 20 bp, synthetic construct
  source 1..20: mol_type = other DNA
ctattcatcatccagcattg

SEQ ID NO: 9930 - DNA, 20 bp, synthetic construct
  source 1..20: mol_type = other DNA
acatgcagtgtgatccagcg

SEQ ID NO: 9931 - DNA, 20 bp, synthetic construct
  source 1..20: mol_type = other DNA
gggcgcatccactagataat

SEQ ID NO: 9932 - DNA, 20 bp, synthetic construct
  source 1..20: mol_type = other DNA
gacgatctggtggaacatca

SEQ ID NO: 9933 - DNA, 20 bp, synthetic construct
  source 1..20: mol_type = other DNA
tcggatgtcgcctaagcgtt

SEQ ID NO: 9934 - DNA, 20 bp, synthetic construct
  source 1..20: mol_type = other DNA
cggtgatcctctcttgtcta

SEQ ID NO: 9935 - DNA, 20 bp, synthetic construct
  source 1..20: mol_type = other DNA
tggatgtcgtacaggccagg

SEQ ID NO: 9936 - DNA, 20 bp, synthetic construct
  source 1..20: mol_type = other DNA
gggagccaagtcggactttc

SEQ ID NO: 9937 - DNA, 20 bp, synthetic construct
  source 1..20: mol_type = other DNA
tcgctagggacatacacggt

SEQ ID NO: 9938 - DNA, 20 bp, synthetic construct
  source 1..20: mol_type = other DNA
ccatggaatgttataacatt

SEQ ID NO: 9939 - DNA, 20 bp, synthetic construct
  source 1..20: mol_type = other DNA
gctgtacctagtgcaatctt

SEQ ID NO: 9940 - DNA, 20 bp, synthetic construct
  source 1..20: mol_type = other DNA
acaaagatactggttaccca

SEQ ID NO: 9941 - DNA, 20 bp, synthetic construct
  source 1..20: mol_type = other DNA
tcctggacgttagcctacag

SEQ ID NO: 9942 - DNA, 20 bp, synthetic construct
  source 1..20: mol_type = other DNA
aagtgaaccaccgtgacaat

SEQ ID NO: 9943 - DNA, 20 bp, synthetic construct
  source 1..20: mol_type = other DNA
gaagatattatgaaccgctt

SEQ ID NO: 9944 - DNA, 20 bp, synthetic construct
  source 1..20: mol_type = other DNA
gcttgtgctctattcgatat

SEQ ID NO: 9945 - DNA, 20 bp, synthetic construct
  source 1..20: mol_type = other DNA
ttaggttagcaactcgatag

SEQ ID NO: 9946 - DNA, 20 bp, synthetic construct
  source 1..20: mol_type = other DNA
aacaccgaacagaagttggt

SEQ ID NO: 9947 - DNA, 20 bp, synthetic construct
  source 1..20: mol_type = other DNA
ttattccctagacccgattg

SEQ ID NO: 9948 - DNA, 20 bp, synthetic construct
  source 1..20: mol_type = other DNA
gcggcccatcacgtataagt

SEQ ID NO: 9949 - DNA, 20 bp, synthetic construct
  source 1..20: mol_type = other DNA
taatccactctcagtgacct

SEQ ID NO: 9950 - DNA, 20 bp, synthetic construct
  source 1..20: mol_type = other DNA
acgccctggtaccaaagcaa

SEQ ID NO: 9951 - DNA, 20 bp, synthetic construct
  source 1..20: mol_type = other DNA
gagtgttactccacggcgtt

SEQ ID NO: 9952 - DNA, 20 bp, synthetic construct
  source 1..20: mol_type = other DNA
tttaaacaggccgatccgta

SEQ ID NO: 9953 - DNA, 20 bp, synthetic construct
  source 1..20: mol_type = other DNA
gcttggctacaagaataacg

SEQ ID NO: 9954 - DNA, 20 bp, synthetic construct
  source 1..20: mol_type = other DNA
gctggcagcattgccatacg

SEQ ID NO: 9955 - DNA, 20 bp, synthetic construct
  source 1..20: mol_type = other DNA
ggccttctcgtgaaggtgca

SEQ ID NO: 9956 - DNA, 20 bp, synthetic construct
  source 1..20: mol_type = other DNA
tcaaatcttagtaaacaggg

SEQ ID NO: 9957 - DNA, 20 bp, synthetic construct
  source 1..20: mol_type = other DNA
taatcatgtatgccaatgcc

SEQ ID NO: 9958 - DNA, 20 bp, synthetic construct
  source 1..20: mol_type = other DNA
ctggagtcgctaaggatgaa

SEQ ID NO: 9959 - DNA, 20 bp, synthetic construct
  source 1..20: mol_type = other DNA
ttcagcgtcatcatgctgat

SEQ ID NO: 9960 - DNA, 20 bp, synthetic construct
  source 1..20: mol_type = other DNA
tttcctacgaagccacgatg

SEQ ID NO: 9961 - DNA, 20 bp, synthetic construct
  source 1..20: mol_type = other DNA
gtcatgttgccagtgctcgg

SEQ ID NO: 9962 - DNA, 20 bp, synthetic construct
  source 1..20: mol_type = other DNA
aattgcatgggtgggctaca

SEQ ID NO: 9963 - DNA, 20 bp, synthetic construct
  source 1..20: mol_type = other DNA
aattacgtacttcaccatct

SEQ ID NO: 9964 - DNA, 20 bp, synthetic construct
  source 1..20: mol_type = other DNA
ggtccactcattaacaaccg

SEQ ID NO: 9965 - DNA, 20 bp, synthetic construct
  source 1..20: mol_type = other DNA
ctttagagcatgatgtccat

SEQ ID NO: 9966 - DNA, 20 bp, synthetic construct
  source 1..20: mol_type = other DNA
agtaaagaccaccttatact

SEQ ID NO: 9967 - DNA, 20 bp, synthetic construct
  source 1..20: mol_type = other DNA
cgcgagaaaggaatggtaat

SEQ ID NO: 9968 - DNA, 20 bp, synthetic construct
  source 1..20: mol_type = other DNA
taagccatatgtcaggaggc

SEQ ID NO: 9969 - DNA, 20 bp, synthetic construct
  source 1..20: mol_type = other DNA
tgaggagagatttccctatc

SEQ ID NO: 9970 - DNA, 20 bp, synthetic construct
  source 1..20: mol_type = other DNA
ctaagtttaaagagtccgtc

SEQ ID NO: 9971 - DNA, 20 bp, synthetic construct
  source 1..20: mol_type = other DNA
tctgctcctcgtggcattac

SEQ ID NO: 9972 - DNA, 20 bp, synthetic construct
  source 1..20: mol_type = other DNA
cctgctaatagaaaggtctt

SEQ ID NO: 9973 - DNA, 20 bp, synthetic construct
  source 1..20: mol_type = other DNA
gtcaatctttcagggtacta

SEQ ID NO: 9974 - DNA, 20 bp, synthetic construct
  source 1..20: mol_type = other DNA
gaaacacgtaacactcgttg

SEQ ID NO: 9975 - DNA, 20 bp, synthetic construct
  source 1..20: mol_type = other DNA
tccgaaacacggacacctgt

SEQ ID NO: 9976 - DNA, 20 bp, synthetic construct
  source 1..20: mol_type = other DNA
gtcctgaactatcacctgaa

SEQ ID NO: 9977 - DNA, 20 bp, synthetic construct
  source 1..20: mol_type = other DNA
ctgcagatcataaggcagtc

SEQ ID NO: 9978 - DNA, 20 bp, synthetic construct
  source 1..20: mol_type = other DNA
tcctaaggcggtcccatagc

SEQ ID NO: 9979 - DNA, 20 bp, synthetic construct
  source 1..20: mol_type = other DNA
ccgcaatatggtccatccga

SEQ ID NO: 9980 - DNA, 20 bp, synthetic construct
  source 1..20: mol_type = other DNA
cccaattgttatcaccagtg

SEQ ID NO: 9981 - DNA, 20 bp, synthetic construct
  source 1..20: mol_type = other DNA
attaatttcctggagtatga

SEQ ID NO: 9982 - DNA, 20 bp, synthetic construct
  source 1..20: mol_type = other DNA
aacaagtccgagatggagga

SEQ ID NO: 9983 - DNA, 20 bp, synthetic construct
  source 1..20: mol_type = other DNA
gagattgcgcaacttaagat

SEQ ID NO: 9984 - DNA, 20 bp, synthetic construct
  source 1..20: mol_type = other DNA
ctaaacgtgggccaggagca

SEQ ID NO: 9985 - DNA, 20 bp, synthetic construct
  source 1..20: mol_type = other DNA
gatcctaggtcgaacactag

SEQ ID NO: 9986 - DNA, 20 bp, synthetic construct
  source 1..20: mol_type = other DNA
aacacttatcgccacgcacg

SEQ ID NO: 9987 - DNA, 20 bp, synthetic construct
  source 1..20: mol_type = other DNA
acttgtacccgcttctttgc

SEQ ID NO: 9988 - DNA, 20 bp, synthetic construct
  source 1..20: mol_type = other DNA
cgttctcgttacccggcgtc

SEQ ID NO: 9989 - DNA, 20 bp, synthetic construct
  source 1..20: mol_type = other DNA
gtaatcgttaacagcgctat

SEQ ID NO: 9990 - DNA, 20 bp, synthetic construct
  source 1..20: mol_type = other DNA
gtcagtactagttaagtacg

SEQ ID NO: 9991 - DNA, 20 bp, synthetic construct
  source 1..20: mol_type = other DNA
gtaaaggattatgagcggtc

SEQ ID NO: 9992 - DNA, 20 bp, synthetic construct
  source 1..20: mol_type = other DNA
atgactactactagcctacc

SEQ ID NO: 9993 - DNA, 20 bp, synthetic construct
  source 1..20: mol_type = other DNA
ttcgcaggtactgacaccat

SEQ ID NO: 9994 - DNA, 20 bp, synthetic construct
  source 1..20: mol_type = other DNA
ttatctggactctagcctga

SEQ ID NO: 9995 - DNA, 20 bp, synthetic construct
  source 1..20: mol_type = other DNA
ctgaatagcttacacatgga

SEQ ID NO: 9996 - DNA, 20 bp, synthetic construct
  source 1..20: mol_type = other DNA
tcaccttgaaactgtttaga

SEQ ID NO: 9997 - DNA, 20 bp, synthetic construct
  source 1..20: mol_type = other DNA
gtaccagggaccagtgcacg

SEQ ID NO: 9998 - DNA, 20 bp, synthetic construct
  source 1..20: mol_type = other DNA
cccactgctatcagtttaga

SEQ ID NO: 9999 - DNA, 20 bp, synthetic construct
  source 1..20: mol_type = other DNA
ctgttaccttattccacagg

SEQ ID NO: 10000 - DNA, 20 bp, synthetic construct
  source 1..20: mol_type = other DNA
gtcgaaaggtaattgcctag

SEQ ID NO: 10001 - DNA, 20 bp, synthetic construct
  source 1..20: mol_type = other DNA
cgcttacgagggtgaaaggc

SEQ ID NO: 10002 - DNA, 20 bp, synthetic construct
  source 1..20: mol_type = other DNA
tgacccgaacactgaccctg

SEQ ID NO: 10003 - DNA, 20 bp, synthetic construct
  source 1..20: mol_type = other DNA
catcaatcattgcactgcct

SEQ ID NO: 10004 - DNA, 20 bp, synthetic construct
  source 1..20: mol_type = other DNA
acctctgggagcgtggtagg

SEQ ID NO: 10005 - DNA, 20 bp, synthetic construct
  source 1..20: mol_type = other DNA
ttgtctcagtgcgagccaag

SEQ ID NO: 10006 - DNA, 20 bp, synthetic construct
  source 1..20: mol_type = other DNA
gtgatgtgtctaaacctttc

SEQ ID NO: 10007 - DNA, 20 bp, synthetic construct
  source 1..20: mol_type = other DNA
aatccattagagcttgtgta

SEQ ID NO: 10008 - DNA, 20 bp, synthetic construct
  source 1..20: mol_type = other DNA
acggagtgccttattgatcg

SEQ ID NO: 10009 - DNA, 20 bp, synthetic construct
  source 1..20: mol_type = other DNA
caactccaatgctaggaagt

SEQ ID NO: 10010 - DNA, 20 bp, synthetic construct
  source 1..20: mol_type = other DNA
tcctatgcagtttctttacc

SEQ ID NO: 10011 - DNA, 20 bp, synthetic construct
  source 1..20: mol_type = other DNA
aagtgagcggtgcgatcaag

SEQ ID NO: 10012 - DNA, 20 bp, synthetic construct
  source 1..20: mol_type = other DNA
ccagaaattacggtatatca

SEQ ID NO: 10013 - DNA, 20 bp, synthetic construct
  source 1..20: mol_type = other DNA
ctcaagctcccttgacggat

SEQ ID NO: 10014 - DNA, 20 bp, synthetic construct
  source 1..20: mol_type = other DNA
ttattgggtgtgcataacac

SEQ ID NO: 10015 - DNA, 20 bp, synthetic construct
  source 1..20: mol_type = other DNA
atgactatgtgccctatggc

SEQ ID NO: 10016 - DNA, 20 bp, synthetic construct
  source 1..20: mol_type = other DNA
ccgtacagtacgcttcgcct

SEQ ID NO: 10017 - DNA, 20 bp, synthetic construct
  source 1..20: mol_type = other DNA
catagtatgcccggatactt

SEQ ID NO: 10018 - DNA, 20 bp, synthetic construct
  source 1..20: mol_type = other DNA
gactatatgggctccgtccc

SEQ ID NO: 10019 - DNA, 20 bp, synthetic construct
  source 1..20: mol_type = other DNA
tacgacaagatgggattcga

SEQ ID NO: 10020 - DNA, 20 bp, synthetic construct
  source 1..20: mol_type = other DNA
ggacctaccgctgtcccatg

SEQ ID NO: 10021 - DNA, 20 bp, synthetic construct
  source 1..20: mol_type = other DNA
tacatacagggcttgagcta

SEQ ID NO: 10022 - DNA, 20 bp, synthetic construct
  source 1..20: mol_type = other DNA
ggtagctgcgggaccttgat

SEQ ID NO: 10023 - DNA, 20 bp, synthetic construct
  source 1..20: mol_type = other DNA
aagcggactgcggctgacac

SEQ ID NO: 10024 - DNA, 20 bp, synthetic construct
  source 1..20: mol_type = other DNA
ttagcagcgaatacggcgta

SEQ ID NO: 10025 - DNA, 20 bp, synthetic construct
  source 1..20: mol_type = other DNA
taggacctactatcatccca

SEQ ID NO: 10026 - DNA, 20 bp, synthetic construct
  source 1..20: mol_type = other DNA
gaggcactgccgtgagtctg

SEQ ID NO: 10027 - DNA, 20 bp, synthetic construct
  source 1..20: mol_type = other DNA
ggatagtaaccaaacacatc

SEQ ID NO: 10028 - DNA, 20 bp, synthetic construct
  source 1..20: mol_type = other DNA
agccgccgataggagcgtat

SEQ ID NO: 10029 - DNA, 20 bp, synthetic construct
  source 1..20: mol_type = other DNA
taaacagctcagcggatcct

SEQ ID NO: 10030 - DNA, 20 bp, synthetic construct
  source 1..20: mol_type = other DNA
gttgcgatctgggagctcgc

SEQ ID NO: 10031 - DNA, 20 bp, synthetic construct
  source 1..20: mol_type = other DNA
cagcagctcattcagccaga

SEQ ID NO: 10032 - DNA, 20 bp, synthetic construct
  source 1..20: mol_type = other DNA
aagccgtattacctggcata

SEQ ID NO: 10033 - DNA, 20 bp, synthetic construct
  source 1..20: mol_type = other DNA
gcaaacgcccgctaacaacc

SEQ ID NO: 10034 - DNA, 20 bp, synthetic construct
  source 1..20: mol_type = other DNA
cgaatacccgacagcggcga

SEQ ID NO: 10035 - DNA, 20 bp, synthetic construct
  source 1..20: mol_type = other DNA
accgactgtacagccgtctg

SEQ ID NO: 10036 - DNA, 20 bp, synthetic construct
  source 1..20: mol_type = other DNA
acgtgggagatgacagcgtg

SEQ ID NO: 10037 - DNA, 20 bp, synthetic construct
  source 1..20: mol_type = other DNA
gaggactttctcctggcaga

SEQ ID NO: 10038 - DNA, 20 bp, synthetic construct
  source 1..20: mol_type = other DNA
cgtcgaggtggctgagtgag

SEQ ID NO: 10039 - DNA, 20 bp, synthetic construct
  source 1..20: mol_type = other DNA
ctgaatccgctcaagattga

SEQ ID NO: 10040 - DNA, 20 bp, synthetic construct
  source 1..20: mol_type = other DNA
aatcattccgctccgccagc

SEQ ID NO: 10041 - DNA, 20 bp, synthetic construct
  source 1..20: mol_type = other DNA
atgcaaccgtccctgcgtgt

SEQ ID NO: 10042 - DNA, 20 bp, synthetic construct
  source 1..20: mol_type = other DNA
agcccaaccaccagaggatg

SEQ ID NO: 10043 - DNA, 20 bp, synthetic construct
  source 1..20: mol_type = other DNA
cggtcgtctttgaagtctgc

SEQ ID NO: 10044 - DNA, 20 bp, synthetic construct
  source 1..20: mol_type = other DNA
ctgggattcatagtgttcca

SEQ ID NO: 10045 - DNA, 20 bp, synthetic construct
  source 1..20: mol_type = other DNA
gcctcatctcctgccgatac

SEQ ID NO: 10046 - DNA, 20 bp, synthetic construct
  source 1..20: mol_type = other DNA
gcctaggtgtggtgtgccgt

SEQ ID NO: 10047 - DNA, 20 bp, synthetic construct
  source 1..20: mol_type = other DNA
actcgaatcctcagggaaga

SEQ ID NO: 10048 - DNA, 20 bp, synthetic construct
  source 1..20: mol_type = other DNA
tgcgcacagactatatggga

SEQ ID NO: 10049 - DNA, 20 bp, synthetic construct
  source 1..20: mol_type = other DNA
gctattaagactccgggtgc

SEQ ID NO: 10050 - DNA, 20 bp, synthetic construct
  source 1..20: mol_type = other DNA
ctaggaacacgactagagta

SEQ ID NO: 10051 - DNA, 20 bp, synthetic construct
  source 1..20: mol_type = other DNA
ggcaactagtaatgtgaata

SEQ ID NO: 10052 - DNA, 20 bp, synthetic construct
  source 1..20: mol_type = other DNA
gagcggctagccctgtgttt

SEQ ID NO: 10053 - DNA, 20 bp, synthetic construct
  source 1..20: mol_type = other DNA
gatacccgtggcttaagccg

SEQ ID NO: 10054 - DNA, 20 bp, synthetic construct
  source 1..20: mol_type = other DNA
acgagttgcaggacggtcac

SEQ ID NO: 10055 - DNA, 20 bp, synthetic construct
  source 1..20: mol_type = other DNA
gaccgtagttaatctgtcat

SEQ ID NO: 10056 - DNA, 20 bp, synthetic construct
  source 1..20: mol_type = other DNA
attacgcatggcggactgtc

SEQ ID NO: 10057 - DNA, 20 bp, synthetic construct
  source 1..20: mol_type = other DNA
ggtgacctgagatcgaatcg

SEQ ID NO: 10058 - DNA, 20 bp, synthetic construct
  source 1..20: mol_type = other DNA
ccgatcgatgacgtgtccgc

SEQ ID NO: 10059 - DNA, 20 bp, synthetic construct
  source 1..20: mol_type = other DNA
tccaagaccgggaaacagta

SEQ ID NO: 10060 - DNA, 20 bp, synthetic construct
  source 1..20: mol_type = other DNA
actgacgtgacgctggcgac

SEQ ID NO: 10061 - DNA, 20 bp, synthetic construct
  source 1..20: mol_type = other DNA
tgcgcaatatccaagacctg

SEQ ID NO: 10062 - DNA, 20 bp, synthetic construct
  source 1..20: mol_type = other DNA
ccagtcgttcgtataggtat

SEQ ID NO: 10063 - DNA, 20 bp, synthetic construct
  source 1..20: mol_type = other DNA
aatgcagttgttctaaagca

SEQ ID NO: 10064 - DNA, 20 bp, synthetic construct
  source 1..20: mol_type = other DNA
gttcacaaggttgtgtcaaa

SEQ ID NO: 10065 - DNA, 20 bp, synthetic construct
  source 1..20: mol_type = other DNA
agtatctctagctccagaca

SEQ ID NO: 10066 - DNA, 20 bp, synthetic construct
  source 1..20: mol_type = other DNA
atcaagccatatcaatctgg

SEQ ID NO: 10067 - DNA, 20 bp, synthetic construct
  source 1..20: mol_type = other DNA
cgcaatcacctctctttgcc

SEQ ID NO: 10068 - DNA, 20 bp, synthetic construct
  source 1..20: mol_type = other DNA
tctatatgctgtggtcccat

SEQ ID NO: 10069 - DNA, 20 bp, synthetic construct
  source 1..20: mol_type = other DNA
gacgcgtggtggtattggcc

SEQ ID NO: 10070 - DNA, 20 bp, synthetic construct
  source 1..20: mol_type = other DNA
tggttcatgagctggtacgg

SEQ ID NO: 10071 - DNA, 20 bp, synthetic construct
  source 1..20: mol_type = other DNA
cttggccgtcaagctcctta

SEQ ID NO: 10072 - DNA, 20 bp, synthetic construct
  source 1..20: mol_type = other DNA
ggtgtgcaatgttgtcgggc

SEQ ID NO: 10073 - DNA, 20 bp, synthetic construct
  source 1..20: mol_type = other DNA
ctgtccagcgcatgacttta

SEQ ID NO: 10074 - DNA, 20 bp, synthetic construct
  source 1..20: mol_type = other DNA
cgcattaatccagatgaagc

SEQ ID NO: 10075 - DNA, 20 bp, synthetic construct
  source 1..20: mol_type = other DNA
tttcgggattgactgacctc

SEQ ID NO: 10076 - DNA, 20 bp, synthetic construct
  source 1..20: mol_type = other DNA
gtgcggtgaacgagttggca

SEQ ID NO: 10077 - DNA, 20 bp, synthetic construct
  source 1..20: mol_type = other DNA
cgcgggtcgtcaaactcacg

SEQ ID NO: 10078 - DNA, 20 bp, synthetic construct
  source 1..20: mol_type = other DNA
cccgacttaattggcatgca

SEQ ID NO: 10079 - DNA, 20 bp, synthetic construct
  source 1..20: mol_type = other DNA
ccggaggtaagtgatacccg

SEQ ID NO: 10080 - DNA, 20 bp, synthetic construct
  source 1..20: mol_type = other DNA
aggatcgctgcaaactcgat

SEQ ID NO: 10081 - DNA, 20 bp, synthetic construct
  source 1..20: mol_type = other DNA
aacttcgtacggttcagtcc

SEQ ID NO: 10082 - DNA, 20 bp, synthetic construct
  source 1..20: mol_type = other DNA
tatcctaaccctctcgtgca

SEQ ID NO: 10083 - DNA, 20 bp, synthetic construct
  source 1..20: mol_type = other DNA
gatacgggcaaattcacaac

SEQ ID NO: 10084 - DNA, 20 bp, synthetic construct
  source 1..20: mol_type = other DNA
tcgagggagagataacgcat

SEQ ID NO: 10085 - DNA, 20 bp, synthetic construct
  source 1..20: mol_type = other DNA
cgtgactgtagtgccgatac

SEQ ID NO: 10086 - DNA, 20 bp, synthetic construct
  source 1..20: mol_type = other DNA
aacagcgacaaagctgcgca

SEQ ID NO: 10087 - DNA, 20 bp, synthetic construct
  source 1..20: mol_type = other DNA
cccacggtattcacaagtat

SEQ ID NO: 10088 - DNA, 20 bp, synthetic construct
  source 1..20: mol_type = other DNA
accagccgcaagtcgtgcac

SEQ ID NO: 10089 - DNA, 20 bp, synthetic construct
  source 1..20: mol_type = other DNA
gatcaatctgaagttctcca

SEQ ID NO: 10090 - DNA, 20 bp, synthetic construct
  source 1..20: mol_type = other DNA
gaataaacttcgaggctgag

SEQ ID NO: 10091 - DNA, 20 bp, synthetic construct
  source 1..20: mol_type = other DNA
ggctcacttgcagcctgatt

SEQ ID NO: 10092 - DNA, 20 bp, synthetic construct
  source 1..20: mol_type = other DNA
ttcgctgagtgctggattgg

SEQ ID NO: 10093 - DNA, 20 bp, synthetic construct
  source 1..20: mol_type = other DNA
ctgcgatgcacatcaaattg

SEQ ID NO: 10094 - DNA, 20 bp, synthetic construct
  source 1..20: mol_type = other DNA
accttcggagttgtatactc

SEQ ID NO: 10095 - DNA, 20 bp, synthetic construct
  source 1..20: mol_type = other DNA
agacgtgtttacctctggga

SEQ ID NO: 10096 - DNA, 20 bp, synthetic construct
  source 1..20: mol_type = other DNA
aaatcacgttccgggtgatg

SEQ ID NO: 10097 - DNA, 20 bp, synthetic construct
  source 1..20: mol_type = other DNA
tacaattagcgaacataatg

SEQ ID NO: 10098 - DNA, 20 bp, synthetic construct
  source 1..20: mol_type = other DNA
ccacaaggactgcattgtgc

SEQ ID NO: 10099 - DNA, 20 bp, synthetic construct
  source 1..20: mol_type = other DNA
cctcagtgtttctaaacgtt

SEQ ID NO: 10100 - DNA, 20 bp, synthetic construct
  source 1..20: mol_type = other DNA
tgagcctggcgaatgggcaa

SEQ ID NO: 10101 - DNA, 20 bp, synthetic construct
  source 1..20: mol_type = other DNA
gtatgcgataggacggatac

SEQ ID NO: 10102 - DNA, 20 bp, synthetic construct
  source 1..20: mol_type = other DNA
ttacccatgagaatgccatg

SEQ ID NO: 10103 - DNA, 20 bp, synthetic construct
  source 1..20: mol_type = other DNA
ccataagttgtgtagcgatg

SEQ ID NO: 10104 - DNA, 20 bp, synthetic construct
  source 1..20: mol_type = other DNA
caaatgcacttgcgtgaggg

SEQ ID NO: 10105 - DNA, 20 bp, synthetic construct
  source 1..20: mol_type = other DNA
aaccgtgcaaagaccacact

SEQ ID NO: 10106 - DNA, 20 bp, synthetic construct
  source 1..20: mol_type = other DNA
ggcttgcgtaccaccacttt

SEQ ID NO: 10107 - DNA, 20 bp, synthetic construct
  source 1..20: mol_type = other DNA
ttccaatgagcgcctcgact

SEQ ID NO: 10108 - DNA, 20 bp, synthetic construct
  source 1..20: mol_type = other DNA
cctcgcctacgctgatactt

SEQ ID NO: 10109 - DNA, 20 bp, synthetic construct
  source 1..20: mol_type = other DNA
ctctagtttgttgggcttaa

SEQ ID NO: 10110 - DNA, 20 bp, synthetic construct
  source 1..20: mol_type = other DNA
gtacattgcacccaaggcat

SEQ ID NO: 10111 - DNA, 20 bp, synthetic construct
  source 1..20: mol_type = other DNA
tgttggtgattaatcctgtg

SEQ ID NO: 10112 - DNA, 20 bp, synthetic construct
  source 1..20: mol_type = other DNA
acacactgtgagaaacgatt

SEQ ID NO: 10113 - DNA, 20 bp, synthetic construct
  source 1..20: mol_type = other DNA
aacgaaaccatttagggtca

SEQ ID NO: 10114 - DNA, 20 bp, synthetic construct
  source 1..20: mol_type = other DNA
ctgtccctacagcggaagtt

SEQ ID NO: 10115 - DNA, 20 bp, synthetic construct
  source 1..20: mol_type = other DNA
caagggaacctcaggttaga

SEQ ID NO: 10116 - DNA, 20 bp, synthetic construct
  source 1..20: mol_type = other DNA
acgctccgcattcaagtggg

SEQ ID NO: 10117 - DNA, 20 bp, synthetic construct
  source 1..20: mol_type = other DNA
tgcttgaccaaagacacggt

SEQ ID NO: 10118 - DNA, 20 bp, synthetic construct
  source 1..20: mol_type = other DNA
gctgcagtcatgtttagttg

SEQ ID NO: 10119 - DNA, 20 bp, synthetic construct
  source 1..20: mol_type = other DNA
cttccgcgcttaccgttcaa

SEQ ID NO: 10120 - DNA, 20 bp, synthetic construct
  source 1..20: mol_type = other DNA
tacgtgcagcatctcaagct

SEQ ID NO: 10121 - DNA, 20 bp, synthetic construct
  source 1..20: mol_type = other DNA
tgcttgtctcagtacatcca

SEQ ID NO: 10122 - DNA, 20 bp, synthetic construct
  source 1..20: mol_type = other DNA
ccgtcagtgaacagtgtttc

SEQ ID NO: 10123 - DNA, 20 bp, synthetic construct
  source 1..20: mol_type = other DNA
gagatgcctttcgatcctat

SEQ ID NO: 10124 - DNA, 20 bp, synthetic construct
  source 1..20: mol_type = other DNA
cccttgctaaatttgtcaac

SEQ ID NO: 10125 - DNA, 20 bp, synthetic construct
  source 1..20: mol_type = other DNA
gacacagcctattatctcaa

SEQ ID NO: 10126 - DNA, 20 bp, synthetic construct
  source 1..20: mol_type = other DNA
cttaactggaggtgacgcgc

SEQ ID NO: 10127 - DNA, 20 bp, synthetic construct
  source 1..20: mol_type = other DNA
cgttccaaatgacacgcggg

SEQ ID NO: 10128 - DNA, 20 bp, synthetic construct
  source 1..20: mol_type = other DNA
tggcaagaccacaacgaacc

SEQ ID NO: 10129 - DNA, 20 bp, synthetic construct
  source 1..20: mol_type = other DNA
tacctcatagccaaagcgcc

SEQ ID NO: 10130 - DNA, 20 bp, synthetic construct
  source 1..20: mol_type = other DNA
cgtgcactcttgatacgcgc

SEQ ID NO: 10131 - DNA, 20 bp, synthetic construct
  source 1..20: mol_type = other DNA
gtatggctgtcatgcatccc

SEQ ID NO: 10132 - DNA, 20 bp, synthetic construct
  source 1..20: mol_type = other DNA
ctacattaccgtggttacat

SEQ ID NO: 10133 - DNA, 20 bp, synthetic construct
  source 1..20: mol_type = other DNA
catatcggatgtggagttcg

SEQ ID NO: 10134 - DNA, 20 bp, synthetic construct
  source 1..20: mol_type = other DNA
aacctctgtacgttgaagcg

SEQ ID NO: 10135 - DNA, 20 bp, synthetic construct
  source 1..20: mol_type = other DNA
cacctccgcctccatatcgt

SEQ ID NO: 10136 - DNA, 20 bp, synthetic construct
  source 1..20: mol_type = other DNA
ctactttcggtcacacacca

SEQ ID NO: 10137 - DNA, 20 bp, synthetic construct
  source 1..20: mol_type = other DNA
ggcgaccatttgagctacta

SEQ ID NO: 10138 - DNA, 20 bp, synthetic construct
  source 1..20: mol_type = other DNA
tattattccggcatttgcgg

SEQ ID NO: 10139 - DNA, 20 bp, synthetic construct
  source 1..20: mol_type = other DNA
gcagtataggctccctcgga

SEQ ID NO: 10140 - DNA, 20 bp, synthetic construct
  source 1..20: mol_type = other DNA
aacgaaatcctcgctaacgt

SEQ ID NO: 10141 - DNA, 20 bp, synthetic construct
  source 1..20: mol_type = other DNA
ccaaggattgatcatgtagg

SEQ ID NO: 10142 - DNA, 20 bp, synthetic construct
  source 1..20: mol_type = other DNA
agagggagtcggagcgtcgt

SEQ ID NO: 10143 - DNA, 20 bp, synthetic construct
  source 1..20: mol_type = other DNA
atctatctactgaccgacat

SEQ ID NO: 10144 - DNA, 20 bp, synthetic construct
  source 1..20: mol_type = other DNA
tcgtaactgtttgtcaatgg

SEQ ID NO: 10145 - DNA, 20 bp, synthetic construct
  source 1..20: mol_type = other DNA
gcgcagacatgtaaatgcga

SEQ ID NO: 10146 - DNA, 20 bp, synthetic construct
  source 1..20: mol_type = other DNA
tgtgcaatgttgtggagcgc

SEQ ID NO: 10147 - DNA, 20 bp, synthetic construct
  source 1..20: mol_type = other DNA
agagttattaatctgacaca

SEQ ID NO: 10148 - DNA, 20 bp, synthetic construct
  source 1..20: mol_type = other DNA
gcctcggcaacgatatggcg

SEQ ID NO: 10149 - DNA, 20 bp, synthetic construct
  source 1..20: mol_type = other DNA
gcgcgaaagctatttgaatg

SEQ ID NO: 10150 - DNA, 20 bp, synthetic construct
  source 1..20: mol_type = other DNA
acggaggcctcagtcacccg

SEQ ID NO: 10151 - DNA, 20 bp, synthetic construct
  source 1..20: mol_type = other DNA
gtttggacaacgtctgcaac

SEQ ID NO: 10152 - DNA, 20 bp, synthetic construct
  source 1..20: mol_type = other DNA
tagcttgatagctcacctgt

SEQ ID NO: 10153 - DNA, 20 bp, synthetic construct
  source 1..20: mol_type = other DNA
atctcgttaccggaatgtta

SEQ ID NO: 10154 - DNA, 20 bp, synthetic construct
  source 1..20: mol_type = other DNA
aatgactttaaacggagagg

SEQ ID NO: 10155 - DNA, 20 bp, synthetic construct
  source 1..20: mol_type = other DNA
gatgcggtttaagcaagcgt

SEQ ID NO: 10156 - DNA, 20 bp, synthetic construct
  source 1..20: mol_type = other DNA
cgatcagagcaacacctgcg

SEQ ID NO: 10157 - DNA, 20 bp, synthetic construct
  source 1..20: mol_type = other DNA
acgatcgtttgagacaggac

SEQ ID NO: 10158 - DNA, 20 bp, synthetic construct
  source 1..20: mol_type = other DNA
aggcgtagacctctatgaca

SEQ ID NO: 10159 - DNA, 20 bp, synthetic construct
  source 1..20: mol_type = other DNA
ttggaaagtcttgtgtaggc

SEQ ID NO: 10160 - DNA, 20 bp, synthetic construct
  source 1..20: mol_type = other DNA
gtacgacgtctggcgggact

SEQ ID NO: 10161 - DNA, 20 bp, synthetic construct
  source 1..20: mol_type = other DNA
acgaatttcgcattctttgc

SEQ ID NO: 10162 - DNA, 20 bp, synthetic construct
  source 1..20: mol_type = other DNA
ggctacgtctgccacttatg

SEQ ID NO: 10163 - DNA, 20 bp, synthetic construct
  source 1..20: mol_type = other DNA
atccagcgctgctatgctag

SEQ ID NO: 10164 - DNA, 20 bp, synthetic construct
  source 1..20: mol_type = other DNA
gtcgctcaactatagtaacg

SEQ ID NO: 10165 - DNA, 20 bp, synthetic construct
  source 1..20: mol_type = other DNA
cgttcgggcaagcgactgat

SEQ ID NO: 10166 - DNA, 20 bp, synthetic construct
  source 1..20: mol_type = other DNA
aacatcatatcggagccatg

SEQ ID NO: 10167 - DNA, 20 bp, synthetic construct
  source 1..20: mol_type = other DNA
tacagcctacccagatcgca

SEQ ID NO: 10168 - DNA, 20 bp, synthetic construct
  source 1..20: mol_type = other DNA
tgagctctcgctatgcctgt

SEQ ID NO: 10169 - DNA, 20 bp, synthetic construct
  source 1..20: mol_type = other DNA
catgttcagcaacctctgac

SEQ ID NO: 10170 - DNA, 20 bp, synthetic construct
  source 1..20: mol_type = other DNA
taatgaagagtaactgcggc

SEQ ID NO: 10171 - DNA, 20 bp, synthetic construct
  source 1..20: mol_type = other DNA
ttagtcccagggacgtgcac

SEQ ID NO: 10172 - DNA, 20 bp, synthetic construct
  source 1..20: mol_type = other DNA
tgatggctcgcgtatgttcc

SEQ ID NO: 10173 - DNA, 20 bp, synthetic construct
  source 1..20: mol_type = other DNA
ctaactgggagcccacgact

SEQ ID NO: 10174 - DNA, 20 bp, synthetic construct
  source 1..20: mol_type = other DNA
gaacgtcaaatgtagaggct

SEQ ID NO: 10175 - DNA, 20 bp, synthetic construct
  source 1..20: mol_type = other DNA
aaaccgccttatgaccgttc

SEQ ID NO: 10176 - DNA, 20 bp, synthetic construct
  source 1..20: mol_type = other DNA
ggactgtgtggtgcgggaaa

SEQ ID NO: 10177 - DNA, 20 bp, synthetic construct
  source 1..20: mol_type = other DNA
ttgtatctcgccaggtgcct

SEQ ID NO: 10178 - DNA, 20 bp, synthetic construct
  source 1..20: mol_type = other DNA
cgaagggcccacgaatatca

SEQ ID NO: 10179 - DNA, 20 bp, synthetic construct
  source 1..20: mol_type = other DNA
tcccacgagtcgagtcacgt

SEQ ID NO: 10180 - DNA, 20 bp, synthetic construct
  source 1..20: mol_type = other DNA
gtagcccgcgtttgccgata

SEQ ID NO: 10181 - DNA, 20 bp, synthetic construct
  source 1..20: mol_type = other DNA
accaatcttgagcgaactgt

SEQ ID NO: 10182 - DNA, 20 bp, synthetic construct
  source 1..20: mol_type = other DNA
aagccggtaggcaatgcctt

SEQ ID NO: 10183 - DNA, 20 bp, synthetic construct
  source 1..20: mol_type = other DNA
agtgtaggtatccatcgtag

SEQ ID NO: 10184 - DNA, 20 bp, synthetic construct
  source 1..20: mol_type = other DNA
ctggtagtgaccgagattag

SEQ ID NO: 10185 - DNA, 20 bp, synthetic construct
  source 1..20: mol_type = other DNA
cgagagttctttacactctg

SEQ ID NO: 10186 - DNA, 20 bp, synthetic construct
  source 1..20: mol_type = other DNA
gcatatgagaatttgatccc

SEQ ID NO: 10187 - DNA, 20 bp, synthetic construct
  source 1..20: mol_type = other DNA
agattacattgagtaacgct

SEQ ID NO: 10188 - DNA, 20 bp, synthetic construct
  source 1..20: mol_type = other DNA
tgactggcacaatgtaagat

SEQ ID NO: 10189 - DNA, 20 bp, synthetic construct
  source 1..20: mol_type = other DNA
taattacggcggtcaaatga

SEQ ID NO: 10190 - DNA, 20 bp, synthetic construct
  source 1..20: mol_type = other DNA
acccgagtacaatgtctgcc

SEQ ID NO: 10191 - DNA, 20 bp, synthetic construct
  source 1..20: mol_type = other DNA
gctgctatatggaacatacc

SEQ ID NO: 10192 - DNA, 20 bp, synthetic construct
  source 1..20: mol_type = other DNA
agcgtagacgatttcgtcct

SEQ ID NO: 10193 - DNA, 20 bp, synthetic construct
  source 1..20: mol_type = other DNA
gtacgccggaaccgtacatc

SEQ ID NO: 10194 - DNA, 20 bp, synthetic construct
  source 1..20: mol_type = other DNA
aatgaaggtcgggagtcaga

SEQ ID NO: 10195 - DNA, 20 bp, synthetic construct
  source 1..20: mol_type = other DNA
agccaaggccatcagcccag

SEQ ID NO: 10196 - DNA, 20 bp, synthetic construct
  source 1..20: mol_type = other DNA
tctacttcaccgatgatatt

SEQ ID NO: 10197 - DNA, 20 bp, synthetic construct
  source 1..20: mol_type = other DNA
gtctggtcattaccctgcaa

SEQ ID NO: 10198 - DNA, 20 bp, synthetic construct
  source 1..20: mol_type = other DNA
cattagtctcggcatcgagc

SEQ ID NO: 10199 - DNA, 20 bp, synthetic construct
  source 1..20: mol_type = other DNA
aggagctatcagaatatcgg

SEQ ID NO: 10200 - DNA, 20 bp, synthetic construct
  source 1..20: mol_type = other DNA
acatgccaaaccagcgcgtc

SEQ ID NO: 10201 - DNA, 20 bp, synthetic construct
  source 1..20: mol_type = other DNA
ccgggatcaaccgcctatgg

SEQ ID NO: 10202 - DNA, 20 bp, synthetic construct
  source 1..20: mol_type = other DNA
gaaccattcaggcagattag

SEQ ID NO: 10203 - DNA, 20 bp, synthetic construct
  source 1..20: mol_type = other DNA
cctcgatgatattggtatgt

SEQ ID NO: 10204 - DNA, 20 bp, synthetic construct
  source 1..20: mol_type = other DNA
ggtaaatgggtatcgaccga

SEQ ID NO: 10205 - DNA, 20 bp, synthetic construct
  source 1..20: mol_type = other DNA
gtctacagttgacctaagct

SEQ ID NO: 10206 - DNA, 20 bp, synthetic construct
  source 1..20: mol_type = other DNA
gtcgcataactccctgccca

SEQ ID NO: 10207 - DNA, 20 bp, synthetic construct
  source 1..20: mol_type = other DNA
tctggaagttgtaggcctag

SEQ ID NO: 10208 - DNA, 20 bp, synthetic construct
  source 1..20: mol_type = other DNA
gtggctccaagattgaatac

SEQ ID NO: 10209 - DNA, 20 bp, synthetic construct
  source 1..20: mol_type = other DNA
cgaacgcagtaccaggctct

SEQ ID NO: 10210 - DNA, 20 bp, synthetic construct
  source 1..20: mol_type = other DNA
cgagacgaaaccgggagaca

SEQ ID NO: 10211 - DNA, 20 bp, synthetic construct
  source 1..20: mol_type = other DNA
tctccaagtacttaaggacc

SEQ ID NO: 10212 - DNA, 20 bp, synthetic construct
  source 1..20: mol_type = other DNA
cgtgaactacatcaatgcat

SEQ ID NO: 10213 - DNA, 20 bp, synthetic construct
  source 1..20: mol_type = other DNA
ctacattaggtcgctgaccg

SEQ ID NO: 10214 - DNA, 20 bp, synthetic construct
  source 1..20: mol_type = other DNA
tctcaatgcgcagagcatta

SEQ ID NO: 10215 - DNA, 20 bp, synthetic construct
  source 1..20: mol_type = other DNA
aacagtctcaatttgagatc

SEQ ID NO: 10216 - DNA, 20 bp, synthetic construct
  source 1..20: mol_type = other DNA
ccttactatactgatccgcg

SEQ ID NO: 10217 - DNA, 20 bp, synthetic construct
  source 1..20: mol_type = other DNA
tctcccagccgcaactaaag

SEQ ID NO: 10218 - DNA, 20 bp, synthetic construct
  source 1..20: mol_type = other DNA
agtgtttagcggcccatggt

SEQ ID NO: 10219 - DNA, 20 bp, synthetic construct
  source 1..20: mol_type = other DNA
cgaataaacctgacatgaga

SEQ ID NO: 10220 - DNA, 20 bp, synthetic construct
  source 1..20: mol_type = other DNA
gaaagaaatgggcgggtttc

SEQ ID NO: 10221 - DNA, 20 bp, synthetic construct
  source 1..20: mol_type = other DNA
gttgtgagtgctgggtcaag

SEQ ID NO: 10222 - DNA, 20 bp, synthetic construct
  source 1..20: mol_type = other DNA
cattcgggttggcacaaata

SEQ ID NO: 10223 - DNA, 20 bp, synthetic construct
  source 1..20: mol_type = other DNA
acggaagtcgttcgaagcgg

SEQ ID NO: 10224 - DNA, 20 bp, synthetic construct
  source 1..20: mol_type = other DNA
ccctacactagaattaggaa

SEQ ID NO: 10225 - DNA, 20 bp, synthetic construct
  source 1..20: mol_type = other DNA
tggcatatgatggtttgttg

SEQ ID NO: 10226 - DNA, 20 bp, synthetic construct
  source 1..20: mol_type = other DNA
cgttccgtccgttacgatcc

SEQ ID NO: 10227 - DNA, 20 bp, synthetic construct
  source 1..20: mol_type = other DNA
gggctcacctttgtttatag

SEQ ID NO: 10228 - DNA, 20 bp, synthetic construct
  source 1..20: mol_type = other DNA
cgaacagtacaacgcctctg

SEQ ID NO: 10229 - DNA, 20 bp, synthetic construct
  source 1..20: mol_type = other DNA
tgtccgtcagcaacaggtcg

SEQ ID NO: 10230 - DNA, 20 bp, synthetic construct
  source 1..20: mol_type = other DNA
ttgttcgaccgcgaagtatt

SEQ ID NO: 10231 - DNA, 20 bp, synthetic construct
  source 1..20: mol_type = other DNA
ctaatcaccgagattcctcg

SEQ ID NO: 10232 - DNA, 20 bp, synthetic construct
  source 1..20: mol_type = other DNA
ttctaattgcgggcgtgagc

SEQ ID NO: 10233 - DNA, 20 bp, synthetic construct
  source 1..20: mol_type = other DNA
ccagtcactactgcccacct

SEQ ID NO: 10234 - DNA, 20 bp, synthetic construct
  source 1..20: mol_type = other DNA
agggttggaaaccgcagtta

SEQ ID NO: 10235 - DNA, 20 bp, synthetic construct
  source 1..20: mol_type = other DNA
acgagttgcacgtataattc

SEQ ID NO: 10236 - DNA, 20 bp, synthetic construct
  source 1..20: mol_type = other DNA
gttgaccgacgccgctacta

SEQ ID NO: 10237 - DNA, 20 bp, synthetic construct
  source 1..20: mol_type = other DNA
gagtggtaatcgtctcggtg

SEQ ID NO: 10238 - DNA, 20 bp, synthetic construct
  source 1..20: mol_type = other DNA
tatgccgttcttggcgggct

SEQ ID NO: 10239 - DNA, 20 bp, synthetic construct
  source 1..20: mol_type = other DNA
gatagctgcctcgccacaat

SEQ ID NO: 10240 - DNA, 20 bp, synthetic construct
  source 1..20: mol_type = other DNA
tgactttagcactgagacga

SEQ ID NO: 10241 - DNA, 20 bp, synthetic construct
  source 1..20: mol_type = other DNA
tgaactcccgtgtgtacgtt

SEQ ID NO: 10242 - DNA, 20 bp, synthetic construct
  source 1..20: mol_type = other DNA
gttacagacggtgcctcgga

SEQ ID NO: 10243 - DNA, 20 bp, synthetic construct
  source 1..20: mol_type = other DNA
cattgccttcctatggtcct

SEQ ID NO: 10244 - DNA, 20 bp, synthetic construct
  source 1..20: mol_type = other DNA
catccagtagtgagcggcca

SEQ ID NO: 10245 - DNA, 20 bp, synthetic construct
  source 1..20: mol_type = other DNA
ccaatgcgataatgctccag

SEQ ID NO: 10246 - DNA, 20 bp, synthetic construct
  source 1..20: mol_type = other DNA
tttggttagattcgtagccc

SEQ ID NO: 10247 - DNA, 20 bp, synthetic construct
  source 1..20: mol_type = other DNA
gtgatcactgacgtcaggct

SEQ ID NO: 10248 - DNA, 20 bp, synthetic construct
  source 1..20: mol_type = other DNA
cacgggtgcgcttagctgcc

SEQ ID NO: 10249 - DNA, 20 bp, synthetic construct
  source 1..20: mol_type = other DNA
aataggtaggtacatacggg

SEQ ID NO: 10250 - DNA, 20 bp, synthetic construct
  source 1..20: mol_type = other DNA
acactcagggcagtcggaca

SEQ ID NO: 10251 - DNA, 20 bp, synthetic construct
  source 1..20: mol_type = other DNA
ttccacttgcgtagccgtct

SEQ ID NO: 10252 - DNA, 20 bp, synthetic construct
  source 1..20: mol_type = other DNA
ttcttctatgttgccacaga

SEQ ID NO: 10253 - DNA, 20 bp, synthetic construct
  source 1..20: mol_type = other DNA
atgctagagtgggaggacca

SEQ ID NO: 10254 - DNA, 20 bp, synthetic construct
  source 1..20: mol_type = other DNA
cgtggcgtcatcagtcctac

SEQ ID NO: 10255 - DNA, 20 bp, synthetic construct
  source 1..20: mol_type = other DNA
ctgtcacggaactatctacg

SEQ ID NO: 10256 - DNA, 20 bp, synthetic construct
  source 1..20: mol_type = other DNA
tcctcatcgctcagccacag

SEQ ID NO: 10257 - DNA, 20 bp, synthetic construct
  source 1..20: mol_type = other DNA
aaacaagcccacggagtccc

SEQ ID NO: 10258 - DNA, 20 bp, synthetic construct
  source 1..20: mol_type = other DNA
gtatcaagcctcctgtatct

SEQ ID NO: 10259 - DNA, 20 bp, synthetic construct
  source 1..20: mol_type = other DNA
ccgattatacgtaactcgtt

SEQ ID NO: 10260 - DNA, 20 bp, synthetic construct
  source 1..20: mol_type = other DNA
attatgccgttcggtcattt

SEQ ID NO: 10261 - DNA, 20 bp, synthetic construct
  source 1..20: mol_type = other DNA
gctaggtgggaacaacttca

SEQ ID NO: 10262 - DNA, 20 bp, synthetic construct
  source 1..20: mol_type = other DNA
cgccctgacaatggagactc

SEQ ID NO: 10263 - DNA, 20 bp, synthetic construct
  source 1..20: mol_type = other DNA
ggttatcgtgtacaggaccg

SEQ ID NO: 10264 - DNA, 20 bp, synthetic construct
  source 1..20: mol_type = other DNA
taagtggtatccgtctacgt

SEQ ID NO: 10265 - DNA, 20 bp, synthetic construct
  source 1..20: mol_type = other DNA
accatctacctggatcgata

SEQ ID NO: 10266 - DNA, 20 bp, synthetic construct
  source 1..20: mol_type = other DNA
aagggcgcatacatgacatt

SEQ ID NO: 10267 - DNA, 20 bp, synthetic construct
  source 1..20: mol_type = other DNA
tggtcgaaatgctcagtcca

SEQ ID NO: 10268 - DNA, 20 bp, synthetic construct
  source 1..20: mol_type = other DNA
ttcgctgatacaccacgata

SEQ ID NO: 10269 - DNA, 20 bp, synthetic construct
  source 1..20: mol_type = other DNA
cactccggtgcatttcttcc

SEQ ID NO: 10270 - DNA, 20 bp, synthetic construct
  source 1..20: mol_type = other DNA
ctgtgacaagcagccacctg

SEQ ID NO: 10271 - DNA, 20 bp, synthetic construct
  source 1..20: mol_type = other DNA
catcacacaggatacaaggt

SEQ ID NO: 10272 - DNA, 20 bp, synthetic construct
  source 1..20: mol_type = other DNA
gggtgcatgtctcgttatta

SEQ ID NO: 10273 - DNA, 20 bp, synthetic construct
  source 1..20: mol_type = other DNA
tcccgaacgctcgacgatcc

SEQ ID NO: 10274 - DNA, 20 bp, synthetic construct
  source 1..20: mol_type = other DNA
agcatacttcctttcttaac

SEQ ID NO: 10275 - DNA, 20 bp, synthetic construct
  source 1..20: mol_type = other DNA
gccgggaaggacccacctat

SEQ ID NO: 10276 - DNA, 20 bp, synthetic construct
  source 1..20: mol_type = other DNA
tatcctttgtaggagtatcg

SEQ ID NO: 10277 - DNA, 20 bp, synthetic construct
  source 1..20: mol_type = other DNA
ctaatcggtttacgggcggg

SEQ ID NO: 10278 - DNA, 20 bp, synthetic construct
  source 1..20: mol_type = other DNA
ttggatgtccgctcgctgtg

SEQ ID NO: 10279 - DNA, 20 bp, synthetic construct
  source 1..20: mol_type = other DNA
cgtgatagcatagagacaat

SEQ ID NO: 10280 - DNA, 20 bp, synthetic construct
  source 1..20: mol_type = other DNA
atctgttatggtactctatg

SEQ ID NO: 10281 - DNA, 20 bp, synthetic construct
  source 1..20: mol_type = other DNA
ataaacgcgacctcctgctc

SEQ ID NO: 10282 - DNA, 20 bp, synthetic construct
  source 1..20: mol_type = other DNA
tgacacataaccttgtcctc

SEQ ID NO: 10283 - DNA, 20 bp, synthetic construct
  source 1..20: mol_type = other DNA
cccatcagtcgagggaacgg

SEQ ID NO: 10284 - DNA, 20 bp, synthetic construct
  source 1..20: mol_type = other DNA
gatgaaatcatcttcggatg

SEQ ID NO: 10285 - DNA, 20 bp, synthetic construct
  source 1..20: mol_type = other DNA
tgacacatcattcaaccagg

SEQ ID NO: 10286 - DNA, 20 bp, synthetic construct
  source 1..20: mol_type = other DNA
agatcagaaatggcgtgacc

SEQ ID NO: 10287 - DNA, 20 bp, synthetic construct
  source 1..20: mol_type = other DNA
tggtattattatcctcgtaa

SEQ ID NO: 10288 - DNA, 20 bp, synthetic construct
  source 1..20: mol_type = other DNA
gggacagaagaggcgtatca

SEQ ID NO: 10289 - DNA, 20 bp, synthetic construct
  source 1..20: mol_type = other DNA
tactggcccaatcataagat

SEQ ID NO: 10290 - DNA, 20 bp, synthetic construct
  source 1..20: mol_type = other DNA
gcacacaagtcgtaaacatg

SEQ ID NO: 10291 - DNA, 20 bp, synthetic construct
  source 1..20: mol_type = other DNA
aatagctacaagattgtcca

SEQ ID NO: 10292 - DNA, 20 bp, synthetic construct
  source 1..20: mol_type = other DNA
cgctattgctcatcctggag

SEQ ID NO: 10293 - DNA, 20 bp, synthetic construct
  source 1..20: mol_type = other DNA
ttacacaatgcgtccggcaa

SEQ ID NO: 10294 - DNA, 20 bp, synthetic construct
  source 1..20: mol_type = other DNA
aagttcgatggctctcctta

SEQ ID NO: 10295 - DNA, 20 bp, synthetic construct
  source 1..20: mol_type = other DNA
aatcgagatatagacgagac

SEQ ID NO: 10296 - DNA, 20 bp, synthetic construct
  source 1..20: mol_type = other DNA
cgtaatcttatagccaagag

SEQ ID NO: 10297 - DNA, 20 bp, synthetic construct
  source 1..20: mol_type = other DNA
gtgataacgtcttgagactg

SEQ ID NO: 10298 - DNA, 20 bp, synthetic construct
  source 1..20: mol_type = other DNA
tccgaggaacagcataaaca

SEQ ID NO: 10299 - DNA, 20 bp, synthetic construct
  source 1..20: mol_type = other DNA
gggttgctatatgcagtact

SEQ ID NO: 10300 - DNA, 20 bp, synthetic construct
  source 1..20: mol_type = other DNA
gtgcctcacattgctaacag

SEQ ID NO: 10301 - DNA, 20 bp, synthetic construct
  source 1..20: mol_type = other DNA
atagtgagagctcgataagg

SEQ ID NO: 10302 - DNA, 20 bp, synthetic construct
  source 1..20: mol_type = other DNA
gcctatctaactacatcgga

SEQ ID NO: 10303 - DNA, 20 bp, synthetic construct
  source 1..20: mol_type = other DNA
acccgtgatgcatgccggtc

SEQ ID NO: 10304 - DNA, 20 bp, synthetic construct
  source 1..20: mol_type = other DNA
tgctgcccagcgtgatgcct

SEQ ID NO: 10305 - DNA, 20 bp, synthetic construct
  source 1..20: mol_type = other DNA
atagtaggagactgtatcag

SEQ ID NO: 10306 - DNA, 20 bp, synthetic construct
  source 1..20: mol_type = other DNA
ttctcgctacccacaagtca

SEQ ID NO: 10307 - DNA, 20 bp, synthetic construct
  source 1..20: mol_type = other DNA
tagtattgtcgtgtacgcta

SEQ ID NO: 10308 - DNA, 20 bp, synthetic construct
  source 1..20: mol_type = other DNA
actccatggagttcacctcg

SEQ ID NO: 10309 - DNA, 20 bp, synthetic construct
  source 1..20: mol_type = other DNA
tatgcgccataacgtagtag

SEQ ID NO: 10310 - DNA, 20 bp, synthetic construct
  source 1..20: mol_type = other DNA
ttggtaaacatcacacacac

SEQ ID NO: 10311 - DNA, 20 bp, synthetic construct
  source 1..20: mol_type = other DNA
tgggacgcatgactggtaca

SEQ ID NO: 10312 - DNA, 20 bp, synthetic construct
  source 1..20: mol_type = other DNA
ccactacgctgacgcttcag

SEQ ID NO: 10313 - DNA, 20 bp, synthetic construct
  source 1..20: mol_type = other DNA
tcctacgaacgcggctaagt

SEQ ID NO: 10314 - DNA, 20 bp, synthetic construct
  source 1..20: mol_type = other DNA
gttgctcagtctctccgtct

SEQ ID NO: 10315 - DNA, 20 bp, synthetic construct
  source 1..20: mol_type = other DNA
ccggatatagacggagattt

SEQ ID NO: 10316 - DNA, 20 bp, synthetic construct
  source 1..20: mol_type = other DNA
catagaccgagtcgtcatgt

SEQ ID NO: 10317 - DNA, 20 bp, synthetic construct
  source 1..20: mol_type = other DNA
gttacctcgtggctgtaggc

SEQ ID NO: 10318 - DNA, 20 bp, synthetic construct
  source 1..20: mol_type = other DNA
ggttaatctgcgatcacttt

SEQ ID NO: 10319 - DNA, 20 bp, synthetic construct
  source 1..20: mol_type = other DNA
ctacccgatgcctctcaatc

SEQ ID NO: 10320 - DNA, 20 bp, synthetic construct
  source 1..20: mol_type = other DNA
cgacccaagtctacgattag

SEQ ID NO: 10321 - DNA, 20 bp, synthetic construct
  source 1..20: mol_type = other DNA
ctatgctgaccataccatag

SEQ ID NO: 10322 - DNA, 20 bp, synthetic construct
  source 1..20: mol_type = other DNA
caggttagacagagcggctc

SEQ ID NO: 10323 - DNA, 20 bp, synthetic construct
  source 1..20: mol_type = other DNA
tagctggaccagttgcatcg

SEQ ID NO: 10324 - DNA, 20 bp, synthetic construct
  source 1..20: mol_type = other DNA
agagattacgtcttcagggc

SEQ ID NO: 10325 - DNA, 20 bp, synthetic construct
  source 1..20: mol_type = other DNA
aatactgccgctgctctgaa

SEQ ID NO: 10326 - DNA, 20 bp, synthetic construct
  source 1..20: mol_type = other DNA
tcagcgtagtcagatgttcg

SEQ ID NO: 10327 - DNA, 20 bp, synthetic construct
  source 1..20: mol_type = other DNA
cagcgcgtgttagccggaga

SEQ ID NO: 10328 - DNA, 20 bp, synthetic construct
  source 1..20: mol_type = other DNA
tcaataggcatgctagggcg

SEQ ID NO: 10329 - DNA, 20 bp, synthetic construct
  source 1..20: mol_type = other DNA
agccgctctattcagtcagc

SEQ ID NO: 10330 - DNA, 20 bp, synthetic construct
  source 1..20: mol_type = other DNA
cttgctgggcgaattgcaag

SEQ ID NO: 10331 - DNA, 20 bp, synthetic construct
  source 1..20: mol_type = other DNA
ggtcctagctgggtcgcagt

SEQ ID NO: 10332 - DNA, 20 bp, synthetic construct
  source 1..20: mol_type = other DNA
atcacacaattgatagcagg

SEQ ID NO: 10333 - DNA, 20 bp, synthetic construct
  source 1..20: mol_type = other DNA
gtcgcttgctgcataccgcc

SEQ ID NO: 10334 - DNA, 20 bp, synthetic construct
  source 1..20: mol_type = other DNA
tgtcttcgtccggcacactc

SEQ ID NO: 10335 - DNA, 20 bp, synthetic construct
  source 1..20: mol_type = other DNA
cctgtgaaggcttaaggcat

SEQ ID NO: 10336 - DNA, 20 bp, synthetic construct
  source 1..20: mol_type = other DNA
tgcgagggcttagctgtgac

SEQ ID NO: 10337 - DNA, 20 bp, synthetic construct
  source 1..20: mol_type = other DNA
cctataatagcgcttaactc

SEQ ID NO: 10338 - DNA, 20 bp, synthetic construct
  source 1..20: mol_type = other DNA
gactagaaatacttatgggt

SEQ ID NO: 10339 - DNA, 20 bp, synthetic construct
  source 1..20: mol_type = other DNA
aagcgaattgcgctcgcctc

SEQ ID NO: 10340 - DNA, 20 bp, synthetic construct
  source 1..20: mol_type = other DNA
gggttgttgcagctgatcgc

SEQ ID NO: 10341 - DNA, 20 bp, synthetic construct
  source 1..20: mol_type = other DNA
tgagaccagagacgtggctt

SEQ ID NO: 10342 - DNA, 20 bp, synthetic construct
  source 1..20: mol_type = other DNA
tatcgctcgttggattgaat

SEQ ID NO: 10343 - DNA, 20 bp, synthetic construct
  source 1..20: mol_type = other DNA
gtttgtactacggtaacgtg

SEQ ID NO: 10344 - DNA, 20 bp, synthetic construct
  source 1..20: mol_type = other DNA
atacatcatcgactgaggcg

SEQ ID NO: 10345 - DNA, 20 bp, synthetic construct
  source 1..20: mol_type = other DNA
cactcatcggcatgctgttg

SEQ ID NO: 10346 - DNA, 20 bp, synthetic construct
  source 1..20: mol_type = other DNA
tggctcttaccatctgagtc

SEQ ID NO: 10347 - DNA, 20 bp, synthetic construct
  source 1..20: mol_type = other DNA
agacccatagcgcatattcc

SEQ ID NO: 10348 - DNA, 20 bp, synthetic construct
  source 1..20: mol_type = other DNA
ggtgtgacgtgatgaccgcg

SEQ ID NO: 10349 - DNA, 20 bp, synthetic construct
  source 1..20: mol_type = other DNA
gagacagagaggattgggca

SEQ ID NO: 10350 - DNA, 20 bp, synthetic construct
  source 1..20: mol_type = other DNA
aatcagtctgcggatctgct

SEQ ID NO: 10351 - DNA, 20 bp, synthetic construct
  source 1..20: mol_type = other DNA
gaaaggcttgagcacaccga

SEQ ID NO: 10352 - DNA, 20 bp, synthetic construct
  source 1..20: mol_type = other DNA
tgccagagcgaatttcatgc

SEQ ID NO: 10353 - DNA, 20 bp, synthetic construct
  source 1..20: mol_type = other DNA
accatggactgcgaacgatg

SEQ ID NO: 10354 - DNA, 20 bp, synthetic construct
  source 1..20: mol_type = other DNA
aacgtcaacagactcgttaa

SEQ ID NO: 10355 - DNA, 20 bp, synthetic construct
  source 1..20: mol_type = other DNA
tttaggccgctagcaatata

SEQ ID NO: 10356 - DNA, 20 bp, synthetic construct
  source 1..20: mol_type = other DNA
gacagcgtagtgattcagat

SEQ ID NO: 10357 - DNA, 20 bp, synthetic construct
  source 1..20: mol_type = other DNA
gatggtggtcacgactcaca

SEQ ID NO: 10358 - DNA, 20 bp, synthetic construct
  source 1..20: mol_type = other DNA
gtggtcaacactttgtaggg

SEQ ID NO: 10359 - DNA, 20 bp, synthetic construct
  source 1..20: mol_type = other DNA
ttgatattgtaaccagagtc

SEQ ID NO: 10360 - DNA, 20 bp, synthetic construct
  source 1..20: mol_type = other DNA
ctacaaacaaaccagtgctg

SEQ ID NO: 10361 - DNA, 20 bp, synthetic construct
  source 1..20: mol_type = other DNA
acgataggccgtgatttgag

SEQ ID NO: 10362 - DNA, 20 bp, synthetic construct
  source 1..20: mol_type = other DNA
aaaggcatgaagcaacttag

SEQ ID NO: 10363 - DNA, 20 bp, synthetic construct
  source 1..20: mol_type = other DNA
agcgagaaccgtcaagcgca

SEQ ID NO: 10364 - DNA, 20 bp, synthetic construct
  source 1..20: mol_type = other DNA
cagaaggcgccggaaccact

SEQ ID NO: 10365 - DNA, 20 bp, synthetic construct
  source 1..20: mol_type = other DNA
agtgcgtgttcagtaacatt

SEQ ID NO: 10366 - DNA, 20 bp, synthetic construct
  source 1..20: mol_type = other DNA
gaccagtaagtcacagggct

SEQ ID NO: 10367 - DNA, 20 bp, synthetic construct
  source 1..20: mol_type = other DNA
gcatgtagcgggagtcaatt

SEQ ID NO: 10368 - DNA, 20 bp, synthetic construct
  source 1..20: mol_type = other DNA
gataatgctaccgtgcgcat

SEQ ID NO: 10369 - DNA, 20 bp, synthetic construct
  source 1..20: mol_type = other DNA
attcaacggcctactgtgct

SEQ ID NO: 10370 - DNA, 20 bp, synthetic construct
  source 1..20: mol_type = other DNA
atctgtattgtgccctcagg

SEQ ID NO: 10371 - DNA, 20 bp, synthetic construct
  source 1..20: mol_type = other DNA
agttaagcaggagccctcta

SEQ ID NO: 10372 - DNA, 20 bp, synthetic construct
  source 1..20: mol_type = other DNA
tccgtaataggctgcatttc

SEQ ID NO: 10373 - DNA, 20 bp, synthetic construct
  source 1..20: mol_type = other DNA
tgactgtaccttattagatt

SEQ ID NO: 10374 - DNA, 20 bp, synthetic construct
  source 1..20: mol_type = other DNA
cgatattcaggttcgattat

SEQ ID NO: 10375 - DNA, 20 bp, synthetic construct
  source 1..20: mol_type = other DNA
ccgctatcatagactaatgt

SEQ ID NO: 10376 - DNA, 20 bp, synthetic construct
  source 1..20: mol_type = other DNA
cgtataagtccaatggtcgt

SEQ ID NO: 10377 - DNA, 20 bp, synthetic construct
  source 1..20: mol_type = other DNA
ttggcaggacgcatacgcac

SEQ ID NO: 10378 - DNA, 20 bp, synthetic construct
  source 1..20: mol_type = other DNA
actacattcgcaggaacgtg

SEQ ID NO: 10379 - DNA, 20 bp, synthetic construct
  source 1..20: mol_type = other DNA
gtcatgtccactagtcagaa

SEQ ID NO: 10380 - DNA, 20 bp, synthetic construct
  source 1..20: mol_type = other DNA
gacgacacgatagataatct

SEQ ID NO: 10381 - DNA, 20 bp, synthetic construct
  source 1..20: mol_type = other DNA
gagcatggttcatattcaac

SEQ ID NO: 10382 - DNA, 20 bp, synthetic construct
  source 1..20: mol_type = other DNA
cagtatctgtacggttcaac

SEQ ID NO: 10383 - DNA, 20 bp, synthetic construct
  source 1..20: mol_type = other DNA
atatgcagaggaggtaacag

SEQ ID NO: 10384 - DNA, 20 bp, synthetic construct
  source 1..20: mol_type = other DNA
tagagaccacgttctcttgg

SEQ ID NO: 10385 - DNA, 20 bp, synthetic construct
  source 1..20: mol_type = other DNA
gcagaccctgcacggtgtac

SEQ ID NO: 10386 - DNA, 20 bp, synthetic construct
  source 1..20: mol_type = other DNA
aaagggttctgtaagctggt

SEQ ID NO: 10387 - DNA, 20 bp, synthetic construct
  source 1..20: mol_type = other DNA
gttagccaggctcatatcag

SEQ ID NO: 10388 - DNA, 20 bp, synthetic construct
  source 1..20: mol_type = other DNA
cttcgtctaggaaggcgagg

SEQ ID NO: 10389 - DNA, 20 bp, synthetic construct
  source 1..20: mol_type = other DNA
acgagcaacgggttacaaga

SEQ ID NO: 10390 - DNA, 20 bp, synthetic construct
  source 1..20: mol_type = other DNA
ggaacagttaatctgtcatt

SEQ ID NO: 10391 - DNA, 20 bp, synthetic construct
  source 1..20: mol_type = other DNA
caaacaagctacagtacgta

SEQ ID NO: 10392 - DNA, 20 bp, synthetic construct
  source 1..20: mol_type = other DNA
gactccacatggatacacaa

SEQ ID NO: 10393 - DNA, 20 bp, synthetic construct
  source 1..20: mol_type = other DNA
cagctgcgagcgctacttct

SEQ ID NO: 10394 - DNA, 20 bp, synthetic construct
  source 1..20: mol_type = other DNA
tgctgaatggtcccttcccg

SEQ ID NO: 10395 - DNA, 20 bp, synthetic construct
  source 1..20: mol_type = other DNA
ggttaggcactaatccggct

SEQ ID NO: 10396 - DNA, 20 bp, synthetic construct
  source 1..20: mol_type = other DNA
gtctctcgctgtccacaaga

SEQ ID NO: 10397 - DNA, 20 bp, synthetic construct
  source 1..20: mol_type = other DNA
taatattctgaacgaacctg

SEQ ID NO: 10398 - DNA, 20 bp, synthetic construct
  source 1..20: mol_type = other DNA
gtgaccaaactggcctatgc

SEQ ID NO: 10399 - DNA, 20 bp, synthetic construct
  source 1..20: mol_type = other DNA
tagtatcaggcggctcgctg

SEQ ID NO: 10400 - DNA, 20 bp, synthetic construct
  source 1..20: mol_type = other DNA
atgtcactgtattcccttta

SEQ ID NO: 10401 - DNA, 20 bp, synthetic construct
  source 1..20: mol_type = other DNA
cgacgctctgcgaatctaac

SEQ ID NO: 10402 - DNA, 20 bp, synthetic construct
  source 1..20: mol_type = other DNA
catagttgcactgaggtccg

SEQ ID NO: 10403 - DNA, 20 bp, synthetic construct
  source 1..20: mol_type = other DNA
tagggatgcaacctatatgc

SEQ ID NO: 10404 - DNA, 20 bp, synthetic construct
  source 1..20: mol_type = other DNA
gcggctcgactcagaaggac

SEQ ID NO: 10405 - DNA, 20 bp, synthetic construct
  source 1..20: mol_type = other DNA
agagaggctcaaagctagtc

SEQ ID NO: 10406 - DNA, 20 bp, synthetic construct
  source 1..20: mol_type = other DNA
attcatagttgtccgcctta

SEQ ID NO: 10407 - DNA, 20 bp, synthetic construct
  source 1..20: mol_type = other DNA
cttgttcactaactcctcag

SEQ ID NO: 10408 - DNA, 20 bp, synthetic construct
  source 1..20: mol_type = other DNA
gaatctccttcggtgggttt

SEQ ID NO: 10409 - DNA, 20 bp, synthetic construct
  source 1..20: mol_type = other DNA
cctggagtcagtatctacag

SEQ ID NO: 10410 - DNA, 20 bp, synthetic construct
  source 1..20: mol_type = other DNA
cttgtaatccgggcgataat

SEQ ID NO: 10411 - DNA, 20 bp, synthetic construct
  source 1..20: mol_type = other DNA
ctggactaagtccttgtccc

SEQ ID NO: 10412 - DNA, 20 bp, synthetic construct
  source 1..20: mol_type = other DNA
gaggtaggatgcctcactgc

SEQ ID NO: 10413 - DNA, 20 bp, synthetic construct
  source 1..20: mol_type = other DNA
cgatgtctgcgcgtgaaccg

SEQ ID NO: 10414 - DNA, 20 bp, synthetic construct
  source 1..20: mol_type = other DNA
agataactcggttccggctc

SEQ ID NO: 10415 - DNA, 20 bp, synthetic construct
  source 1..20: mol_type = other DNA
agaatgggacagtccttacg

SEQ ID NO: 10416 - DNA, 20 bp, synthetic construct
  source 1..20: mol_type = other DNA
tactggctatagggaacctg

SEQ ID NO: 10417 - DNA, 20 bp, synthetic construct
  source 1..20: mol_type = other DNA
tcttaatcgtcaatggtaca

SEQ ID NO: 10418 - DNA, 20 bp, synthetic construct
  source 1..20: mol_type = other DNA
cctatgaaacagagcagcaa

SEQ ID NO: 10419 - DNA, 20 bp, synthetic construct
  source 1..20: mol_type = other DNA
agggtagcaacactaggctg

SEQ ID NO: 10420 - DNA, 20 bp, synthetic construct
  source 1..20: mol_type = other DNA
aagggttcatgcatcgaggc

SEQ ID NO: 10421 - DNA, 20 bp, synthetic construct
  source 1..20: mol_type = other DNA
agcatggccgctacagtatt

SEQ ID NO: 10422 - DNA, 20 bp, synthetic construct
  source 1..20: mol_type = other DNA
ctaagtatgctagcaagttc

SEQ ID NO: 10423 - DNA, 20 bp, synthetic construct
  source 1..20: mol_type = other DNA
accgaagagtagacttagct

SEQ ID NO: 10424 - DNA, 20 bp, synthetic construct
  source 1..20: mol_type = other DNA
cacagtgagtgcgaccacac

SEQ ID NO: 10425 - DNA, 20 bp, synthetic construct
  source 1..20: mol_type = other DNA
taccgcaacgggtgatttca

SEQ ID NO: 10426 - DNA, 20 bp, synthetic construct
  source 1..20: mol_type = other DNA
ctactccactatacattatc

SEQ ID NO: 10427 - DNA, 20 bp, synthetic construct
  source 1..20: mol_type = other DNA
accgccttctttcatggaaa

SEQ ID NO: 10428 - DNA, 20 bp, synthetic construct
  source 1..20: mol_type = other DNA
ttaagacctaacggcaactt

SEQ ID NO: 10429 - DNA, 20 bp, synthetic construct
  source 1..20: mol_type = other DNA
tagctataagatctcctgct

SEQ ID NO: 10430 - DNA, 20 bp, synthetic construct
  source 1..20: mol_type = other DNA
atccaatcgtagcctaacgc

SEQ ID NO: 10431 - DNA, 20 bp, synthetic construct
  source 1..20: mol_type = other DNA
cctctctgtcaggctatccc

SEQ ID NO: 10432 - DNA, 20 bp, synthetic construct
  source 1..20: mol_type = other DNA
tggtcttctcattgtccgag

SEQ ID NO: 10433 - DNA, 20 bp, synthetic construct
  source 1..20: mol_type = other DNA
accatcgttagtgataggag

SEQ ID NO: 10434 - DNA, 20 bp, synthetic construct
  source 1..20: mol_type = other DNA
actatacgtacagccctcga

SEQ ID NO: 10435 - DNA, 20 bp, synthetic construct
  source 1..20: mol_type = other DNA
gggtctgtgtagatttccgt

SEQ ID NO: 10436 - DNA, 20 bp, synthetic construct
  source 1..20: mol_type = other DNA
gctatccgtgggcaaagaag

SEQ ID NO: 10437 - DNA, 20 bp, synthetic construct
  source 1..20: mol_type = other DNA
agtgtgctgtgcatccactt

SEQ ID NO: 10438 - DNA, 20 bp, synthetic construct
  source 1..20: mol_type = other DNA
taacgatataccaaggacaa

SEQ ID NO: 10439 - DNA, 20 bp, synthetic construct
  source 1..20: mol_type = other DNA
agtatttgaaggattacatc

SEQ ID NO: 10440 - DNA, 20 bp, synthetic construct
  source 1..20: mol_type = other DNA
actttcttcgtacgagactt

SEQ ID NO: 10441 - DNA, 20 bp, synthetic construct
  source 1..20: mol_type = other DNA
aatcagtctagtacagagat

SEQ ID NO: 10442 - DNA, 20 bp, synthetic construct
  source 1..20: mol_type = other DNA
tgaggtcggcagtcacaatc

SEQ ID NO: 10443 - DNA, 20 bp, synthetic construct
  source 1..20: mol_type = other DNA
aggcgtgtatctcatctcgg

SEQ ID NO: 10444 - DNA, 20 bp, synthetic construct
  source 1..20: mol_type = other DNA
caagttctatctcaccagcc

SEQ ID NO: 10445 - DNA, 20 bp, synthetic construct
  source 1..20: mol_type = other DNA
ctacaatcagcttcgttata

SEQ ID NO: 10446 - DNA, 20 bp, synthetic construct
  source 1..20: mol_type = other DNA
ctctaccagtcgtgtacgct

SEQ ID NO: 10447 - DNA, 20 bp, synthetic construct
  source 1..20: mol_type = other DNA
attaagccagtggagatgag

SEQ ID NO: 10448 - DNA, 20 bp, synthetic construct
  source 1..20: mol_type = other DNA
tgtgctgatggagggaatcc

SEQ ID NO: 10449 - DNA, 20 bp, synthetic construct
  source 1..20: mol_type = other DNA
aacatgagcgccacggttaa

SEQ ID NO: 10450 - DNA, 20 bp, synthetic construct
  source 1..20: mol_type = other DNA
catcgatacctcaaggtgaa

SEQ ID NO: 10451 - DNA, 20 bp, synthetic construct
  source 1..20: mol_type = other DNA
gcgtgtggcctgaggagact

SEQ ID NO: 10452 - DNA, 20 bp, synthetic construct
  source 1..20: mol_type = other DNA
atgtgatgggtaacggtata

SEQ ID NO: 10453 - DNA, 20 bp, synthetic construct
  source 1..20: mol_type = other DNA
cgagctcaaagcgacaacac

SEQ ID NO: 10454 - DNA, 20 bp, synthetic construct
  source 1..20: mol_type = other DNA
ggccgaagatgccagacatc

SEQ ID NO: 10455 - DNA, 20 bp, synthetic construct
  source 1..20: mol_type = other DNA
cactttatggctcgcagacg

SEQ ID NO: 10456 - DNA, 20 bp, synthetic construct
  source 1..20: mol_type = other DNA
ttagcgacgatccaatggta

SEQ ID NO: 10457 - DNA, 20 bp, synthetic construct
  source 1..20: mol_type = other DNA
ttcccacctttcaactagtc

SEQ ID NO: 10458 - DNA, 20 bp, synthetic construct
  source 1..20: mol_type = other DNA
atttacagctggtccggaat

SEQ ID NO: 10459 - DNA, 20 bp, synthetic construct
  source 1..20: mol_type = other DNA
tatgcacgactagtctggcg

SEQ ID NO: 10460 - DNA, 20 bp, synthetic construct
  source 1..20: mol_type = other DNA
aaaccgcgcaatccatccag

SEQ ID NO: 10461 - DNA, 20 bp, synthetic construct
  source 1..20: mol_type = other DNA
ccaccagatcggcgacacgc

SEQ ID NO: 10462 - DNA, 20 bp, synthetic construct
  source 1..20: mol_type = other DNA
gtcaaacctggagtcgtgcg

SEQ ID NO: 10463 - DNA, 20 bp, synthetic construct
  source 1..20: mol_type = other DNA
gtacgggtacccataatccg

SEQ ID NO: 10464 - DNA, 20 bp, synthetic construct
  source 1..20: mol_type = other DNA
cctagtagccttcaaagtat

SEQ ID NO: 10465 - DNA, 20 bp, synthetic construct
  source 1..20: mol_type = other DNA
tagttccaagtcgtacataa

SEQ ID NO: 10466 - DNA, 20 bp, synthetic construct
  source 1..20: mol_type = other DNA
actcgtgatccgtacgcagt

SEQ ID NO: 10467 - DNA, 20 bp, synthetic construct
  source 1..20: mol_type = other DNA
cccttacacccaggaattat

SEQ ID NO: 10468 - DNA, 20 bp, synthetic construct
  source 1..20: mol_type = other DNA
gtgtgccaggctacgttgca

SEQ ID NO: 10469 - DNA, 20 bp, synthetic construct
  source 1..20: mol_type = other DNA
aatgcgtgcagtcctgttag

SEQ ID NO: 10470 - DNA, 20 bp, synthetic construct
  source 1..20: mol_type = other DNA
acgcgaggtagctgtgattg

SEQ ID NO: 10471 - DNA, 20 bp, synthetic construct
  source 1..20: mol_type = other DNA
aattaggacggtcttccact

SEQ ID NO: 10472 - DNA, 20 bp, synthetic construct
  source 1..20: mol_type = other DNA
cacagatctccaacgaccga

SEQ ID NO: 10473 - DNA, 20 bp, synthetic construct
  source 1..20: mol_type = other DNA
tcagttgccgaagcagaatc

SEQ ID NO: 10474 - DNA, 20 bp, synthetic construct
  source 1..20: mol_type = other DNA
caagccaggacacgggaggt

SEQ ID NO: 10475 - DNA, 20 bp, synthetic construct
  source 1..20: mol_type = other DNA
gacttcgcgtaataagatgt

SEQ ID NO: 10476 - DNA, 20 bp, synthetic construct
  source 1..20: mol_type = other DNA
ccggtatggatctgccgtgc

SEQ ID NO: 10477 - DNA, 20 bp, synthetic construct
  source 1..20: mol_type = other DNA
cacttacgaatggtcactcg

SEQ ID NO: 10478 - DNA, 20 bp, synthetic construct
  source 1..20: mol_type = other DNA
gtgatcagaggcagccgtcg

SEQ ID NO: 10479 - DNA, 20 bp, synthetic construct
  source 1..20: mol_type = other DNA
aaccgccctttgagctgagt

SEQ ID NO: 10480 - DNA, 20 bp, synthetic construct
  source 1..20: mol_type = other DNA
ggaccattaattgctcagaa

SEQ ID NO: 10481 - DNA, 20 bp, synthetic construct
  source 1..20: mol_type = other DNA
tgcacatggtctcttcgcgg

SEQ ID NO: 10482 - DNA, 20 bp, synthetic construct
  source 1..20: mol_type = other DNA
ggaatatctgcctatttcca

SEQ ID NO: 10483 - DNA, 20 bp, synthetic construct
  source 1..20: mol_type = other DNA
cgcggtgcctttaataaatc

SEQ ID NO: 10484 - DNA, 20 bp, synthetic construct
  source 1..20: mol_type = other DNA
acatgctggctattgaaccc

SEQ ID NO: 10485 - DNA, 20 bp, synthetic construct
  source 1..20: mol_type = other DNA
tgccgtttattgatacgtct

SEQ ID NO: 10486 - DNA, 20 bp, synthetic construct
  source 1..20: mol_type = other DNA
acgctaccatctttgggaaa

SEQ ID NO: 10487 - DNA, 20 bp, synthetic construct
  source 1..20: mol_type = other DNA
ccaaattacgcatgatcggc

SEQ ID NO: 10488 - DNA, 20 bp, synthetic construct
  source 1..20: mol_type = other DNA
tctacgggttgcgccgaaac

SEQ ID NO: 10489 - DNA, 20 bp, synthetic construct
  source 1..20: mol_type = other DNA
aaagaacgcccttataacgt

SEQ ID NO: 10490 - DNA, 20 bp, synthetic construct
  source 1..20: mol_type = other DNA
ctcaaactcaataatccgaa

SEQ ID NO: 10491 - DNA, 20 bp, synthetic construct
  source 1..20: mol_type = other DNA
aacacgcaagctcgcgagtg

SEQ ID NO: 10492 - DNA, 20 bp, synthetic construct
  source 1..20: mol_type = other DNA
tattcggccgtgcgccggta

SEQ ID NO: 10493 - DNA, 20 bp, synthetic construct
  source 1..20: mol_type = other DNA
caagacgtccgcctagctac

SEQ ID NO: 10494 - DNA, 20 bp, synthetic construct
  source 1..20: mol_type = other DNA
gcgccttatttagaacgcga

SEQ ID NO: 10495 - DNA, 20 bp, synthetic construct
  source 1..20: mol_type = other DNA
gaatttagacaccgttgtcc

SEQ ID NO: 10496 - DNA, 20 bp, synthetic construct
  source 1..20: mol_type = other DNA
atgctgagtattccgatctt

SEQ ID NO: 10497 - DNA, 20 bp, synthetic construct
  source 1..20: mol_type = other DNA
atagatttcaaaccacagac

SEQ ID NO: 10498 - DNA, 20 bp, synthetic construct
  source 1..20: mol_type = other DNA
tagtgtaggacaatcgtcta

SEQ ID NO: 10499 - DNA, 20 bp, synthetic construct
  source 1..20: mol_type = other DNA
ctgtcaacagcctcgtactc

SEQ ID NO: 10500 - DNA, 20 bp, synthetic construct
  source 1..20: mol_type = other DNA
gtgtgaaagcatacctctca

SEQ ID NO: 10501 - DNA, 20 bp, synthetic construct
  source 1..20: mol_type = other DNA
accagcacctttaggcggga

SEQ ID NO: 10502 - DNA, 20 bp, synthetic construct
  source 1..20: mol_type = other DNA
aaccgtcatctcggtcagtt

SEQ ID NO: 10503 - DNA, 20 bp, synthetic construct
  source 1..20: mol_type = other DNA
gcactaccagagacaaagca

SEQ ID NO: 10504 - DNA, 20 bp, synthetic construct
  source 1..20: mol_type = other DNA
tccggtttgcgctattcgtt

SEQ ID NO: 10505 - DNA, 20 bp, synthetic construct
  source 1..20: mol_type = other DNA
tgggcagtcagggatgagag

SEQ ID NO: 10506 - DNA, 20 bp, synthetic construct
  source 1..20: mol_type = other DNA
agattacctgttgaggatca

SEQ ID NO: 10507 - DNA, 20 bp, synthetic construct
  source 1..20: mol_type = other DNA
ctataacgtgagcggccacg

SEQ ID NO: 10508 - DNA, 20 bp, synthetic construct
  source 1..20: mol_type = other DNA
cctcaatatgaaatcatggg

SEQ ID NO: 10509 - DNA, 20 bp, synthetic construct
  source 1..20: mol_type = other DNA
ctaaatagacccagtatgca

SEQ ID NO: 10510 - DNA, 20 bp, synthetic construct
  source 1..20: mol_type = other DNA
ggcccgtttacccgaacctg

SEQ ID NO: 10511 - DNA, 20 bp, synthetic construct
  source 1..20: mol_type = other DNA
tacatatagtggttccctat

SEQ ID NO: 10512 - DNA, 20 bp, synthetic construct
  source 1..20: mol_type = other DNA
aacgctgggactaactggtt

SEQ ID NO: 10513 - DNA, 20 bp, synthetic construct
  source 1..20: mol_type = other DNA
gataagtttccgaaacccta

SEQ ID NO: 10514 - DNA, 20 bp, synthetic construct
  source 1..20: mol_type = other DNA
attgtgcctcaggcgaagtg

SEQ ID NO: 10515 - DNA, 20 bp, synthetic construct
  source 1..20: mol_type = other DNA
agtttctcacgctattgcgt

SEQ ID NO: 10516 - DNA, 20 bp, synthetic construct
  source 1..20: mol_type = other DNA
tcatcgaccaatccggtgat

SEQ ID NO: 10517 - DNA, 20 bp, synthetic construct
  source 1..20: mol_type = other DNA
gtacatgacagatcgttata

SEQ ID NO: 10518 - DNA, 20 bp, synthetic construct
  source 1..20: mol_type = other DNA
gatgcaacgtggtattcagg

SEQ ID NO: 10519 - DNA, 20 bp, synthetic construct
  source 1..20: mol_type = other DNA
aaacggttagttgctggaat

SEQ ID NO: 10520 - DNA, 20 bp, synthetic construct
  source 1..20: mol_type = other DNA
atttgggcacaccagacgta

SEQ ID NO: 10521 - DNA, 20 bp, synthetic construct
  source 1..20: mol_type = other DNA
aagtactttgctagcgcctc

SEQ ID NO: 10522 - DNA, 20 bp, synthetic construct
  source 1..20: mol_type = other DNA
gtagtatgaacacagctccg

SEQ ID NO: 10523 - DNA, 20 bp, synthetic construct
  source 1..20: mol_type = other DNA
tagccatcggatcctggacg

SEQ ID NO: 10524 - DNA, 20 bp, synthetic construct
  source 1..20: mol_type = other DNA
cggatgaaccggccacggta

SEQ ID NO: 10525 - DNA, 20 bp, synthetic construct
  source 1..20: mol_type = other DNA
acagtagttctaagcgtaga

SEQ ID NO: 10526 - DNA, 20 bp, synthetic construct
  source 1..20: mol_type = other DNA
tctggcattactgcacaggt

SEQ ID NO: 10527 - DNA, 20 bp, synthetic construct
  source 1..20: mol_type = other DNA
ggattactacagcttccttt

SEQ ID NO: 10528 - DNA, 20 bp, synthetic construct
  source 1..20: mol_type = other DNA
gagacacatcgtggttcgtg

SEQ ID NO: 10529 - DNA, 20 bp, synthetic construct
  source 1..20: mol_type = other DNA
aactttcaactagtctctat

SEQ ID NO: 10530 - DNA, 20 bp, synthetic construct
  source 1..20: mol_type = other DNA
gcgtgctgtagtgacaggat

SEQ ID NO: 10531 - DNA, 20 bp, synthetic construct
  source 1..20: mol_type = other DNA
ctcaatgactactgatcgac

SEQ ID NO: 10532 - DNA, 20 bp, synthetic construct
  source 1..20: mol_type = other DNA
agctctaaacgatgggatgc

SEQ ID NO: 10533 - DNA, 20 bp, synthetic construct
  source 1..20: mol_type = other DNA
tgctaccctccggattctcg

SEQ ID NO: 10534 - DNA, 20 bp, synthetic construct
  source 1..20: mol_type = other DNA
cgggcgtcatcacggaacat

SEQ ID NO: 10535 - DNA, 20 bp, synthetic construct
  source 1..20: mol_type = other DNA
gactaggatcaaacaacgtt

SEQ ID NO: 10536 - DNA, 20 bp, synthetic construct
  source 1..20: mol_type = other DNA
tattgatcaccgtgaagaag

SEQ ID NO: 10537 - DNA, 20 bp, synthetic construct
  source 1..20: mol_type = other DNA
taagactctcacagtgtgag

SEQ ID NO: 10538 - DNA, 20 bp, synthetic construct
  source 1..20: mol_type = other DNA
agtggatcgggctagcgaca

SEQ ID NO: 10539 - DNA, 20 bp, synthetic construct
  source 1..20: mol_type = other DNA
acctcaaagaaagcacgcac

SEQ ID NO: 10540 - DNA, 20 bp, synthetic construct
  source 1..20: mol_type = other DNA
tcccttgggagagtctttga

SEQ ID NO: 10541 - DNA, 20 bp, synthetic construct
  source 1..20: mol_type = other DNA
gaatttaagggagtatgtgc

SEQ ID NO: 10542 - DNA, 20 bp, synthetic construct
  source 1..20: mol_type = other DNA
acaaagcgtcagagtatttg

SEQ ID NO: 10543 - DNA, 20 bp, synthetic construct
  source 1..20: mol_type = other DNA
cggtagttatcgcagtccag

SEQ ID NO: 10544 - DNA, 20 bp, synthetic construct
  source 1..20: mol_type = other DNA
ccgtggttatataaccattt

SEQ ID NO: 10545 - DNA, 20 bp, synthetic construct
  source 1..20: mol_type = other DNA
atgagcctttcccatgctga

SEQ ID NO: 10546 - DNA, 20 bp, synthetic construct
  source 1..20: mol_type = other DNA
aaggccctaactgcgaaagg

SEQ ID NO: 10547 - DNA, 20 bp, synthetic construct
  source 1..20: mol_type = other DNA
atcctatagtacttgtggga

SEQ ID NO: 10548 - DNA, 20 bp, synthetic construct
  source 1..20: mol_type = other DNA
agatggccgaaactctttac

SEQ ID NO: 10549 - DNA, 20 bp, synthetic construct
  source 1..20: mol_type = other DNA
tgttagcagggctaagagaa

SEQ ID NO: 10550 - DNA, 20 bp, synthetic construct
  source 1..20: mol_type = other DNA
ttgcctctggtatatccaaa

SEQ ID NO: 10551 - DNA, 20 bp, synthetic construct
  source 1..20: mol_type = other DNA
tccactgtccaccgaaggct

SEQ ID NO: 10552 - DNA, 20 bp, synthetic construct
  source 1..20: mol_type = other DNA
atggaaacgcatacactgca

SEQ ID NO: 10553 - DNA, 20 bp, synthetic construct
  source 1..20: mol_type = other DNA
aagacgtaagtcacggtgac

SEQ ID NO: 10554 - DNA, 20 bp, synthetic construct
  source 1..20: mol_type = other DNA
ctaggctcggtggtttaccc

SEQ ID NO: 10555 - DNA, 20 bp, synthetic construct
  source 1..20: mol_type = other DNA
catacagcctatggcgcata

SEQ ID NO: 10556 - DNA, 20 bp, synthetic construct
  source 1..20: mol_type = other DNA
ctcgtagccacggaccttca

SEQ ID NO: 10557 - DNA, 20 bp, synthetic construct
  source 1..20: mol_type = other DNA
cgttcactcctgccaaatta

SEQ ID NO: 10558 - DNA, 20 bp, synthetic construct
  source 1..20: mol_type = other DNA
tggtcaagtgacccactatt

SEQ ID NO: 10559 - DNA, 20 bp, synthetic construct
  source 1..20: mol_type = other DNA
tctaggagcatatcgcgatc

SEQ ID NO: 10560 - DNA, 20 bp, synthetic construct
  source 1..20: mol_type = other DNA
cgtgccaccgggtaagatga

SEQ ID NO: 10561 - DNA, 20 bp, synthetic construct
  source 1..20: mol_type = other DNA
tcgtaggctaaggcagtcgg

SEQ ID NO: 10562 - DNA, 20 bp, synthetic construct
  source 1..20: mol_type = other DNA
tatctgtcgccctcgcttgg

SEQ ID NO: 10563 - DNA, 20 bp, synthetic construct
  source 1..20: mol_type = other DNA
tcttgcgtgtcctacaacgc

SEQ ID NO: 10564 - DNA, 20 bp, synthetic construct
  source 1..20: mol_type = other DNA
ggtttggacgaacgcatttg

SEQ ID NO: 10565 - DNA, 20 bp, synthetic construct
  source 1..20: mol_type = other DNA
ctataaagtaggactcgata

SEQ ID NO: 10566 - DNA, 20 bp, synthetic construct
  source 1..20: mol_type = other DNA
aagaggttatctcagccata

SEQ ID NO: 10567 - DNA, 20 bp, synthetic construct
  source 1..20: mol_type = other DNA
atgccgcactaattattgtg

SEQ ID NO: 10568 - DNA, 20 bp, synthetic construct
  source 1..20: mol_type = other DNA
atgcgcgcgttatcccatgt

SEQ ID NO: 10569 - DNA, 20 bp, synthetic construct
  source 1..20: mol_type = other DNA
caaacagtgcatcccagaat

SEQ ID NO: 10570 - DNA, 20 bp, synthetic construct
  source 1..20: mol_type = other DNA
gttgcttagtattgatccgt

SEQ ID NO: 10571 - DNA, 20 bp, synthetic construct
  source 1..20: mol_type = other DNA
atatcagtggcgtccaacgt

SEQ ID NO: 10572 - DNA, 20 bp, synthetic construct
  source 1..20: mol_type = other DNA
cgaattgcaggtcttaagta

SEQ ID NO: 10573 - DNA, 20 bp, synthetic construct
  source 1..20: mol_type = other DNA
gccgaaccactttaattaat

SEQ ID NO: 10574 - DNA, 20 bp, synthetic construct
  source 1..20: mol_type = other DNA
tggccctccaatctctgagt

SEQ ID NO: 10575 - DNA, 20 bp, synthetic construct
  source 1..20: mol_type = other DNA
gattgtctgctcaggcagcg

SEQ ID NO: 10576 - DNA, 20 bp, synthetic construct
  source 1..20: mol_type = other DNA
cgtctttactactacgcagt

SEQ ID NO: 10577 - DNA, 20 bp, synthetic construct
  source 1..20: mol_type = other DNA
ggaaggctgacttctctgag

SEQ ID NO: 10578 - DNA, 20 bp, synthetic construct
  source 1..20: mol_type = other DNA
catggacagggtagcggcct

SEQ ID NO: 10579 - DNA, 20 bp, synthetic construct
  source 1..20: mol_type = other DNA
aatgcacacgccgattccta

SEQ ID NO: 10580 - DNA, 20 bp, synthetic construct
  source 1..20: mol_type = other DNA
cttgaaccttctacggagac

SEQ ID NO: 10581 - DNA, 20 bp, synthetic construct
  source 1..20: mol_type = other DNA
gcaattagggctggaggaag

SEQ ID NO: 10582 - DNA, 20 bp, synthetic construct
  source 1..20: mol_type = other DNA
tgggatctgctcataaagtt

SEQ ID NO: 10583 - DNA, 20 bp, synthetic construct
  source 1..20: mol_type = other DNA
ctcgctcatcaatgtttggt

SEQ ID NO: 10584 - DNA, 20 bp, synthetic construct
  source 1..20: mol_type = other DNA
gttacaaatcggagagggtg

SEQ ID NO: 10585 - DNA, 20 bp, synthetic construct
  source 1..20: mol_type = other DNA
acggtaggaatcttctcggc

SEQ ID NO: 10586 - DNA, 20 bp, synthetic construct
  source 1..20: mol_type = other DNA
atacaggcaccgatatgtcg

SEQ ID NO: 10587 - DNA, 20 bp, synthetic construct
  source 1..20: mol_type = other DNA
acgaatccactctcacagat

SEQ ID NO: 10588 - DNA, 20 bp, synthetic construct
  source 1..20: mol_type = other DNA
cgagtcgttaaacgccctgg

SEQ ID NO: 10589 - DNA, 20 bp, synthetic construct
  source 1..20: mol_type = other DNA
gttccgataagagaggcggg

SEQ ID NO: 10590 - DNA, 20 bp, synthetic construct
  source 1..20: mol_type = other DNA
ggcatcagtggtatacgata

SEQ ID NO: 10591 - DNA, 20 bp, synthetic construct
  source 1..20: mol_type = other DNA
acggacaaacaaagaataga

SEQ ID NO: 10592 - DNA, 20 bp, synthetic construct
  source 1..20: mol_type = other DNA
ccgcgaactacataacctga

SEQ ID NO: 10593 - DNA, 20 bp, synthetic construct
  source 1..20: mol_type = other DNA
aagggagccctcgggaaact

SEQ ID NO: 10594 - DNA, 20 bp, synthetic construct
  source 1..20: mol_type = other DNA
tgctgggcaaacgccgttga

SEQ ID NO: 10595 - DNA, 20 bp, synthetic construct
  source 1..20: mol_type = other DNA
aatacgtacggcgaggtttg

SEQ ID NO: 10596 - DNA, 20 bp, synthetic construct
  source 1..20: mol_type = other DNA
agttctgtaagtgggcgatt

SEQ ID NO: 10597 - DNA, 20 bp, synthetic construct
  source 1..20: mol_type = other DNA
acagcaacaaagattctagc

SEQ ID NO: 10598 - DNA, 20 bp, synthetic construct
  source 1..20: mol_type = other DNA
tcaaagtttgcggtctgtgc

SEQ ID NO: 10599 - DNA, 20 bp, synthetic construct
  source 1..20: mol_type = other DNA
accgtcagagtcactattat

SEQ ID NO: 10600 - DNA, 20 bp, synthetic construct
  source 1..20: mol_type = other DNA
aacccaactgcgtttgcaca

SEQ ID NO: 10601 - DNA, 20 bp, synthetic construct
  source 1..20: mol_type = other DNA
gtccgctctaacgaccggta

SEQ ID NO: 10602 - DNA, 20 bp, synthetic construct
  source 1..20: mol_type = other DNA
ctaaggcacaatggctaacc

SEQ ID NO: 10603 - DNA, 20 bp, synthetic construct
  source 1..20: mol_type = other DNA
agtttgtgtaagctgccgtc

SEQ ID NO: 10604 - DNA, 20 bp, synthetic construct
  source 1..20: mol_type = other DNA
atcgacttctccctaaccag

SEQ ID NO: 10605 - DNA, 20 bp, synthetic construct
  source 1..20: mol_type = other DNA
attacggctcaaagctgttg

SEQ ID NO: 10606 - DNA, 20 bp, synthetic construct
  source 1..20: mol_type = other DNA
tgattcacagacgaactcga

SEQ ID NO: 10607 - DNA, 20 bp, synthetic construct
  source 1..20: mol_type = other DNA
acagtgtgcgtgactatcga

SEQ ID NO: 10608 - DNA, 20 bp, synthetic construct
  source 1..20: mol_type = other DNA
gcagataattaacgggtctg

SEQ ID NO: 10609 - DNA, 20 bp, synthetic construct
  source 1..20: mol_type = other DNA
tcaaaggtcgtcatagggag

SEQ ID NO: 10610 - DNA, 20 bp, synthetic construct
  source 1..20: mol_type = other DNA
agaagtctactgaaccagat

SEQ ID NO: 10611 - DNA, 20 bp, synthetic construct
  source 1..20: mol_type = other DNA
tttaaatggtgccgcacttg

SEQ ID NO: 10612 - DNA, 20 bp, synthetic construct
  source 1..20: mol_type = other DNA
cagtcggtggaaattacact

SEQ ID NO: 10613 - DNA, 20 bp, synthetic construct
  source 1..20: mol_type = other DNA
aagtcaatgtcatcggttcc

SEQ ID NO: 10614 - DNA, 20 bp, synthetic construct
  source 1..20: mol_type = other DNA
gggacgcagctaagattcat

SEQ ID NO: 10615 - DNA, 20 bp, synthetic construct
  source 1..20: mol_type = other DNA
aactaaccctcaataagact

SEQ ID NO: 10616 - DNA, 20 bp, synthetic construct
  source 1..20: mol_type = other DNA
aaagagtcgcgtgaacgtca

SEQ ID NO: 10617 - DNA, 20 bp, synthetic construct
  source 1..20: mol_type = other DNA
gtttcaatcgcgtacagaat

SEQ ID NO: 10618 - DNA, 20 bp, synthetic construct
  source 1..20: mol_type = other DNA
atttagctcaatatgatggc

SEQ ID NO: 10619 - DNA, 20 bp, synthetic construct
  source 1..20: mol_type = other DNA
ggtggtgagatctaaagatt

SEQ ID NO: 10620 - DNA, 20 bp, synthetic construct
  source 1..20: mol_type = other DNA
ctcctgaggaccatgtaacg

SEQ ID NO: 10621 - DNA, 20 bp, synthetic construct
  source 1..20: mol_type = other DNA
ctaactgactagcccgctga

SEQ ID NO: 10622 - DNA, 20 bp, synthetic construct
  source 1..20: mol_type = other DNA
cccatttatgagggacgaac

SEQ ID NO: 10623 - DNA, 20 bp, synthetic construct
  source 1..20: mol_type = other DNA
tttctcttgtcgctcaccca

SEQ ID NO: 10624 - DNA, 20 bp, synthetic construct
  source 1..20: mol_type = other DNA
gtgacttaaagactcataat

SEQ ID NO: 10625 - DNA, 20 bp, synthetic construct
  source 1..20: mol_type = other DNA
cttctcaaaccttcgtagaa

SEQ ID NO: 10626 - DNA, 20 bp, synthetic construct
  source 1..20: mol_type = other DNA
atggaatttctccactcgcg

SEQ ID NO: 10627 - DNA, 20 bp, synthetic construct
  source 1..20: mol_type = other DNA
tgtgttagtcgcaagcctcc

SEQ ID NO: 10628 - DNA, 20 bp, synthetic construct
  source 1..20: mol_type = other DNA
cggaaggtcgaactgaccaa

SEQ ID NO: 10629 - DNA, 20 bp, synthetic construct
  source 1..20: mol_type = other DNA
gacccggttatgggagtaaa

SEQ ID NO: 10630 - DNA, 20 bp, synthetic construct
  source 1..20: mol_type = other DNA
ctatcttatcgtatccagct

SEQ ID NO: 10631 - DNA, 20 bp, synthetic construct
  source 1..20: mol_type = other DNA
gcatagaaacatccatatcc

SEQ ID NO: 10632 - DNA, 20 bp, synthetic construct
  source 1..20: mol_type = other DNA
cggatcctggtctactgccg

SEQ ID NO: 10633 - DNA, 20 bp, synthetic construct
  source 1..20: mol_type = other DNA
ttccctaggcgtagagatgt

SEQ ID NO: 10634 - DNA, 20 bp, synthetic construct
  source 1..20: mol_type = other DNA
tcccaatcagagcagatacg

SEQ ID NO: 10635 - DNA, 20 bp, synthetic construct
  source 1..20: mol_type = other DNA
gtctaacacagtaccgggag

SEQ ID NO: 10636 - DNA, 20 bp, synthetic construct
  source 1..20: mol_type = other DNA
attgaggtaacgattgatac

SEQ ID NO: 10637 - DNA, 20 bp, synthetic construct
  source 1..20: mol_type = other DNA
agggaacctccactcccgca

SEQ ID NO: 10638 - DNA, 20 bp, synthetic construct
  source 1..20: mol_type = other DNA
agaactcgacgactttacgt

SEQ ID NO: 10639 - DNA, 20 bp, synthetic construct
  source 1..20: mol_type = other DNA
aggccgattcgccgttcgta

SEQ ID NO: 10640 - DNA, 20 bp, synthetic construct
  source 1..20: mol_type = other DNA
cgctagagctcaccgcactt

SEQ ID NO: 10641 - DNA, 20 bp, synthetic construct
  source 1..20: mol_type = other DNA
gccaggagatgcttgtgact

SEQ ID NO: 10642 - DNA, 20 bp, synthetic construct
  source 1..20: mol_type = other DNA
attggattacgtttgttcat

SEQ ID NO: 10643 - DNA, 20 bp, synthetic construct
  source 1..20: mol_type = other DNA
gtaactggtaggttccatag

SEQ ID NO: 10644 - DNA, 20 bp, synthetic construct
  source 1..20: mol_type = other DNA
ctacaattggtttaggcgga

SEQ ID NO: 10645 - DNA, 20 bp, synthetic construct
  source 1..20: mol_type = other DNA
tattcggtaccgcccacatc

SEQ ID NO: 10646 - DNA, 20 bp, synthetic construct
  source 1..20: mol_type = other DNA
attcattggccagtcgagca

SEQ ID NO: 10647 - DNA, 20 bp, synthetic construct
  source 1..20: mol_type = other DNA
aaacgactgaggacgtgtgt

SEQ ID NO: 10648 - DNA, 20 bp, synthetic construct
  source 1..20: mol_type = other DNA
ggaatgggagctcgaaccag

SEQ ID NO: 10649 - DNA, 20 bp, synthetic construct
  source 1..20: mol_type = other DNA
gcccatttcaaatcgtgtac

SEQ ID NO: 10650 - DNA, 20 bp, synthetic construct
  source 1..20: mol_type = other DNA
aaggcggtctcgctgtctca

SEQ ID NO: 10651 - DNA, 20 bp, synthetic construct
  source 1..20: mol_type = other DNA
agtcagtcgcagaagtctaa

SEQ ID NO: 10652 - DNA, 20 bp, synthetic construct
  source 1..20: mol_type = other DNA
gagccagtggcagcgaatgt

SEQ ID NO: 10653 - DNA, 20 bp, synthetic construct
  source 1..20: mol_type = other DNA
ttctatggaacatttggcat

SEQ ID NO: 10654 - DNA, 20 bp, synthetic construct
  source 1..20: mol_type = other DNA
atcttcccttagtctagcgc

SEQ ID NO: 10655 - DNA, 20 bp, synthetic construct
  source 1..20: mol_type = other DNA
acctacatatggattggata

SEQ ID NO: 10656 - DNA, 20 bp, synthetic construct
  source 1..20: mol_type = other DNA
ggattaccaagcaatccata

SEQ ID NO: 10657 - DNA, 20 bp, synthetic construct
  source 1..20: mol_type = other DNA
agcccattactgcagaatgg

SEQ ID NO: 10658 - DNA, 20 bp, synthetic construct
  source 1..20: mol_type = other DNA
ctgactgatcggtttaagtg

SEQ ID NO: 10659 - DNA, 20 bp, synthetic construct
  source 1..20: mol_type = other DNA
gtcctgataggagcagcaga

SEQ ID NO: 10660 - DNA, 20 bp, synthetic construct
  source 1..20: mol_type = other DNA
cgaatacactgtcctccgta

SEQ ID NO: 10661 - DNA, 20 bp, synthetic construct
  source 1..20: mol_type = other DNA
gttcaaggtcctgcggctat

SEQ ID NO: 10662 - DNA, 20 bp, synthetic construct
  source 1..20: mol_type = other DNA
gaaggacgcgggcttacgta

SEQ ID NO: 10663 - DNA, 20 bp, synthetic construct
  source 1..20: mol_type = other DNA
tgagcgtataagctccgcat

SEQ ID NO: 10664 - DNA, 20 bp, synthetic construct
  source 1..20: mol_type = other DNA
acgttctaaaccatttcgcg

SEQ ID NO: 10665 - DNA, 20 bp, synthetic construct
  source 1..20: mol_type = other DNA
ctgagaatctcgcccttgtt

SEQ ID NO: 10666 - DNA, 20 bp, synthetic construct
  source 1..20: mol_type = other DNA
tcttggcgctgacatttcac

SEQ ID NO: 10667 - DNA, 20 bp, synthetic construct
  source 1..20: mol_type = other DNA
tataggtacaaccggcaaca

SEQ ID NO: 10668 - DNA, 20 bp, synthetic construct
  source 1..20: mol_type = other DNA
agaaacttacagcacttgct

SEQ ID NO: 10669 - DNA, 20 bp, synthetic construct
  source 1..20: mol_type = other DNA
catacatgctccacttaagc

SEQ ID NO: 10670 - DNA, 20 bp, synthetic construct
  source 1..20: mol_type = other DNA
atcgtgtctgggtcgggatc

SEQ ID NO: 10671 - DNA, 20 bp, synthetic construct
  source 1..20: mol_type = other DNA
cttgccaagtgctcggtagg

SEQ ID NO: 10672 - DNA, 20 bp, synthetic construct
  source 1..20: mol_type = other DNA
acttccctgaaacctagaag

SEQ ID NO: 10673 - DNA, 20 bp, synthetic construct
  source 1..20: mol_type = other DNA
gactttggaggcatgggttt

SEQ ID NO: 10674 - DNA, 20 bp, synthetic construct
  source 1..20: mol_type = other DNA
cttgatcgataacacactcc

SEQ ID NO: 10675 - DNA, 20 bp, synthetic construct
  source 1..20: mol_type = other DNA
atccctgcgttgattagtcc

SEQ ID NO: 10676 - DNA, 20 bp, synthetic construct
  source 1..20: mol_type = other DNA
ctatcaactgactctcgtaa

SEQ ID NO: 10677 - DNA, 20 bp, synthetic construct
  source 1..20: mol_type = other DNA
gtatgatcctgcgtaaagtc

SEQ ID NO: 10678 - DNA, 20 bp, synthetic construct
  source 1..20: mol_type = other DNA
atggagacttaattgtgtta

SEQ ID NO: 10679 - DNA, 20 bp, synthetic construct
  source 1..20: mol_type = other DNA
ggcttctgcactgtgcatta

SEQ ID NO: 10680 - DNA, 20 bp, synthetic construct
  source 1..20: mol_type = other DNA
ctataagtcgtgatggactc

SEQ ID NO: 10681 - DNA, 20 bp, synthetic construct
  source 1..20: mol_type = other DNA
gaagcgcgtctcctgggcaa

SEQ ID NO: 10682 - DNA, 20 bp, synthetic construct
  source 1..20: mol_type = other DNA
gcccatccgaactagcgcta

SEQ ID NO: 10683 - DNA, 20 bp, synthetic construct
  source 1..20: mol_type = other DNA
cacgttcctgatattgcagc

SEQ ID NO: 10684 - DNA, 20 bp, synthetic construct
  source 1..20: mol_type = other DNA
cgactgaagaggaccataca

SEQ ID NO: 10685 - DNA, 20 bp, synthetic construct
  source 1..20: mol_type = other DNA
aactggctagtcctcttacg

SEQ ID NO: 10686 - DNA, 20 bp, synthetic construct
  source 1..20: mol_type = other DNA
agttagaggcgcagaccaaa

SEQ ID NO: 10687 - DNA, 20 bp, synthetic construct
  source 1..20: mol_type = other DNA
cgcaaccttggcgttatgaa

SEQ ID NO: 10688 - DNA, 20 bp, synthetic construct
  source 1..20: mol_type = other DNA
ctgctatttaattgggactt

SEQ ID NO: 10689 - DNA, 20 bp, synthetic construct
  source 1..20: mol_type = other DNA
caagacgtgcatgaatgtag

SEQ ID NO: 10690 - DNA, 20 bp, synthetic construct
  source 1..20: mol_type = other DNA
tgagtagtttccgcgataga

SEQ ID NO: 10691 - DNA, 20 bp, synthetic construct
  source 1..20: mol_type = other DNA
ctcgataccattgggcacaa

SEQ ID NO: 10692 - DNA, 20 bp, synthetic construct
  source 1..20: mol_type = other DNA
tcactatagagaatggttga

SEQ ID NO: 10693 - DNA, 20 bp, synthetic construct
  source 1..20: mol_type = other DNA
gcaagactggcaattgcttc

SEQ ID NO: 10694 - DNA, 20 bp, synthetic construct
  source 1..20: mol_type = other DNA
caccctcaggtgcaaagatg

SEQ ID NO: 10695 - DNA, 20 bp, synthetic construct
  source 1..20: mol_type = other DNA
gagggtggagggtctaatac

SEQ ID NO: 10696 - DNA, 20 bp, synthetic construct
  source 1..20: mol_type = other DNA
ttaccctgggctgtcctggg

SEQ ID NO: 10697 - DNA, 20 bp, synthetic construct
  source 1..20: mol_type = other DNA
ttatctaagccaagcgccac

SEQ ID NO: 10698 - DNA, 20 bp, synthetic construct
  source 1..20: mol_type = other DNA
taatctacgagacgcacgaa

SEQ ID NO: 10699 - DNA, 20 bp, synthetic construct
  source 1..20: mol_type = other DNA
tactaaggatgggctgtcta

SEQ ID NO: 10700 - DNA, 20 bp, synthetic construct
  source 1..20: mol_type = other DNA
taccgggtgacacgtgtcat

SEQ ID NO: 10701 - DNA, 20 bp, synthetic construct
  source 1..20: mol_type = other DNA
cgtggtcagtcgtgttgcgc

SEQ ID NO: 10702 - DNA, 20 bp, synthetic construct
  source 1..20: mol_type = other DNA
actaacctaccaaataaagg

SEQ ID NO: 10703 - DNA, 20 bp, synthetic construct
  source 1..20: mol_type = other DNA
cctcttccggtggaaactac

SEQ ID NO: 10704 - DNA, 20 bp, synthetic construct
  source 1..20: mol_type = other DNA
cgcactacactagcgaaccc

SEQ ID NO: 10705 - DNA, 20 bp, synthetic construct
  source 1..20: mol_type = other DNA
aagtatatccgaaccgatca

SEQ ID NO: 10706 - DNA, 20 bp, synthetic construct
  source 1..20: mol_type = other DNA
atgttggcgatgtcgccttc

SEQ ID NO: 10707 - DNA, 20 bp, synthetic construct
  source 1..20: mol_type = other DNA
catcatgatcaaccgtttca

SEQ ID NO: 10708 - DNA, 20 bp, synthetic construct
  source 1..20: mol_type = other DNA
cgatagctgtgactcccttt

SEQ ID NO: 10709 - DNA, 20 bp, synthetic construct
  source 1..20: mol_type = other DNA
gcacgatggagctccctagt

SEQ ID NO: 10710 - DNA, 20 bp, synthetic construct
  source 1..20: mol_type = other DNA
gtggttacgtagtcaatttg

SEQ ID NO: 10711 - DNA, 20 bp, synthetic construct
  source 1..20: mol_type = other DNA
acatttgggtgctggccatg

SEQ ID NO: 10712 - DNA, 20 bp, synthetic construct
  source 1..20: mol_type = other DNA
cccaagtgcggacgttatca

SEQ ID NO: 10713 - DNA, 20 bp, synthetic construct
  source 1..20: mol_type = other DNA
gaccatccaataatgggcat

SEQ ID NO: 10714 - DNA, 20 bp, synthetic construct
  source 1..20: mol_type = other DNA
accgttgagtctcagcgatg

SEQ ID NO: 10715 - DNA, 20 bp, synthetic construct
  source 1..20: mol_type = other DNA
tatgccaggaaagcgacgac

SEQ ID NO: 10716 - DNA, 20 bp, synthetic construct
  source 1..20: mol_type = other DNA
accctaaagttgatggagtc

SEQ ID NO: 10717 - DNA, 20 bp, synthetic construct
  source 1..20: mol_type = other DNA
ccacgtatgagagccaccgc

SEQ ID NO: 10718 - DNA, 20 bp, synthetic construct
  source 1..20: mol_type = other DNA
tcgggcttatagaaatgagg

SEQ ID NO: 10719 - DNA, 20 bp, synthetic construct
  source 1..20: mol_type = other DNA
ggtggcgagatcgatagtgt

SEQ ID NO: 10720 - DNA, 20 bp, synthetic construct
  source 1..20: mol_type = other DNA
cgcatgatgattatcgggcc

SEQ ID NO: 10721 - DNA, 20 bp, synthetic construct
  source 1..20: mol_type = other DNA
agctgccatccgatcgtatg

SEQ ID NO: 10722 - DNA, 20 bp, synthetic construct
  source 1..20: mol_type = other DNA
ctctgctccttgtagcgcat

SEQ ID NO: 10723 - DNA, 20 bp, synthetic construct
  source 1..20: mol_type = other DNA
agcttccctcaccacccagt

SEQ ID NO: 10724 - DNA, 20 bp, synthetic construct
  source 1..20: mol_type = other DNA
cctcagaaagaccaatgtag

SEQ ID NO: 10725 - DNA, 20 bp, synthetic construct
  source 1..20: mol_type = other DNA
ccgtattgaaacccacctga

SEQ ID NO: 10726 - DNA, 20 bp, synthetic construct
  source 1..20: mol_type = other DNA
gtgggtattcaccgctacca

SEQ ID NO: 10727 - DNA, 20 bp, synthetic construct
  source 1..20: mol_type = other DNA
gccatctcaacattacagag

SEQ ID NO: 10728 - DNA, 20 bp, synthetic construct
  source 1..20: mol_type = other DNA
tttctgggttcgtttagatt

SEQ ID NO: 10729 - DNA, 20 bp, synthetic construct
  source 1..20: mol_type = other DNA
ggagacctactggcagacct

SEQ ID NO: 10730 - DNA, 20 bp, synthetic construct
  source 1..20: mol_type = other DNA
atccgggtaaactatcatag

SEQ ID NO: 10731 - DNA, 20 bp, synthetic construct
  source 1..20: mol_type = other DNA
acgtgcaaacccttacgtgc

SEQ ID NO: 10732 - DNA, 20 bp, synthetic construct
  source 1..20: mol_type = other DNA
agtacctctcaaggcatccc

SEQ ID NO: 10733 - DNA, 20 bp, synthetic construct
  source 1..20: mol_type = other DNA
ttcgtagagtgcgtgtagga

SEQ ID NO: 10734 - DNA, 20 bp, synthetic construct
  source 1..20: mol_type = other DNA
tgaaagatgacgtacagatg

SEQ ID NO: 10735 - DNA, 20 bp, synthetic construct
  source 1..20: mol_type = other DNA
cggacagtgtatttgaggat

SEQ ID NO: 10736 - DNA, 20 bp, synthetic construct
  source 1..20: mol_type = other DNA
attcgcgcgttaccttcgag

SEQ ID NO: 10737 - DNA, 20 bp, synthetic construct
  source 1..20: mol_type = other DNA
gcattgtagttgtagcgttc

SEQ ID NO: 10738 - DNA, 20 bp, synthetic construct
  source 1..20: mol_type = other DNA
taggtcggcgatggccataa

SEQ ID NO: 10739 - DNA, 20 bp, synthetic construct
  source 1..20: mol_type = other DNA
gccatggatgaaagtcaacc

SEQ ID NO: 10740 - DNA, 20 bp, synthetic construct
  source 1..20: mol_type = other DNA
gctcaacatggttatgctac

SEQ ID NO: 10741 - DNA, 20 bp, synthetic construct
  source 1..20: mol_type = other DNA
ttgtgactgatagcagccat

SEQ ID NO: 10742 - DNA, 20 bp, synthetic construct
  source 1..20: mol_type = other DNA
tcctacattacaataagcct

SEQ ID NO: 10743 - DNA, 20 bp, synthetic construct
  source 1..20: mol_type = other DNA
gagtactcgaagtacaaact

SEQ ID NO: 10744 - DNA, 20 bp, synthetic construct
  source 1..20: mol_type = other DNA
tagccggaataaacgtaaac

SEQ ID NO: 10745 - DNA, 20 bp, synthetic construct
  source 1..20: mol_type = other DNA
agttacttgggctgcactgg

SEQ ID NO: 10746 - DNA, 20 bp, synthetic construct
  source 1..20: mol_type = other DNA
acactagacacaacagcaca

SEQ ID NO: 10747 - DNA, 20 bp, synthetic construct
  source 1..20: mol_type = other DNA
tgtctgaactgaaatcgtgg

SEQ ID NO: 10748 - DNA, 20 bp, synthetic construct
  source 1..20: mol_type = other DNA
tcaggctctactggagtgac

SEQ ID NO: 10749 - DNA, 20 bp, synthetic construct
  source 1..20: mol_type = other DNA
atatctggatcagtctcccg

SEQ ID NO: 10750 - DNA, 20 bp, synthetic construct
  source 1..20: mol_type = other DNA
gagatcctgcattaagagcg

SEQ ID NO: 10751 - DNA, 20 bp, synthetic construct
  source 1..20: mol_type = other DNA
atttgtttggccagtccata

SEQ ID NO: 10752 - DNA, 20 bp, synthetic construct
  source 1..20: mol_type = other DNA
agccgtctctaagtctcaaa

SEQ ID NO: 10753 - DNA, 20 bp, synthetic construct
  source 1..20: mol_type = other DNA
atatgaacatactgacaaac

SEQ ID NO: 10754 - DNA, 20 bp, synthetic construct
  source 1..20: mol_type = other DNA
tgataaacgctcgttaacat

SEQ ID NO: 10755 - DNA, 20 bp, synthetic construct
  source 1..20: mol_type = other DNA
agatgaccaccacggcggat

SEQ ID NO: 10756 - DNA, 20 bp, synthetic construct
  source 1..20: mol_type = other DNA
acaatcaaaccgattgctcc

SEQ ID NO: 10757 - DNA, 20 bp, synthetic construct
  source 1..20: mol_type = other DNA
ggtcgccactaaacaccacc

SEQ ID NO: 10758 - DNA, 20 bp, synthetic construct
  source 1..20: mol_type = other DNA
ttgtgtggaatcgcacaatg

SEQ ID NO: 10759 - DNA, 20 bp, synthetic construct
  source 1..20: mol_type = other DNA
ggagaccagactaagtcagc

SEQ ID NO: 10760 - DNA, 20 bp, synthetic construct
  source 1..20: mol_type = other DNA
tcggaaacagtatgctcgat

SEQ ID NO: 10761 - DNA, 20 bp, synthetic construct
  source 1..20: mol_type = other DNA
ggaatttgagttattacttg

SEQ ID NO: 10762 - DNA, 20 bp, synthetic construct
  source 1..20: mol_type = other DNA
atcagcgatccattaagtat

SEQ ID NO: 10763 - DNA, 20 bp, synthetic construct
  source 1..20: mol_type = other DNA
atctcaggaagtggcgatgc

SEQ ID NO: 10764 - DNA, 20 bp, synthetic construct
  source 1..20: mol_type = other DNA
taacagagaattaggccgta

SEQ ID NO: 10765 - DNA, 20 bp, synthetic construct
  source 1..20: mol_type = other DNA
ttcaaggatccatggtgtgt

SEQ ID NO: 10766 - DNA, 20 bp, synthetic construct
  source 1..20: mol_type = other DNA
agtcgaagatagtaatggat

SEQ ID NO: 10767 - DNA, 20 bp, synthetic construct
  source 1..20: mol_type = other DNA
ctgtctgtcacttctcgttt

SEQ ID NO: 10768 - DNA, 20 bp, synthetic construct
  source 1..20: mol_type = other DNA
atcatactcaattgctctga

SEQ ID NO: 10769 - DNA, 20 bp, synthetic construct
  source 1..20: mol_type = other DNA
cagactaccaagtgcggatg

SEQ ID NO: 10770 - DNA, 20 bp, synthetic construct
  source 1..20: mol_type = other DNA
ttggacaccttacctgaatt

SEQ ID NO: 10771 - DNA, 20 bp, synthetic construct
  source 1..20: mol_type = other DNA
catatctactagcaggactt

SEQ ID NO: 10772 - DNA, 20 bp, synthetic construct
  source 1..20: mol_type = other DNA
gacactagctaccgttccgc

SEQ ID NO: 10773 - DNA, 20 bp, synthetic construct
  source 1..20: mol_type = other DNA
atgtgaagcagttatgaatg

SEQ ID NO: 10774 - DNA, 20 bp, synthetic construct
  source 1..20: mol_type = other DNA
attagcatgtgtatagggtg

SEQ ID NO: 10775 - DNA, 20 bp, synthetic construct
  source 1..20: mol_type = other DNA
tcctatacagacccaatcac

SEQ ID NO: 10776 - DNA, 20 bp, synthetic construct
  source 1..20: mol_type = other DNA
tttcgcctaacctgggaccg

SEQ ID NO: 10777 - DNA, 20 bp, synthetic construct
  source 1..20: mol_type = other DNA
tgttggatagtcatgctacc

SEQ ID NO: 10778 - DNA, 20 bp, synthetic construct
  source 1..20: mol_type = other DNA
gacaatcgataaacaccaag

SEQ ID NO: 10779 - DNA, 20 bp, synthetic construct
  source 1..20: mol_type = other DNA
cgtacctagccatggagcat

SEQ ID NO: 10780 - DNA, 20 bp, synthetic construct
  source 1..20: mol_type = other DNA
ctagaactaaagcgtgccga

SEQ ID NO: 10781 - DNA, 20 bp, synthetic construct
  source 1..20: mol_type = other DNA
caatcagattcatgtcattt

SEQ ID NO: 10782 - DNA, 20 bp, synthetic construct
  source 1..20: mol_type = other DNA
ctatttgtcggtcatgtaac

SEQ ID NO: 10783 - DNA, 20 bp, synthetic construct
  source 1..20: mol_type = other DNA
accagggactgaatgcgttc

SEQ ID NO: 10784 - DNA, 20 bp, synthetic construct
  source 1..20: mol_type = other DNA
gtggtgtctcactctacgtg

SEQ ID NO: 10785 - DNA, 20 bp, synthetic construct
  source 1..20: mol_type = other DNA
gcagcgctcgctgagtagtc

SEQ ID NO: 10786 - DNA, 20 bp, synthetic construct
  source 1..20: mol_type = other DNA
cgtttctcacacagggcaag

SEQ ID NO: 10787 - DNA, 20 bp, synthetic construct
  source 1..20: mol_type = other DNA
agagatcacccgtacagacg

SEQ ID NO: 10788 - DNA, 20 bp, synthetic construct
  source 1..20: mol_type = other DNA
gtggcgtctcctaggtgcgg

SEQ ID NO: 10789 - DNA, 20 bp, synthetic construct
  source 1..20: mol_type = other DNA
tcatgcataatatctcggac

SEQ ID NO: 10790 - DNA, 20 bp, synthetic construct
  source 1..20: mol_type = other DNA
tagacagacttcatgaaaga

SEQ ID NO: 10791 - DNA, 20 bp, synthetic construct
  source 1..20: mol_type = other DNA
acacggagcatcgaactaga

SEQ ID NO: 10792 - DNA, 20 bp, synthetic construct
  source 1..20: mol_type = other DNA
ttctgctgttctgctgatgc

SEQ ID NO: 10793 - DNA, 20 bp, synthetic construct
  source 1..20: mol_type = other DNA
tctattctgggtacccaatc

SEQ ID NO: 10794 - DNA, 20 bp, synthetic construct
  source 1..20: mol_type = other DNA
ttgcagaccagcgactatat

SEQ ID NO: 10795 - DNA, 20 bp, synthetic construct
  source 1..20: mol_type = other DNA
ttgaactcgctaacatagtc

SEQ ID NO: 10796 - DNA, 20 bp, synthetic construct
  source 1..20: mol_type = other DNA
gcccactggaactcgtctcc

SEQ ID NO: 10797 - DNA, 20 bp, synthetic construct
  source 1..20: mol_type = other DNA
gcgagcatagctggtcactt

SEQ ID NO: 10798 - DNA, 20 bp, synthetic construct
  source 1..20: mol_type = other DNA
gccactcttgattaccttca

SEQ ID NO: 10799 - DNA, 20 bp, synthetic construct
  source 1..20: mol_type = other DNA
cctaagattcggtgaatggt

SEQ ID NO: 10800 - DNA, 20 bp, synthetic construct
  source 1..20: mol_type = other DNA
tactacaattgtgccctgtg

SEQ ID NO: 10801 - DNA, 20 bp, synthetic construct
  source 1..20: mol_type = other DNA
ttggcctaacagtacaaact

SEQ ID NO: 10802 - DNA, 20 bp, synthetic construct
  source 1..20: mol_type = other DNA
agtgtagacgattgtgtagc

SEQ ID NO: 10803 - DNA, 20 bp, synthetic construct
  source 1..20: mol_type = other DNA
gtcaagggtggtttaatcta

SEQ ID NO: 10804 - DNA, 20 bp, synthetic construct
  source 1..20: mol_type = other DNA
ctgaccaattaagtggtatt

SEQ ID NO: 10805 - DNA, 20 bp, synthetic construct
  source 1..20: mol_type = other DNA
aggcaccgtcttgtaaaggc

SEQ ID NO: 10806 - DNA, 20 bp, synthetic construct
  source 1..20: mol_type = other DNA
atttgcattagcgtgggtcg

SEQ ID NO: 10807 - DNA, 20 bp, synthetic construct
  source 1..20: mol_type = other DNA
ttcttaaagcgcgttacaga

SEQ ID NO: 10808 - DNA, 20 bp, synthetic construct
  source 1..20: mol_type = other DNA
actcggccgcagtttaaagg

SEQ ID NO: 10809 - DNA, 20 bp, synthetic construct
  source 1..20: mol_type = other DNA
tacatcggctgaagtttctc

SEQ ID NO: 10810 - DNA, 20 bp, synthetic construct
  source 1..20: mol_type = other DNA
tatgacagtgccatggttct

SEQ ID NO: 10811 - DNA, 20 bp, synthetic construct
  source 1..20: mol_type = other DNA
gtagcctcgattaaagagcg

SEQ ID NO: 10812 - DNA, 20 bp, synthetic construct
  source 1..20: mol_type = other DNA
gtccatcgcgaacgtaccca

SEQ ID NO: 10813 - DNA, 20 bp, synthetic construct
  source 1..20: mol_type = other DNA
gtcgaagtggtctaacagtt

SEQ ID NO: 10814 - DNA, 20 bp, synthetic construct
  source 1..20: mol_type = other DNA
tctcttgcggttaacctacc

SEQ ID NO: 10815 - DNA, 20 bp, synthetic construct
  source 1..20: mol_type = other DNA
tgaaccgttacataatagcg

SEQ ID NO: 10816 - DNA, 20 bp, synthetic construct
  source 1..20: mol_type = other DNA
atggactaattgttcctggc

SEQ ID NO: 10817 - DNA, 20 bp, synthetic construct
  source 1..20: mol_type = other DNA
tatgctacccagcaagttta

SEQ ID NO: 10818 - DNA, 20 bp, synthetic construct
  source 1..20: mol_type = other DNA
gatgagtgaacgcgatctgc

SEQ ID NO: 10819 - DNA, 20 bp, synthetic construct
  source 1..20: mol_type = other DNA
tttgggaacctctggtgggt

SEQ ID NO: 10820 - DNA, 20 bp, synthetic construct
  source 1..20: mol_type = other DNA
gggaatctgggcctcccaat

SEQ ID NO: 10821 - DNA, 20 bp, synthetic construct
  source 1..20: mol_type = other DNA
accgtcgtaagtggaaagcc

SEQ ID NO: 10822 - DNA, 20 bp, synthetic construct
  source 1..20: mol_type = other DNA
gtgaagctacatgtcggcac

SEQ ID NO: 10823 - DNA, 20 bp, synthetic construct
  source 1..20: mol_type = other DNA
ttgatactaaggctgagtga

SEQ ID NO: 10824 - DNA, 20 bp, synthetic construct
  source 1..20: mol_type = other DNA
acaatatccaccgctactga

SEQ ID NO: 10825 - DNA, 20 bp, synthetic construct
  source 1..20: mol_type = other DNA
cgacggttaaatatgcaccc

SEQ ID NO: 10826 - DNA, 20 bp, synthetic construct
  source 1..20: mol_type = other DNA
cacggcgcattgtccatcat

SEQ ID NO: 10827 - DNA, 20 bp, synthetic construct
  source 1..20: mol_type = other DNA
gaccacctcagtgtactggc

SEQ ID NO: 10828 - DNA, 20 bp, synthetic construct
  source 1..20: mol_type = other DNA
atcgatactgtgttgcatgc

SEQ ID NO: 10829 - DNA, 20 bp, synthetic construct
  source 1..20: mol_type = other DNA
gtaggtagtgtacagcagct

SEQ ID NO: 10830 - DNA, 20 bp, synthetic construct
  source 1..20: mol_type = other DNA
gtcagcgacattcagctcac

SEQ ID NO: 10831 - DNA, 20 bp, synthetic construct
  source 1..20: mol_type = other DNA
tgcttctccgccggtcaaga

SEQ ID NO: 10832 - DNA, 20 bp, synthetic construct
  source 1..20: mol_type = other DNA
atcatatacacttcgaggta

SEQ ID NO: 10833 - DNA, 20 bp, synthetic construct
  source 1..20: mol_type = other DNA
tctcgtaatcatccaatact

SEQ ID NO: 10834 - DNA, 20 bp, synthetic construct
  source 1..20: mol_type = other DNA
ccgggtgtcccgcatttaaa

SEQ ID NO: 10835 - DNA, 20 bp, synthetic construct
  source 1..20: mol_type = other DNA
tgcccacgttgagatggact

SEQ ID NO: 10836 - DNA, 20 bp, synthetic construct
  source 1..20: mol_type = other DNA
tagccgacactctgaaacag

SEQ ID NO: 10837 - DNA, 20 bp, synthetic construct
  source 1..20: mol_type = other DNA
caactcgctttaatgttcca

SEQ ID NO: 10838 - DNA, 20 bp, synthetic construct
  source 1..20: mol_type = other DNA
ctcccggcagatattgacct

SEQ ID NO: 10839 - DNA, 20 bp, synthetic construct
  source 1..20: mol_type = other DNA
acgcagccagcttcgcaact

SEQ ID NO: 10840 - DNA, 20 bp, synthetic construct
  source 1..20: mol_type = other DNA
acactattcacgaggcgtct

SEQ ID NO: 10841 - DNA, 20 bp, synthetic construct
  source 1..20: mol_type = other DNA
aatcgaggtttgctatgctt

SEQ ID NO: 10842 - DNA, 20 bp, synthetic construct
  source 1..20: mol_type = other DNA
cgtccaaagtttggtcgttc

SEQ ID NO: 10843 - DNA, 20 bp, synthetic construct
  source 1..20: mol_type = other DNA
gggcatcactgctccgttgg

SEQ ID NO: 10844 - DNA, 20 bp, synthetic construct
  source 1..20: mol_type = other DNA
catgtcgcgcggacgaagat

SEQ ID NO: 10845 - DNA, 20 bp, synthetic construct
  source 1..20: mol_type = other DNA
gtcaccaatgggcgctgcat

SEQ ID NO: 10846 - DNA, 20 bp, synthetic construct
  source 1..20: mol_type = other DNA
ttgtcctgcgcccatccagg

SEQ ID NO: 10847 - DNA, 20 bp, synthetic construct
  source 1..20: mol_type = other DNA
cgccggattgccttcacgtg

SEQ ID NO: 10848 - DNA, 20 bp, synthetic construct
  source 1..20: mol_type = other DNA
aacgtcaattcggaaaccac

SEQ ID NO: 10849 - DNA, 20 bp, synthetic construct
  source 1..20: mol_type = other DNA
taatactgagagagaggttg

SEQ ID NO: 10850 - DNA, 20 bp, synthetic construct
  source 1..20: mol_type = other DNA
ctttacgatccctatgtctc

SEQ ID NO: 10851 - DNA, 20 bp, synthetic construct
  source 1..20: mol_type = other DNA
gagcaattggtaaggtgaat

SEQ ID NO: 10852 - DNA, 20 bp, synthetic construct
  source 1..20: mol_type = other DNA
gctgatttgccaagtgtgaa

SEQ ID NO: 10853 - DNA, 20 bp, synthetic construct
  source 1..20: mol_type = other DNA
caacaacaatggtacatccg

SEQ ID NO: 10854 - DNA, 20 bp, synthetic construct
  source 1..20: mol_type = other DNA
aacccaagcgccagctgtga

SEQ ID NO: 10855 - DNA, 20 bp, synthetic construct
  source 1..20: mol_type = other DNA
gtccacacgcatcgccacaa

SEQ ID NO: 10856 - DNA, 20 bp, synthetic construct
  source 1..20: mol_type = other DNA
agttataggttgaaggcctg

SEQ ID NO: 10857 - DNA, 20 bp, synthetic construct
  source 1..20: mol_type = other DNA
tcggagctgtgattagatga

SEQ ID NO: 10858 - DNA, 20 bp, synthetic construct
  source 1..20: mol_type = other DNA
gtttgcaaggtattctgtgc

SEQ ID NO: 10859 - DNA, 20 bp, synthetic construct
  source 1..20: mol_type = other DNA
ctcgtggataccagtccata

SEQ ID NO: 10860 - DNA, 20 bp, synthetic construct
  source 1..20: mol_type = other DNA
caaccctccgctctattctc

SEQ ID NO: 10861 - DNA, 20 bp, synthetic construct
  source 1..20: mol_type = other DNA
ctcttggaattattgtgcca

SEQ ID NO: 10862 - DNA, 20 bp, synthetic construct
  source 1..20: mol_type = other DNA
gtggctattgtctacgaatt

SEQ ID NO: 10863 - DNA, 20 bp, synthetic construct
  source 1..20: mol_type = other DNA
agttattggtatcctcagac

SEQ ID NO: 10864 - DNA, 20 bp, synthetic construct
  source 1..20: mol_type = other DNA
cagctgcctaatgtccaggg

SEQ ID NO: 10865 - DNA, 20 bp, synthetic construct
  source 1..20: mol_type = other DNA
gccagtaacgcgcctttcgt

SEQ ID NO: 10866 - DNA, 20 bp, synthetic construct
  source 1..20: mol_type = other DNA
cagtgccttcaattggcgtt

SEQ ID NO: 10867 - DNA, 20 bp, synthetic construct
  source 1..20: mol_type = other DNA
acgagtcagcactgatttaa

SEQ ID NO: 10868 - DNA, 20 bp, synthetic construct
  source 1..20: mol_type = other DNA
taataatcgatcaagcaaca

SEQ ID NO: 10869 - DNA, 20 bp, synthetic construct
  source 1..20: mol_type = other DNA
tccagcaagctccgcgtaaa

SEQ ID NO: 10870 - DNA, 20 bp, synthetic construct
  source 1..20: mol_type = other DNA
agccactcgttgttgatgca

SEQ ID NO: 10871 - DNA, 20 bp, synthetic construct
  source 1..20: mol_type = other DNA
atttaactaaccgttggttc

SEQ ID NO: 10872 - DNA, 20 bp, synthetic construct
  source 1..20: mol_type = other DNA
cagaccaatatgaagtctgc

SEQ ID NO: 10873 - DNA, 20 bp, synthetic construct
  source 1..20: mol_type = other DNA
tgtggcgttcgagggccttg

SEQ ID NO: 10874 - DNA, 20 bp, synthetic construct
  source 1..20: mol_type = other DNA
gaccgaggagtcttgagtcg

SEQ ID NO: 10875 - DNA, 20 bp, synthetic construct
  source 1..20: mol_type = other DNA
tcactatagaacgtagtacg

SEQ ID NO: 10876 - DNA, 20 bp, synthetic construct
  source 1..20: mol_type = other DNA
aaccaacgagggcattcatc

SEQ ID NO: 10877 - DNA, 20 bp, synthetic construct
  source 1..20: mol_type = other DNA
gtgggatgtatcagagcacc

SEQ ID NO: 10878 - DNA, 20 bp, synthetic construct
  source 1..20: mol_type = other DNA
caatgcttatggtacatgcg

SEQ ID NO: 10879 - DNA, 20 bp, synthetic construct
  source 1..20: mol_type = other DNA
aaagagggtttgggagccaa

SEQ ID NO: 10880 - DNA, 20 bp, synthetic construct
  source 1..20: mol_type = other DNA
agactaagcggtccacctcc

SEQ ID NO: 10881 - DNA, 20 bp, synthetic construct
  source 1..20: mol_type = other DNA
ggatctcagcttcgaccaga

SEQ ID NO: 10882 - DNA, 20 bp, synthetic construct
  source 1..20: mol_type = other DNA
ttggtctttaccctctattt

SEQ ID NO: 10883 - DNA, 20 bp, synthetic construct
  source 1..20: mol_type = other DNA
ttgcccgcgcgctgatatta

SEQ ID NO: 10884 - DNA, 20 bp, synthetic construct
  source 1..20: mol_type = other DNA
tgtctttacaatgggtagtt

SEQ ID NO: 10885 - DNA, 20 bp, synthetic construct
  source 1..20: mol_type = other DNA
ttctcaatggaacgggtcct

SEQ ID NO: 10886 - DNA, 20 bp, synthetic construct
  source 1..20: mol_type = other DNA
aacattgcaataggtgattg

SEQ ID NO: 10887 - DNA, 20 bp, synthetic construct
  source 1..20: mol_type = other DNA
atgatcgactacaagccatg

SEQ ID NO: 10888 - DNA, 20 bp, synthetic construct
  source 1..20: mol_type = other DNA
agttggacagatgtagcgca

SEQ ID NO: 10889 - DNA, 20 bp, synthetic construct
  source 1..20: mol_type = other DNA
gttatgagtcgccgcaagag

SEQ ID NO: 10890 - DNA, 20 bp, synthetic construct
  source 1..20: mol_type = other DNA
tgatatatccgtcagctatg

SEQ ID NO: 10891 - DNA, 20 bp, synthetic construct
  source 1..20: mol_type = other DNA
ggtcttacagcgttgacgtt

SEQ ID NO: 10892 - DNA, 20 bp, synthetic construct
  source 1..20: mol_type = other DNA
aaatggcgttggatgtccga

SEQ ID NO: 10893 - DNA, 20 bp, synthetic construct
  source 1..20: mol_type = other DNA
tgaacacactatgaggtgtg

SEQ ID NO: 10894 - DNA, 20 bp, synthetic construct
  source 1..20: mol_type = other DNA
gtcagtcatgggtggagaga

SEQ ID NO: 10895 - DNA, 20 bp, synthetic construct
  source 1..20: mol_type = other DNA
gcggaatgagcattcagact

SEQ ID NO: 10896 - DNA, 20 bp, synthetic construct
  source 1..20: mol_type = other DNA
agggtatggatgaaggtcta

SEQ ID NO: 10897 - DNA, 20 bp, synthetic construct
  source 1..20: mol_type = other DNA
tttcagttagagacttggat

SEQ ID NO: 10898 - DNA, 20 bp, synthetic construct
  source 1..20: mol_type = other DNA
gatcttgtgtctcctgcgtc

SEQ ID NO: 10899 - DNA, 20 bp, synthetic construct
  source 1..20: mol_type = other DNA
ggattcactgcggtgcgact

SEQ ID NO: 10900 - DNA, 20 bp, synthetic construct
  source 1..20: mol_type = other DNA
ttagtcaaagcaacgctagc

SEQ ID NO: 10901 - DNA, 20 bp, synthetic construct
  source 1..20: mol_type = other DNA
tgaacttgatcaaactccaa

SEQ ID NO: 10902 - DNA, 20 bp, synthetic construct
  source 1..20: mol_type = other DNA
agcagtcagccggttacggc

SEQ ID NO: 10903 - DNA, 20 bp, synthetic construct
  source 1..20: mol_type = other DNA
tggtaggatacggatttacc

SEQ ID NO: 10904 - DNA, 20 bp, synthetic construct
  source 1..20: mol_type = other DNA
gcgaaaggatcatgatccaa

SEQ ID NO: 10905 - DNA, 20 bp, synthetic construct
  source 1..20: mol_type = other DNA
catccggtagctactgaatg

SEQ ID NO: 10906 - DNA, 20 bp, synthetic construct
  source 1..20: mol_type = other DNA
tgatttgccggtgtttaatc

SEQ ID NO: 10907 - DNA, 20 bp, synthetic construct
  source 1..20: mol_type = other DNA
atagccagcctacccagcca

SEQ ID NO: 10908 - DNA, 20 bp, synthetic construct
  source 1..20: mol_type = other DNA
taagaagcatccacgccgag

SEQ ID NO: 10909 - DNA, 20 bp, synthetic construct
  source 1..20: mol_type = other DNA
ggtatctttatgcggatgct

SEQ ID NO: 10910 - DNA, 20 bp, synthetic construct
  source 1..20: mol_type = other DNA
atgaccgggcccactaaccc

SEQ ID NO: 10911 - DNA, 20 bp, synthetic construct
  source 1..20: mol_type = other DNA
cttgtgcgaatgccaatagc

SEQ ID NO: 10912 - DNA, 20 bp, synthetic construct
  source 1..20: mol_type = other DNA
atcgggcggcatacacctaa

SEQ ID NO: 10913 - DNA, 20 bp, synthetic construct
  source 1..20: mol_type = other DNA
cgcgtattagcagcttgatg

SEQ ID NO: 10914 - DNA, 20 bp, synthetic construct
  source 1..20: mol_type = other DNA
cgtaatggccggtcaaggct

SEQ ID NO: 10915 - DNA, 20 bp, synthetic construct
  source 1..20: mol_type = other DNA
acgcgcgcgaaagtccatgg

SEQ ID NO: 10916 - DNA, 20 bp, synthetic construct
  source 1..20: mol_type = other DNA
gaaccggaagagaagccgag

SEQ ID NO: 10917 - DNA, 20 bp, synthetic construct
  source 1..20: mol_type = other DNA
ctcgcatgataccagccacg

SEQ ID NO: 10918 - DNA, 20 bp, synthetic construct
  source 1..20: mol_type = other DNA
tgcgtaacgagcaaatgctt

SEQ ID NO: 10919 - DNA, 20 bp, synthetic construct
  source 1..20: mol_type = other DNA
tacatccatcattgggcgtg

SEQ ID NO: 10920 - DNA, 20 bp, synthetic construct
  source 1..20: mol_type = other DNA
catgcagacatcaagccgag

SEQ ID NO: 10921 - DNA, 20 bp, synthetic construct
  source 1..20: mol_type = other DNA
aaacggtaaccgaaccgtta

SEQ ID NO: 10922 - DNA, 20 bp, synthetic construct
  source 1..20: mol_type = other DNA
atgacagtagctggcagcct

SEQ ID NO: 10923 - DNA, 20 bp, synthetic construct
  source 1..20: mol_type = other DNA
ccgagactatgttcgataag

SEQ ID NO: 10924 - DNA, 20 bp, synthetic construct
  source 1..20: mol_type = other DNA
ggtactaccatatagtcgct

SEQ ID NO: 10925 - DNA, 20 bp, synthetic construct
  source 1..20: mol_type = other DNA
tgacccaacccggctgagct

SEQ ID NO: 10926 - DNA, 20 bp, synthetic construct
  source 1..20: mol_type = other DNA
ccaagcatgctgggaggctg

SEQ ID NO: 10927 - DNA, 20 bp, synthetic construct
  source 1..20: mol_type = other DNA
atagcaattgcgtgaaatag

SEQ ID NO: 10928 - DNA, 20 bp, synthetic construct
  source 1..20: mol_type = other DNA
tgctgagggcaacgtacgaa

SEQ ID NO: 10929 - DNA, 20 bp, synthetic construct
  source 1..20: mol_type = other DNA
cggcagcgggatagcgttac

SEQ ID NO: 10930 - DNA, 20 bp, synthetic construct
  source 1..20: mol_type = other DNA
gtccacaggcccgtaaccga

SEQ ID NO: 10931 - DNA, 20 bp, synthetic construct
  source 1..20: mol_type = other DNA
aggtggagacgaccatgtcc

SEQ ID NO: 10932 - DNA, 20 bp, synthetic construct
  source 1..20: mol_type = other DNA
gcacttcctagacttaaccc

SEQ ID NO: 10933 - DNA, 20 bp, synthetic construct
  source 1..20: mol_type = other DNA
tgacttctccaggatgtcat

SEQ ID NO: 10934 - DNA, 20 bp, synthetic construct
  source 1..20: mol_type = other DNA
acctagtcctcctatcacag

SEQ ID NO: 10935 - DNA, 20 bp, synthetic construct
  source 1..20: mol_type = other DNA
cacacggcctaagacaattg

SEQ ID NO: 10936 - DNA, 20 bp, synthetic construct
  source 1..20: mol_type = other DNA
tgtcaaccaagggcgccggt

SEQ ID NO: 10937 - DNA, 20 bp, synthetic construct
  source 1..20: mol_type = other DNA
cacgttactctcatattgat

SEQ ID NO: 10938 - DNA, 20 bp, synthetic construct
  source 1..20: mol_type = other DNA
aggacttcctgtttagcagc

SEQ ID NO: 10939 - DNA, 20 bp, synthetic construct
  source 1..20: mol_type = other DNA
tcgctaagcgtagccgacgc

SEQ ID NO: 10940 - DNA, 20 bp, synthetic construct
  source 1..20: mol_type = other DNA
tagtagtcctttgcctcgtg

SEQ ID NO: 10941 - DNA, 20 bp, synthetic construct
  source 1..20: mol_type = other DNA
cctacattctacactcaata

SEQ ID NO: 10942 - DNA, 20 bp, synthetic construct
  source 1..20: mol_type = other DNA
gtcaagctgttgccacagtc

SEQ ID NO: 10943 - DNA, 20 bp, synthetic construct
  source 1..20: mol_type = other DNA
tttactgcgtccaggccttc

SEQ ID NO: 10944 - DNA, 20 bp, synthetic construct
  source 1..20: mol_type = other DNA
agacagcagactctgatcgc

SEQ ID NO: 10945 - DNA, 20 bp, synthetic construct
  source 1..20: mol_type = other DNA
tagactttcggcaacgtcat

SEQ ID NO: 10946 - DNA, 20 bp, synthetic construct
  source 1..20: mol_type = other DNA
tggacacagtaactctgaga

SEQ ID NO: 10947 - DNA, 20 bp, synthetic construct
  source 1..20: mol_type = other DNA
caagtcgtggctctatgaat

SEQ ID NO: 10948 - DNA, 20 bp, synthetic construct
  source 1..20: mol_type = other DNA
ggcagcctaattgtatctaa

SEQ ID NO: 10949 - DNA, 20 bp, synthetic construct
  source 1..20: mol_type = other DNA
gttcgctgaactggactctt

SEQ ID NO: 10950 - DNA, 20 bp, synthetic construct
  source 1..20: mol_type = other DNA
gagtacaccatcaggagtgc

SEQ ID NO: 10951 - DNA, 20 bp, synthetic construct
  source 1..20: mol_type = other DNA
agtctgtaggagagaaaggt

SEQ ID NO: 10952 - DNA, 20 bp, synthetic construct
  source 1..20: mol_type = other DNA
ttggattgggtagccgtaag

SEQ ID NO: 10953 - DNA, 20 bp, synthetic construct
  source 1..20: mol_type = other DNA
ggtgggtagcgaaagcaaca

SEQ ID NO: 10954 - DNA, 20 bp, synthetic construct
  source 1..20: mol_type = other DNA
aatgagtacccacttggtac

SEQ ID NO: 10955 - DNA, 20 bp, synthetic construct
  source 1..20: mol_type = other DNA
gtccggcaggtgtgaggtca

SEQ ID NO: 10956 - DNA, 20 bp, synthetic construct
  source 1..20: mol_type = other DNA
tttgcttaggaaggcctcta

SEQ ID NO: 10957 - DNA, 20 bp, synthetic construct
  source 1..20: mol_type = other DNA
cccgctaattcgtccaaagc

SEQ ID NO: 10958 - DNA, 20 bp, synthetic construct
  source 1..20: mol_type = other DNA
aaggaggatgtctgattcag

SEQ ID NO: 10959 - DNA, 20 bp, synthetic construct
  source 1..20: mol_type = other DNA
atcccagagcaggacttacc

SEQ ID NO: 10960 - DNA, 20 bp, synthetic construct
  source 1..20: mol_type = other DNA
gaagctgtccgaaagcctct

SEQ ID NO: 10961 - DNA, 20 bp, synthetic construct
  source 1..20: mol_type = other DNA
aaggctgtttgtcgtcgctc

SEQ ID NO: 10962 - DNA, 20 bp, synthetic construct
  source 1..20: mol_type = other DNA
ttaactgagctgtctgcaac

SEQ ID NO: 10963 - DNA, 20 bp, synthetic construct
  source 1..20: mol_type = other DNA
gttgtcctgttgtggaatga

SEQ ID NO: 10964 - DNA, 20 bp, synthetic construct
  source 1..20: mol_type = other DNA
ttgcgtagagtacacctcga

SEQ ID NO: 10965 - DNA, 20 bp, synthetic construct
  source 1..20: mol_type = other DNA
accgggcagacggatgaaac

SEQ ID NO: 10966 - DNA, 20 bp, synthetic construct
  source 1..20: mol_type = other DNA
gataacaggccaccggtcca

SEQ ID NO: 10967 - DNA, 20 bp, synthetic construct
  source 1..20: mol_type = other DNA
gcgagacgatttgtcctcat

SEQ ID NO: 10968 - DNA, 20 bp, synthetic construct
  source 1..20: mol_type = other DNA
gttgaccttgacactcctag

SEQ ID NO: 10969 - DNA, 20 bp, synthetic construct
  source 1..20: mol_type = other DNA
ggcagacttactcatggttc

SEQ ID NO: 10970 - DNA, 20 bp, synthetic construct
  source 1..20: mol_type = other DNA
atccttgagtgaccaggtag

SEQ ID NO: 10971 - DNA, 20 bp, synthetic construct
  source 1..20: mol_type = other DNA
gtccttcgttagacactgct

SEQ ID NO: 10972 - DNA, 20 bp, synthetic construct
  source 1..20: mol_type = other DNA
accacaacctatgatgccca

SEQ ID NO: 10973 - DNA, 20 bp, synthetic construct
  source 1..20: mol_type = other DNA
gattgactgacaagcggccc

SEQ ID NO: 10974 - DNA, 20 bp, synthetic construct
  source 1..20: mol_type = other DNA
tgcggatacccggatgctat

SEQ ID NO: 10975 - DNA, 20 bp, synthetic construct
  source 1..20: mol_type = other DNA
ctcgcacaccaacaagtccc

SEQ ID NO: 10976 - DNA, 20 bp, synthetic construct
  source 1..20: mol_type = other DNA
cagagtgccctgaatccgag

SEQ ID NO: 10977 - DNA, 20 bp, synthetic construct
  source 1..20: mol_type = other DNA
tcctcctaacggaagttctt

SEQ ID NO: 10978 - DNA, 20 bp, synthetic construct
  source 1..20: mol_type = other DNA
tccctcgcggtaatagttcc

SEQ ID NO: 10979 - DNA, 20 bp, synthetic construct
  source 1..20: mol_type = other DNA
gatggtctggagagaaagag

SEQ ID NO: 10980 - DNA, 20 bp, synthetic construct
  source 1..20: mol_type = other DNA
tcgtattgggctgtattgca

SEQ ID NO: 10981 - DNA, 20 bp, synthetic construct
  source 1..20: mol_type = other DNA
acattcaattctcttgaact

SEQ ID NO: 10982 - DNA, 20 bp, synthetic construct
  source 1..20: mol_type = other DNA
gcctcacttaaatcccaatt

SEQ ID NO: 10983 - DNA, 20 bp, synthetic construct
  source 1..20: mol_type = other DNA
gataatcgtcgttctgctcg

SEQ ID NO: 10984 - DNA, 20 bp, synthetic construct
  source 1..20: mol_type = other DNA
atatagattgggtggtgcgg

SEQ ID NO: 10985 - DNA, 20 bp, synthetic construct
  source 1..20: mol_type = other DNA
ctatgcaccacggaccgctt

SEQ ID NO: 10986 - DNA, 20 bp, synthetic construct
  source 1..20: mol_type = other DNA
tccacacaaggaagcattca

SEQ ID NO: 10987 - DNA, 20 bp, synthetic construct
  source 1..20: mol_type = other DNA
cgtgtgtacagcacgacccg

SEQ ID NO: 10988 - DNA, 20 bp, synthetic construct
  source 1..20: mol_type = other DNA
gaaggtgccgctaagggaat

SEQ ID NO: 10989 - DNA, 20 bp, synthetic construct
  source 1..20: mol_type = other DNA
tgagaagcattgacggcgaa

SEQ ID NO: 10990 - DNA, 20 bp, synthetic construct
  source 1..20: mol_type = other DNA
cctaaccctagaaaggatga

SEQ ID NO: 10991 - DNA, 20 bp, synthetic construct
  source 1..20: mol_type = other DNA
tcttgggtggatcttaggct

SEQ ID NO: 10992 - DNA, 20 bp, synthetic construct
  source 1..20: mol_type = other DNA
gcataacttctttctgcacc

SEQ ID NO: 10993 - DNA, 20 bp, synthetic construct
  source 1..20: mol_type = other DNA
agtggcctctggacctttaa

SEQ ID NO: 10994 - DNA, 20 bp, synthetic construct
  source 1..20: mol_type = other DNA
ccgtcagcagtagtgcacca

SEQ ID NO: 10995 - DNA, 20 bp, synthetic construct
  source 1..20: mol_type = other DNA
ttgatgtatacacatccatc

SEQ ID NO: 10996 - DNA, 20 bp, synthetic construct
  source 1..20: mol_type = other DNA
gttgtcgcgtaaggttctct

SEQ ID NO: 10997 - DNA, 20 bp, synthetic construct
  source 1..20: mol_type = other DNA
aagtccacgacggagaggat

SEQ ID NO: 10998 - DNA, 20 bp, synthetic construct
  source 1..20: mol_type = other DNA
cttaacctggtgacgcgttg

SEQ ID NO: 10999 - DNA, 20 bp, synthetic construct
  source 1..20: mol_type = other DNA
tgcaccggaccaacaacacc

SEQ ID NO: 11000 - DNA, 20 bp, synthetic construct
  source 1..20: mol_type = other DNA
cgttcaaggcgtgagtaaca

SEQ ID NO: 11001 - DNA, 20 bp, synthetic construct
  source 1..20: mol_type = other DNA
attacatccaagggatctac

SEQ ID NO: 11002 - DNA, 20 bp, synthetic construct
  source 1..20: mol_type = other DNA
tgtcttgcagtgagaggtat

SEQ ID NO: 11003 - DNA, 20 bp, synthetic construct
  source 1..20: mol_type = other DNA
ggtttatgcttggagggctc

SEQ ID NO: 11004 - DNA, 20 bp, synthetic construct
  source 1..20: mol_type = other DNA
aaagccgcgcacaccttgag

SEQ ID NO: 11005 - DNA, 20 bp, synthetic construct
  source 1..20: mol_type = other DNA
gccgtgggaatggaacgtat

SEQ ID NO: 11006 - DNA, 20 bp, synthetic construct
  source 1..20: mol_type = other DNA
attgacaatcactatcgaaa

SEQ ID NO: 11007 - DNA, 20 bp, synthetic construct
  source 1..20: mol_type = other DNA
tcccatgtcaaagctaagac

SEQ ID NO: 11008 - DNA, 20 bp, synthetic construct
  source 1..20: mol_type = other DNA
atccactacgaagttggtgt

SEQ ID NO: 11009 - DNA, 20 bp, synthetic construct
  source 1..20: mol_type = other DNA
cctcattaagaaatctctag

SEQ ID NO: 11010 - DNA, 20 bp, synthetic construct
  source 1..20: mol_type = other DNA
gttcaggactcttagtttag

SEQ ID NO: 11011 - DNA, 20 bp, synthetic construct
  source 1..20: mol_type = other DNA
accgatggtgccatcggctt

SEQ ID NO: 11012 - DNA, 20 bp, synthetic construct
  source 1..20: mol_type = other DNA
ggatcactacagtaaggtga

SEQ ID NO: 11013 - DNA, 20 bp, synthetic construct
  source 1..20: mol_type = other DNA
ctgtaatctcagggcaaatc

SEQ ID NO: 11014 - DNA, 20 bp, synthetic construct
  source 1..20: mol_type = other DNA
aggttagagaattgacgcca

SEQ ID NO: 11015 - DNA, 20 bp, synthetic construct
  source 1..20: mol_type = other DNA
ccagcacattgttctctaaa

SEQ ID NO: 11016 - DNA, 20 bp, synthetic construct
  source 1..20: mol_type = other DNA
actatcgctcggactatacg

SEQ ID NO: 11017 - DNA, 20 bp, synthetic construct
  source 1..20: mol_type = other DNA
gtaaggcaccagaataatct

SEQ ID NO: 11018 - DNA, 20 bp, synthetic construct
  source 1..20: mol_type = other DNA
ctcaatgggagtttaagatg

SEQ ID NO: 11019 - DNA, 20 bp, synthetic construct
  source 1..20: mol_type = other DNA
agccttggccaccatagcta

SEQ ID NO: 11020 - DNA, 20 bp, synthetic construct
  source 1..20: mol_type = other DNA
gctaggttactcgggttccg

SEQ ID NO: 11021 - DNA, 20 bp, synthetic construct
  source 1..20: mol_type = other DNA
tctttagccgttggacgagg

SEQ ID NO: 11022 - DNA, 20 bp, synthetic construct
  source 1..20: mol_type = other DNA
ccgcaagtttgccgcacctc

SEQ ID NO: 11023 - DNA, 20 bp, synthetic construct
  source 1..20: mol_type = other DNA
ataagagttgccgccgtact

SEQ ID NO: 11024 - DNA, 20 bp, synthetic construct
  source 1..20: mol_type = other DNA
ctatggtagttgtgttcgcc

SEQ ID NO: 11025 - DNA, 20 bp, synthetic construct
  source 1..20: mol_type = other DNA
acaattctaacaaacagcag

SEQ ID NO: 11026 - DNA, 20 bp, synthetic construct
  source 1..20: mol_type = other DNA
gtcgcacgcaagcaagtgtg

SEQ ID NO: 11027 - DNA, 20 bp, synthetic construct
  source 1..20: mol_type = other DNA
gctgaagcgatcagagcgac

SEQ ID NO: 11028 - DNA, 20 bp, synthetic construct
  source 1..20: mol_type = other DNA
tcccgtcagggcaagcgtcg

SEQ ID NO: 11029 - DNA, 20 bp, synthetic construct
  source 1..20: mol_type = other DNA
agctttagacgttatggcag

SEQ ID NO: 11030 - DNA, 20 bp, synthetic construct
  source 1..20: mol_type = other DNA
tcgttggccaacttcgataa

SEQ ID NO: 11031 - DNA, 20 bp, synthetic construct
  source 1..20: mol_type = other DNA
ttggcgggtagacccgcaca

SEQ ID NO: 11032 - DNA, 20 bp, synthetic construct
  source 1..20: mol_type = other DNA
gtcaacggcctgacctttcg

SEQ ID NO: 11033 - DNA, 20 bp, synthetic construct
  source 1..20: mol_type = other DNA
gtccggcggaactgtgaaga

SEQ ID NO: 11034 - DNA, 20 bp, synthetic construct
  source 1..20: mol_type = other DNA
cctcctcagggctttgcacc

SEQ ID NO: 11035 - DNA, 20 bp, synthetic construct
  source 1..20: mol_type = other DNA
aaagccataaataagatgcc

SEQ ID NO: 11036 - DNA, 20 bp, synthetic construct
  source 1..20: mol_type = other DNA
cgcaaatggccaacagctta

SEQ ID NO: 11037 - DNA, 20 bp, synthetic construct
  source 1..20: mol_type = other DNA
agcactctgggaactatgat

SEQ ID NO: 11038 - DNA, 20 bp, synthetic construct
  source 1..20: mol_type = other DNA
aattgatgtagcgagaaagg

SEQ ID NO: 11039 - DNA, 20 bp, synthetic construct
  source 1..20: mol_type = other DNA
ataaccacgaaagatacgaa

SEQ ID NO: 11040 - DNA, 20 bp, synthetic construct
  source 1..20: mol_type = other DNA
gtacggaagctgttcacggc

SEQ ID NO: 11041 - DNA, 20 bp, synthetic construct
  source 1..20: mol_type = other DNA
agtcctagagactggactgg

SEQ ID NO: 11042 - DNA, 20 bp, synthetic construct
  source 1..20: mol_type = other DNA
aaagtggcgagaatcgcctg

SEQ ID NO: 11043 - DNA, 20 bp, synthetic construct
  source 1..20: mol_type = other DNA
ttgatttcccagggagaaca

SEQ ID NO: 11044 - DNA, 20 bp, synthetic construct
  source 1..20: mol_type = other DNA
cagatacctaccaagtgacc

SEQ ID NO: 11045 - DNA, 20 bp, synthetic construct
  source 1..20: mol_type = other DNA
aaccgcacatcatgagtctt

SEQ ID NO: 11046 - DNA, 20 bp, synthetic construct
  source 1..20: mol_type = other DNA
aatttagacggagtggacaa

SEQ ID NO: 11047 - DNA, 20 bp, synthetic construct
  source 1..20: mol_type = other DNA
aattcgctccaacgtaaatc

SEQ ID NO: 11048 - DNA, 20 bp, synthetic construct
  source 1..20: mol_type = other DNA
agtatcaaggtccgaagctg

SEQ ID NO: 11049 - DNA, 20 bp, synthetic construct
  source 1..20: mol_type = other DNA
tgatcgaggaacgatcgatt

SEQ ID NO: 11050 - DNA, 20 bp, synthetic construct
  source 1..20: mol_type = other DNA
tctgaggcgaattaccttgt

SEQ ID NO: 11051 - DNA, 20 bp, synthetic construct
  source 1..20: mol_type = other DNA
ctgatcaagcataactacat

SEQ ID NO: 11052 - DNA, 20 bp, synthetic construct
  source 1..20: mol_type = other DNA
catggtgtgactgagtctaa

SEQ ID NO: 11053 - DNA, 20 bp, synthetic construct
  source 1..20: mol_type = other DNA
aaatacccgctgcaatgttt

SEQ ID NO: 11054 - DNA, 20 bp, synthetic construct
  source 1..20: mol_type = other DNA
gtcagcttggctgaggacta

SEQ ID NO: 11055 - DNA, 20 bp, synthetic construct
  source 1..20: mol_type = other DNA
ccgcgagttaagagatcagc

SEQ ID NO: 11056 - DNA, 20 bp, synthetic construct
  source 1..20: mol_type = other DNA
atatcttgattgggaacgcc

SEQ ID NO: 11057 - DNA, 20 bp, synthetic construct
  source 1..20: mol_type = other DNA
gagaacagtggtgggacgaa

SEQ ID NO: 11058 - DNA, 20 bp, synthetic construct
  source 1..20: mol_type = other DNA
tccgcgataaagcacgtttg

SEQ ID NO: 11059 - DNA, 20 bp, synthetic construct
  source 1..20: mol_type = other DNA
gacaagcgcgacgtgtaaat

SEQ ID NO: 11060 - DNA, 20 bp, synthetic construct
  source 1..20: mol_type = other DNA
tttggaaagtacagcaggcg

SEQ ID NO: 11061 - DNA, 20 bp, synthetic construct
  source 1..20: mol_type = other DNA
catttgagtgaggttgatgg

SEQ ID NO: 11062 - DNA, 20 bp, synthetic construct
  source 1..20: mol_type = other DNA
ctcaaataatttagctccgc

SEQ ID NO: 11063 - DNA, 20 bp, synthetic construct
  source 1..20: mol_type = other DNA
tacaagggagagaccaaacg

SEQ ID NO: 11064 - DNA, 20 bp, synthetic construct
  source 1..20: mol_type = other DNA
agggtatcaacttaacgcga

SEQ ID NO: 11065 - DNA, 20 bp, synthetic construct
  source 1..20: mol_type = other DNA
tcttaagtcgttagctgcgc

SEQ ID NO: 11066 - DNA, 20 bp, synthetic construct
  source 1..20: mol_type = other DNA
tcggaggagtatgacggcgt

SEQ ID NO: 11067 - DNA, 20 bp, synthetic construct
  source 1..20: mol_type = other DNA
ttggccttcgtccggatgca

SEQ ID NO: 11068 - DNA, 20 bp, synthetic construct
  source 1..20: mol_type = other DNA
gaacgttgttgcttccagca

SEQ ID NO: 11069 - DNA, 20 bp, synthetic construct
  source 1..20: mol_type = other DNA
agaaggcgtaattcttggct

SEQ ID NO: 11070 - DNA, 20 bp, synthetic construct
  source 1..20: mol_type = other DNA
aaacaggtacctgaaagaac

SEQ ID NO: 11071 - DNA, 20 bp, synthetic construct
  source 1..20: mol_type = other DNA
cgtcgatcggaaggcctggt

SEQ ID NO: 11072 - DNA, 20 bp, synthetic construct
  source 1..20: mol_type = other DNA
tcatccatgtcattaggagt

SEQ ID NO: 11073 - DNA, 20 bp, synthetic construct
  source 1..20: mol_type = other DNA
gcaaaggtctgcgctctctg

SEQ ID NO: 11074 - DNA, 20 bp, synthetic construct
  source 1..20: mol_type = other DNA
tccatgtcccgttaggttca

SEQ ID NO: 11075 - DNA, 20 bp, synthetic construct
  source 1..20: mol_type = other DNA
attccacttgtattctggcg

SEQ ID NO: 11076 - DNA, 20 bp, synthetic construct
  source 1..20: mol_type = other DNA
gtagctgctttcgcatgacc

SEQ ID NO: 11077 - DNA, 20 bp, synthetic construct
  source 1..20: mol_type = other DNA
aagcccttccggaaggattt

SEQ ID NO: 11078 - DNA, 20 bp, synthetic construct
  source 1..20: mol_type = other DNA
ttgagcgtccgactagctcc

SEQ ID NO: 11079 - DNA, 20 bp, synthetic construct
  source 1..20: mol_type = other DNA
ggcagcctaattaactagta

SEQ ID NO: 11080 - DNA, 20 bp, synthetic construct
  source 1..20: mol_type = other DNA
tccagaccgttcctaccgac

SEQ ID NO: 11081 - DNA, 20 bp, synthetic construct
  source 1..20: mol_type = other DNA
cgatgaccgatgccacggac

SEQ ID NO: 11082 - DNA, 20 bp, synthetic construct
  source 1..20: mol_type = other DNA
gtggccactttgggtagcga

SEQ ID NO: 11083 - DNA, 20 bp, synthetic construct
  source 1..20: mol_type = other DNA
cgggtgctaggttctgttct

SEQ ID NO: 11084 - DNA, 20 bp, synthetic construct
  source 1..20: mol_type = other DNA
ggtaacctgcacttacgtct

SEQ ID NO: 11085 - DNA, 20 bp, synthetic construct
  source 1..20: mol_type = other DNA
ccggcgaacctgtcaacagc

SEQ ID NO: 11086 - DNA, 20 bp, synthetic construct
  source 1..20: mol_type = other DNA
ttctataacttaagccgctg

SEQ ID NO: 11087 - DNA, 20 bp, synthetic construct
  source 1..20: mol_type = other DNA
agcatgtggtttgtgttcgg

SEQ ID NO: 11088 - DNA, 20 bp, synthetic construct
  source 1..20: mol_type = other DNA
actggccttgaggtagttat

SEQ ID NO: 11089 - DNA, 20 bp, synthetic construct
  source 1..20: mol_type = other DNA
tacagggaactcactagatg

SEQ ID NO: 11090 - DNA, 20 bp, synthetic construct
  source 1..20: mol_type = other DNA
caaatagagcagtacgtcta

SEQ ID NO: 11091 - DNA, 20 bp, synthetic construct
  source 1..20: mol_type = other DNA
tgcatggcctggttatttcg

SEQ ID NO: 11092 - DNA, 20 bp, synthetic construct
  source 1..20: mol_type = other DNA
agcttacctattccgagatg

SEQ ID NO: 11093 - DNA, 20 bp, synthetic construct
  source 1..20: mol_type = other DNA
gtgcaagcacgttacgagta

SEQ ID NO: 11094 - DNA, 20 bp, synthetic construct
  source 1..20: mol_type = other DNA
tcttgaaggtagtttactgc

SEQ ID NO: 11095 - DNA, 20 bp, synthetic construct
  source 1..20: mol_type = other DNA
taatacgatggtaactccgg

SEQ ID NO: 11096 - DNA, 20 bp, synthetic construct
  source 1..20: mol_type = other DNA
tccgggaatgctcgcccttc

SEQ ID NO: 11097 - DNA, 20 bp, synthetic construct
  source 1..20: mol_type = other DNA
gggtaggtatgcatgagcca

SEQ ID NO: 11098 - DNA, 20 bp, synthetic construct
  source 1..20: mol_type = other DNA
gggtcacggataatgtggcc

SEQ ID NO: 11099 - DNA, 20 bp, synthetic construct
  source 1..20: mol_type = other DNA
ctttgtatgtagtcgccact

SEQ ID NO: 11100 - DNA, 20 bp, synthetic construct
  source 1..20: mol_type = other DNA
ctagaagattaggacggaaa

SEQ ID NO: 11101 - DNA, 20 bp, synthetic construct
  source 1..20: mol_type = other DNA
tgtagtattgaaatccgacc

SEQ ID NO: 11102 - DNA, 20 bp, synthetic construct
  source 1..20: mol_type = other DNA
ggtatgatatacgaacgtcc

SEQ ID NO: 11103 - DNA, 20 bp, synthetic construct
  source 1..20: mol_type = other DNA
atcatgttctcgtccacagg

SEQ ID NO: 11104 - DNA, 20 bp, synthetic construct
  source 1..20: mol_type = other DNA
tgctcatgcagcgtcattga

SEQ ID NO: 11105 - DNA, 20 bp, synthetic construct
  source 1..20: mol_type = other DNA
gtcctgcgaccctccctatg

SEQ ID NO: 11106 - DNA, 20 bp, synthetic construct
  source 1..20: mol_type = other DNA
ccttaccggcgggtgtgtaa

SEQ ID NO: 11107 - DNA, 20 bp, synthetic construct
  source 1..20: mol_type = other DNA
caatgcaacttgtgaccagc

SEQ ID NO: 11108 - DNA, 20 bp, synthetic construct
  source 1..20: mol_type = other DNA
ctttattggttcgctgctcc

SEQ ID NO: 11109 - DNA, 20 bp, synthetic construct
  source 1..20: mol_type = other DNA
gtgagaagtgggattgaagg

SEQ ID NO: 11110 - DNA, 20 bp, synthetic construct
  source 1..20: mol_type = other DNA
aagccgttgctagatgcggc

SEQ ID NO: 11111 - DNA, 20 bp, synthetic construct
  source 1..20: mol_type = other DNA
ccgaatgtagtccctgcagt

SEQ ID NO: 11112 - DNA, 20 bp, synthetic construct
  source 1..20: mol_type = other DNA
cggaccgttcaacaggcgat

SEQ ID NO: 11113 - DNA, 20 bp, synthetic construct
  source 1..20: mol_type = other DNA
gtatcccttatgctgcgcta

SEQ ID NO: 11114 - DNA, 20 bp, synthetic construct
  source 1..20: mol_type = other DNA
cgggtcggcgaagtaagtct

SEQ ID NO: 11115 - DNA, 20 bp, synthetic construct
  source 1..20: mol_type = other DNA
ccaggaccctctaacacata

SEQ ID NO: 11116 - DNA, 20 bp, synthetic construct
  source 1..20: mol_type = other DNA
ctttcggttggccgagcacc

SEQ ID NO: 11117 - DNA, 20 bp, synthetic construct
  source 1..20: mol_type = other DNA
cagctttgtcatcaccacaa

SEQ ID NO: 11118 - DNA, 20 bp, synthetic construct
  source 1..20: mol_type = other DNA
aacgtgtcctgttcggaata

SEQ ID NO: 11119 - DNA, 20 bp, synthetic construct
  source 1..20: mol_type = other DNA
agacgatcccgaacaacgca

SEQ ID NO: 11120 - DNA, 20 bp, synthetic construct
  source 1..20: mol_type = other DNA
cgtgaggtcgaatgtgggag

SEQ ID NO: 11121 - DNA, 20 bp, synthetic construct
  source 1..20: mol_type = other DNA
tcaagtagctctgctccgtc

SEQ ID NO: 11122 - DNA, 20 bp, synthetic construct
  source 1..20: mol_type = other DNA
tgtgtaaccctgggtggtgc

SEQ ID NO: 11123 - DNA, 20 bp, synthetic construct
  source 1..20: mol_type = other DNA
accgaggccagtaactccac

SEQ ID NO: 11124 - DNA, 20 bp, synthetic construct
  source 1..20: mol_type = other DNA
tccagcacgattgtggctac

SEQ ID NO: 11125 - DNA, 20 bp, synthetic construct
  source 1..20: mol_type = other DNA
cacacctgcgtcgaaggagg

SEQ ID NO: 11126 - DNA, 20 bp, synthetic construct
  source 1..20: mol_type = other DNA
tcctctgggacggccacgta

SEQ ID NO: 11127 - DNA, 20 bp, synthetic construct
  source 1..20: mol_type = other DNA
ctttgaggaacttccttctt

SEQ ID NO: 11128 - DNA, 20 bp, synthetic construct
  source 1..20: mol_type = other DNA
ttagtccgccggtatttggc

SEQ ID NO: 11129 - DNA, 20 bp, synthetic construct
  source 1..20: mol_type = other DNA
gcattcaacgcgggtcctgc

SEQ ID NO: 11130 - DNA, 20 bp, synthetic construct
  source 1..20: mol_type = other DNA
ttcatatcggtgcaacagcc

SEQ ID NO: 11131 - DNA, 20 bp, synthetic construct
  source 1..20: mol_type = other DNA
tggagttcgcccacgccacg

SEQ ID NO: 11132 - DNA, 20 bp, synthetic construct
  source 1..20: mol_type = other DNA
gacgtgttcctaacacattt

SEQ ID NO: 11133 - DNA, 20 bp, synthetic construct
  source 1..20: mol_type = other DNA
cctatgtgcgagttcacggc

SEQ ID NO: 11134 - DNA, 20 bp, synthetic construct
  source 1..20: mol_type = other DNA
tgtggctcagggtcgggtct

SEQ ID NO: 11135 - DNA, 20 bp, synthetic construct
  source 1..20: mol_type = other DNA
tataacagctgtcagaagcg

SEQ ID NO: 11136 - DNA, 20 bp, synthetic construct
  source 1..20: mol_type = other DNA
tatgaatcaagaaccagcac

SEQ ID NO: 11137 - DNA, 20 bp, synthetic construct
  source 1..20: mol_type = other DNA
cgttgttgagttgacacgat

SEQ ID NO: 11138 - DNA, 20 bp, synthetic construct
  source 1..20: mol_type = other DNA
ggcagtcccagtcaaactcg

SEQ ID NO: 11139 - DNA, 20 bp, synthetic construct
  source 1..20: mol_type = other DNA
tacttagctgcccttagcga

SEQ ID NO: 11140 - DNA, 20 bp, synthetic construct
  source 1..20: mol_type = other DNA
gagaaggtatgaactcagca

SEQ ID NO: 11141 - DNA, 20 bp, synthetic construct
  source 1..20: mol_type = other DNA
ggtactgtttctaaagtggc

SEQ ID NO: 11142 - DNA, 20 bp, synthetic construct
  source 1..20: mol_type = other DNA
gactcttaccctacatgtac

SEQ ID NO: 11143 - DNA, 20 bp, synthetic construct
  source 1..20: mol_type = other DNA
aatcgtgctttgtacttact

SEQ ID NO: 11144 - DNA, 20 bp, synthetic construct
  source 1..20: mol_type = other DNA
tgtatgtcatcaagagtacc

SEQ ID NO: 11145 - DNA, 20 bp, synthetic construct
  source 1..20: mol_type = other DNA
tactttagttgcagatatgt

SEQ ID NO: 11146 - DNA, 20 bp, synthetic construct
  source 1..20: mol_type = other DNA
tccattcgtagaaccgaacc

SEQ ID NO: 11147 - DNA, 20 bp, synthetic construct
  source 1..20: mol_type = other DNA
tcccgcgtagggaatctagc

SEQ ID NO: 11148 - DNA, 20 bp, synthetic construct
  source 1..20: mol_type = other DNA
cgggtggaactaaccgaagt

SEQ ID NO: 11149 - DNA, 20 bp, synthetic construct
  source 1..20: mol_type = other DNA
tagatgctcttcatcaacca

SEQ ID NO: 11150 - DNA, 20 bp, synthetic construct
  source 1..20: mol_type = other DNA
tttgataccaggcatcgtga

SEQ ID NO: 11151 - DNA, 20 bp, synthetic construct
  source 1..20: mol_type = other DNA
gagttatgttacagccgaca

SEQ ID NO: 11152 - DNA, 20 bp, synthetic construct
  source 1..20: mol_type = other DNA
ctatgtgtggactggatagc

SEQ ID NO: 11153 - DNA, 20 bp, synthetic construct
  source 1..20: mol_type = other DNA
cgacactgagatccaactta

SEQ ID NO: 11154 - DNA, 20 bp, synthetic construct
  source 1..20: mol_type = other DNA
gcttggtagcaagagaatac

SEQ ID NO: 11155 - DNA, 20 bp, synthetic construct
  source 1..20: mol_type = other DNA
tatcgtgctaacagggagga

SEQ ID NO: 11156 - DNA, 20 bp, synthetic construct
  source 1..20: mol_type = other DNA
gtagaagggccacaactagt

SEQ ID NO: 11157 - DNA, 20 bp, synthetic construct
  source 1..20: mol_type = other DNA
taccggtaagtcgctcttgc

SEQ ID NO: 11158 - DNA, 20 bp, synthetic construct
  source 1..20: mol_type = other DNA
attacgatggcatgaccact

SEQ ID NO: 11159 - DNA, 20 bp, synthetic construct
  source 1..20: mol_type = other DNA
catcgctccacgtgctcaag

SEQ ID NO: 11160 - DNA, 20 bp, synthetic construct
  source 1..20: mol_type = other DNA
tataccctagattccgctag

SEQ ID NO: 11161 - DNA, 20 bp, synthetic construct
  source 1..20: mol_type = other DNA
tccgacggcctttgtcctga

SEQ ID NO: 11162 - DNA, 20 bp, synthetic construct
  source 1..20: mol_type = other DNA
gaagcaggcttgcagagtca

SEQ ID NO: 11163 - DNA, 20 bp, synthetic construct
  source 1..20: mol_type = other DNA
tggacactttcattaagcgg

SEQ ID NO: 11164 - DNA, 20 bp, synthetic construct
  source 1..20: mol_type = other DNA
tgaacggctaatgcgcacgt

SEQ ID NO: 11165 - DNA, 20 bp, synthetic construct
  source 1..20: mol_type = other DNA
atatgcctctcttccaagaa

SEQ ID NO: 11166 - DNA, 20 bp, synthetic construct
  source 1..20: mol_type = other DNA
ttaggtgatgtcctagttgt

SEQ ID NO: 11167 - DNA, 20 bp, synthetic construct
  source 1..20: mol_type = other DNA
cattgtgttgccgcgttcga

SEQ ID NO: 11168 - DNA, 20 bp, synthetic construct
  source 1..20: mol_type = other DNA
gtgcttcgttggttcctcga

SEQ ID NO: 11169 - DNA, 20 bp, synthetic construct
  source 1..20: mol_type = other DNA
gcacactgctagcaatgagc

SEQ ID NO: 11170 - DNA, 20 bp, synthetic construct
  source 1..20: mol_type = other DNA
tccacacgcacgcagtgaga

SEQ ID NO: 11171 - DNA, 20 bp, synthetic construct
  source 1..20: mol_type = other DNA
gagtaagtacactttgaaac

SEQ ID NO: 11172 - DNA, 20 bp, synthetic construct
  source 1..20: mol_type = other DNA
gcatacaatctatcgtggtt

SEQ ID NO: 11173 - DNA, 20 bp, synthetic construct
  source 1..20: mol_type = other DNA
cccttgcatagcttctgata

SEQ ID NO: 11174 - DNA, 20 bp, synthetic construct
  source 1..20: mol_type = other DNA
tgtaaccaacgacatgctta

SEQ ID NO: 11175 - DNA, 20 bp, synthetic construct
  source 1..20: mol_type = other DNA
ctattcccacccaattattt

SEQ ID NO: 11176 - DNA, 20 bp, synthetic construct
  source 1..20: mol_type = other DNA
tgtgacccagttatcgctca

SEQ ID NO: 11177 - DNA, 20 bp, synthetic construct
  source 1..20: mol_type = other DNA
gtctgatggtatagtgccgg

SEQ ID NO: 11178 - DNA, 20 bp, synthetic construct
  source 1..20: mol_type = other DNA
gcaattgggattctccgtag

SEQ ID NO: 11179 - DNA, 20 bp, synthetic construct
  source 1..20: mol_type = other DNA
attctaccgtcgttacagta

SEQ ID NO: 11180 - DNA, 20 bp, synthetic construct
  source 1..20: mol_type = other DNA
tcgtacatctgcgtcagtcc

SEQ ID NO: 11181 - DNA, 20 bp, synthetic construct
  source 1..20: mol_type = other DNA
ccaccttggtgaattaactc

SEQ ID NO: 11182 - DNA, 20 bp, synthetic construct
  source 1..20: mol_type = other DNA
gtgttcagtgtgaccatatc

SEQ ID NO: 11183 - DNA, 20 bp, synthetic construct
  source 1..20: mol_type = other DNA
atgcaatttcgagagcacac

SEQ ID NO: 11184 - DNA, 20 bp, synthetic construct
  source 1..20: mol_type = other DNA
cggacttcgcctagataagg

SEQ ID NO: 11185 - DNA, 20 bp, synthetic construct
  source 1..20: mol_type = other DNA
cctcagggtaccctgtaacc

SEQ ID NO: 11186 - DNA, 20 bp, synthetic construct
  source 1..20: mol_type = other DNA
cagagaaataaagtttccct

SEQ ID NO: 11187 - DNA, 20 bp, synthetic construct
  source 1..20: mol_type = other DNA
aaacaagactgtggtactaa

SEQ ID NO: 11188 - DNA, 20 bp, synthetic construct
  source 1..20: mol_type = other DNA
tcccgtgaaatctgcaagac

SEQ ID NO: 11189 - DNA, 20 bp, synthetic construct
  source 1..20: mol_type = other DNA
agtcgcagtgtgctagggtc

SEQ ID NO: 11190 - DNA, 20 bp, synthetic construct
  source 1..20: mol_type = other DNA
ctggacttaaatacgatcct

SEQ ID NO: 11191 - DNA, 20 bp, synthetic construct
  source 1..20: mol_type = other DNA
actgccttgtcaatgtttgg

SEQ ID NO: 11192 - DNA, 20 bp, synthetic construct
  source 1..20: mol_type = other DNA
gtcatagcatttgcggtcct

SEQ ID NO: 11193 - DNA, 20 bp, synthetic construct
  source 1..20: mol_type = other DNA
caatcacagagataaccgta

SEQ ID NO: 11194 - DNA, 20 bp, synthetic construct
  source 1..20: mol_type = other DNA
gggacaaagcctccgaaaga

SEQ ID NO: 11195 - DNA, 20 bp, synthetic construct
  source 1..20: mol_type = other DNA
tgttcatgtaaatcccatgt

SEQ ID NO: 11196 - DNA, 20 bp, synthetic construct
  source 1..20: mol_type = other DNA
tgactagatgctctactgat

SEQ ID NO: 11197 - DNA, 20 bp, synthetic construct
  source 1..20: mol_type = other DNA
gcggcattcgtattcgtaga

SEQ ID NO: 11198 - DNA, 20 bp, synthetic construct
  source 1..20: mol_type = other DNA
ctaagagagcaatcatcaat

SEQ ID NO: 11199 - DNA, 20 bp, synthetic construct
  source 1..20: mol_type = other DNA
tgtcaatgtgaatctcccga

SEQ ID NO: 11200 - DNA, 20 bp, synthetic construct
  source 1..20: mol_type = other DNA
cattgcgttgaccaattgcg

SEQ ID NO: 11201 - DNA, 20 bp, synthetic construct
  source 1..20: mol_type = other DNA
ctgcatcggagccgcatctt

SEQ ID NO: 11202 - DNA, 20 bp, synthetic construct
  source 1..20: mol_type = other DNA
attcgctcatgcccggtata

SEQ ID NO: 11203 - DNA, 20 bp, synthetic construct
  source 1..20: mol_type = other DNA
cactccagatggaggtcgca

SEQ ID NO: 11204 - DNA, 20 bp, synthetic construct
  source 1..20: mol_type = other DNA
agttacaggcgtccaacttc

SEQ ID NO: 11205 - DNA, 20 bp, synthetic construct
  source 1..20: mol_type = other DNA
tgtcttcctagaagcgactc

SEQ ID NO: 11206 - DNA, 20 bp, synthetic construct
  source 1..20: mol_type = other DNA
attggtggtcgcagcaggtc

SEQ ID NO: 11207 - DNA, 20 bp, synthetic construct
  source 1..20: mol_type = other DNA
gaatatcatgcccgttgtat

SEQ ID NO: 11208 - DNA, 20 bp, synthetic construct
  source 1..20: mol_type = other DNA
acggttgtaccgtatgctag

SEQ ID NO: 11209 - DNA, 20 bp, synthetic construct
  source 1..20: mol_type = other DNA
ctccttacagcgtcaccatg

SEQ ID NO: 11210 - DNA, 20 bp, synthetic construct
  source 1..20: mol_type = other DNA
tttcccgcgccagtgtattc

SEQ ID NO: 11211 - DNA, 20 bp, synthetic construct
  source 1..20: mol_type = other DNA
gtaccacgctagtagttgaa

SEQ ID NO: 11212 - DNA, 20 bp, synthetic construct
  source 1..20: mol_type = other DNA
gtgatggctcgtatcgaagt

SEQ ID NO: 11213 - DNA, 20 bp, synthetic construct
  source 1..20: mol_type = other DNA
agctttcgtatagagctaaa

SEQ ID NO: 11214 - DNA, 20 bp, synthetic construct
  source 1..20: mol_type = other DNA
gatgggttataatgacttcc

SEQ ID NO: 11215 - DNA, 20 bp, synthetic construct
  source 1..20: mol_type = other DNA
gaccatcgaatttctgaatt

SEQ ID NO: 11216 - DNA, 20 bp, synthetic construct
  source 1..20: mol_type = other DNA
tgtctggtcgatttactgct

SEQ ID NO: 11217 - DNA, 20 bp, synthetic construct
  source 1..20: mol_type = other DNA
ccattgccggttaagatcct

SEQ ID NO: 11218 - DNA, 20 bp, synthetic construct
  source 1..20: mol_type = other DNA
cctggttgctacgcatttca

SEQ ID NO: 11219 - DNA, 20 bp, synthetic construct
  source 1..20: mol_type = other DNA
tgaacggatcattctcttga

SEQ ID NO: 11220 - DNA, 20 bp, synthetic construct
  source 1..20: mol_type = other DNA
aacactatacacacgtgccg

SEQ ID NO: 11221 - DNA, 20 bp, synthetic construct
  source 1..20: mol_type = other DNA
gctccttctctaggccggca

SEQ ID NO: 11222 - DNA, 20 bp, synthetic construct
  source 1..20: mol_type = other DNA
tttagtgcgtgagtttatcc

SEQ ID NO: 11223 - DNA, 20 bp, synthetic construct
  source 1..20: mol_type = other DNA
ttcgaatggttaaaccgcta

SEQ ID NO: 11224 - DNA, 20 bp, synthetic construct
  source 1..20: mol_type = other DNA
ccgatgtatttctacgagaa

SEQ ID NO: 11225 - DNA, 20 bp, synthetic construct
  source 1..20: mol_type = other DNA
cgatgaccgactatgcatag

SEQ ID NO: 11226 - DNA, 20 bp, synthetic construct
  source 1..20: mol_type = other DNA
cgttggcccatgcatggatt

SEQ ID NO: 11227 - DNA, 20 bp, synthetic construct
  source 1..20: mol_type = other DNA
caggttacgttcttccggat

SEQ ID NO: 11228 - DNA, 20 bp, synthetic construct
  source 1..20: mol_type = other DNA
gagggctagcttccacgacc

SEQ ID NO: 11229 - DNA, 20 bp, synthetic construct
  source 1..20: mol_type = other DNA
ctaagtttccgactgttcca

SEQ ID NO: 11230 - DNA, 20 bp, synthetic construct
  source 1..20: mol_type = other DNA
gttcggcataacttaacgta

SEQ ID NO: 11231 - DNA, 20 bp, synthetic construct
  source 1..20: mol_type = other DNA
aggacctaacatacatcctt

SEQ ID NO: 11232 - DNA, 20 bp, synthetic construct
  source 1..20: mol_type = other DNA
gtgggtaccaaaggtgttgg

SEQ ID NO: 11233 - DNA, 20 bp, synthetic construct
  source 1..20: mol_type = other DNA
ttcatcaggagatcaagacg

SEQ ID NO: 11234 - DNA, 20 bp, synthetic construct
  source 1..20: mol_type = other DNA
cgacttgtttggagcgttaa

SEQ ID NO: 11235 - DNA, 20 bp, synthetic construct
  source 1..20: mol_type = other DNA
agatcacaatccctgccgca

SEQ ID NO: 11236 - DNA, 20 bp, synthetic construct
  source 1..20: mol_type = other DNA
cagtcggtctgatcaatatt

SEQ ID NO: 11237 - DNA, 20 bp, synthetic construct
  source 1..20: mol_type = other DNA
cacattgtttcccataagca

SEQ ID NO: 11238 - DNA, 20 bp, synthetic construct
  source 1..20: mol_type = other DNA
ccatcgaagaagctcagacc

SEQ ID NO: 11239 - DNA, 20 bp, synthetic construct
  source 1..20: mol_type = other DNA
tcaagtgtgctttccaacct

SEQ ID NO: 11240 - DNA, 20 bp, synthetic construct
  source 1..20: mol_type = other DNA
gtgacttgtattgctcgaca

SEQ ID NO: 11241 - DNA, 20 bp, synthetic construct
  source 1..20: mol_type = other DNA
actgtcagtgcgactcgtgg

SEQ ID NO: 11242 - DNA, 20 bp, synthetic construct
  source 1..20: mol_type = other DNA
tacgaaacgcgtgagtttcg

SEQ ID NO: 11243 - DNA, 20 bp, synthetic construct
  source 1..20: mol_type = other DNA
gagcgcactttatgttaagt

SEQ ID NO: 11244 - DNA, 20 bp, synthetic construct
  source 1..20: mol_type = other DNA
tatcgaccgcattaagacag

SEQ ID NO: 11245 - DNA, 20 bp, synthetic construct
  source 1..20: mol_type = other DNA
cgggtctacattctggcttg

SEQ ID NO: 11246 - DNA, 20 bp, synthetic construct
  source 1..20: mol_type = other DNA
tccgcactgcgttacgtcga

SEQ ID NO: 11247 - DNA, 20 bp, synthetic construct
  source 1..20: mol_type = other DNA
gttcggataccgccgcatat

SEQ ID NO: 11248 - DNA, 20 bp, synthetic construct
  source 1..20: mol_type = other DNA
caatattccagtacgcatat

SEQ ID NO: 11249 - DNA, 20 bp, synthetic construct
  source 1..20: mol_type = other DNA
tggagttacactatagacta

SEQ ID NO: 11250 - DNA, 20 bp, synthetic construct
  source 1..20: mol_type = other DNA
taacttggagggtgccctcg

SEQ ID NO: 11251 - DNA, 20 bp, synthetic construct
  source 1..20: mol_type = other DNA
gctaaccatgtacggaaatg

SEQ ID NO: 11252 - DNA, 20 bp, synthetic construct
  source 1..20: mol_type = other DNA
ccttggccgggtgtgttatt

SEQ ID NO: 11253 - DNA, 20 bp, synthetic construct
  source 1..20: mol_type = other DNA
atcccatcgggaacgagaga

SEQ ID NO: 11254 - DNA, 20 bp, synthetic construct
  source 1..20: mol_type = other DNA
ggatattaatctcctaccgt

SEQ ID NO: 11255 - DNA, 20 bp, synthetic construct
  source 1..20: mol_type = other DNA
tccaaggcttactctcccag

SEQ ID NO: 11256 - DNA, 20 bp, synthetic construct
  source 1..20: mol_type = other DNA
tcatgcgacaggccgggaga

SEQ ID NO: 11257 - DNA, 20 bp, synthetic construct
  source 1..20: mol_type = other DNA
aagtgtcacgatcatgactc

SEQ ID NO: 11258 - DNA, 20 bp, synthetic construct
  source 1..20: mol_type = other DNA
gctataccgagcctcaagga

SEQ ID NO: 11259 - DNA, 20 bp, synthetic construct
  source 1..20: mol_type = other DNA
tgttacacgactcggactac

SEQ ID NO: 11260 - DNA, 20 bp, synthetic construct
  source 1..20: mol_type = other DNA
gtcagacttgtcacaagcta

SEQ ID NO: 11261 - DNA, 20 bp, synthetic construct
  source 1..20: mol_type = other DNA
atttgctcgcatgaggtagg

SEQ ID NO: 11262 - DNA, 20 bp, synthetic construct
  source 1..20: mol_type = other DNA
attaactaaagggtcctagc

SEQ ID NO: 11263 - DNA, 20 bp, synthetic construct
  source 1..20: mol_type = other DNA
caccgttactacttaattgt

SEQ ID NO: 11264 - DNA, 20 bp, synthetic construct
  source 1..20: mol_type = other DNA
cctccgactaatgagttcag

SEQ ID NO: 11265 - DNA, 20 bp, synthetic construct
  source 1..20: mol_type = other DNA
caaatagtgtcggaacatat

SEQ ID NO: 11266 - DNA, 20 bp, synthetic construct
  source 1..20: mol_type = other DNA
ttgctaacttatgcattctc

SEQ ID NO: 11267 - DNA, 20 bp, synthetic construct
  source 1..20: mol_type = other DNA
gcaatcctgttagtcgcggt

SEQ ID NO: 11268 - DNA, 20 bp, synthetic construct
  source 1..20: mol_type = other DNA
ccgacatcgatcactaattt

SEQ ID NO: 11269 - DNA, 20 bp, synthetic construct
  source 1..20: mol_type = other DNA
aaggatgcgagggcgacaca

SEQ ID NO: 11270 - DNA, 20 bp, synthetic construct
  source 1..20: mol_type = other DNA
ggaaccggttacgtcggtcg

SEQ ID NO: 11271 - DNA, 20 bp, synthetic construct
  source 1..20: mol_type = other DNA
gataactacttgtgagtgag

SEQ ID NO: 11272 - DNA, 20 bp, synthetic construct
  source 1..20: mol_type = other DNA
ctctattctagtgtgggcgt

SEQ ID NO: 11273 - DNA, 20 bp, synthetic construct
  source 1..20: mol_type = other DNA
ctgtgacgatgtatgcgtta

SEQ ID NO: 11274 - DNA, 20 bp, synthetic construct
  source 1..20: mol_type = other DNA
ggctgttggtgtagtcctca

SEQ ID NO: 11275 - DNA, 20 bp, synthetic construct
  source 1..20: mol_type = other DNA
agcaggtacagtctgacggt

SEQ ID NO: 11276 - DNA, 20 bp, synthetic construct
  source 1..20: mol_type = other DNA
agtgccaaagttgccgtgga

SEQ ID NO: 11277 - DNA, 20 bp, synthetic construct
  source 1..20: mol_type = other DNA
gctaacaacgtctactatct

SEQ ID NO: 11278 - DNA, 20 bp, synthetic construct
  source 1..20: mol_type = other DNA
gcatcatgtagtcgtccgct

SEQ ID NO: 11279 - DNA, 20 bp, synthetic construct
  source 1..20: mol_type = other DNA
ttgatagggtgtgcatgttg

SEQ ID NO: 11280 - DNA, 20 bp, synthetic construct
  source 1..20: mol_type = other DNA
gtaacagccgtcacatagcg

SEQ ID NO: 11281 - DNA, 20 bp, synthetic construct
  source 1..20: mol_type = other DNA
tgcgaggtccaatagttgaa

SEQ ID NO: 11282 - DNA, 20 bp, synthetic construct
  source 1..20: mol_type = other DNA
gtagaccaggcactcgtaag

SEQ ID NO: 11283 - DNA, 20 bp, synthetic construct
  source 1..20: mol_type = other DNA
cccaattcaatgatcacaag

SEQ ID NO: 11284 - DNA, 20 bp, synthetic construct
  source 1..20: mol_type = other DNA
cctcaggcttgggcttggtt

SEQ ID NO: 11285 - DNA, 20 bp, synthetic construct
  source 1..20: mol_type = other DNA
ttgctcgcgtgtggaatgtc

SEQ ID NO: 11286 - DNA, 20 bp, synthetic construct
  source 1..20: mol_type = other DNA
ccgccggacgtaatgctggt

SEQ ID NO: 11287 - DNA, 20 bp, synthetic construct
  source 1..20: mol_type = other DNA
gcattccctactataggccg

SEQ ID NO: 11288 - DNA, 20 bp, synthetic construct
  source 1..20: mol_type = other DNA
cgctcgctacagacctttaa

SEQ ID NO: 11289 - DNA, 20 bp, synthetic construct
  source 1..20: mol_type = other DNA
acgcgccatacttacacgct

SEQ ID NO: 11290 - DNA, 20 bp, synthetic construct
  source 1..20: mol_type = other DNA
ataatggcatggtacctact

SEQ ID NO: 11291 - DNA, 20 bp, synthetic construct
  source 1..20: mol_type = other DNA
gaaggtacatgtgcctgata

SEQ ID NO: 11292 - DNA, 20 bp, synthetic construct
  source 1..20: mol_type = other DNA
ctagagggctcacatgtgtc

SEQ ID NO: 11293 - DNA, 20 bp, synthetic construct
  source 1..20: mol_type = other DNA
tgccgcaaatgagggccaag

SEQ ID NO: 11294 - DNA, 20 bp, synthetic construct
  source 1..20: mol_type = other DNA
tcgtggtcgtggtaccttcg

SEQ ID NO: 11295 - DNA, 20 bp, synthetic construct
  source 1..20: mol_type = other DNA
tcgccgtcaatgagggtgta

SEQ ID NO: 11296 - DNA, 20 bp, synthetic construct
  source 1..20: mol_type = other DNA
ggtgggcagatacgtaggat

SEQ ID NO: 11297 - DNA, 20 bp, synthetic construct
  source 1..20: mol_type = other DNA
aggtctccgtgaatacccta

SEQ ID NO: 11298 - DNA, 20 bp, synthetic construct
  source 1..20: mol_type = other DNA
gtccggctttataccaggaa

SEQ ID NO: 11299 - DNA, 20 bp, synthetic construct
  source 1..20: mol_type = other DNA
tcatggcataagcctttgcc

SEQ ID NO: 11300 - DNA, 20 bp, synthetic construct
  source 1..20: mol_type = other DNA
gggcttatgtagacataatg

SEQ ID NO: 11301 - DNA, 20 bp, synthetic construct
  source 1..20: mol_type = other DNA
agcgtgctagggcattgact

SEQ ID NO: 11302 - DNA, 20 bp, synthetic construct
  source 1..20: mol_type = other DNA
tctaatttctgaatgatgcg

SEQ ID NO: 11303 - DNA, 20 bp, synthetic construct
  source 1..20: mol_type = other DNA
gcactctagcttaactgggt

SEQ ID NO: 11304 - DNA, 20 bp, synthetic construct
  source 1..20: mol_type = other DNA
ttcccgcaggattcgagtct

SEQ ID NO: 11305 - DNA, 20 bp, synthetic construct
  source 1..20: mol_type = other DNA
tattcctaccggtttagaag

SEQ ID NO: 11306 - DNA, 20 bp, synthetic construct
  source 1..20: mol_type = other DNA
cgtagcgacagactagacaa

SEQ ID NO: 11307 - DNA, 20 bp, synthetic construct
  source 1..20: mol_type = other DNA
cgaggtggtactctcggaaa

SEQ ID NO: 11308 - DNA, 20 bp, synthetic construct
  source 1..20: mol_type = other DNA
gcaattgtggtagatgacct

SEQ ID NO: 11309 - DNA, 20 bp, synthetic construct
  source 1..20: mol_type = other DNA
ggtgtcgaaccagatacaga

SEQ ID NO: 11310 - DNA, 20 bp, synthetic construct
  source 1..20: mol_type = other DNA
gggtgtgacagacctctgaa

SEQ ID NO: 11311 - DNA, 20 bp, synthetic construct
  source 1..20: mol_type = other DNA
tcctcgggactgaacaaagg

SEQ ID NO: 11312 - DNA, 20 bp, synthetic construct
  source 1..20: mol_type = other DNA
aatgcgttattatataccca

SEQ ID NO: 11313 - DNA, 20 bp, synthetic construct
  source 1..20: mol_type = other DNA
taaagcatccttatggagta

SEQ ID NO: 11314 - DNA, 20 bp, synthetic construct
  source 1..20: mol_type = other DNA
atgcaacgtcgcgatagacg

SEQ ID NO: 11315 - DNA, 20 bp, synthetic construct
  source 1..20: mol_type = other DNA
ttctgtgtccatgcgaaccc

SEQ ID NO: 11316 - DNA, 20 bp, synthetic construct
  source 1..20: mol_type = other DNA
gacactatcggagacaccat

SEQ ID NO: 11317 - DNA, 20 bp, synthetic construct
  source 1..20: mol_type = other DNA
agaaatgctcaagtggatta

SEQ ID NO: 11318 - DNA, 20 bp, synthetic construct
  source 1..20: mol_type = other DNA
tcgtagtatactctgagatt

SEQ ID NO: 11319 - DNA, 20 bp, synthetic construct
  source 1..20: mol_type = other DNA
aatctgagagctgcttacgt

SEQ ID NO: 11320 - DNA, 20 bp, synthetic construct
  source 1..20: mol_type = other DNA
aactctctaacgaagagaag

SEQ ID NO: 11321 - DNA, 20 bp, synthetic construct
  source 1..20: mol_type = other DNA
tggtcggcactcgtatactg

SEQ ID NO: 11322 - DNA, 20 bp, synthetic construct
  source 1..20: mol_type = other DNA
gtcggctggatgggttataa

SEQ ID NO: 11323 - DNA, 20 bp, synthetic construct
  source 1..20: mol_type = other DNA
ctttattagtcggactccga

SEQ ID NO: 11324 - DNA, 20 bp, synthetic construct
  source 1..20: mol_type = other DNA
ggcgttagggaacgacagcg

SEQ ID NO: 11325 - DNA, 20 bp, synthetic construct
  source 1..20: mol_type = other DNA
gtagcacaacgggttcttat

SEQ ID NO: 11326 - DNA, 20 bp, synthetic construct
  source 1..20: mol_type = other DNA
gatcgctgggagactgttga

SEQ ID NO: 11327 - DNA, 20 bp, synthetic construct
  source 1..20: mol_type = other DNA
tgtcgtacgtaacggaacgc

SEQ ID NO: 11328 - DNA, 20 bp, synthetic construct
  source 1..20: mol_type = other DNA
catcgataggcaactggccg

SEQ ID NO: 11329 - DNA, 20 bp, synthetic construct
  source 1..20: mol_type = other DNA
ttggctgccagctgatccat

SEQ ID NO: 11330 - DNA, 20 bp, synthetic construct
  source 1..20: mol_type = other DNA
cgaggcaaataattaccgca

SEQ ID NO: 11331 - DNA, 20 bp, synthetic construct
  source 1..20: mol_type = other DNA
gtgagtaaatcaccttcctt

SEQ ID NO: 11332 - DNA, 20 bp, synthetic construct
  source 1..20: mol_type = other DNA
cctacacgtgagatctaccg

SEQ ID NO: 11333 - DNA, 20 bp, synthetic construct
  source 1..20: mol_type = other DNA
gacttattcgtaatgtttgg

SEQ ID NO: 11334 - DNA, 20 bp, synthetic construct
  source 1..20: mol_type = other DNA
ggacagacagctaaggactt

SEQ ID NO: 11335 - DNA, 20 bp, synthetic construct
  source 1..20: mol_type = other DNA
acttatcccagatactggag

SEQ ID NO: 11336 - DNA, 20 bp, synthetic construct
  source 1..20: mol_type = other DNA
acggtttacatatgactggc

SEQ ID NO: 11337 - DNA, 20 bp, synthetic construct
  source 1..20: mol_type = other DNA
cgcttccatgggtagaggca

SEQ ID NO: 11338 - DNA, 20 bp, synthetic construct
  source 1..20: mol_type = other DNA
aagaatccacgctggacttg

SEQ ID NO: 11339 - DNA, 20 bp, synthetic construct
  source 1..20: mol_type = other DNA
tatctgggtttcgatttaga

SEQ ID NO: 11340 - DNA, 20 bp, synthetic construct
  source 1..20: mol_type = other DNA
agtataagtgctctgtgatg

SEQ ID NO: 11341 - DNA, 20 bp, synthetic construct
  source 1..20: mol_type = other DNA
cttgggaccgtcggcttatg

SEQ ID NO: 11342 - DNA, 20 bp, synthetic construct
  source 1..20: mol_type = other DNA
gagagatgctcatgtagaca

SEQ ID NO: 11343 - DNA, 20 bp, synthetic construct
  source 1..20: mol_type = other DNA
ctcaacccaagcgggctgtt

SEQ ID NO: 11344 - DNA, 20 bp, synthetic construct
  source 1..20: mol_type = other DNA
tacgtgctctggatccgaca

SEQ ID NO: 11345 - DNA, 20 bp, synthetic construct
  source 1..20: mol_type = other DNA
acggaactggttcgtcgaga

SEQ ID NO: 11346 - DNA, 20 bp, synthetic construct
  source 1..20: mol_type = other DNA
atggtcgtagcaaagctggg

SEQ ID NO: 11347 - DNA, 20 bp, synthetic construct
  source 1..20: mol_type = other DNA
gcacatcaccagaacagtac

SEQ ID NO: 11348 - DNA, 20 bp, synthetic construct
  source 1..20: mol_type = other DNA
tgttcgagctgactgtgcac

SEQ ID NO: 11349 - DNA, 20 bp, synthetic construct
  source 1..20: mol_type = other DNA
atgttaccgtgtaggtagtt

SEQ ID NO: 11350 - DNA, 20 bp, synthetic construct
  source 1..20: mol_type = other DNA
agtcaaccaacaggacgcat

SEQ ID NO: 11351 - DNA, 20 bp, synthetic construct
  source 1..20: mol_type = other DNA
atatcttccacagagttaga

SEQ ID NO: 11352 - DNA, 20 bp, synthetic construct
  source 1..20: mol_type = other DNA
gggaggaagcctggactctc

SEQ ID NO: 11353 - DNA, 20 bp, synthetic construct
  source 1..20: mol_type = other DNA
ggacgcttgtggtcacgcaa

SEQ ID NO: 11354 - DNA, 20 bp, synthetic construct
  source 1..20: mol_type = other DNA
agcgggagatccacaaattt

SEQ ID NO: 11355 - DNA, 20 bp, synthetic construct
  source 1..20: mol_type = other DNA
gatcagtccgtattataatg

SEQ ID NO: 11356 - DNA, 20 bp, synthetic construct
  source 1..20: mol_type = other DNA
atatctattcgatcggtcgc

SEQ ID NO: 11357 - DNA, 20 bp, synthetic construct
  source 1..20: mol_type = other DNA
cctagcttatacgtacctaa

SEQ ID NO: 11358 - DNA, 20 bp, synthetic construct
  source 1..20: mol_type = other DNA
acgtagcgatcctacccaca

SEQ ID NO: 11359 - DNA, 20 bp, synthetic construct
  source 1..20: mol_type = other DNA
ttcacgaaccatcgagttga

SEQ ID NO: 11360 - DNA, 20 bp, synthetic construct
  source 1..20: mol_type = other DNA
gccctactacatcggtcaac

SEQ ID NO: 11361 - DNA, 20 bp, synthetic construct
  source 1..20: mol_type = other DNA
gtgccgctcggtggcttaaa

SEQ ID NO: 11362 - DNA, 20 bp, synthetic construct
  source 1..20: mol_type = other DNA
tatccactgctacgtgcccg

SEQ ID NO: 11363 - DNA, 20 bp, synthetic construct
  source 1..20: mol_type = other DNA
ccctcctacatggagccatt

SEQ ID NO: 11364 - DNA, 20 bp, synthetic construct
  source 1..20: mol_type = other DNA
ttgattatcctgcagaggca

SEQ ID NO: 11365 - DNA, 20 bp, synthetic construct
  source 1..20: mol_type = other DNA
cttagtgggagtaagacgta

SEQ ID NO: 11366 - DNA, 20 bp, synthetic construct
  source 1..20: mol_type = other DNA
cccggatggacaaaggcaga

SEQ ID NO: 11367 - DNA, 20 bp, synthetic construct
  source 1..20: mol_type = other DNA
tttcctgtccctctttgatg

SEQ ID NO: 11368 - DNA, 20 bp, synthetic construct
  source 1..20: mol_type = other DNA
aaacggcgacttgtggcttc

SEQ ID NO: 11369 - DNA, 20 bp, synthetic construct
  source 1..20: mol_type = other DNA
agcatgagtgtgtatagtgt

SEQ ID NO: 11370 - DNA, 20 bp, synthetic construct
  source 1..20: mol_type = other DNA
agtcacttgttacttagtta

SEQ ID NO: 11371 - DNA, 20 bp, synthetic construct
  source 1..20: mol_type = other DNA
caggctcgatcggacacgtg

SEQ ID NO: 11372 - DNA, 20 bp, synthetic construct
  source 1..20: mol_type = other DNA
ccaaatcaagatctttaacg

SEQ ID NO: 11373 - DNA, 20 bp, synthetic construct
  source 1..20: mol_type = other DNA
cgcacaatggttaataacca

SEQ ID NO: 11374 - DNA, 20 bp, synthetic construct
  source 1..20: mol_type = other DNA
tggattcagcacgtagacgg

SEQ ID NO: 11375 - DNA, 20 bp, synthetic construct
  source 1..20: mol_type = other DNA
aactctaaacgcatgagcct

SEQ ID NO: 11376 - DNA, 20 bp, synthetic construct
  source 1..20: mol_type = other DNA
atttctacaagaatatggtg

SEQ ID NO: 11377 - DNA, 20 bp, synthetic construct
  source 1..20: mol_type = other DNA
tcttaagctaccaaactaga

SEQ ID NO: 11378 - DNA, 20 bp, synthetic construct
  source 1..20: mol_type = other DNA
taagcagtgcataggagcag

SEQ ID NO: 11379 - DNA, 20 bp, synthetic construct
  source 1..20: mol_type = other DNA
gtcatcactggaaaggagca

SEQ ID NO: 11380 - DNA, 20 bp, synthetic construct
  source 1..20: mol_type = other DNA
agctcgatactgttgcgacc

SEQ ID NO: 11381 - DNA, 20 bp, synthetic construct
  source 1..20: mol_type = other DNA
accaactatgtcggtgttcg

SEQ ID NO: 11382 - DNA, 20 bp, synthetic construct
  source 1..20: mol_type = other DNA
tgcgaacctccattgatcct

SEQ ID NO: 11383 - DNA, 20 bp, synthetic construct
  source 1..20: mol_type = other DNA
cggacctctcgatcctatgt

SEQ ID NO: 11384 - DNA, 20 bp, synthetic construct
  source 1..20: mol_type = other DNA
gtactcccacgccatcaaca

SEQ ID NO: 11385 - DNA, 20 bp, synthetic construct
  source 1..20: mol_type = other DNA
acatagaatcgaggacacta

SEQ ID NO: 11386 - DNA, 20 bp, synthetic construct
  source 1..20: mol_type = other DNA
tacgtgtcaatgagttcact

SEQ ID NO: 11387 - DNA, 20 bp, synthetic construct
  source 1..20: mol_type = other DNA
ctgttcaggatctctgttcc

SEQ ID NO: 11388 - DNA, 20 bp, synthetic construct
  source 1..20: mol_type = other DNA
taacgatgctaccaatgtcc

SEQ ID NO: 11389 - DNA, 20 bp, synthetic construct
  source 1..20: mol_type = other DNA
acatcggacaggtgaccgta

SEQ ID NO: 11390 - DNA, 20 bp, synthetic construct
  source 1..20: mol_type = other DNA
aaacttctgagatacagtct

SEQ ID NO: 11391 - DNA, 20 bp, synthetic construct
  source 1..20: mol_type = other DNA
tctaagcagtctgcaaggca

SEQ ID NO: 11392 - DNA, 20 bp, synthetic construct
  source 1..20: mol_type = other DNA
attagggctgcgctgtcctt

SEQ ID NO: 11393 - DNA, 20 bp, synthetic construct
  source 1..20: mol_type = other DNA
atcacactgcgcttatgacc

SEQ ID NO: 11394 - DNA, 20 bp, synthetic construct
  source 1..20: mol_type = other DNA
acatcttattaacgaagcga

SEQ ID NO: 11395 - DNA, 20 bp, synthetic construct
  source 1..20: mol_type = other DNA
ttctttcgcacctaggtgat

SEQ ID NO: 11396 - DNA, 20 bp, synthetic construct
  source 1..20: mol_type = other DNA
gacttagaacctccagaagt

SEQ ID NO: 11397 - DNA, 20 bp, synthetic construct
  source 1..20: mol_type = other DNA
cgccgtggacctcatcttta

SEQ ID NO: 11398 - DNA, 20 bp, synthetic construct
  source 1..20: mol_type = other DNA
ggtaagtaccatgtcttaag

SEQ ID NO: 11399 - DNA, 20 bp, synthetic construct
  source 1..20: mol_type = other DNA
actgcgagcatgggctagcc

SEQ ID NO: 11400 - DNA, 20 bp, synthetic construct
  source 1..20: mol_type = other DNA
tttagacgtactcaattgac

SEQ ID NO: 11401 - DNA, 20 bp, synthetic construct
  source 1..20: mol_type = other DNA
gagcgttctcgatgagctgc

SEQ ID NO: 11402 - DNA, 20 bp, synthetic construct
  source 1..20: mol_type = other DNA
aaatcgtacctaccgacacc

SEQ ID NO: 11403 - DNA, 20 bp, synthetic construct
  source 1..20: mol_type = other DNA
aacgacaaggcagaacccaa

SEQ ID NO: 11404 - DNA, 20 bp, synthetic construct
  source 1..20: mol_type = other DNA
ccacacaaacttgcgatatt

SEQ ID NO: 11405 - DNA, 20 bp, synthetic construct
  source 1..20: mol_type = other DNA
tcatgcgatgccgatttctc

SEQ ID NO: 11406 - DNA, 20 bp, synthetic construct
  source 1..20: mol_type = other DNA
accagtggaatttataggac

SEQ ID NO: 11407 - DNA, 20 bp, synthetic construct
  source 1..20: mol_type = other DNA
tgttggcaatcatgtatagc

SEQ ID NO: 11408 - DNA, 20 bp, synthetic construct
  source 1..20: mol_type = other DNA
cgggtccggtggtggactac

SEQ ID NO: 11409 - DNA, 20 bp, synthetic construct
  source 1..20: mol_type = other DNA
gaatcgagtcatttgtggct

SEQ ID NO: 11410 - DNA, 20 bp, synthetic construct
  source 1..20: mol_type = other DNA
attccgtgtcggactcctac

SEQ ID NO: 11411 - DNA, 20 bp, synthetic construct
  source 1..20: mol_type = other DNA
ctaacgacgcgtatcaagca

SEQ ID NO: 11412 - DNA, 20 bp, synthetic construct
  source 1..20: mol_type = other DNA
ctgaatttaaccggatcgtc

SEQ ID NO: 11413 - DNA, 20 bp, synthetic construct
  source 1..20: mol_type = other DNA
tgtgtaacttcgtgacttaa

SEQ ID NO: 11414 - DNA, 20 bp, synthetic construct
  source 1..20: mol_type = other DNA
tagttgagtaggcttaggcc

SEQ ID NO: 11415 - DNA, 20 bp, synthetic construct
  source 1..20: mol_type = other DNA
ttctgggtaacttgcttctt

SEQ ID NO: 11416 - DNA, 20 bp, synthetic construct
  source 1..20: mol_type = other DNA
acaccctttgcaactgggtt

SEQ ID NO: 11417 - DNA, 20 bp, synthetic construct
  source 1..20: mol_type = other DNA
tatggtggtgtcaacccggc

SEQ ID NO: 11418 - DNA, 20 bp, synthetic construct
  source 1..20: mol_type = other DNA
atggacccttactcgcacgc

SEQ ID NO: 11419 - DNA, 20 bp, synthetic construct
  source 1..20: mol_type = other DNA
catgtagggagcactccaag

SEQ ID NO: 11420 - DNA, 20 bp, synthetic construct
  source 1..20: mol_type = other DNA
atgggtccatggcgtgggaa

SEQ ID NO: 11421 - DNA, 20 bp, synthetic construct
  source 1..20: mol_type = other DNA
accacggacgcatgttacgg

SEQ ID NO: 11422 - DNA, 20 bp, synthetic construct
  source 1..20: mol_type = other DNA
acctagtgtacgctaggtat

SEQ ID NO: 11423 - DNA, 20 bp, synthetic construct
  source 1..20: mol_type = other DNA
tacacaacagccttccaacc

SEQ ID NO: 11424 - DNA, 20 bp, synthetic construct
  source 1..20: mol_type = other DNA
ggcgtctaaccggtatgacc

SEQ ID NO: 11425 - DNA, 20 bp, synthetic construct
  source 1..20: mol_type = other DNA
cacgcacagccaagcatctc

SEQ ID NO: 11426 - DNA, 20 bp, synthetic construct
  source 1..20: mol_type = other DNA
cggcccgaagtcttgctcta

SEQ ID NO: 11427 - DNA, 20 bp, synthetic construct
  source 1..20: mol_type = other DNA
ttcagcagcgtcaatacctg

SEQ ID NO: 11428 - DNA, 20 bp, synthetic construct
  source 1..20: mol_type = other DNA
gaacgaatcgtgaaggcccg

SEQ ID NO: 11429 - DNA, 20 bp, synthetic construct
  source 1..20: mol_type = other DNA
ttaatgttcgtccgacgtga

SEQ ID NO: 11430 - DNA, 20 bp, synthetic construct
  source 1..20: mol_type = other DNA
tctacacaatggaacttgta

SEQ ID NO: 11431 - DNA, 20 bp, synthetic construct
  source 1..20: mol_type = other DNA
tgaattaatagcgtagctat

SEQ ID NO: 11432 - DNA, 20 bp, synthetic construct
  source 1..20: mol_type = other DNA
gcggacccaaggtcatatca

SEQ ID NO: 11433 - DNA, 20 bp, synthetic construct
  source 1..20: mol_type = other DNA
agtgctggctcctaagccgt

SEQ ID NO: 11434 - DNA, 20 bp, synthetic construct
  source 1..20: mol_type = other DNA
ctctaccacgtgcaagcacc

SEQ ID NO: 11435 - DNA, 20 bp, synthetic construct
  source 1..20: mol_type = other DNA
aagctcctatagtaaatgga

SEQ ID NO: 11436 - DNA, 20 bp, synthetic construct
  source 1..20: mol_type = other DNA
acgcggttaaatgccatata

SEQ ID NO: 11437 - DNA, 20 bp, synthetic construct
  source 1..20: mol_type = other DNA
tgcgctattgataagctcgc

SEQ ID NO: 11438 - DNA, 20 bp, synthetic construct
  source 1..20: mol_type = other DNA
acgatggcctcttatctata

SEQ ID NO: 11439 - DNA, 20 bp, synthetic construct
  source 1..20: mol_type = other DNA
gtacgttgtattccgagcta

SEQ ID NO: 11440 - DNA, 20 bp, synthetic construct
  source 1..20: mol_type = other DNA
tccggactgctgtttagtac

SEQ ID NO: 11441 - DNA, 20 bp, synthetic construct
  source 1..20: mol_type = other DNA
gttggacatctgctacgaag

SEQ ID NO: 11442 - DNA, 20 bp, synthetic construct
  source 1..20: mol_type = other DNA
ctcattgacgagacttcttg

SEQ ID NO: 11443 - DNA, 20 bp, synthetic construct
  source 1..20: mol_type = other DNA
tagtcaattgactggcgttt

SEQ ID NO: 11444 - DNA, 20 bp, synthetic construct
  source 1..20: mol_type = other DNA
ggtcctttgagacctagggc

SEQ ID NO: 11445 - DNA, 20 bp, synthetic construct
  source 1..20: mol_type = other DNA
gttgaggaggacgagacatt

SEQ ID NO: 11446 - DNA, 20 bp, synthetic construct
  source 1..20: mol_type = other DNA
tacgctgtgatggcactacg

SEQ ID NO: 11447 - DNA, 20 bp, synthetic construct
  source 1..20: mol_type = other DNA
agtggaaatgtccagactca

SEQ ID NO: 11448 - DNA, 20 bp, synthetic construct
  source 1..20: mol_type = other DNA
cctagacaaacgggtctaca

SEQ ID NO: 11449 - DNA, 20 bp, synthetic construct
  source 1..20: mol_type = other DNA
tgatcttctgtgtgacaggc

SEQ ID NO: 11450 - DNA, 20 bp, synthetic construct
  source 1..20: mol_type = other DNA
gcctcgtatctccatttcct

SEQ ID NO: 11451 - DNA, 20 bp, synthetic construct
  source 1..20: mol_type = other DNA
agcggtttcatacctaaagg

SEQ ID NO: 11452 - DNA, 20 bp, synthetic construct
  source 1..20: mol_type = other DNA
agcttgaccctgtacgaagc

SEQ ID NO: 11453 - DNA, 20 bp, synthetic construct
  source 1..20: mol_type = other DNA
ggaattgtaattagcccgtc

SEQ ID NO: 11454 - DNA, 20 bp, synthetic construct
  source 1..20: mol_type = other DNA
tgaatgctttactgcaagac

SEQ ID NO: 11455 - DNA, 20 bp, synthetic construct
  source 1..20: mol_type = other DNA
tgtggcacgacacctggcaa

SEQ ID NO: 11456 - DNA, 20 bp, synthetic construct
  source 1..20: mol_type = other DNA
gtccaggtcacaatgtgggc

SEQ ID NO: 11457 - DNA, 20 bp, synthetic construct
  source 1..20: mol_type = other DNA
gtaatgtatgggtctagtat

SEQ ID NO: 11458 - DNA, 20 bp, synthetic construct
  source 1..20: mol_type = other DNA
gacatcgttgctctactacg

SEQ ID NO: 11459 - DNA, 20 bp, synthetic construct
  source 1..20: mol_type = other DNA
acgcaaacggttaagaaacc

SEQ ID NO: 11460 - DNA, 20 bp, synthetic construct
  source 1..20: mol_type = other DNA
tacattaccgagccagttca

SEQ ID NO: 11461 - DNA, 20 bp, synthetic construct
  source 1..20: mol_type = other DNA
atggctataacgtaggcgaa

SEQ ID NO: 11462 - DNA, 20 bp, synthetic construct
  source 1..20: mol_type = other DNA
cgatacctcgcgacaagatt

SEQ ID NO: 11463 - DNA, 20 bp, synthetic construct
  source 1..20: mol_type = other DNA
tgagttggagccctcccaac

SEQ ID NO: 11464 - DNA, 20 bp, synthetic construct
  source 1..20: mol_type = other DNA
cgtcctacagacttcttcca

SEQ ID NO: 11465 - DNA, 20 bp, synthetic construct
  source 1..20: mol_type = other DNA
cagccgtatttccaacagcg

SEQ ID NO: 11466 - DNA, 20 bp, synthetic construct
  source 1..20: mol_type = other DNA
ctgaaatattacgccgacta

SEQ ID NO: 11467 - DNA, 20 bp, synthetic construct
  source 1..20: mol_type = other DNA
gccgtctttatttgatatgc

SEQ ID NO: 11468 - DNA, 20 bp, synthetic construct
  source 1..20: mol_type = other DNA
atcatcgggttcccgacctg

SEQ ID NO: 11469 - DNA, 20 bp, synthetic construct
  source 1..20: mol_type = other DNA
tcgcgtgagagcaaccgcag

SEQ ID NO: 11470 - DNA, 20 bp, synthetic construct
  source 1..20: mol_type = other DNA
cacgtgcgcttgaagagttt

SEQ ID NO: 11471 - DNA, 20 bp, synthetic construct
  source 1..20: mol_type = other DNA
tccatagcattgttgggtta

SEQ ID NO: 11472 - DNA, 20 bp, synthetic construct
  source 1..20: mol_type = other DNA
gaagcgtgggcccagttcct

SEQ ID NO: 11473 - DNA, 20 bp, synthetic construct
  source 1..20: mol_type = other DNA
acgtggaagttaatcccaga

SEQ ID NO: 11474 - DNA, 20 bp, synthetic construct
  source 1..20: mol_type = other DNA
atatcacaaggctcactgtc

SEQ ID NO: 11475 - DNA, 20 bp, synthetic construct
  source 1..20: mol_type = other DNA
agaacgcccatgtagttcgt

SEQ ID NO: 11476 - DNA, 20 bp, synthetic construct
  source 1..20: mol_type = other DNA
ccctcctccatttataacag

SEQ ID NO: 11477 - DNA, 20 bp, synthetic construct
  source 1..20: mol_type = other DNA
aaccgcgcccgtcctccaat

SEQ ID NO: 11478 - DNA, 20 bp, synthetic construct
  source 1..20: mol_type = other DNA
tctcaaccacgtcgcctact

SEQ ID NO: 11479 - DNA, 20 bp, synthetic construct
  source 1..20: mol_type = other DNA
catcaggctcgtcagctctt

SEQ ID NO: 11480 - DNA, 20 bp, synthetic construct
  source 1..20: mol_type = other DNA
atgtaaaccgagccaattaa

SEQ ID NO: 11481 - DNA, 20 bp, synthetic construct
  source 1..20: mol_type = other DNA
tcgcgtcttactgaccgatc

SEQ ID NO: 11482 - DNA, 20 bp, synthetic construct
  source 1..20: mol_type = other DNA
gtcttccgaccgggcgagaa

SEQ ID NO: 11483 - DNA, 20 bp, synthetic construct
  source 1..20: mol_type = other DNA
ctgtgacacttctgcgataa

SEQ ID NO: 11484 - DNA, 20 bp, synthetic construct
  source 1..20: mol_type = other DNA
gcagtctaaatcttccgtct

SEQ ID NO: 11485 - DNA, 20 bp, synthetic construct
  source 1..20: mol_type = other DNA
aagcagaagtctcgatgtat

SEQ ID NO: 11486 - DNA, 20 bp, synthetic construct
  source 1..20: mol_type = other DNA
atctagttgatcgcagcttt

SEQ ID NO: 11487 - DNA, 20 bp, synthetic construct
  source 1..20: mol_type = other DNA
ccactttctattgggtggaa

SEQ ID NO: 11488 - DNA, 20 bp, synthetic construct
  source 1..20: mol_type = other DNA
agttgatcacagtggcgata

SEQ ID NO: 11489 - DNA, 20 bp, synthetic construct
  source 1..20: mol_type = other DNA
agaaacccgcaactagagat

SEQ ID NO: 11490 - DNA, 20 bp, synthetic construct
  source 1..20: mol_type = other DNA
gggtaatgcttggccatctg

SEQ ID NO: 11491 - DNA, 20 bp, synthetic construct
  source 1..20: mol_type = other DNA
ctctacatccgacgggtatt

SEQ ID NO: 11492 - DNA, 20 bp, synthetic construct
  source 1..20: mol_type = other DNA
ctaaggacgtcactggagat

SEQ ID NO: 11493 - DNA, 20 bp, synthetic construct
  source 1..20: mol_type = other DNA
aacccggtcaacccacgtga

SEQ ID NO: 11494 - DNA, 20 bp, synthetic construct
  source 1..20: mol_type = other DNA
gtctcatttcagatactgtc

SEQ ID NO: 11495 - DNA, 20 bp, synthetic construct
  source 1..20: mol_type = other DNA
ctcactattgaatgggacga

SEQ ID NO: 11496 - DNA, 20 bp, synthetic construct
  source 1..20: mol_type = other DNA
acttggtccgacgttcaggt

SEQ ID NO: 11497 - DNA, 20 bp, synthetic construct
  source 1..20: mol_type = other DNA
ccatcgcacatctaattgtt

SEQ ID NO: 11498 - DNA, 20 bp, synthetic construct
  source 1..20: mol_type = other DNA
tgtgctagcggaccaatctt

SEQ ID NO: 11499 - DNA, 20 bp, synthetic construct
  source 1..20: mol_type = other DNA
caacagtcagcacgtgactt

SEQ ID NO: 11500 - DNA, 20 bp, synthetic construct
  source 1..20: mol_type = other DNA
tgacgggagtaatgtggtcg

SEQ ID NO: 11501 - DNA, 20 bp, synthetic construct
  source 1..20: mol_type = other DNA
gagccgctaccagatcaaga

SEQ ID NO: 11502 - DNA, 20 bp, synthetic construct
  source 1..20: mol_type = other DNA
actgctcgcactcgggcttt

SEQ ID NO: 11503 - DNA, 20 bp, synthetic construct
  source 1..20: mol_type = other DNA
tttgaaattgtctttctgcg

SEQ ID NO: 11504 - DNA, 20 bp, synthetic construct
  source 1..20: mol_type = other DNA
accaatgccttagaggagtg

SEQ ID NO: 11505 - DNA, 20 bp, synthetic construct
  source 1..20: mol_type = other DNA
gcccttcagcaccttagagt

SEQ ID NO: 11506 - DNA, 20 bp, synthetic construct
  source 1..20: mol_type = other DNA
gtctgggaggataggtttag

SEQ ID NO: 11507 - DNA, 20 bp, synthetic construct
  source 1..20: mol_type = other DNA
tcgccaactctggaagatgc

SEQ ID NO: 11508 - DNA, 20 bp, synthetic construct
  source 1..20: mol_type = other DNA
aaattcctagctccgccttg

SEQ ID NO: 11509 - DNA, 20 bp, synthetic construct
  source 1..20: mol_type = other DNA
atatcacgatagactacagg

SEQ ID NO: 11510 - DNA, 20 bp, synthetic construct
  source 1..20: mol_type = other DNA
gctaagtgcgacttcgttat

SEQ ID NO: 11511 - DNA, 20 bp, synthetic construct
  source 1..20: mol_type = other DNA
aaactcctcagaagcgtaaa

SEQ ID NO: 11512 - DNA, 20 bp, synthetic construct
  source 1..20: mol_type = other DNA
ggttacgactggcttcagga

SEQ ID NO: 11513 - DNA, 20 bp, synthetic construct
  source 1..20: mol_type = other DNA
gacatcgcgatacgagcgtg

SEQ ID NO: 11514 - DNA, 20 bp, synthetic construct
  source 1..20: mol_type = other DNA
atacgagtgcgctacgtcca

SEQ ID NO: 11515 - DNA, 20 bp, synthetic construct
  source 1..20: mol_type = other DNA
cctcggtccgatccttagct

SEQ ID NO: 11516 - DNA, 20 bp, synthetic construct
  source 1..20: mol_type = other DNA
ctcatttcgagatacactgt

SEQ ID NO: 11517 - DNA, 20 bp, synthetic construct
  source 1..20: mol_type = other DNA
aagagtgcaaatcatcaact

SEQ ID NO: 11518 - DNA, 20 bp, synthetic construct
  source 1..20: mol_type = other DNA
caatttctgctaccgattga

SEQ ID NO: 11519 - DNA, 20 bp, synthetic construct
  source 1..20: mol_type = other DNA
gaacgtcgtcgcatgcgctt

SEQ ID NO: 11520 - DNA, 20 bp, synthetic construct
  source 1..20: mol_type = other DNA
actcgttgctcctgttctat

SEQ ID NO: 11521 - DNA, 20 bp, synthetic construct
  source 1..20: mol_type = other DNA
gtctaccatgatcatccgct

SEQ ID NO: 11522 - DNA, 20 bp, synthetic construct
  source 1..20: mol_type = other DNA
gacaatttcgttaacccaga

SEQ ID NO: 11523 - DNA, 20 bp, synthetic construct
  source 1..20: mol_type = other DNA
gatatgtgcacgtctacctt

SEQ ID NO: 11524 - DNA, 20 bp, synthetic construct
  source 1..20: mol_type = other DNA
gtgtgacgtttaacgtgcga

SEQ ID NO: 11525 - DNA, 20 bp, synthetic construct
  source 1..20: mol_type = other DNA
tgcgtattccctcttctagt

SEQ ID NO: 11526 - DNA, 20 bp, synthetic construct
  source 1..20: mol_type = other DNA
cacgaacagcgttcatgccc

SEQ ID NO: 11527 - DNA, 20 bp, synthetic construct
  source 1..20: mol_type = other DNA
tctcatggtccatacagtaa

SEQ ID NO: 11528 - DNA, 20 bp, synthetic construct
  source 1..20: mol_type = other DNA
tctgggcgaccgtcacaact

SEQ ID NO: 11529 - DNA, 20 bp, synthetic construct
  source 1..20: mol_type = other DNA
gccatgtctaacaaggcagg

SEQ ID NO: 11530 - DNA, 20 bp, synthetic construct
  source 1..20: mol_type = other DNA
ttaggcatccgtagaatgtc

SEQ ID NO: 11531 - DNA, 20 bp, synthetic construct
  source 1..20: mol_type = other DNA
agttccgccacgtcactcat

SEQ ID NO: 11532 - DNA, 20 bp, synthetic construct
  source 1..20: mol_type = other DNA
agttgacatgccctccaaga

SEQ ID NO: 11533 - DNA, 20 bp, synthetic construct
  source 1..20: mol_type = other DNA
gcacgcattctgacatgtgt

SEQ ID NO: 11534 - DNA, 20 bp, synthetic construct
  source 1..20: mol_type = other DNA
ctctagtgatccacagtggc

SEQ ID NO: 11535 - DNA, 20 bp, synthetic construct
  source 1..20: mol_type = other DNA
catagccctcaagaggtgac

SEQ ID NO: 11536 - DNA, 20 bp, synthetic construct
  source 1..20: mol_type = other DNA
agcaagccggaagtatcttt

SEQ ID NO: 11537 - DNA, 20 bp, synthetic construct
  source 1..20: mol_type = other DNA
ttgtggcgaacgacttctcc

SEQ ID NO: 11538 - DNA, 20 bp, synthetic construct
  source 1..20: mol_type = other DNA
agaccacgtatgctcgtact

SEQ ID NO: 11539 - DNA, 20 bp, synthetic construct
  source 1..20: mol_type = other DNA
atgaataaagaattgcgcca

SEQ ID NO: 11540 - DNA, 20 bp, synthetic construct
  source 1..20: mol_type = other DNA
atgccatcatgagcagccgt

SEQ ID NO: 11541 - DNA, 20 bp, synthetic construct
  source 1..20: mol_type = other DNA
gcgatcagtcttgtaactgt

SEQ ID NO: 11542 - DNA, 20 bp, synthetic construct
  source 1..20: mol_type = other DNA
ggatgggaccgtatgataca

SEQ ID NO: 11543 - DNA, 20 bp, synthetic construct
  source 1..20: mol_type = other DNA
agcccttctcgcggaacaca

SEQ ID NO: 11544 - DNA, 20 bp, synthetic construct
  source 1..20: mol_type = other DNA
acggctgcatagttatgcct

SEQ ID NO: 11545 - DNA, 20 bp, synthetic construct
  source 1..20: mol_type = other DNA
ggcattattagagtatgatc

SEQ ID NO: 11546 - DNA, 20 bp, synthetic construct
  source 1..20: mol_type = other DNA
gaggttacgtcgttagctta

SEQ ID NO: 11547 - DNA, 20 bp, synthetic construct
  source 1..20: mol_type = other DNA
atgttccctttccgcccgcg

SEQ ID NO: 11548 - DNA, 20 bp, synthetic construct
  source 1..20: mol_type = other DNA
taataacacagtctcactgt

SEQ ID NO: 11549 - DNA, 20 bp, synthetic construct
  source 1..20: mol_type = other DNA
ggagatcccactttaccgta

SEQ ID NO: 11550 - DNA, 20 bp, synthetic construct
  source 1..20: mol_type = other DNA
cgtctcgctagtgctgagta

SEQ ID NO: 11551 - DNA, 20 bp, synthetic construct
  source 1..20: mol_type = other DNA
aagttaggcgctttaagctg

SEQ ID NO: 11552 - DNA, 20 bp, synthetic construct
  source 1..20: mol_type = other DNA
gacttcttgaagaggaatac

SEQ ID NO: 11553 - DNA, 20 bp, synthetic construct
  source 1..20: mol_type = other DNA
gtcgctgcgctatttcgcgc

SEQ ID NO: 11554 - DNA, 20 bp, synthetic construct
  source 1..20: mol_type = other DNA
cagcttaacatacgagaact

SEQ ID NO: 11555 - DNA, 20 bp, synthetic construct
  source 1..20: mol_type = other DNA
ccctggagagatgggccata

SEQ ID NO: 11556 - DNA, 20 bp, synthetic construct
  source 1..20: mol_type = other DNA
ttgtggtgtactattcccgc

SEQ ID NO: 11557 - DNA, 20 bp, synthetic construct
  source 1..20: mol_type = other DNA
tgtatccaatagtaagattc

SEQ ID NO: 11558 - DNA, 20 bp, synthetic construct
  source 1..20: mol_type = other DNA
accggacaggtgtcagtgag

SEQ ID NO: 11559 - DNA, 20 bp, synthetic construct
  source 1..20: mol_type = other DNA
ctccaccagccatatttcca

SEQ ID NO: 11560 - DNA, 20 bp, synthetic construct
  source 1..20: mol_type = other DNA
tggatcaccagtaatcgctc

SEQ ID NO: 11561 - DNA, 20 bp, synthetic construct
  source 1..20: mol_type = other DNA
attgtcggctggcaagtcac

SEQ ID NO: 11562 - DNA, 20 bp, synthetic construct
  source 1..20: mol_type = other DNA
cgtcctaatccctaagtggt

SEQ ID NO: 11563 - DNA, 20 bp, synthetic construct
  source 1..20: mol_type = other DNA
cttatggctgggtccgggac

SEQ ID NO: 11564 - DNA, 20 bp, synthetic construct
  source 1..20: mol_type = other DNA
aaagagctagagtacgttac

SEQ ID NO: 11565 - DNA, 20 bp, synthetic construct
  source 1..20: mol_type = other DNA
ggtattgtctacagggccat

SEQ ID NO: 11566 - DNA, 20 bp, synthetic construct
  source 1..20: mol_type = other DNA
tgcggatagtcttctggtgc

SEQ ID NO: 11567 - DNA, 20 bp, synthetic construct
  source 1..20: mol_type = other DNA
tacgctactgtcgccgactt

SEQ ID NO: 11568 - DNA, 20 bp, synthetic construct
  source 1..20: mol_type = other DNA
cacggcgtcgggatccatgc

SEQ ID NO: 11569 - DNA, 20 bp, synthetic construct
  source 1..20: mol_type = other DNA
tcaacggcagcgtgaggaac

SEQ ID NO: 11570 - DNA, 20 bp, synthetic construct
  source 1..20: mol_type = other DNA
acgcagatgtggaatctatc

SEQ ID NO: 11571 - DNA, 20 bp, synthetic construct
  source 1..20: mol_type = other DNA
ttgcgggagagaagtaatct

SEQ ID NO: 11572 - DNA, 20 bp, synthetic construct
  source 1..20: mol_type = other DNA
cttcttcgcaccatggaacc

SEQ ID NO: 11573 - DNA, 20 bp, synthetic construct
  source 1..20: mol_type = other DNA
gtagccatttcttctcatga

SEQ ID NO: 11574 - DNA, 20 bp, synthetic construct
  source 1..20: mol_type = other DNA
atcgagatgaatggtcgggc

SEQ ID NO: 11575 - DNA, 20 bp, synthetic construct
  source 1..20: mol_type = other DNA
cttctgctgctacttgggcc

SEQ ID NO: 11576 - DNA, 20 bp, synthetic construct
  source 1..20: mol_type = other DNA
gcactagccacactgctaca

SEQ ID NO: 11577 - DNA, 20 bp, synthetic construct
  source 1..20: mol_type = other DNA
tatagaagagtgtgtcgggc

SEQ ID NO: 11578 - DNA, 20 bp, synthetic construct
  source 1..20: mol_type = other DNA
taattccacgactccgagga

SEQ ID NO: 11579 - DNA, 20 bp, synthetic construct
  source 1..20: mol_type = other DNA
cgaagtatcgggtagaatac

SEQ ID NO: 11580 - DNA, 20 bp, synthetic construct
  source 1..20: mol_type = other DNA
cgtcattggtcaccatagtc

SEQ ID NO: 11581 - DNA, 20 bp, synthetic construct
  source 1..20: mol_type = other DNA
ttgccggatgtaggcggtga

SEQ ID NO: 11582 - DNA, 20 bp, synthetic construct
  source 1..20: mol_type = other DNA
caataaacatcgaccggaga

SEQ ID NO: 11583 - DNA, 20 bp, synthetic construct
  source 1..20: mol_type = other DNA
ggtccacggtagttgctgag

SEQ ID NO: 11584 - DNA, 20 bp, synthetic construct
  source 1..20: mol_type = other DNA
gtcaccgaaggaatttatga

SEQ ID NO: 11585 - DNA, 20 bp, synthetic construct
  source 1..20: mol_type = other DNA
ctggtcggtctcaacttctt

SEQ ID NO: 11586 - DNA, 20 bp, synthetic construct
  source 1..20: mol_type = other DNA
agctagttcccagtggtctg

SEQ ID NO: 11587 - DNA, 20 bp, synthetic construct
  source 1..20: mol_type = other DNA
tgatgactgatacggaactt

SEQ ID NO: 11588 - DNA, 20 bp, synthetic construct
  source 1..20: mol_type = other DNA
tgtagtgccgcttagtacat

SEQ ID NO: 11589 - DNA, 20 bp, synthetic construct
  source 1..20: mol_type = other DNA
agcttagtctaaccctcgtc

SEQ ID NO: 11590 - DNA, 20 bp, synthetic construct
  source 1..20: mol_type = other DNA
gctaaagcagtgaagatata

SEQ ID NO: 11591 - DNA, 20 bp, synthetic construct
  source 1..20: mol_type = other DNA
ccctgatcaacatatcggtt

SEQ ID NO: 11592 - DNA, 20 bp, synthetic construct
  source 1..20: mol_type = other DNA
accgtgtctctcctagctag

SEQ ID NO: 11593 - DNA, 20 bp, synthetic construct
  source 1..20: mol_type = other DNA
taggccatctggcggtctgc

SEQ ID NO: 11594 - DNA, 20 bp, synthetic construct
  source 1..20: mol_type = other DNA
gcgctcatgggatccagcga

SEQ ID NO: 11595 - DNA, 20 bp, synthetic construct
  source 1..20: mol_type = other DNA
acaagagagcgaataacggc

SEQ ID NO: 11596 - DNA, 20 bp, synthetic construct
  source 1..20: mol_type = other DNA
actggagtacttcgagtcgc

SEQ ID NO: 11597 - DNA, 20 bp, synthetic construct
  source 1..20: mol_type = other DNA
cgcgtccttccgcctttata

SEQ ID NO: 11598 - DNA, 20 bp, synthetic construct
  source 1..20: mol_type = other DNA
tggcaatcgcgttgtggtct

SEQ ID NO: 11599 - DNA, 20 bp, synthetic construct
  source 1..20: mol_type = other DNA
tccactcagtccgggcctac

SEQ ID NO: 11600 - DNA, 20 bp, synthetic construct
  source 1..20: mol_type = other DNA
ccgttctgctttgaggaccc

SEQ ID NO: 11601 - DNA, 20 bp, synthetic construct
  source 1..20: mol_type = other DNA
cccatctgggagcactagta

SEQ ID NO: 11602 - DNA, 20 bp, synthetic construct
  source 1..20: mol_type = other DNA
gcatttggagggagccgttg

SEQ ID NO: 11603 - DNA, 20 bp, synthetic construct
  source 1..20: mol_type = other DNA
aatgtgataccataggtctt

SEQ ID NO: 11604 - DNA, 20 bp, synthetic construct
  source 1..20: mol_type = other DNA
agatgcgtcttagtcgcgtc

SEQ ID NO: 11605 - DNA, 20 bp, synthetic construct
  source 1..20: mol_type = other DNA
agtgtacatagcgcgccctg

SEQ ID NO: 11606 - DNA, 20 bp, synthetic construct
  source 1..20: mol_type = other DNA
tcgcttctcgcataccgagt

SEQ ID NO: 11607 - DNA, 20 bp, synthetic construct
  source 1..20: mol_type = other DNA
gtggcatcggcgtgtggtgc

SEQ ID NO: 11608 - DNA, 20 bp, synthetic construct
  source 1..20: mol_type = other DNA
cgtgtttgaaagaggagcca

SEQ ID NO: 11609 - DNA, 20 bp, synthetic construct
  source 1..20: mol_type = other DNA
tggcggagctacaacttgct

SEQ ID NO: 11610 - DNA, 20 bp, synthetic construct
  source 1..20: mol_type = other DNA
tatcgtttcgacaggaggcc

SEQ ID NO: 11611 - DNA, 20 bp, synthetic construct
  source 1..20: mol_type = other DNA
caaccgctctgatagcctct

SEQ ID NO: 11612 - DNA, 20 bp, synthetic construct
  source 1..20: mol_type = other DNA
gagcaccaatgagcagggat

SEQ ID NO: 11613 - DNA, 20 bp, synthetic construct
  source 1..20: mol_type = other DNA
cagtgtagtgacgttcataa

SEQ ID NO: 11614 - DNA, 20 bp, synthetic construct
  source 1..20: mol_type = other DNA
gcggaatactgcggacaagg

SEQ ID NO: 11615 - DNA, 20 bp, synthetic construct
  source 1..20: mol_type = other DNA
cctgcatcctcctcaactat

SEQ ID NO: 11616 - DNA, 20 bp, synthetic construct
  source 1..20: mol_type = other DNA
cgtatcggaagtgcttacct

SEQ ID NO: 11617 - DNA, 20 bp, synthetic construct
  source 1..20: mol_type = other DNA
cgggttactgtactggcacg

SEQ ID NO: 11618 - DNA, 20 bp, synthetic construct
  source 1..20: mol_type = other DNA
tggctattcggtgggcaagc

SEQ ID NO: 11619 - DNA, 20 bp, synthetic construct
  source 1..20: mol_type = other DNA
ctgaagaaaggttctacgtt

SEQ ID NO: 11620 - DNA, 20 bp, synthetic construct
  source 1..20: mol_type = other DNA
tcttcttaagggatctagca

SEQ ID NO: 11621 - DNA, 20 bp, synthetic construct
  source 1..20: mol_type = other DNA
gcataaaggcgagggtaaag

SEQ ID NO: 11622 - DNA, 20 bp, synthetic construct
  source 1..20: mol_type = other DNA
aggtcaatcaagaaagcagg

SEQ ID NO: 11623 - DNA, 20 bp, synthetic construct
  source 1..20: mol_type = other DNA
gtcaccgcgtatgaggcact

SEQ ID NO: 11624 - DNA, 20 bp, synthetic construct
  source 1..20: mol_type = other DNA
ggatgggatgtttgagcatt

SEQ ID NO: 11625 - DNA, 20 bp, synthetic construct
  source 1..20: mol_type = other DNA
tgcaaccagtctgttaatta

SEQ ID NO: 11626 - DNA, 20 bp, synthetic construct
  source 1..20: mol_type = other DNA
ctttcggatcgatccatttc

SEQ ID NO: 11627 - DNA, 20 bp, synthetic construct
  source 1..20: mol_type = other DNA
gttggtgtcagagccattta

SEQ ID NO: 11628 - DNA, 20 bp, synthetic construct
  source 1..20: mol_type = other DNA
ttgcgcaagtgtgtttaaga

SEQ ID NO: 11629 - DNA, 20 bp, synthetic construct
  source 1..20: mol_type = other DNA
tcctgtaactagacgatgaa

SEQ ID NO: 11630 - DNA, 20 bp, synthetic construct
  source 1..20: mol_type = other DNA
gggaaatgtgtacaggtaat

SEQ ID NO: 11631 - DNA, 20 bp, synthetic construct
  source 1..20: mol_type = other DNA
cgtggacgttgggtcgttcc

SEQ ID NO: 11632 - DNA, 20 bp, synthetic construct
  source 1..20: mol_type = other DNA
cccaatgatacagacagttg

SEQ ID NO: 11633 - DNA, 20 bp, synthetic construct
  source 1..20: mol_type = other DNA
cgaggtaccggcacggctaa

SEQ ID NO: 11634 - DNA, 20 bp, synthetic construct
  source 1..20: mol_type = other DNA
gcccatatgggttctagtga

SEQ ID NO: 11635 - DNA, 20 bp, synthetic construct
  source 1..20: mol_type = other DNA
acaacttctcgaataaggac

SEQ ID NO: 11636 - DNA, 20 bp, synthetic construct
  source 1..20: mol_type = other DNA
tcagttcttagggataagta

SEQ ID NO: 11637 - DNA, 20 bp, synthetic construct
  source 1..20: mol_type = other DNA
ctaggagacgcctcgatcct

SEQ ID NO: 11638 - DNA, 20 bp, synthetic construct
  source 1..20: mol_type = other DNA
ctcgattacggtctccctag

SEQ ID NO: 11639 - DNA, 20 bp, synthetic construct
  source 1..20: mol_type = other DNA
tcgctaatctaaatgtccaa

SEQ ID NO: 11640 - DNA, 20 bp, synthetic construct
  source 1..20: mol_type = other DNA
gtgtctagggcgagttggtc

SEQ ID NO: 11641 - DNA, 20 bp, synthetic construct
  source 1..20: mol_type = other DNA
gaacatttgtagacaaggta

SEQ ID NO: 11642 - DNA, 20 bp, synthetic construct
  source 1..20: mol_type = other DNA
ctaagagcggcgtaatgggc

SEQ ID NO: 11643 - DNA, 20 bp, synthetic construct
  source 1..20: mol_type = other DNA
gccacagcggtcgctgctta

SEQ ID NO: 11644 - DNA, 20 bp, synthetic construct
  source 1..20: mol_type = other DNA
ccaatagtcgatttgcgaag

SEQ ID NO: 11645 - DNA, 20 bp, synthetic construct
  source 1..20: mol_type = other DNA
gtatgttgagcgtaacgttc

SEQ ID NO: 11646 - DNA, 20 bp, synthetic construct
  source 1..20: mol_type = other DNA
gttgttgcggtctaaacgtt

SEQ ID NO: 11647 - DNA, 20 bp, synthetic construct
  source 1..20: mol_type = other DNA
gggttcgttcgagcggtctt

SEQ ID NO: 11648 - DNA, 20 bp, synthetic construct
  source 1..20: mol_type = other DNA
tactccaacgtggacgacta

SEQ ID NO: 11649 - DNA, 20 bp, synthetic construct
  source 1..20: mol_type = other DNA
tcccacaattcggccatcac

SEQ ID NO: 11650 - DNA, 20 bp, synthetic construct
  source 1..20: mol_type = other DNA
ttcgtaaggtgtcatctcgc

SEQ ID NO: 11651 - DNA, 20 bp, synthetic construct
  source 1..20: mol_type = other DNA
gcaatccagatacctgttgg

SEQ ID NO: 11652 - DNA, 20 bp, synthetic construct
  source 1..20: mol_type = other DNA
ggaacctaggtagtataacc

SEQ ID NO: 11653 - DNA, 20 bp, synthetic construct
  source 1..20: mol_type = other DNA
ccgaccataagtaccgaacg

SEQ ID NO: 11654 - DNA, 20 bp, synthetic construct
  source 1..20: mol_type = other DNA
tccaggtcatcgcgtgacac

SEQ ID NO: 11655 - DNA, 20 bp, synthetic construct
  source 1..20: mol_type = other DNA
gtgtggcggaatcaataact

SEQ ID NO: 11656 - DNA, 20 bp, synthetic construct
  source 1..20: mol_type = other DNA
gtggttctagcttattcgta

SEQ ID NO: 11657 - DNA, 20 bp, synthetic construct
  source 1..20: mol_type = other DNA
gccgggctgtgaactacacg

SEQ ID NO: 11658 - DNA, 20 bp, synthetic construct
  source 1..20: mol_type = other DNA
agggctagttgcagactgta

SEQ ID NO: 11659 - DNA, 20 bp, synthetic construct
  source 1..20: mol_type = other DNA
ttcgggcttcagacacaatt

SEQ ID NO: 11660 - DNA, 20 bp, synthetic construct
  source 1..20: mol_type = other DNA
cggacgatagcacttcaact

SEQ ID NO: 11661 - DNA, 20 bp, synthetic construct
  source 1..20: mol_type = other DNA
tacacaactcatgtccgggt

SEQ ID NO: 11662 - DNA, 20 bp, synthetic construct
  source 1..20: mol_type = other DNA
cacacagttgggaacagaca

SEQ ID NO: 11663 - DNA, 20 bp, synthetic construct
  source 1..20: mol_type = other DNA
cgacgatggaggattgcaaa

SEQ ID NO: 11664 - DNA, 20 bp, synthetic construct
  source 1..20: mol_type = other DNA
actccctggtatagggcccg

SEQ ID NO: 11665 - DNA, 20 bp, synthetic construct
  source 1..20: mol_type = other DNA
gcgcagggttccttagggag

SEQ ID NO: 11666 - DNA, 20 bp, synthetic construct
  source 1..20: mol_type = other DNA
aacacataaataccgaacgg

SEQ ID NO: 11667 - DNA, 20 bp, synthetic construct
  source 1..20: mol_type = other DNA
tagtcccgaggacacaagtg

SEQ ID NO: 11668 - DNA, 20 bp, synthetic construct
  source 1..20: mol_type = other DNA
agactcacaagaccacagag

SEQ ID NO: 11669 - DNA, 20 bp, synthetic construct
  source 1..20: mol_type = other DNA
tacgataaattcgattgtct

SEQ ID NO: 11670 - DNA, 20 bp, synthetic construct
  source 1..20: mol_type = other DNA
tatcagcagtatgcatttga

SEQ ID NO: 11671 - DNA, 20 bp, synthetic construct
  source 1..20: mol_type = other DNA
acaccacgtagccagcttta

SEQ ID NO: 11672 - DNA, 20 bp, synthetic construct
  source 1..20: mol_type = other DNA
atatgctactacacgtctag

SEQ ID NO: 11673 - DNA, 20 bp, synthetic construct
  source 1..20: mol_type = other DNA
taagaactcacacggccctc

SEQ ID NO: 11674 - DNA, 20 bp, synthetic construct
  source 1..20: mol_type = other DNA
acctagtgttgtgcagcatc

SEQ ID NO: 11675 - DNA, 20 bp, synthetic construct
  source 1..20: mol_type = other DNA
cgacaacaaacgccgacgaa

SEQ ID NO: 11676 - DNA, 20 bp, synthetic construct
  source 1..20: mol_type = other DNA
gaggacaattcactgcggcc

SEQ ID NO: 11677 - DNA, 20 bp, synthetic construct
  source 1..20: mol_type = other DNA
ggagtatgcaacatttgtta

SEQ ID NO: 11678 - DNA, 20 bp, synthetic construct
  source 1..20: mol_type = other DNA
ttaaagcctcgggtcgagca

SEQ ID NO: 11679 - DNA, 20 bp, synthetic construct
  source 1..20: mol_type = other DNA
cgtcgcgtctagtgagtaga

SEQ ID NO: 11680 - DNA, 20 bp, synthetic construct
  source 1..20: mol_type = other DNA
atgtaagtatgcgactacag

SEQ ID NO: 11681 - DNA, 20 bp, synthetic construct
  source 1..20: mol_type = other DNA
atacacacccttgtgcaaag

SEQ ID NO: 11682 - DNA, 20 bp, synthetic construct
  source 1..20: mol_type = other DNA
aagtaaattgtgcagttggc

SEQ ID NO: 11683 - DNA, 20 bp, synthetic construct
  source 1..20: mol_type = other DNA
catgtcttagattaggtcca

SEQ ID NO: 11684 - DNA, 20 bp, synthetic construct
  source 1..20: mol_type = other DNA
gccggagcgacgttcctata

SEQ ID NO: 11685 - DNA, 20 bp, synthetic construct
  source 1..20: mol_type = other DNA
cccagtcatcaccgctgcca

SEQ ID NO: 11686 - DNA, 20 bp, synthetic construct
  source 1..20: mol_type = other DNA
agtagcctttcttgtccaga

SEQ ID NO: 11687 - DNA, 20 bp, synthetic construct
  source 1..20: mol_type = other DNA
ttgtcataccgacccgcgtg

SEQ ID NO: 11688 - DNA, 20 bp, synthetic construct
  source 1..20: mol_type = other DNA
gcgtctcgtagcaggatgga

SEQ ID NO: 11689 - DNA, 20 bp, synthetic construct
  source 1..20: mol_type = other DNA
ctagattagcacggctcgtc

SEQ ID NO: 11690 - DNA, 20 bp, synthetic construct
  source 1..20: mol_type = other DNA
atatcccgcggacttcattt

SEQ ID NO: 11691 - DNA, 20 bp, synthetic construct
  source 1..20: mol_type = other DNA
agggaggagggagaaacgac

SEQ ID NO: 11692 - DNA, 20 bp, synthetic construct
  source 1..20: mol_type = other DNA
cccacgcagtggatatgacc

SEQ ID NO: 11693 - DNA, 20 bp, synthetic construct
  source 1..20: mol_type = other DNA
gacagtgatactttcaacgg

SEQ ID NO: 11694 - DNA, 20 bp, synthetic construct
  source 1..20: mol_type = other DNA
actggtctgccatgtagaaa

SEQ ID NO: 11695 - DNA, 20 bp, synthetic construct
  source 1..20: mol_type = other DNA
ctgcgtccgtccaacggata

SEQ ID NO: 11696 - DNA, 20 bp, synthetic construct
  source 1..20: mol_type = other DNA
ttaaagtcctggcaggaagc

SEQ ID NO: 11697 - DNA, 20 bp, synthetic construct
  source 1..20: mol_type = other DNA
agacaaatgccgtcgaggga

SEQ ID NO: 11698 - DNA, 20 bp, synthetic construct
  source 1..20: mol_type = other DNA
aattcgacgcgacctagcta

SEQ ID NO: 11699 - DNA, 20 bp, synthetic construct
  source 1..20: mol_type = other DNA
ttcctctgtcatgctccggt

SEQ ID NO: 11700 - DNA, 20 bp, synthetic construct
  source 1..20: mol_type = other DNA
acggcatacgactgaacaaa

SEQ ID NO: 11701 - DNA, 20 bp, synthetic construct
  source 1..20: mol_type = other DNA
agtactgccgacaagtcgcg

SEQ ID NO: 11702 - DNA, 20 bp, synthetic construct
  source 1..20: mol_type = other DNA
cgtgcttacacatattcgtc

SEQ ID NO: 11703 - DNA, 20 bp, synthetic construct
  source 1..20: mol_type = other DNA
attccgacctatgaagtctg

SEQ ID NO: 11704 - DNA, 20 bp, synthetic construct
  source 1..20: mol_type = other DNA
tccggaacttatgtgctagc

SEQ ID NO: 11705 - DNA, 20 bp, synthetic construct
  source 1..20: mol_type = other DNA
taaagcggacttagcgtctt

SEQ ID NO: 11706 - DNA, 20 bp, synthetic construct
  source 1..20: mol_type = other DNA
ccatgagcgcgctgacggtt

SEQ ID NO: 11707 - DNA, 20 bp, synthetic construct
  source 1..20: mol_type = other DNA
ttatggaagtgaaatcactc

SEQ ID NO: 11708 - DNA, 20 bp, synthetic construct
  source 1..20: mol_type = other DNA
tacaagggaggtctttgagt

SEQ ID NO: 11709 - DNA, 20 bp, synthetic construct
  source 1..20: mol_type = other DNA
ggagactcgttagcaacttg

SEQ ID NO: 11710 - DNA, 20 bp, synthetic construct
  source 1..20: mol_type = other DNA
aagtgcatcatgaaatgagt

SEQ ID NO: 11711 - DNA, 20 bp, synthetic construct
  source 1..20: mol_type = other DNA
ttgaaagctaccttggagcc

SEQ ID NO: 11712 - DNA, 20 bp, synthetic construct
  source 1..20: mol_type = other DNA
gcaacaccagcctacatcat

SEQ ID NO: 11713 - DNA, 20 bp, synthetic construct
  source 1..20: mol_type = other DNA
cccggaagtgacagtcttct

SEQ ID NO: 11714 - DNA, 20 bp, synthetic construct
  source 1..20: mol_type = other DNA
aggacagtactttggacatg

SEQ ID NO: 11715 - DNA, 20 bp, synthetic construct
  source 1..20: mol_type = other DNA
acaatcgttctggcgtagca

SEQ ID NO: 11716 - DNA, 20 bp, synthetic construct
  source 1..20: mol_type = other DNA
agttgcctcctaaagtctca

SEQ ID NO: 11717 - DNA, 20 bp, synthetic construct
  source 1..20: mol_type = other DNA
caccctggaaagacgaatca

SEQ ID NO: 11718 - DNA, 20 bp, synthetic construct
  source 1..20: mol_type = other DNA
gtaaactaacctcaccgacc

SEQ ID NO: 11719 - DNA, 20 bp, synthetic construct
  source 1..20: mol_type = other DNA
gagcacaggtcacctgcaaa

SEQ ID NO: 11720 - DNA, 20 bp, synthetic construct
  source 1..20: mol_type = other DNA
gcttacctcattgctacacc

SEQ ID NO: 11721 - DNA, 20 bp, synthetic construct
  source 1..20: mol_type = other DNA
cgcggacagttccgtttagt

SEQ ID NO: 11722 - DNA, 20 bp, synthetic construct
  source 1..20: mol_type = other DNA
acgacactcttacgctcgat

SEQ ID NO: 11723 - DNA, 20 bp, synthetic construct
  source 1..20: mol_type = other DNA
gagcgtggctgttacctcct

SEQ ID NO: 11724 - DNA, 20 bp, synthetic construct
  source 1..20: mol_type = other DNA
gggccacattccagagggag

SEQ ID NO: 11725 - DNA, 20 bp, synthetic construct
  source 1..20: mol_type = other DNA
gcaataaactccgtcgggta

SEQ ID NO: 11726 - DNA, 20 bp, synthetic construct
  source 1..20: mol_type = other DNA
ggcgacgcacaccatccaac

SEQ ID NO: 11727 - DNA, 20 bp, synthetic construct
  source 1..20: mol_type = other DNA
tctcgtgtggtaaaccctgg

SEQ ID NO: 11728 - DNA, 20 bp, synthetic construct
  source 1..20: mol_type = other DNA
tcttgttcagcgcggtgttt

SEQ ID NO: 11729 - DNA, 20 bp, synthetic construct
  source 1..20: mol_type = other DNA
atcacggctgttgcgctctc

SEQ ID NO: 11730 - DNA, 20 bp, synthetic construct
  source 1..20: mol_type = other DNA
ctttgcttgagcataagcaa

SEQ ID NO: 11731 - DNA, 20 bp, synthetic construct
  source 1..20: mol_type = other DNA
ggacatcatccattcacagt

SEQ ID NO: 11732 - DNA, 20 bp, synthetic construct
  source 1..20: mol_type = other DNA
tacgctctttcgtagagaat

SEQ ID NO: 11733 - DNA, 20 bp, synthetic construct
  source 1..20: mol_type = other DNA
ccacaacgatctgaccttgc

SEQ ID NO: 11734 - DNA, 20 bp, synthetic construct
  source 1..20: mol_type = other DNA
gctcacttctcgttagggag

SEQ ID NO: 11735 - DNA, 20 bp, synthetic construct
  source 1..20: mol_type = other DNA
ctttgtcatccgaaccagct

SEQ ID NO: 11736 - DNA, 20 bp, synthetic construct
  source 1..20: mol_type = other DNA
cgtaatcaattactcgtccc

SEQ ID NO: 11737 - DNA, 20 bp, synthetic construct
  source 1..20: mol_type = other DNA
gcaactagtcaataagattc

SEQ ID NO: 11738 - DNA, 20 bp, synthetic construct
  source 1..20: mol_type = other DNA
tctaactcctttgttgaccc

SEQ ID NO: 11739 - DNA, 20 bp, synthetic construct
  source 1..20: mol_type = other DNA
ttcactacgttagaaaggat

SEQ ID NO: 11740 - DNA, 20 bp, synthetic construct
  source 1..20: mol_type = other DNA
ttgcgttgaatgaactatga

SEQ ID NO: 11741 - DNA, 20 bp, synthetic construct
  source 1..20: mol_type = other DNA
gcccttcgcgactggtatct

SEQ ID NO: 11742 - DNA, 20 bp, synthetic construct
  source 1..20: mol_type = other DNA
tacatggcttgtcatatcag

SEQ ID NO: 11743 - DNA, 20 bp, synthetic construct
  source 1..20: mol_type = other DNA
gattcccacgcctaactaaa

SEQ ID NO: 11744 - DNA, 20 bp, synthetic construct
  source 1..20: mol_type = other DNA
atcccatccaggtctcagac

SEQ ID NO: 11745 - DNA, 20 bp, synthetic construct
  source 1..20: mol_type = other DNA
atcgtgcctagtacccattt

SEQ ID NO: 11746 - DNA, 20 bp, synthetic construct
  source 1..20: mol_type = other DNA
aggccggagtccgtccttgt

SEQ ID NO: 11747 - DNA, 20 bp, synthetic construct
  source 1..20: mol_type = other DNA
ggttcctggctgtcagtgga

SEQ ID NO: 11748 - DNA, 20 bp, synthetic construct
  source 1..20: mol_type = other DNA
atcgctacccagtgtccatg

SEQ ID NO: 11749 - DNA, 20 bp, synthetic construct
  source 1..20: mol_type = other DNA
tcaactttcaatcacgctgc

SEQ ID NO: 11750 - DNA, 20 bp, synthetic construct
  source 1..20: mol_type = other DNA
actctagtatgcccggttaa

SEQ ID NO: 11751 - DNA, 20 bp, synthetic construct
  source 1..20: mol_type = other DNA
gcccttcgctatctatgttt

SEQ ID NO: 11752 - DNA, 20 bp, synthetic construct
  source 1..20: mol_type = other DNA
agtgctaggaagcctcccga

SEQ ID NO: 11753 - DNA, 20 bp, synthetic construct
  source 1..20: mol_type = other DNA
ccgggacgcggtaggttact

SEQ ID NO: 11754 - DNA, 20 bp, synthetic construct
  source 1..20: mol_type = other DNA
cattaacggtgtacggtacc

SEQ ID NO: 11755 - DNA, 20 bp, synthetic construct
  source 1..20: mol_type = other DNA
gcagttggtttcgtctaatt

SEQ ID NO: 11756 - DNA, 20 bp, synthetic construct
  source 1..20: mol_type = other DNA
gaaacaatcatgcacatggg

SEQ ID NO: 11757 - DNA, 20 bp, synthetic construct
  source 1..20: mol_type = other DNA
gcatgcccgagaggagtcga

SEQ ID NO: 11758 - DNA, 20 bp, synthetic construct
  source 1..20: mol_type = other DNA
ataattagcgacgactaggt

SEQ ID NO: 11759 - DNA, 20 bp, synthetic construct
  source 1..20: mol_type = other DNA
gccgataaacgttgcgacag

SEQ ID NO: 11760 - DNA, 20 bp, synthetic construct
  source 1..20: mol_type = other DNA
agaattgatcctatgcgtcc

SEQ ID NO: 11761 - DNA, 20 bp, synthetic construct
  source 1..20: mol_type = other DNA
gtcagtagtggatgtactcg

SEQ ID NO: 11762 - DNA, 20 bp, synthetic construct
  source 1..20: mol_type = other DNA
acgctaccatgtcaaaccgt

SEQ ID NO: 11763 - DNA, 20 bp, synthetic construct
  source 1..20: mol_type = other DNA
ggcgcgaggttaaggtttga

SEQ ID NO: 11764 - DNA, 20 bp, synthetic construct
  source 1..20: mol_type = other DNA
gggaggctaaacgtagtaga

SEQ ID NO: 11765 - DNA, 20 bp, synthetic construct
  source 1..20: mol_type = other DNA
tttagcccatagctggcttt

SEQ ID NO: 11766 - DNA, 20 bp, synthetic construct
  source 1..20: mol_type = other DNA
aacactttcccgtctacgtt

SEQ ID NO: 11767 - DNA, 20 bp, synthetic construct
  source 1..20: mol_type = other DNA
ctcgtcattcgtgaatacag

SEQ ID NO: 11768 - DNA, 20 bp, synthetic construct
  source 1..20: mol_type = other DNA
cgtggtgcaggagcgtcctt

SEQ ID NO: 11769 - DNA, 20 bp, synthetic construct
  source 1..20: mol_type = other DNA
ggcgatcatctagcgagctt

SEQ ID NO: 11770 - DNA, 20 bp, synthetic construct
  source 1..20: mol_type = other DNA
cgggatcgcaagtaagtata

SEQ ID NO: 11771 - DNA, 20 bp, synthetic construct
  source 1..20: mol_type = other DNA
gctcatcgggacagactgtg

SEQ ID NO: 11772 - DNA, 20 bp, synthetic construct
  source 1..20: mol_type = other DNA
ttagcgttcgaggtaacgcc

SEQ ID NO: 11773 - DNA, 20 bp, synthetic construct
  source 1..20: mol_type = other DNA
attcgcatttgttgaggcct

SEQ ID NO: 11774 - DNA, 20 bp, synthetic construct
  source 1..20: mol_type = other DNA
atacgattcacctcatagcg

SEQ ID NO: 11775 - DNA, 20 bp, synthetic construct
  source 1..20: mol_type = other DNA
attgctaatcttatactggc

SEQ ID NO: 11776 - DNA, 20 bp, synthetic construct
  source 1..20: mol_type = other DNA
tctaacttgttgtggacgtc

SEQ ID NO: 11777 - DNA, 20 bp, synthetic construct
  source 1..20: mol_type = other DNA
gggtggtatccgcggttagg

SEQ ID NO: 11778 - DNA, 20 bp, synthetic construct
  source 1..20: mol_type = other DNA
aacatactgcgggtgcttcg

SEQ ID NO: 11779 - DNA, 20 bp, synthetic construct
  source 1..20: mol_type = other DNA
gcagtaatatatgtcctgtt

SEQ ID NO: 11780 - DNA, 20 bp, synthetic construct
  source 1..20: mol_type = other DNA
ttcagacgattgctgcacta

SEQ ID NO: 11781 - DNA, 20 bp, synthetic construct
  source 1..20: mol_type = other DNA
taaagttgaccctcctgttg

SEQ ID NO: 11782 - DNA, 20 bp, synthetic construct
  source 1..20: mol_type = other DNA
cgcatgctgccgtctgccaa

SEQ ID NO: 11783 - DNA, 20 bp, synthetic construct
  source 1..20: mol_type = other DNA
tttccgtgacaatgcaggca

SEQ ID NO: 11784 - DNA, 20 bp, synthetic construct
  source 1..20: mol_type = other DNA
gcggcttgccgtcggtttct

SEQ ID NO: 11785 - DNA, 20 bp, synthetic construct
  source 1..20: mol_type = other DNA
acacactgagaatacggtcc

SEQ ID NO: 11786 - DNA, 20 bp, synthetic construct
  source 1..20: mol_type = other DNA
cgggtaaatctctgctggag

SEQ ID NO: 11787 - DNA, 20 bp, synthetic construct
  source 1..20: mol_type = other DNA
cgatgacataagacacactg

SEQ ID NO: 11788 - DNA, 20 bp, synthetic construct
  source 1..20: mol_type = other DNA
taggacaactggcatatgct

SEQ ID NO: 11789 - DNA, 20 bp, synthetic construct
  source 1..20: mol_type = other DNA
tggtagcattctgagaagca

SEQ ID NO: 11790 - DNA, 20 bp, synthetic construct
  source 1..20: mol_type = other DNA
tagcctggtagctgacgcac

SEQ ID NO: 11791 - DNA, 20 bp, synthetic construct
  source 1..20: mol_type = other DNA
aacctccgtacgcaacccta

SEQ ID NO: 11792 - DNA, 20 bp, synthetic construct
  source 1..20: mol_type = other DNA
tatgacggtgttaataaacc

SEQ ID NO: 11793 - DNA, 20 bp, synthetic construct
  source 1..20: mol_type = other DNA
actccgctcagagcaactcg

SEQ ID NO: 11794 - DNA, 20 bp, synthetic construct
  source 1..20: mol_type = other DNA
tgtggagctatacgcagctg

SEQ ID NO: 11795 - DNA, 20 bp, synthetic construct
  source 1..20: mol_type = other DNA
ccagcagtagaaactaatgt

SEQ ID NO: 11796 - DNA, 20 bp, synthetic construct
  source 1..20: mol_type = other DNA
cgatgctccggtatctgacc

SEQ ID NO: 11797 - DNA, 20 bp, synthetic construct
  source 1..20: mol_type = other DNA
cagggttgtcgggttgcttc

SEQ ID NO: 11798 - DNA, 20 bp, synthetic construct
  source 1..20: mol_type = other DNA
cttcactactggtaggctgt

SEQ ID NO: 11799 - DNA, 20 bp, synthetic construct
  source 1..20: mol_type = other DNA
caagtcggtatagtggcgcc

SEQ ID NO: 11800 - DNA, 20 bp, synthetic construct
  source 1..20: mol_type = other DNA
atacgaggtgcgtttaggag

SEQ ID NO: 11801 - DNA, 20 bp, synthetic construct
  source 1..20: mol_type = other DNA
ctggtagcatgtgaaccggt

SEQ ID NO: 11802 - DNA, 20 bp, synthetic construct
  source 1..20: mol_type = other DNA
gaatgtgcgcgtcggatagg

SEQ ID NO: 11803 - DNA, 20 bp, synthetic construct
  source 1..20: mol_type = other DNA
tttcccatagagtcaagggc

SEQ ID NO: 11804 - DNA, 20 bp, synthetic construct
  source 1..20: mol_type = other DNA
catctgccgtcttcggtgcg

SEQ ID NO: 11805 - DNA, 20 bp, synthetic construct
  source 1..20: mol_type = other DNA
aagccctctctcgttgccag

SEQ ID NO: 11806 - DNA, 20 bp, synthetic construct
  source 1..20: mol_type = other DNA
caggcttggttaatattcgg

SEQ ID NO: 11807 - DNA, 20 bp, synthetic construct
  source 1..20: mol_type = other DNA
acggcgacgtcacataggaa

SEQ ID NO: 11808 - DNA, 20 bp, synthetic construct
  source 1..20: mol_type = other DNA
ccatacacgaaagcgagaac

SEQ ID NO: 11809 - DNA, 20 bp, synthetic construct
  source 1..20: mol_type = other DNA
gtgtagcttcgtctccgacc

SEQ ID NO: 11810 - DNA, 20 bp, synthetic construct
  source 1..20: mol_type = other DNA
tctggtctccatggaactcg

SEQ ID NO: 11811 - DNA, 20 bp, synthetic construct
  source 1..20: mol_type = other DNA
tctatctaaactgtgaggcg

SEQ ID NO: 11812 - DNA, 20 bp, synthetic construct
  source 1..20: mol_type = other DNA
caatcctgacaatcattgcc

SEQ ID NO: 11813 - DNA, 20 bp, synthetic construct
  source 1..20: mol_type = other DNA
tgtgtacgctgtttcgctat

SEQ ID NO: 11814 - DNA, 20 bp, synthetic construct
  source 1..20: mol_type = other DNA
cagcagcaagatattactcg

SEQ ID NO: 11815 - DNA, 20 bp, synthetic construct
  source 1..20: mol_type = other DNA
catcggcacgaggaaatttc

SEQ ID NO: 11816 - DNA, 20 bp, synthetic construct
  source 1..20: mol_type = other DNA
tctcgtggtttgtgctatga

SEQ ID NO: 11817 - DNA, 20 bp, synthetic construct
  source 1..20: mol_type = other DNA
tagatgctgacgtccttctc

SEQ ID NO: 11818 - DNA, 20 bp, synthetic construct
  source 1..20: mol_type = other DNA
tgactacgggaagcagtaaa

SEQ ID NO: 11819 - DNA, 20 bp, synthetic construct
  source 1..20: mol_type = other DNA
catatagatagcacggcatc

SEQ ID NO: 11820 - DNA, 20 bp, synthetic construct
  source 1..20: mol_type = other DNA
tctccttggtcggtttcgga

SEQ ID NO: 11821 - DNA, 20 bp, synthetic construct
  source 1..20: mol_type = other DNA
tccgccatcgaggtgctcta

SEQ ID NO: 11822 - DNA, 20 bp, synthetic construct
  source 1..20: mol_type = other DNA
tttcacgaagattcagtgtg

SEQ ID NO: 11823 - DNA, 20 bp, synthetic construct
  source 1..20: mol_type = other DNA
acgacactgcgccgaacgct

SEQ ID NO: 11824 - DNA, 20 bp, synthetic construct
  source 1..20: mol_type = other DNA
ggaaagttataatacccggc

SEQ ID NO: 11825 - DNA, 20 bp, synthetic construct
  source 1..20: mol_type = other DNA
tctgtgacgtgccatctgaa

SEQ ID NO: 11826 - DNA, 20 bp, synthetic construct
  source 1..20: mol_type = other DNA
agcccgagttacggctaggt

SEQ ID NO: 11827 - DNA, 20 bp, synthetic construct
  source 1..20: mol_type = other DNA
gcaccgagatcgcgctgatg

SEQ ID NO: 11828 - DNA, 20 bp, synthetic construct
  source 1..20: mol_type = other DNA
agtcatatccgacaattagg

SEQ ID NO: 11829 - DNA, 20 bp, synthetic construct
  source 1..20: mol_type = other DNA
gtaacaaggaagcatttcag

SEQ ID NO: 11830 - DNA, 20 bp, synthetic construct
  source 1..20: mol_type = other DNA
ggagcaattagctaggtaac

SEQ ID NO: 11831 - DNA, 20 bp, synthetic construct
  source 1..20: mol_type = other DNA
tgtgtatgtgtaagagctta

SEQ ID NO: 11832 - DNA, 20 bp, synthetic construct
  source 1..20: mol_type = other DNA
taccagaagcgtttggacta

SEQ ID NO: 11833 - DNA, 20 bp, synthetic construct
  source 1..20: mol_type = other DNA
agatagcgagctgcagctat

SEQ ID NO: 11834 - DNA, 20 bp, synthetic construct
  source 1..20: mol_type = other DNA
agggcatcccagttcccaat

SEQ ID NO: 11835 - DNA, 20 bp, synthetic construct
  source 1..20: mol_type = other DNA
gatccggtaaaccctcgacc

SEQ ID NO: 11836 - DNA, 20 bp, synthetic construct
  source 1..20: mol_type = other DNA
tcctcggcgcagtattgagc

SEQ ID NO: 11837 - DNA, 20 bp, synthetic construct
  source 1..20: mol_type = other DNA
ctaccacgttcttgtggttg

SEQ ID NO: 11838 - DNA, 20 bp, synthetic construct
  source 1..20: mol_type = other DNA
cgatgacgaacactgatcct

SEQ ID NO: 11839 - DNA, 20 bp, synthetic construct
  source 1..20: mol_type = other DNA
gattccgaaatatggttgac

SEQ ID NO: 11840 - DNA, 20 bp, synthetic construct
  source 1..20: mol_type = other DNA
ccgcactcgaaacaaaggta

SEQ ID NO: 11841 - DNA, 20 bp, synthetic construct
  source 1..20: mol_type = other DNA
tagtgctatttcgacacttt

SEQ ID NO: 11842 - DNA, 20 bp, synthetic construct
  source 1..20: mol_type = other DNA
ggtagcacttaagataatcg

SEQ ID NO: 11843 - DNA, 20 bp, synthetic construct
  source 1..20: mol_type = other DNA
gcgaatatgttcgctcgcat

SEQ ID NO: 11844 - DNA, 20 bp, synthetic construct
  source 1..20: mol_type = other DNA
attacatcgggcctgctgcc

SEQ ID NO: 11845 - DNA, 20 bp, synthetic construct
  source 1..20: mol_type = other DNA
tacctgctttccgggcggta

SEQ ID NO: 11846 - DNA, 20 bp, synthetic construct
  source 1..20: mol_type = other DNA
ctggatctaaagtacccgga

SEQ ID NO: 11847 - DNA, 20 bp, synthetic construct
  source 1..20: mol_type = other DNA
ctcgtcgttcgttccagctt

SEQ ID NO: 11848 - DNA, 20 bp, synthetic construct
  source 1..20: mol_type = other DNA
ggagattaccgcgctcaatc

SEQ ID NO: 11849 - DNA, 20 bp, synthetic construct
  source 1..20: mol_type = other DNA
cccacaagctgcgtgacttg

SEQ ID NO: 11850 - DNA, 20 bp, synthetic construct
  source 1..20: mol_type = other DNA
tcacaccatggcgtggtatc

SEQ ID NO: 11851 - DNA, 20 bp, synthetic construct
  source 1..20: mol_type = other DNA
ttcaggctgaaagctagcat

SEQ ID NO: 11852 - DNA, 20 bp, synthetic construct
  source 1..20: mol_type = other DNA
tatttaggatttgtcccgcg

SEQ ID NO: 11853 - DNA, 20 bp, synthetic construct
  source 1..20: mol_type = other DNA
tattccacccggtaactctt

SEQ ID NO: 11854 - DNA, 20 bp, synthetic construct
  source 1..20: mol_type = other DNA
cgaccctagaaagtgtgatc

SEQ ID NO: 11855 - DNA, 20 bp, synthetic construct
  source 1..20: mol_type = other DNA
ccgctcggaccttctattaa

SEQ ID NO: 11856 - DNA, 20 bp, synthetic construct
  source 1..20: mol_type = other DNA
gtagggtcggatttgcctga

SEQ ID NO: 11857 - DNA, 20 bp, synthetic construct
  source 1..20: mol_type = other DNA
aacgtattcctaccagcgtc

SEQ ID NO: 11858 - DNA, 20 bp, synthetic construct
  source 1..20: mol_type = other DNA
ctactagttccaagggtttg

SEQ ID NO: 11859 - DNA, 20 bp, synthetic construct
  source 1..20: mol_type = other DNA
cactcaccggtagggtgtac

SEQ ID NO: 11860 - DNA, 20 bp, synthetic construct
  source 1..20: mol_type = other DNA
tctataacgcgggtggtcgt

SEQ ID NO: 11861 - DNA, 20 bp, synthetic construct
  source 1..20: mol_type = other DNA
acccgtgcttgcatagtatt

SEQ ID NO: 11862 - DNA, 20 bp, synthetic construct
  source 1..20: mol_type = other DNA
atgtgtattgagttaggcct

SEQ ID NO: 11863 - DNA, 20 bp, synthetic construct
  source 1..20: mol_type = other DNA
aaacgatttggcttgcctac

SEQ ID NO: 11864 - DNA, 20 bp, synthetic construct
  source 1..20: mol_type = other DNA
acttcgaaggactacataga

SEQ ID NO: 11865 - DNA, 20 bp, synthetic construct
  source 1..20: mol_type = other DNA
tggtctgcataacctccaca

SEQ ID NO: 11866 - DNA, 20 bp, synthetic construct
  source 1..20: mol_type = other DNA
tgatgccctgtatggagtag

SEQ ID NO: 11867 - DNA, 20 bp, synthetic construct
  source 1..20: mol_type = other DNA
caacaagcggtgcgttggta

SEQ ID NO: 11868 - DNA, 20 bp, synthetic construct
  source 1..20: mol_type = other DNA
ctttgatcctattcgcccgc

SEQ ID NO: 11869 - DNA, 20 bp, synthetic construct
  source 1..20: mol_type = other DNA
ggattcatagatagcaagcc

SEQ ID NO: 11870 - DNA, 20 bp, synthetic construct
  source 1..20: mol_type = other DNA
atcgatcttgcggagccgtt

SEQ ID NO: 11871 - DNA, 20 bp, synthetic construct
  source 1..20: mol_type = other DNA
aggcggcctgcaaacgtgct

SEQ ID NO: 11872 - DNA, 20 bp, synthetic construct
  source 1..20: mol_type = other DNA
gttagaccagcaccaaccct

SEQ ID NO: 11873 - DNA, 20 bp, synthetic construct
  source 1..20: mol_type = other DNA
gctagcacggcaaggatgca

SEQ ID NO: 11874 - DNA, 20 bp, synthetic construct
  source 1..20: mol_type = other DNA
tccacggtgcttcctacatt

SEQ ID NO: 11875 - DNA, 20 bp, synthetic construct
  source 1..20: mol_type = other DNA
taattatgagcacctcctct

SEQ ID NO: 11876 - DNA, 20 bp, synthetic construct
  source 1..20: mol_type = other DNA
tagacacagggtccgacctc

SEQ ID NO: 11877 - DNA, 20 bp, synthetic construct
  source 1..20: mol_type = other DNA
cttaacggagctacctttac

SEQ ID NO: 11878 - DNA, 20 bp, synthetic construct
  source 1..20: mol_type = other DNA
atgttcgtggtcaaacctat

SEQ ID NO: 11879 - DNA, 20 bp, synthetic construct
  source 1..20: mol_type = other DNA
gcaaacgccatgactaagtg

SEQ ID NO: 11880 - DNA, 20 bp, synthetic construct
  source 1..20: mol_type = other DNA
cacggacacagattgtccca

SEQ ID NO: 11881 - DNA, 20 bp, synthetic construct
  source 1..20: mol_type = other DNA
acaatgtggacccaattgag

SEQ ID NO: 11882 - DNA, 20 bp, synthetic construct
  source 1..20: mol_type = other DNA
cccagaagttacgcgtacgt

SEQ ID NO: 11883 - DNA, 20 bp, synthetic construct
  source 1..20: mol_type = other DNA
cgaaatgacctaacttgcgg

SEQ ID NO: 11884 - DNA, 20 bp, synthetic construct
  source 1..20: mol_type = other DNA
tcccactaccgccatttaga

SEQ ID NO: 11885 - DNA, 20 bp, synthetic construct
  source 1..20: mol_type = other DNA
ccagaggtggcacttaatgt

SEQ ID NO: 11886 - DNA, 20 bp, synthetic construct
  source 1..20: mol_type = other DNA
acaagtcggcctggtacaag

SEQ ID NO: 11887 - DNA, 20 bp, synthetic construct
  source 1..20: mol_type = other DNA
ggatacgctgagctgtttcc

SEQ ID NO: 11888 - DNA, 20 bp, synthetic construct
  source 1..20: mol_type = other DNA
aatgatgttcgcggcttgac

SEQ ID NO: 11889 - DNA, 20 bp, synthetic construct
  source 1..20: mol_type = other DNA
ctaccgtccagtgagaaagg

SEQ ID NO: 11890 - DNA, 20 bp, synthetic construct
  source 1..20: mol_type = other DNA
atggatttcgcatccttacc

SEQ ID NO: 11891 - DNA, 20 bp, synthetic construct
  source 1..20: mol_type = other DNA
tgcgcagaaggaaacaagga

SEQ ID NO: 11892 - DNA, 20 bp, synthetic construct
  source 1..20: mol_type = other DNA
atcactgacgaccgtttgat

SEQ ID NO: 11893 - DNA, 20 bp, synthetic construct
  source 1..20: mol_type = other DNA
ataccttagtagaggtagtc

SEQ ID NO: 11894 - DNA, 20 bp, synthetic construct
  source 1..20: mol_type = other DNA
tcctttcctggactaaatta

SEQ ID NO: 11895 - DNA, 20 bp, synthetic construct
  source 1..20: mol_type = other DNA
gcgctaagcgaacgctaatc

SEQ ID NO: 11896 - DNA, 20 bp, synthetic construct
  source 1..20: mol_type = other DNA
gtatgaggtcagtctcgccg

SEQ ID NO: 11897 - DNA, 20 bp, synthetic construct
  source 1..20: mol_type = other DNA
ccgtatctcacaacttaagc

SEQ ID NO: 11898 - DNA, 20 bp, synthetic construct
  source 1..20: mol_type = other DNA
tctcctagtgtcctcacgga

SEQ ID NO: 11899 - DNA, 20 bp, synthetic construct
  source 1..20: mol_type = other DNA
gttgaagccgtgtagcaact

SEQ ID NO: 11900 - DNA, 20 bp, synthetic construct
  source 1..20: mol_type = other DNA
tcatccaacgtcagagcatc

SEQ ID NO: 11901 - DNA, 20 bp, synthetic construct
  source 1..20: mol_type = other DNA
agcaatggtttgcgtgccta

SEQ ID NO: 11902 - DNA, 20 bp, synthetic construct
  source 1..20: mol_type = other DNA
gaaggattggtcggacgaaa

SEQ ID NO: 11903 - DNA, 20 bp, synthetic construct
  source 1..20: mol_type = other DNA
ggtctcgtatcgaacgcagc

SEQ ID NO: 11904 - DNA, 20 bp, synthetic construct
  source 1..20: mol_type = other DNA
cccggcgtagctagtatcga

SEQ ID NO: 11905 - DNA, 20 bp, synthetic construct
  source 1..20: mol_type = other DNA
tggtctcgtgcatataatat

SEQ ID NO: 11906 - DNA, 20 bp, synthetic construct
  source 1..20: mol_type = other DNA
ataaacccggaactaggtcg

SEQ ID NO: 11907 - DNA, 20 bp, synthetic construct
  source 1..20: mol_type = other DNA
gcagggacttagcgaaatca

SEQ ID NO: 11908 - DNA, 20 bp, synthetic construct
  source 1..20: mol_type = other DNA
gtaccgctcctcttcgtcta

SEQ ID NO: 11909 - DNA, 20 bp, synthetic construct
  source 1..20: mol_type = other DNA
aacaaccgaaatacgttagc

SEQ ID NO: 11910 - DNA, 20 bp, synthetic construct
  source 1..20: mol_type = other DNA
agtacacattgctctgggca

SEQ ID NO: 11911 - DNA, 20 bp, synthetic construct
  source 1..20: mol_type = other DNA
tgcgcattagtacgccgaac

SEQ ID NO: 11912 - DNA, 20 bp, synthetic construct
  source 1..20: mol_type = other DNA
ttggcctgaggcatctgcgg

SEQ ID NO: 11913 - DNA, 20 bp, synthetic construct
  source 1..20: mol_type = other DNA
gagttcacaaagcacgcatc

SEQ ID NO: 11914 - DNA, 20 bp, synthetic construct
  source 1..20: mol_type = other DNA
ctattaaagaggtctcgtcg

SEQ ID NO: 11915 - DNA, 20 bp, synthetic construct
  source 1..20: mol_type = other DNA
aagccaaggccgtcactgat

SEQ ID NO: 11916 - DNA, 20 bp, synthetic construct
  source 1..20: mol_type = other DNA
ttctgctctctcaaggaaca

SEQ ID NO: 11917 - DNA, 20 bp, synthetic construct
  source 1..20: mol_type = other DNA
ccgaggtctattatctggga

SEQ ID NO: 11918 - DNA, 20 bp, synthetic construct
  source 1..20: mol_type = other DNA
cgtacaagtggccgctaata

SEQ ID NO: 11919 - DNA, 20 bp, synthetic construct
  source 1..20: mol_type = other DNA
atccctattgcttgtacaag

SEQ ID NO: 11920 - DNA, 20 bp, synthetic construct
  source 1..20: mol_type = other DNA
gtcggttgatgcactggtga

SEQ ID NO: 11921 - DNA, 20 bp, synthetic construct
  source 1..20: mol_type = other DNA
gtcatttccacaaaggtcgt

SEQ ID NO: 11922 - DNA, 20 bp, synthetic construct
  source 1..20: mol_type = other DNA
atattaagcccgaggcatgt

SEQ ID NO: 11923 - DNA, 20 bp, synthetic construct
  source 1..20: mol_type = other DNA
ttgtgttcggccggaaccta

SEQ ID NO: 11924 - DNA, 20 bp, synthetic construct
  source 1..20: mol_type = other DNA
aatgtgagtcagaaaggcta

SEQ ID NO: 11925 - DNA, 20 bp, synthetic construct
  source 1..20: mol_type = other DNA
atcatgctaaactgccaata

SEQ ID NO: 11926 - DNA, 20 bp, synthetic construct
  source 1..20: mol_type = other DNA
acccgatgcgttctctaaga

SEQ ID NO: 11927 - DNA, 20 bp, synthetic construct
  source 1..20: mol_type = other DNA
gagaatgggcttaacgtggc

SEQ ID NO: 11928 - DNA, 20 bp, synthetic construct
  source 1..20: mol_type = other DNA
gaccttgtatttattcagag

SEQ ID NO: 11929 - DNA, 20 bp, synthetic construct
  source 1..20: mol_type = other DNA
tccgagtgtatgatgcgctt

SEQ ID NO: 11930 - DNA, 20 bp, synthetic construct
  source 1..20: mol_type = other DNA
gaggtgagggaaatgtacga

SEQ ID NO: 11931 - DNA, 20 bp, synthetic construct
  source 1..20: mol_type = other DNA
tcgtgactatccggacagac

SEQ ID NO: 11932 - DNA, 20 bp, synthetic construct
  source 1..20: mol_type = other DNA
atgcaactgaacttccaaag

SEQ ID NO: 11933 - DNA, 20 bp, synthetic construct
  source 1..20: mol_type = other DNA
gttagctggtcagaaattga

SEQ ID NO: 11934 - DNA, 20 bp, synthetic construct
  source 1..20: mol_type = other DNA
ttgctgtaattccctcgtac

SEQ ID NO: 11935 - DNA, 20 bp, synthetic construct
  source 1..20: mol_type = other DNA
cggcacgagctgacgctaat

SEQ ID NO: 11936 - DNA, 20 bp, synthetic construct
  source 1..20: mol_type = other DNA
gatcccgaggacaagatttg

SEQ ID NO: 11937 - DNA, 20 bp, synthetic construct
  source 1..20: mol_type = other DNA
caatgtcacataaccctatt

SEQ ID NO: 11938 - DNA, 20 bp, synthetic construct
  source 1..20: mol_type = other DNA
tattagcgcgtctcgactac

SEQ ID NO: 11939 - DNA, 20 bp, synthetic construct
  source 1..20: mol_type = other DNA
ataaagacaaggtccgacgg

SEQ ID NO: 11940 - DNA, 20 bp, synthetic construct
  source 1..20: mol_type = other DNA
agattattcctagcccacgg

SEQ ID NO: 11941 - DNA, 20 bp, synthetic construct
  source 1..20: mol_type = other DNA
ccgaatgctatcatgtagac

SEQ ID NO: 11942 - DNA, 20 bp, synthetic construct
  source 1..20: mol_type = other DNA
cagtaaacgactcttcagca

SEQ ID NO: 11943 - DNA, 20 bp, synthetic construct
  source 1..20: mol_type = other DNA
tcggacggataaggtatcga

SEQ ID NO: 11944 - DNA, 20 bp, synthetic construct
  source 1..20: mol_type = other DNA
acccaacgaagggcttgcta

SEQ ID NO: 11945 - DNA, 20 bp, synthetic construct
  source 1..20: mol_type = other DNA
atcgtcgtagtgctatctac

SEQ ID NO: 11946 - DNA, 20 bp, synthetic construct
  source 1..20: mol_type = other DNA
gtataatgacgaaattcagg

SEQ ID NO: 11947 - DNA, 20 bp, synthetic construct
  source 1..20: mol_type = other DNA
gcctaggcgacgcatgtttg

SEQ ID NO: 11948 - DNA, 20 bp, synthetic construct
  source 1..20: mol_type = other DNA
tatgactcttattcagtcac

SEQ ID NO: 11949 - DNA, 20 bp, synthetic construct
  source 1..20: mol_type = other DNA
tgtggtcactctgggagtca

SEQ ID NO: 11950 - DNA, 20 bp, synthetic construct
  source 1..20: mol_type = other DNA
gggataggtcttactttggg

SEQ ID NO: 11951 - DNA, 20 bp, synthetic construct
  source 1..20: mol_type = other DNA
gcttacaggcacggtctact

SEQ ID NO: 11952 - DNA, 20 bp, synthetic construct
  source 1..20: mol_type = other DNA
ccataactgggctggacttg

SEQ ID NO: 11953 - DNA, 20 bp, synthetic construct
  source 1..20: mol_type = other DNA
gaagtaggacctgcatagtt

SEQ ID NO: 11954 - DNA, 20 bp, synthetic construct
  source 1..20: mol_type = other DNA
ggacttccatacgtatatgt

SEQ ID NO: 11955 - DNA, 20 bp, synthetic construct
  source 1..20: mol_type = other DNA
aatcgatggattgatacacc

SEQ ID NO: 11956 - DNA, 20 bp, synthetic construct
  source 1..20: mol_type = other DNA
ttaccatgcataggcctcca

SEQ ID NO: 11957 - DNA, 20 bp, synthetic construct
  source 1..20: mol_type = other DNA
aggcttactacgcgccgctg

SEQ ID NO: 11958 - DNA, 20 bp, synthetic construct
  source 1..20: mol_type = other DNA
atcatcctacatacgtgctc

SEQ ID NO: 11959 - DNA, 20 bp, synthetic construct
  source 1..20: mol_type = other DNA
atgcgtgccatatttatgca

SEQ ID NO: 11960 - DNA, 20 bp, synthetic construct
  source 1..20: mol_type = other DNA
tgaaagtggtcgatcttccc

SEQ ID NO: 11961 - DNA, 20 bp, synthetic construct
  source 1..20: mol_type = other DNA
gcctaattcgatcgtcagat

SEQ ID NO: 11962 - DNA, 20 bp, synthetic construct
  source 1..20: mol_type = other DNA
gtaatggaaccgtgtagcag

SEQ ID NO: 11963 - DNA, 20 bp, synthetic construct
  source 1..20: mol_type = other DNA
tgagacttgaccggactaca

SEQ ID NO: 11964 - DNA, 20 bp, synthetic construct
  source 1..20: mol_type = other DNA
ccacgtccagtcgtacggag

SEQ ID NO: 11965 - DNA, 20 bp, synthetic construct
  source 1..20: mol_type = other DNA
gcatagagttctgaggtcta

SEQ ID NO: 11966 - DNA, 20 bp, synthetic construct
  source 1..20: mol_type = other DNA
gacttgtggtgtcctgtact

SEQ ID NO: 11967 - DNA, 20 bp, synthetic construct
  source 1..20: mol_type = other DNA
cgtgtataaggcgctccatg

SEQ ID NO: 11968 - DNA, 20 bp, synthetic construct
  source 1..20: mol_type = other DNA
ttccgacatgcatactgact

SEQ ID NO: 11969 - DNA, 20 bp, synthetic construct
  source 1..20: mol_type = other DNA
gctgcggaatttaagagtat

SEQ ID NO: 11970 - DNA, 20 bp, synthetic construct
  source 1..20: mol_type = other DNA
tcgttacacctgtgggtaca

SEQ ID NO: 11971 - DNA, 20 bp, synthetic construct
  source 1..20: mol_type = other DNA
ctacttggctgcagagctct

SEQ ID NO: 11972 - DNA, 20 bp, synthetic construct
  source 1..20: mol_type = other DNA
caccacggttaacgaaacta

SEQ ID NO: 11973 - DNA, 20 bp, synthetic construct
  source 1..20: mol_type = other DNA
ttgaagcgtgtgctccaatt

SEQ ID NO: 11974 - DNA, 20 bp, synthetic construct
  source 1..20: mol_type = other DNA
ttgcacctagtccaccttac

SEQ ID NO: 11975 - DNA, 20 bp, synthetic construct
  source 1..20: mol_type = other DNA
ggtcagaaacgggcaaggta

SEQ ID NO: 11976 - DNA, 20 bp, synthetic construct
  source 1..20: mol_type = other DNA
ggctggatattgttgaatgt

SEQ ID NO: 11977 - DNA, 20 bp, synthetic construct
  source 1..20: mol_type = other DNA
cttacgatggaagatatgca

SEQ ID NO: 11978 - DNA, 20 bp, synthetic construct
  source 1..20: mol_type = other DNA
tcggcagtaatcctatcttg

SEQ ID NO: 11979 - DNA, 20 bp, synthetic construct
  source 1..20: mol_type = other DNA
agattacgtcggaatctacg

SEQ ID NO: 11980 - DNA, 20 bp, synthetic construct
  source 1..20: mol_type = other DNA
tgtgaaataaacattggctg

SEQ ID NO: 11981 - DNA, 20 bp, synthetic construct
  source 1..20: mol_type = other DNA
tgagactactgtgtgacatg

SEQ ID NO: 11982 - DNA, 20 bp, synthetic construct
  source 1..20: mol_type = other DNA
cctggtacacgcgtatgttt

SEQ ID NO: 11983 - DNA, 20 bp, synthetic construct
  source 1..20: mol_type = other DNA
tatgtcacgttggtcactaa

SEQ ID NO: 11984 - DNA, 20 bp, synthetic construct
  source 1..20: mol_type = other DNA
tatagttgtcagtggtagca

SEQ ID NO: 11985 - DNA, 20 bp, synthetic construct
  source 1..20: mol_type = other DNA
gcggtcgtagtacacggcaa

SEQ ID NO: 11986 - DNA, 20 bp, synthetic construct
  source 1..20: mol_type = other DNA
ctaaagtctccacttgaaag

SEQ ID NO: 11987 - DNA, 20 bp, synthetic construct
  source 1..20: mol_type = other DNA
cacggttgtcgtttcttaca

SEQ ID NO: 11988 - DNA, 20 bp, synthetic construct
  source 1..20: mol_type = other DNA
tggacggagatttgtcaagc

SEQ ID NO: 11989 - DNA, 20 bp, synthetic construct
  source 1..20: mol_type = other DNA
agtacgtatttgaagtagcc

SEQ ID NO: 11990 - DNA, 20 bp, synthetic construct
  source 1..20: mol_type = other DNA
gcgagcctcattgatcaagc

SEQ ID NO: 11991 - DNA, 20 bp, synthetic construct
  source 1..20: mol_type = other DNA
gaatcgagagaaattgctgg

SEQ ID NO: 11992 - DNA, 20 bp, synthetic construct
  source 1..20: mol_type = other DNA
tcttctaaccatagagacta

SEQ ID NO: 11993 - DNA, 20 bp, synthetic construct
  source 1..20: mol_type = other DNA
ggtacctgaagtggagggtt

SEQ ID NO: 11994 - DNA, 20 bp, synthetic construct
  source 1..20: mol_type = other DNA
gcgagactgactaaattgag

SEQ ID NO: 11995 - DNA, 20 bp, synthetic construct
  source 1..20: mol_type = other DNA
gatgtacttatacctcacca

SEQ ID NO: 11996 - DNA, 20 bp, synthetic construct
  source 1..20: mol_type = other DNA
acgaagattacgcagagtca

SEQ ID NO: 11997 - DNA, 20 bp, synthetic construct
  source 1..20: mol_type = other DNA
acccgtcgcgggatttatac

SEQ ID NO: 11998 - DNA, 20 bp, synthetic construct
  source 1..20: mol_type = other DNA
gacgttggtctgacacatgg

SEQ ID NO: 11999 - DNA, 20 bp, synthetic construct
  source 1..20: mol_type = other DNA
agtcttaacgacgtaaggaa

SEQ ID NO: 12000 - DNA, 20 bp, synthetic construct
  source 1..20: mol_type = other DNA
gacaccatcatatgatagcg

SEQ ID NO: 12001 - DNA, 20 bp, synthetic construct
  source 1..20: mol_type = other DNA
ccatctcccaaatggatcgt

SEQ ID NO: 12002 - DNA, 20 bp, synthetic construct
  source 1..20: mol_type = other DNA
tcagaatcgcggcacgtgtg

SEQ ID NO: 12003 - DNA, 20 bp, synthetic construct
  source 1..20: mol_type = other DNA
cttcggtttctggaatcaaa

SEQ ID NO: 12004 - DNA, 20 bp, synthetic construct
  source 1..20: mol_type = other DNA
atatcgcacacctgtagagg

SEQ ID NO: 12005 - DNA, 20 bp, synthetic construct
  source 1..20: mol_type = other DNA
cttacacaaggtccttagca

SEQ ID NO: 12006 - DNA, 20 bp, synthetic construct
  source 1..20: mol_type = other DNA
acgcgcgcgacgaatgcgtg

SEQ ID NO: 12007 - DNA, 20 bp, synthetic construct
  source 1..20: mol_type = other DNA
gcgctaaacctctaagacct

SEQ ID NO: 12008 - DNA, 20 bp, synthetic construct
  source 1..20: mol_type = other DNA
atcgatcacctggactttcg

SEQ ID NO: 12009 - DNA, 20 bp, synthetic construct
  source 1..20: mol_type = other DNA
tgtactcggacgaaggctca

SEQ ID NO: 12010 - DNA, 20 bp, synthetic construct
  source 1..20: mol_type = other DNA
ctgcggtacgcacatgcact

SEQ ID NO: 12011 - DNA, 20 bp, synthetic construct
  source 1..20: mol_type = other DNA
ctgttatcagctgtttatat

SEQ ID NO: 12012 - DNA, 20 bp, synthetic construct
  source 1..20: mol_type = other DNA
tgctaggattgccgtacaag

SEQ ID NO: 12013 - DNA, 20 bp, synthetic construct
  source 1..20: mol_type = other DNA
taggcttcacttcggcgact

SEQ ID NO: 12014 - DNA, 20 bp, synthetic construct
  source 1..20: mol_type = other DNA
tcacacgaacactgctcttg

SEQ ID NO: 12015 - DNA, 20 bp, synthetic construct
  source 1..20: mol_type = other DNA
ggtggataatatgaggagga

SEQ ID NO: 12016 - DNA, 20 bp, synthetic construct
  source 1..20: mol_type = other DNA
aatcctttgggcagaaggat

SEQ ID NO: 12017 - DNA, 20 bp, synthetic construct
  source 1..20: mol_type = other DNA
ttccacaggacgaccgtata

SEQ ID NO: 12018 - DNA, 20 bp, synthetic construct
  source 1..20: mol_type = other DNA
ggcgcacggtgtgtacttga

SEQ ID NO: 12019 - DNA, 20 bp, synthetic construct
  source 1..20: mol_type = other DNA
ttcggttcagggcaagtgtg

SEQ ID NO: 12020 - DNA, 20 bp, synthetic construct
  source 1..20: mol_type = other DNA
atctatcgtcttaggccgta

SEQ ID NO: 12021 - DNA, 20 bp, synthetic construct
  source 1..20: mol_type = other DNA
agcactgcttaatgtgtcat

SEQ ID NO: 12022 - DNA, 20 bp, synthetic construct
  source 1..20: mol_type = other DNA
taacaatgcgcattcggtcg

SEQ ID NO: 12023 - DNA, 20 bp, synthetic construct
  source 1..20: mol_type = other DNA
cccgtacgcaaggtatccct

SEQ ID NO: 12024 - DNA, 20 bp, synthetic construct
  source 1..20: mol_type = other DNA
ccctaaggaagctcgtccta

SEQ ID NO: 12025 - DNA, 20 bp, synthetic construct
  source 1..20: mol_type = other DNA
tatttgctggtttaacgccg

SEQ ID NO: 12026 - DNA, 20 bp, synthetic construct
  source 1..20: mol_type = other DNA
tgagtcttcccgacatacca

SEQ ID NO: 12027 - DNA, 20 bp, synthetic construct
  source 1..20: mol_type = other DNA
atgcgaccctgtaatcattc

SEQ ID NO: 12028 - DNA, 20 bp, synthetic construct
  source 1..20: mol_type = other DNA
tattgtccgcgggaacacag

SEQ ID NO: 12029 - DNA, 20 bp, synthetic construct
  source 1..20: mol_type = other DNA
cggaaggcgtcttagatacc

SEQ ID NO: 12030 - DNA, 20 bp, synthetic construct
  source 1..20: mol_type = other DNA
atgtaattaggctggcgtaa

SEQ ID NO: 12031 - DNA, 20 bp, synthetic construct
  source 1..20: mol_type = other DNA
gtcgaagcaatggatagaca

SEQ ID NO: 12032 - DNA, 20 bp, synthetic construct
  source 1..20: mol_type = other DNA
atacgatggagtcaggagtt

SEQ ID NO: 12033 - DNA, 20 bp, synthetic construct
  source 1..20: mol_type = other DNA
aacttcggatggagcgggct

SEQ ID NO: 12034 - DNA, 20 bp, synthetic construct
  source 1..20: mol_type = other DNA
agccgatccgggaactcata

SEQ ID NO: 12035 - DNA, 20 bp, synthetic construct
  source 1..20: mol_type = other DNA
actggttgatccagaattac

SEQ ID NO: 12036 - DNA, 20 bp, synthetic construct
  source 1..20: mol_type = other DNA
atttgcgattcctcaggagt

SEQ ID NO: 12037 - DNA, 20 bp, synthetic construct
  source 1..20: mol_type = other DNA
atccaagcatcccgcgtgac

SEQ ID NO: 12038 - DNA, 20 bp, synthetic construct
  source 1..20: mol_type = other DNA
caggcctgcgtacgtttatc

SEQ ID NO: 12039 - DNA, 20 bp, synthetic construct
  source 1..20: mol_type = other DNA
ttagttgaaagtgctccgcg

SEQ ID NO: 12040 - DNA, 20 bp, synthetic construct
  source 1..20: mol_type = other DNA
ccgaaacggtcatttgttat

SEQ ID NO: 12041 - DNA, 20 bp, synthetic construct
  source 1..20: mol_type = other DNA
aggttgacagtttcatgcgt

SEQ ID NO: 12042 - DNA, 20 bp, synthetic construct
  source 1..20: mol_type = other DNA
aacgcgctataaggacgtta

SEQ ID NO: 12043 - DNA, 20 bp, synthetic construct
  source 1..20: mol_type = other DNA
ggaccctagctgttcgacga

SEQ ID NO: 12044 - DNA, 20 bp, synthetic construct
  source 1..20: mol_type = other DNA
ctcaagtacgcctatccggg

SEQ ID NO: 12045 - DNA, 20 bp, synthetic construct
  source 1..20: mol_type = other DNA
ttagtgtataagaggaaagc

SEQ ID NO: 12046 - DNA, 20 bp, synthetic construct
  source 1..20: mol_type = other DNA
gtacttgtaaagactactta

SEQ ID NO: 12047 - DNA, 20 bp, synthetic construct
  source 1..20: mol_type = other DNA
tggctaccgtgattacattg

SEQ ID NO: 12048 - DNA, 20 bp, synthetic construct
  source 1..20: mol_type = other DNA
aagtcggatactaacgtgcc

SEQ ID NO: 12049 - DNA, 20 bp, synthetic construct
  source 1..20: mol_type = other DNA
gtatcaagcgtagcacccgt

SEQ ID NO: 12050 - DNA, 20 bp, synthetic construct
  source 1..20: mol_type = other DNA
cgaagctaccgtgaacctgg

SEQ ID NO: 12051 - DNA, 20 bp, synthetic construct
  source 1..20: mol_type = other DNA
aattcggaccaggcagtccg

SEQ ID NO: 12052 - DNA, 20 bp, synthetic construct
  source 1..20: mol_type = other DNA
aaagcgttctgcgtcacttc

SEQ ID NO: 12053 - DNA, 20 bp, synthetic construct
  source 1..20: mol_type = other DNA
cctcttgaatttccaacagt

SEQ ID NO: 12054 - DNA, 20 bp, synthetic construct
  source 1..20: mol_type = other DNA
ccaccgatcaataaatttgg

SEQ ID NO: 12055 - DNA, 20 bp, synthetic construct
  source 1..20: mol_type = other DNA
tctaagtaatcctgcgcact

SEQ ID NO: 12056 - DNA, 20 bp, synthetic construct
  source 1..20: mol_type = other DNA
ccaccttagctagtaaagta

SEQ ID NO: 12057 - DNA, 20 bp, synthetic construct
  source 1..20: mol_type = other DNA
cacctcatcacagcgtctat

SEQ ID NO: 12058 - DNA, 20 bp, synthetic construct
  source 1..20: mol_type = other DNA
ggatcgacccgtgcatagag

SEQ ID NO: 12059 - DNA, 20 bp, synthetic construct
  source 1..20: mol_type = other DNA
tccttgatactgcagaactt

SEQ ID NO: 12060 - DNA, 20 bp, synthetic construct
  source 1..20: mol_type = other DNA
cccacgccgtccgtagtaca

SEQ ID NO: 12061 - DNA, 20 bp, synthetic construct
  source 1..20: mol_type = other DNA
agacgcataactcagatctg

SEQ ID NO: 12062 - DNA, 20 bp, synthetic construct
  source 1..20: mol_type = other DNA
gttctacctctagcgcggca

SEQ ID NO: 12063 - DNA, 20 bp, synthetic construct
  source 1..20: mol_type = other DNA
gcgactgcttatgccaacac

SEQ ID NO: 12064 - DNA, 20 bp, synthetic construct
  source 1..20: mol_type = other DNA
gtcttaagttgttaatgtgc

SEQ ID NO: 12065 - DNA, 20 bp, synthetic construct
  source 1..20: mol_type = other DNA
gtgttcatgatctctcgaac

SEQ ID NO: 12066 - DNA, 20 bp, synthetic construct
  source 1..20: mol_type = other DNA
tgattctctcgttggcgcgg

SEQ ID NO: 12067 - DNA, 20 bp, synthetic construct
  source 1..20: mol_type = other DNA
cttaaagcgttgggtctaca

SEQ ID NO: 12068 - DNA, 20 bp, synthetic construct
  source 1..20: mol_type = other DNA
ataccaatgtgcggcgattc

SEQ ID NO: 12069 - DNA, 20 bp, synthetic construct
  source 1..20: mol_type = other DNA
tctatgcaaataggctggcg

SEQ ID NO: 12070 - DNA, 20 bp, synthetic construct
  source 1..20: mol_type = other DNA
gcgccttagaacgatggacg

SEQ ID NO: 12071 - DNA, 20 bp, synthetic construct
  source 1..20: mol_type = other DNA
aagtgtaccttgtctctcgt

SEQ ID NO: 12072 - DNA, 20 bp, synthetic construct
  source 1..20: mol_type = other DNA
actcattgttgtaggccaac

SEQ ID NO: 12073 - DNA, 20 bp, synthetic construct
  source 1..20: mol_type = other DNA
tacgtgagggtactcattgg

SEQ ID NO: 12074 - DNA, 20 bp, synthetic construct
  source 1..20: mol_type = other DNA
atgcaatattgacgcatagg

SEQ ID NO: 12075 - DNA, 20 bp, synthetic construct
  source 1..20: mol_type = other DNA
cactcggcgtgcagctattg

SEQ ID NO: 12076 - DNA, 20 bp, synthetic construct
  source 1..20: mol_type = other DNA
ccatggcgcatcctacaata

SEQ ID NO: 12077 - DNA, 20 bp, synthetic construct
  source 1..20: mol_type = other DNA
gttctcattggtctcctcga

SEQ ID NO: 12078 - DNA, 20 bp, synthetic construct
  source 1..20: mol_type = other DNA
gtcatcagagatagcgtgtc

SEQ ID NO: 12079 - DNA, 20 bp, synthetic construct
  source 1..20: mol_type = other DNA
agatccaagaacatacccat

SEQ ID NO: 12080 - DNA, 20 bp, synthetic construct
  source 1..20: mol_type = other DNA
gatgcagtcacccaacgaat

SEQ ID NO: 12081 - DNA, 20 bp, synthetic construct
  source 1..20: mol_type = other DNA
acatggcacgaggcagaggt

SEQ ID NO: 12082 - DNA, 20 bp, synthetic construct
  source 1..20: mol_type = other DNA
tcacgctcgttcacagggtc

SEQ ID NO: 12083 - DNA, 20 bp, synthetic construct
  source 1..20: mol_type = other DNA
taagcaactcgcggtgcgat

SEQ ID NO: 12084 - DNA, 20 bp, synthetic construct
  source 1..20: mol_type = other DNA
ccctcatcccacaaccaggg

SEQ ID NO: 12085 - DNA, 20 bp, synthetic construct
  source 1..20: mol_type = other DNA
ccgaccatagcatttaacgc

SEQ ID NO: 12086 - DNA, 20 bp, synthetic construct
  source 1..20: mol_type = other DNA
ctggtcctagttgctcgtga

SEQ ID NO: 12087 - DNA, 20 bp, synthetic construct
  source 1..20: mol_type = other DNA
aatcatactgacgctgttaa

SEQ ID NO: 12088 - DNA, 20 bp, synthetic construct
  source 1..20: mol_type = other DNA
aacgaactcacattcgatgt

SEQ ID NO: 12089 - DNA, 20 bp, synthetic construct
  source 1..20: mol_type = other DNA
acctagattaaggagattca

SEQ ID NO: 12090 - DNA, 20 bp, synthetic construct
  source 1..20: mol_type = other DNA
cttcggtgtctaccattagc

SEQ ID NO: 12091 - DNA, 20 bp, synthetic construct
  source 1..20: mol_type = other DNA
tgctattgtccgaaggcgtt

SEQ ID NO: 12092 - DNA, 20 bp, synthetic construct
  source 1..20: mol_type = other DNA
aagatacctcgtatgggaaa

SEQ ID NO: 12093 - DNA, 20 bp, synthetic construct
  source 1..20: mol_type = other DNA
tgcggccggttggtagctgt

SEQ ID NO: 12094 - DNA, 20 bp, synthetic construct
  source 1..20: mol_type = other DNA
ggccgggcctgattcatagg

SEQ ID NO: 12095 - DNA, 20 bp, synthetic construct
  source 1..20: mol_type = other DNA
gtacttctatgtcaagagga

SEQ ID NO: 12096 - DNA, 20 bp, synthetic construct
  source 1..20: mol_type = other DNA
aaagtcgcgtgcatcgggtc

SEQ ID NO: 12097 - DNA, 20 bp, synthetic construct
  source 1..20: mol_type = other DNA
ctggccctgatagcgtgtac

SEQ ID NO: 12098 - DNA, 20 bp, synthetic construct
  source 1..20: mol_type = other DNA
gggtgtaaatgtaagcccat

SEQ ID NO: 12099 - DNA, 20 bp, synthetic construct
  source 1..20: mol_type = other DNA
gtttcacatgaaatcctccc

SEQ ID NO: 12100 - DNA, 20 bp, synthetic construct
  source 1..20: mol_type = other DNA
taccaagcgcgctattgcga

SEQ ID NO: 12101 - DNA, 20 bp, synthetic construct
  source 1..20: mol_type = other DNA
gtctagtgtgcttgcttaga

SEQ ID NO: 12102 - DNA, 20 bp, synthetic construct
  source 1..20: mol_type = other DNA
acacaggcaggtaatgcttg

SEQ ID NO: 12103 - DNA, 20 bp, synthetic construct
  source 1..20: mol_type = other DNA
aaattccttggccctacttc

SEQ ID NO: 12104 - DNA, 20 bp, synthetic construct
  source 1..20: mol_type = other DNA
tatgtgcaacgtttaagcaa

SEQ ID NO: 12105 - DNA, 20 bp, synthetic construct
  source 1..20: mol_type = other DNA
gccgatctgacgcctcagta

SEQ ID NO: 12106 - DNA, 20 bp, synthetic construct
  source 1..20: mol_type = other DNA
gcgtgagtgggagggtaacg

SEQ ID NO: 12107 - DNA, 20 bp, synthetic construct
  source 1..20: mol_type = other DNA
tagcaatactgattcctact

SEQ ID NO: 12108 - DNA, 20 bp, synthetic construct
  source 1..20: mol_type = other DNA
ggtccctacttaggcttcgg

SEQ ID NO: 12109 - DNA, 20 bp, synthetic construct
  source 1..20: mol_type = other DNA
ctcacatggtctcggcccga

SEQ ID NO: 12110 - DNA, 20 bp, synthetic construct
  source 1..20: mol_type = other DNA
tgtagtagtacctcctctcg

SEQ ID NO: 12111 - DNA, 20 bp, synthetic construct
  source 1..20: mol_type = other DNA
gatagatctcctagatgcta

SEQ ID NO: 12112 - DNA, 20 bp, synthetic construct
  source 1..20: mol_type = other DNA
acggaccacactacaatagg

SEQ ID NO: 12113 - DNA, 20 bp, synthetic construct
  source 1..20: mol_type = other DNA
ggaatgttgagtaaaccaaa

SEQ ID NO: 12114 - DNA, 20 bp, synthetic construct
  source 1..20: mol_type = other DNA
aacattcaatagacaggcga

SEQ ID NO: 12115 - DNA, 20 bp, synthetic construct
  source 1..20: mol_type = other DNA
aaggttcatgtttagggata

SEQ ID NO: 12116 - DNA, 20 bp, synthetic construct
  source 1..20: mol_type = other DNA
ctcgtggcaactagccacga

SEQ ID NO: 12117 - DNA, 20 bp, synthetic construct
  source 1..20: mol_type = other DNA
atacttagtgtccttatgcc

SEQ ID NO: 12118 - DNA, 20 bp, synthetic construct
  source 1..20: mol_type = other DNA
caattcgactcatccctccc

SEQ ID NO: 12119 - DNA, 20 bp, synthetic construct
  source 1..20: mol_type = other DNA
ctccaagcatctgcggaggc

SEQ ID NO: 12120 - DNA, 20 bp, synthetic construct
  source 1..20: mol_type = other DNA
tcccgtcaccgatggcctga

SEQ ID NO: 12121 - DNA, 20 bp, synthetic construct
  source 1..20: mol_type = other DNA
cagaaagggcagaactgtaa

SEQ ID NO: 12122 - DNA, 20 bp, synthetic construct
  source 1..20: mol_type = other DNA
ggaatcaaggaactttggcg

SEQ ID NO: 12123 - DNA, 20 bp, synthetic construct
  source 1..20: mol_type = other DNA
gaacaactgtgttactgtgt

SEQ ID NO: 12124 - DNA, 20 bp, synthetic construct
  source 1..20: mol_type = other DNA
acctgtctctcaccgtagga

SEQ ID NO: 12125 - DNA, 20 bp, synthetic construct
  source 1..20: mol_type = other DNA
ggccaagatattggtcacac

SEQ ID NO: 12126 - DNA, 20 bp, synthetic construct
  source 1..20: mol_type = other DNA
gaccgcgcaaagctaggacg

SEQ ID NO: 12127 - DNA, 20 bp, synthetic construct
  source 1..20: mol_type = other DNA
tgacaagccctgtttctatg

SEQ ID NO: 12128 - DNA, 20 bp, synthetic construct
  source 1..20: mol_type = other DNA
gattattggcagtgttcgtt

SEQ ID NO: 12129 - DNA, 20 bp, synthetic construct
  source 1..20: mol_type = other DNA
agtgtcaggaacacgctgct

SEQ ID NO: 12130 - DNA, 20 bp, synthetic construct
  source 1..20: mol_type = other DNA
aggataactccgtccgccaa

SEQ ID NO: 12131 - DNA, 20 bp, synthetic construct
  source 1..20: mol_type = other DNA
ctcccgtccgttatccatga

SEQ ID NO: 12132 - DNA, 20 bp, synthetic construct
  source 1..20: mol_type = other DNA
tacgcgggaaataggtgtta

SEQ ID NO: 12133 - DNA, 20 bp, synthetic construct
  source 1..20: mol_type = other DNA
gtgtaacccatagtgttcgt

SEQ ID NO: 12134 - DNA, 20 bp, synthetic construct
  source 1..20: mol_type = other DNA
cctcgctgcgggtctctgaa

SEQ ID NO: 12135 - DNA, 20 bp, synthetic construct
  source 1..20: mol_type = other DNA
cgcgctgagagggttcagga

SEQ ID NO: 12136 - DNA, 20 bp, synthetic construct
  source 1..20: mol_type = other DNA
tctgagctagtcatccggtg

SEQ ID NO: 12137 - DNA, 20 bp, synthetic construct
  source 1..20: mol_type = other DNA
cctctctatgcgttctgcga

SEQ ID NO: 12138 - DNA, 20 bp, synthetic construct
  source 1..20: mol_type = other DNA
gtgtgacttcttggtcaacc

SEQ ID NO: 12139 - DNA, 20 bp, synthetic construct
  source 1..20: mol_type = other DNA
ggctgtactcaggacactga

SEQ ID NO: 12140 - DNA, 20 bp, synthetic construct
  source 1..20: mol_type = other DNA
atagcgctaatattcaagga

SEQ ID NO: 12141 - DNA, 20 bp, synthetic construct
  source 1..20: mol_type = other DNA
cccactgatcacgtatgtta

SEQ ID NO: 12142 - DNA, 20 bp, synthetic construct
  source 1..20: mol_type = other DNA
ccgtaacaagccgagcggat

SEQ ID NO: 12143 - DNA, 20 bp, synthetic construct
  source 1..20: mol_type = other DNA
gcctgccacatctttggttg

SEQ ID NO: 12144 - DNA, 20 bp, synthetic construct
  source 1..20: mol_type = other DNA
cagctattgaacctgtcgtc

SEQ ID NO: 12145 - DNA, 20 bp, synthetic construct
  source 1..20: mol_type = other DNA
attagaacacggtcggattc

SEQ ID NO: 12146 - DNA, 20 bp, synthetic construct
  source 1..20: mol_type = other DNA
aagaggatacctataagcca

SEQ ID NO: 12147 - DNA, 20 bp, synthetic construct
  source 1..20: mol_type = other DNA
atacgggccaggcaagccga

SEQ ID NO: 12148 - DNA, 20 bp, synthetic construct
  source 1..20: mol_type = other DNA
ctgcatgcatacggcgacta

SEQ ID NO: 12149 - DNA, 20 bp, synthetic construct
  source 1..20: mol_type = other DNA
ctaccctagtcgggagacac

SEQ ID NO: 12150 - DNA, 20 bp, synthetic construct
  source 1..20: mol_type = other DNA
cagaccgagacaagagtcat

SEQ ID NO: 12151 - DNA, 20 bp, synthetic construct
  source 1..20: mol_type = other DNA
agggtattaccgacagaatg

SEQ ID NO: 12152 - DNA, 20 bp, synthetic construct
  source 1..20: mol_type = other DNA
aatcaagcataagtctgtcc

SEQ ID NO: 12153 - DNA, 20 bp, synthetic construct
  source 1..20: mol_type = other DNA
agtatatggacaatccggga

SEQ ID NO: 12154 - DNA, 20 bp, synthetic construct
  source 1..20: mol_type = other DNA
cagccatggtatgtctaaag

SEQ ID NO: 12155 - DNA, 20 bp, synthetic construct
  source 1..20: mol_type = other DNA
ggcaattcgcactcttgcca

SEQ ID NO: 12156 - DNA, 20 bp, synthetic construct
  source 1..20: mol_type = other DNA
ccatattatcgcattagtaa

SEQ ID NO: 12157 - DNA, 20 bp, synthetic construct
  source 1..20: mol_type = other DNA
ttattccgtaggattagccg

SEQ ID NO: 12158 - DNA, 20 bp, synthetic construct
  source 1..20: mol_type = other DNA
ctttcgcgactctgaatgca

SEQ ID NO: 12159 - DNA, 20 bp, synthetic construct
  source 1..20: mol_type = other DNA
ttcctcgcaaccttcccacc

SEQ ID NO: 12160 - DNA, 20 bp, synthetic construct
  source 1..20: mol_type = other DNA
agggttacaccggtccctaa

SEQ ID NO: 12161 - DNA, 20 bp, synthetic construct
  source 1..20: mol_type = other DNA
ccgcgttaaatcatgcgctt

SEQ ID NO: 12162 - DNA, 20 bp, synthetic construct
  source 1..20: mol_type = other DNA
atgcaccttagtccttcttt

SEQ ID NO: 12163 - DNA, 20 bp, synthetic construct
  source 1..20: mol_type = other DNA
agacccacgcattcctcacc

SEQ ID NO: 12164 - DNA, 20 bp, synthetic construct
  source 1..20: mol_type = other DNA
gtattgtctagggaatggtg

SEQ ID NO: 12165 - DNA, 20 bp, synthetic construct
  source 1..20: mol_type = other DNA
gcaccaattgagtgcataag

SEQ ID NO: 12166 - DNA, 20 bp, synthetic construct
  source 1..20: mol_type = other DNA
tctgatcagcaaacatgcaa

SEQ ID NO: 12167 - DNA, 20 bp, synthetic construct
  source 1..20: mol_type = other DNA
ctttcacaatttgttcccga

SEQ ID NO: 12168 - DNA, 20 bp, synthetic construct
  source 1..20: mol_type = other DNA
atgcctgggcaattaggtca

SEQ ID NO: 12169 - DNA, 20 bp, synthetic construct
  source 1..20: mol_type = other DNA
tgggtgaaatccatacttta

SEQ ID NO: 12170 - DNA, 20 bp, synthetic construct
  source 1..20: mol_type = other DNA
cccagcctatgtattcgcag

SEQ ID NO: 12171 - DNA, 20 bp, synthetic construct
  source 1..20: mol_type = other DNA
acaacgcacatggacgacct

SEQ ID NO: 12172 - DNA, 20 bp, synthetic construct
  source 1..20: mol_type = other DNA
gcggtactagatccgagttt

SEQ ID NO: 12173 - DNA, 20 bp, synthetic construct
  source 1..20: mol_type = other DNA
attctctatcaggacccaat

SEQ ID NO: 12174 - DNA, 20 bp, synthetic construct
  source 1..20: mol_type = other DNA
tgaggctacagtactcgcga

SEQ ID NO: 12175 - DNA, 20 bp, synthetic construct
  source 1..20: mol_type = other DNA
gtcgatttcagggcgcgagc

SEQ ID NO: 12176 - DNA, 20 bp, synthetic construct
  source 1..20: mol_type = other DNA
gttaaatttgcgacggcata

SEQ ID NO: 12177 - DNA, 20 bp, synthetic construct
  source 1..20: mol_type = other DNA
ggtgagcttattacatcaac

SEQ ID NO: 12178 - DNA, 20 bp, synthetic construct
  source 1..20: mol_type = other DNA
gcagtttccactgaccagga

SEQ ID NO: 12179 - DNA, 20 bp, synthetic construct
  source 1..20: mol_type = other DNA
gtacgatgcgccgcatttgg

SEQ ID NO: 12180 - DNA, 20 bp, synthetic construct
  source 1..20: mol_type = other DNA
cggcagcaaacagagagttg

SEQ ID NO: 12181 - DNA, 20 bp, synthetic construct
  source 1..20: mol_type = other DNA
cggacgcgaccgacgagtaa

SEQ ID NO: 12182 - DNA, 20 bp, synthetic construct
  source 1..20: mol_type = other DNA
gtaagggtgagttaagaagg

SEQ ID NO: 12183 - DNA, 20 bp, synthetic construct
  source 1..20: mol_type = other DNA
ccgcgtttcgaatatcttcc

SEQ ID NO: 12184 - DNA, 20 bp, synthetic construct
  source 1..20: mol_type = other DNA
agtccgtgctgactcctcga

SEQ ID NO: 12185 - DNA, 20 bp, synthetic construct
  source 1..20: mol_type = other DNA
tcggcagtaacccagactcg

SEQ ID NO: 12186 - DNA, 20 bp, synthetic construct
  source 1..20: mol_type = other DNA
agggccgcgtttgttatggc

SEQ ID NO: 12187 - DNA, 20 bp, synthetic construct
  source 1..20: mol_type = other DNA
atcgtacgctccaatggtca

SEQ ID NO: 12188 - DNA, 20 bp, synthetic construct
  source 1..20: mol_type = other DNA
cattatcggtcgtagcttcg

SEQ ID NO: 12189 - DNA, 20 bp, synthetic construct
  source 1..20: mol_type = other DNA
attcagagcctataatacag

SEQ ID NO: 12190 - DNA, 20 bp, synthetic construct
  source 1..20: mol_type = other DNA
tcactcggatgatagtgtac

SEQ ID NO: 12191 - DNA, 20 bp, synthetic construct
  source 1..20: mol_type = other DNA
aattgttgctgttggtgcgc

SEQ ID NO: 12192 - DNA, 20 bp, synthetic construct
  source 1..20: mol_type = other DNA
ccatcgcggtatataaagct

SEQ ID NO: 12193 - DNA, 20 bp, synthetic construct
  source 1..20: mol_type = other DNA
gaactccttacttctttgcg

SEQ ID NO: 12194 - DNA, 20 bp, synthetic construct
  source 1..20: mol_type = other DNA
tatctgaactacgagtgaac

SEQ ID NO: 12195 - DNA, 20 bp, synthetic construct
  source 1..20: mol_type = other DNA
gaactcctatcgtggagaat

SEQ ID NO: 12196 - DNA, 20 bp, synthetic construct
  source 1..20: mol_type = other DNA
ataattcagccaactagtgc

SEQ ID NO: 12197 - DNA, 20 bp, synthetic construct
  source 1..20: mol_type = other DNA
taaataaccgacaatgatga

SEQ ID NO: 12198 - DNA, 20 bp, synthetic construct
  source 1..20: mol_type = other DNA
atagatcacgcgctcaagtc

SEQ ID NO: 12199 - DNA, 20 bp, synthetic construct
  source 1..20: mol_type = other DNA
tggtgggaaatgtagctcgt

SEQ ID NO: 12200 - DNA, 20 bp, synthetic construct
  source 1..20: mol_type = other DNA
aactaagcaggtcaagattg

SEQ ID NO: 12201 - DNA, 20 bp, synthetic construct
  source 1..20: mol_type = other DNA
tgttctcacatggcttatga

SEQ ID NO: 12202 - DNA, 20 bp, synthetic construct
  source 1..20: mol_type = other DNA
gcggctctacaatgctctgc

SEQ ID NO: 12203 - DNA, 20 bp, synthetic construct
  source 1..20: mol_type = other DNA
atcaggcattcaactccttt

SEQ ID NO: 12204 - DNA, 20 bp, synthetic construct
  source 1..20: mol_type = other DNA
tctaactctaggccacggat

SEQ ID NO: 12205 - DNA, 20 bp, synthetic construct
  source 1..20: mol_type = other DNA
gtagactctagcgtgcttac

SEQ ID NO: 12206 - DNA, 20 bp, synthetic construct
  source 1..20: mol_type = other DNA
gccagtcccgaagttataaa

SEQ ID NO: 12207 - DNA, 20 bp, synthetic construct
  source 1..20: mol_type = other DNA
tctagtggctacgcgtagga

SEQ ID NO: 12208 - DNA, 20 bp, synthetic construct
  source 1..20: mol_type = other DNA
tagttgggcctgctaattat

SEQ ID NO: 12209 - DNA, 20 bp, synthetic construct
  source 1..20: mol_type = other DNA
agccgggtgactggattgca

SEQ ID NO: 12210 - DNA, 20 bp, synthetic construct
  source 1..20: mol_type = other DNA
ccctcgcacatgttagatct

SEQ ID NO: 12211 - DNA, 20 bp, synthetic construct
  source 1..20: mol_type = other DNA
ctcaaattgtcccagcggta

SEQ ID NO: 12212 - DNA, 20 bp, synthetic construct
  source 1..20: mol_type = other DNA
catatgcccagctcgtagta

SEQ ID NO: 12213 - DNA, 20 bp, synthetic construct
  source 1..20: mol_type = other DNA
catgtggcaaccctaccaag

SEQ ID NO: 12214 - DNA, 20 bp, synthetic construct
  source 1..20: mol_type = other DNA
ccggccgatggtaaccgtgt

SEQ ID NO: 12215 - DNA, 20 bp, synthetic construct
  source 1..20: mol_type = other DNA
cgtccttcaggctatcatcg

SEQ ID NO: 12216 - DNA, 20 bp, synthetic construct
  source 1..20: mol_type = other DNA
cgccgatcatttgtctcgga

SEQ ID NO: 12217 - DNA, 20 bp, synthetic construct
  source 1..20: mol_type = other DNA
ggaccaacaaggacgaagtt

SEQ ID NO: 12218 - DNA, 20 bp, synthetic construct
  source 1..20: mol_type = other DNA
ttataacaccaacgcgttga

SEQ ID NO: 12219 - DNA, 20 bp, synthetic construct
  source 1..20: mol_type = other DNA
tggtcgtttaggcaccgcac

SEQ ID NO: 12220 - DNA, 20 bp, synthetic construct
  source 1..20: mol_type = other DNA
cctcttcgatgacgaaagcc

SEQ ID NO: 12221 - DNA, 20 bp, synthetic construct
  source 1..20: mol_type = other DNA
atgaacgcagctctataaat

SEQ ID NO: 12222 - DNA, 20 bp, synthetic construct
  source 1..20: mol_type = other DNA
gacgactttcccaaggctta

SEQ ID NO: 12223 - DNA, 20 bp, synthetic construct
  source 1..20: mol_type = other DNA
catgcggttagctcggcgaa

SEQ ID NO: 12224 - DNA, 20 bp, synthetic construct
  source 1..20: mol_type = other DNA
tgtgaatcaccctaccggca

SEQ ID NO: 12225 - DNA, 20 bp, synthetic construct
  source 1..20: mol_type = other DNA
gaagtctcatttaatctacc

SEQ ID NO: 12226 - DNA, 20 bp, synthetic construct
  source 1..20: mol_type = other DNA
tagccacctaatacgggtac

SEQ ID NO: 12227 - DNA, 20 bp, synthetic construct
  source 1..20: mol_type = other DNA
tcccgcttatgcctttcaga

SEQ ID NO: 12228 - DNA, 20 bp, synthetic construct
  source 1..20: mol_type = other DNA
atgctttgagccattatact

SEQ ID NO: 12229 - DNA, 20 bp, synthetic construct
  source 1..20: mol_type = other DNA
gaggccatgatgtgcgtggg

SEQ ID NO: 12230 - DNA, 20 bp, synthetic construct
  source 1..20: mol_type = other DNA
ctgttcgacattaggattgg

SEQ ID NO: 12231 - DNA, 20 bp, synthetic construct
  source 1..20: mol_type = other DNA
cggccttgcggctttggtgt

SEQ ID NO: 12232 - DNA, 20 bp, synthetic construct
  source 1..20: mol_type = other DNA
tggttccgagtgcctcttag

SEQ ID NO: 12233 - DNA, 20 bp, synthetic construct
  source 1..20: mol_type = other DNA
catgccgaaaggtaagagca

SEQ ID NO: 12234 - DNA, 20 bp, synthetic construct
  source 1..20: mol_type = other DNA
acgctgtactgatagtctag

SEQ ID NO: 12235 - DNA, 20 bp, synthetic construct
  source 1..20: mol_type = other DNA
cttgtggtacgccgtatata

SEQ ID NO: 12236 - DNA, 20 bp, synthetic construct
  source 1..20: mol_type = other DNA
gttgcattattcatagggcg

SEQ ID NO: 12237 - DNA, 20 bp, synthetic construct
  source 1..20: mol_type = other DNA
gggcagaactagcaagacat

SEQ ID NO: 12238 - DNA, 20 bp, synthetic construct
  source 1..20: mol_type = other DNA
tattctcaggtcaccgcagc

SEQ ID NO: 12239 - DNA, 20 bp, synthetic construct
  source 1..20: mol_type = other DNA
tgtgcaattgtgtcccaagt

SEQ ID NO: 12240 - DNA, 20 bp, synthetic construct
  source 1..20: mol_type = other DNA
cttctggctcgtggctccgc

SEQ ID NO: 12241 - DNA, 20 bp, synthetic construct
  source 1..20: mol_type = other DNA
ttggcgctcagggctgagta

SEQ ID NO: 12242 - DNA, 20 bp, synthetic construct
  source 1..20: mol_type = other DNA
gcggtcgcctttatactaat

SEQ ID NO: 12243 - DNA, 20 bp, synthetic construct
  source 1..20: mol_type = other DNA
cgattctagtcgcgatcagc

SEQ ID NO: 12244 - DNA, 20 bp, synthetic construct
  source 1..20: mol_type = other DNA
gtccaccaccggctaaccat

SEQ ID NO: 12245 - DNA, 20 bp, synthetic construct
  source 1..20: mol_type = other DNA
ctaacttgagaacctggtgt

SEQ ID NO: 12246 - DNA, 20 bp, synthetic construct
  source 1..20: mol_type = other DNA
gatagattcgcttagattgt

SEQ ID NO: 12247 - DNA, 20 bp, synthetic construct
  source 1..20: mol_type = other DNA
ctcgcacttcgtcataggac

SEQ ID NO: 12248 - DNA, 20 bp, synthetic construct
  source 1..20: mol_type = other DNA
gactgccctactagcaggtg

SEQ ID NO: 12249 - DNA, 20 bp, synthetic construct
  source 1..20: mol_type = other DNA
acatgaatgagagcgcccta

SEQ ID NO: 12250 - DNA, 20 bp, synthetic construct
  source 1..20: mol_type = other DNA
caaatttcgcatttaggccg

SEQ ID NO: 12251 - DNA, 20 bp, synthetic construct
  source 1..20: mol_type = other DNA
cgctctgagctcctgcagag

SEQ ID NO: 12252 - DNA, 20 bp, synthetic construct
  source 1..20: mol_type = other DNA
taggcctcctcacgtcctga

SEQ ID NO: 12253 - DNA, 20 bp, synthetic construct
  source 1..20: mol_type = other DNA
tacaagccacgtacattgcg

SEQ ID NO: 12254 - DNA, 20 bp, synthetic construct
  source 1..20: mol_type = other DNA
ggtttgttcaggcacaccaa

SEQ ID NO: 12255 - DNA, 20 bp, synthetic construct
  source 1..20: mol_type = other DNA
atggcgtaataggagttagg

SEQ ID NO: 12256 - DNA, 20 bp, synthetic construct
  source 1..20: mol_type = other DNA
acggcattcgtcattagtgg

SEQ ID NO: 12257 - DNA, 20 bp, synthetic construct
  source 1..20: mol_type = other DNA
aagggtaatgtacgagttat

SEQ ID NO: 12258 - DNA, 20 bp, synthetic construct
  source 1..20: mol_type = other DNA
agaacgatgtagccaggcgc

SEQ ID NO: 12259 - DNA, 20 bp, synthetic construct
  source 1..20: mol_type = other DNA
acgccacgtcgccggatgct

SEQ ID NO: 12260 - DNA, 20 bp, synthetic construct
  source 1..20: mol_type = other DNA
gcgaacagttgatgctcttt

SEQ ID NO: 12261 - DNA, 20 bp, synthetic construct
  source 1..20: mol_type = other DNA
agcgactcctgagcatagta

SEQ ID NO: 12262 - DNA, 20 bp, synthetic construct
  source 1..20: mol_type = other DNA
tattggtttctgatggcgcc

SEQ ID NO: 12263 - DNA, 20 bp, synthetic construct
  source 1..20: mol_type = other DNA
ttgtctggataaactaggag

SEQ ID NO: 12264 - DNA, 20 bp, synthetic construct
  source 1..20: mol_type = other DNA
cgattctccagaccaacaca

SEQ ID NO: 12265 - DNA, 20 bp, synthetic construct
  source 1..20: mol_type = other DNA
actccgtaaccgaaatccat

SEQ ID NO: 12266 - DNA, 20 bp, synthetic construct
  source 1..20: mol_type = other DNA
atcgccgaggaaactctgac

SEQ ID NO: 12267 - DNA, 20 bp, synthetic construct
  source 1..20: mol_type = other DNA
tggaggatgcctccagtagc

SEQ ID NO: 12268 - DNA, 20 bp, synthetic construct
  source 1..20: mol_type = other DNA
gcagcctagtccctaaaccg

SEQ ID NO: 12269 - DNA, 20 bp, synthetic construct
  source 1..20: mol_type = other DNA
agggacagcttacctataaa

SEQ ID NO: 12270 - DNA, 20 bp, synthetic construct
  source 1..20: mol_type = other DNA
ggacaggacggtggtttatc

SEQ ID NO: 12271 - DNA, 20 bp, synthetic construct
  source 1..20: mol_type = other DNA
tcggccacctttagcatctg

SEQ ID NO: 12272 - DNA, 20 bp, synthetic construct
  source 1..20: mol_type = other DNA
tttgtccaacgaggcctgta

SEQ ID NO: 12273 - DNA, 20 bp, synthetic construct
  source 1..20: mol_type = other DNA
cctcagcgagtacacgcgaa

SEQ ID NO: 12274 - DNA, 20 bp, synthetic construct
  source 1..20: mol_type = other DNA
cgcatcctaccagctcaacc

SEQ ID NO: 12275 - DNA, 20 bp, synthetic construct
  source 1..20: mol_type = other DNA
gtaacatacgaaagcgagtt

SEQ ID NO: 12276 - DNA, 20 bp, synthetic construct
  source 1..20: mol_type = other DNA
gtaagtgcagtgggtattca

SEQ ID NO: 12277 - DNA, 20 bp, synthetic construct
  source 1..20: mol_type = other DNA
gcgcaatgataacacctgca

SEQ ID NO: 12278 - DNA, 20 bp, synthetic construct
  source 1..20: mol_type = other DNA
catgaccggctgattacttt

SEQ ID NO: 12279 - DNA, 20 bp, synthetic construct
  source 1..20: mol_type = other DNA
attggatcacgctacatcat

SEQ ID NO: 12280 - DNA, 20 bp, synthetic construct
  source 1..20: mol_type = other DNA
tggacacccttacatggcgg

SEQ ID NO: 12281 - DNA, 20 bp, synthetic construct
  source 1..20: mol_type = other DNA
gcagggaatttacaaacaaa

SEQ ID NO: 12282 - DNA, 20 bp, synthetic construct
  source 1..20: mol_type = other DNA
atggacatcgtcgtgactgg

SEQ ID NO: 12283 - DNA, 20 bp, synthetic construct
  source 1..20: mol_type = other DNA
ataacgcggcccttctacag

SEQ ID NO: 12284 - DNA, 20 bp, synthetic construct
  source 1..20: mol_type = other DNA
cctccacgaatatgtgcgta

SEQ ID NO: 12285 - DNA, 20 bp, synthetic construct
  source 1..20: mol_type = other DNA
gctacctgcgcagagacaaa

SEQ ID NO: 12286 - DNA, 20 bp, synthetic construct
  source 1..20: mol_type = other DNA
cgccgaaggagcctggtaac

SEQ ID NO: 12287 - DNA, 20 bp, synthetic construct
  source 1..20: mol_type = other DNA
gatcaggtctcggaacttgt

SEQ ID NO: 12288 - DNA, 20 bp, synthetic construct
  source 1..20: mol_type = other DNA
accggtcgattctcctgcaa

SEQ ID NO: 12289 - DNA, 20 bp, synthetic construct
  source 1..20: mol_type = other DNA
gcactgtcctagaactcaac

SEQ ID NO: 12290 - DNA, 20 bp, synthetic construct
  source 1..20: mol_type = other DNA
acatatgaaacgtgcagagc

SEQ ID NO: 12291 - DNA, 20 bp, synthetic construct
  source 1..20: mol_type = other DNA
tataggaaggatgaactagg

SEQ ID NO: 12292 - DNA, 20 bp, synthetic construct
  source 1..20: mol_type = other DNA
agggtacgggtgagagtcga

SEQ ID NO: 12293 - DNA, 20 bp, synthetic construct
  source 1..20: mol_type = other DNA
gcgtacacgtgcgtagcacc

SEQ ID NO: 12294 - DNA, 20 bp, synthetic construct
  source 1..20: mol_type = other DNA
gtcaacacccattccttatt

SEQ ID NO: 12295 - DNA, 20 bp, synthetic construct
  source 1..20: mol_type = other DNA
aagcgcgtaggttcagactg

SEQ ID NO: 12296 - DNA, 20 bp, synthetic construct
  source 1..20: mol_type = other DNA
cgcttagccggtaccagcag

SEQ ID NO: 12297 - DNA, 20 bp, synthetic construct
  source 1..20: mol_type = other DNA
catttcagccacgagaaaga

SEQ ID NO: 12298 - DNA, 20 bp, synthetic construct
  source 1..20: mol_type = other DNA
ttgttcgcactctcccattg

SEQ ID NO: 12299 - DNA, 20 bp, synthetic construct
  source 1..20: mol_type = other DNA
catctcctgtacatggaggc

SEQ ID NO: 12300 - DNA, 20 bp, synthetic construct
  source 1..20: mol_type = other DNA
tctcgttgataagttcacgg

SEQ ID NO: 12301 - DNA, 20 bp, synthetic construct
  source 1..20: mol_type = other DNA
ctaatagaatggcattcgct

SEQ ID NO: 12302 - DNA, 20 bp, synthetic construct
  source 1..20: mol_type = other DNA
actctctggatacttagata

SEQ ID NO: 12303 - DNA, 20 bp, synthetic construct
  source 1..20: mol_type = other DNA
acgtttatcacagccgtgat

SEQ ID NO: 12304 - DNA, 20 bp, synthetic construct
  source 1..20: mol_type = other DNA
gcatggtgtatgtgcagcat

SEQ ID NO: 12305 - DNA, 20 bp, synthetic construct
  source 1..20: mol_type = other DNA
ggcggcttcaccgctactgt

SEQ ID NO: 12306 - DNA, 20 bp, synthetic construct
  source 1..20: mol_type = other DNA
gacaccgtttgctcggacag

SEQ ID NO: 12307 - DNA, 20 bp, synthetic construct
  source 1..20: mol_type = other DNA
attcaacaagccgctaacag

SEQ ID NO: 12308 - DNA, 20 bp, synthetic construct
  source 1..20: mol_type = other DNA
tatcgaatctaaggtcacgc

SEQ ID NO: 12309 - DNA, 20 bp, synthetic construct
  source 1..20: mol_type = other DNA
gtggtagcgtccgaatttgg

SEQ ID NO: 12310 - DNA, 20 bp, synthetic construct
  source 1..20: mol_type = other DNA
gagggagatgtacgagtgac

SEQ ID NO: 12311 - DNA, 20 bp, synthetic construct
  source 1..20: mol_type = other DNA
ctgacggtgcgtactaacag

SEQ ID NO: 12312 - DNA, 20 bp, synthetic construct
  source 1..20: mol_type = other DNA
accggagcatggaaaccaga

SEQ ID NO: 12313 - DNA, 20 bp, synthetic construct
  source 1..20: mol_type = other DNA
ttagctgccagcgcttgcaa

SEQ ID NO: 12314 - DNA, 20 bp, synthetic construct
  source 1..20: mol_type = other DNA
tctgtcgtagaatacgtcac

SEQ ID NO: 12315 - DNA, 20 bp, synthetic construct
  source 1..20: mol_type = other DNA
tgcctttacgaacccgcggg

SEQ ID NO: 12316 - DNA, 20 bp, synthetic construct
  source 1..20: mol_type = other DNA
agcaaagctatggtgcgagg

SEQ ID NO: 12317 - DNA, 20 bp, synthetic construct
  source 1..20: mol_type = other DNA
ataatgcgggtcgcttaccc

SEQ ID NO: 12318 - DNA, 20 bp, synthetic construct
  source 1..20: mol_type = other DNA
tctggaatgactgtcctggt

SEQ ID NO: 12319 - DNA, 20 bp, synthetic construct
  source 1..20: mol_type = other DNA
aggcgaggctatttagaaga

SEQ ID NO: 12320 - DNA, 20 bp, synthetic construct
  source 1..20: mol_type = other DNA
gcgtcccatgctattacgcc

SEQ ID NO: 12321 - DNA, 20 bp, synthetic construct
  source 1..20: mol_type = other DNA
cttctctcacaagtggccga

SEQ ID NO: 12322 - DNA, 20 bp, synthetic construct
  source 1..20: mol_type = other DNA
tatgtacaggcctcaattaa

SEQ ID NO: 12323 - DNA, 20 bp, synthetic construct
  source 1..20: mol_type = other DNA
cgtgaggtgttgagcaagct

SEQ ID NO: 12324 - DNA, 20 bp, synthetic construct
  source 1..20: mol_type = other DNA
acgggtgcgtttgattaggc

SEQ ID NO: 12325 - DNA, 20 bp, synthetic construct
  source 1..20: mol_type = other DNA
cccaggtatgtgtttggttg

SEQ ID NO: 12326 - DNA, 20 bp, synthetic construct
  source 1..20: mol_type = other DNA
gtggagtcgaaggtaggctc

SEQ ID NO: 12327 - DNA, 20 bp, synthetic construct
  source 1..20: mol_type = other DNA
gagcaccggagacaacatcg

SEQ ID NO: 12328 - DNA, 20 bp, synthetic construct
  source 1..20: mol_type = other DNA
gcgtagatagtgacgggcgc

SEQ ID NO: 12329 - DNA, 20 bp, synthetic construct
  source 1..20: mol_type = other DNA
cgctattccagctcagcacc

SEQ ID NO: 12330 - DNA, 20 bp, synthetic construct
  source 1..20: mol_type = other DNA
gaaacgcaatggcgttctgg

SEQ ID NO: 12331 - DNA, 20 bp, synthetic construct
  source 1..20: mol_type = other DNA
ttccaggcggtggaatctaa

SEQ ID NO: 12332 - DNA, 20 bp, synthetic construct
  source 1..20: mol_type = other DNA
ttcccggtagacgatctcca

SEQ ID NO: 12333 - DNA, 20 bp, synthetic construct
  source 1..20: mol_type = other DNA
cacaatgtcctatcaaatac

SEQ ID NO: 12334 - DNA, 20 bp, synthetic construct
  source 1..20: mol_type = other DNA
ctgagtaccggaaggctcgc

SEQ ID NO: 12335 - DNA, 20 bp, synthetic construct
  source 1..20: mol_type = other DNA
atggataaagtgcgtacttc

SEQ ID NO: 12336 - DNA, 20 bp, synthetic construct
  source 1..20: mol_type = other DNA
cctgatgatcggcttagagt

SEQ ID NO: 12337 - DNA, 20 bp, synthetic construct
  source 1..20: mol_type = other DNA
ctgcaaactcgttacatgct

SEQ ID NO: 12338 - DNA, 20 bp, synthetic construct
  source 1..20: mol_type = other DNA
taataagtgtcatcggttac

SEQ ID NO: 12339 - DNA, 20 bp, synthetic construct
  source 1..20: mol_type = other DNA
tttataccgacagggctcac

SEQ ID NO: 12340 - DNA, 20 bp, synthetic construct
  source 1..20: mol_type = other DNA
atataactctatgacggtca

SEQ ID NO: 12341 - DNA, 20 bp, synthetic construct
  source 1..20: mol_type = other DNA
gtacaccaggtctaaacaat

SEQ ID NO: 12342 - DNA, 20 bp, synthetic construct
  source 1..20: mol_type = other DNA
tacggcaaccgtgcataatg

SEQ ID NO: 12343 - DNA, 20 bp, synthetic construct
  source 1..20: mol_type = other DNA
tcgaggcgtttgtatgcagg

SEQ ID NO: 12344 - DNA, 20 bp, synthetic construct
  source 1..20: mol_type = other DNA
ccaatgcccacgtcaaatcc

SEQ ID NO: 12345 - DNA, 20 bp, synthetic construct
  source 1..20: mol_type = other DNA
ttaattcacacgagatgtaa

SEQ ID NO: 12346 - DNA, 20 bp, synthetic construct
  source 1..20: mol_type = other DNA
acgggaaataatccaccata

SEQ ID NO: 12347 - DNA, 20 bp, synthetic construct
  source 1..20: mol_type = other DNA
cgtaggccatcagccggttt

SEQ ID NO: 12348 - DNA, 20 bp, synthetic construct
  source 1..20: mol_type = other DNA
ccaatgtggaggtcaattta

SEQ ID NO: 12349 - DNA, 20 bp, synthetic construct
  source 1..20: mol_type = other DNA
tcaggtaccgatgaatggca

SEQ ID NO: 12350 - DNA, 20 bp, synthetic construct
  source 1..20: mol_type = other DNA
catctcccgtcccgctcagt

SEQ ID NO: 12351 - DNA, 20 bp, synthetic construct
  source 1..20: mol_type = other DNA
tcgcaaataatacaacggtg

SEQ ID NO: 12352 - DNA, 20 bp, synthetic construct
  source 1..20: mol_type = other DNA
aaatggaacttaaaggcgcc

SEQ ID NO: 12353 - DNA, 20 bp, synthetic construct
  source 1..20: mol_type = other DNA
catcgtgctaaagctgaagg

SEQ ID NO: 12354 - DNA, 20 bp, synthetic construct
  source 1..20: mol_type = other DNA
aactgcatcctaatcatcta

SEQ ID NO: 12355 - DNA, 20 bp, synthetic construct
  source 1..20: mol_type = other DNA
actctataagcagcgagacg

SEQ ID NO: 12356 - DNA, 20 bp, synthetic construct
  source 1..20: mol_type = other DNA
cggacccttgctccaatagg

SEQ ID NO: 12357 - DNA, 20 bp, synthetic construct
  source 1..20: mol_type = other DNA
gtgatctaccacaacgcgtg

SEQ ID NO: 12358 - DNA, 20 bp, synthetic construct
  source 1..20: mol_type = other DNA
atagttggtgtggcaataac

SEQ ID NO: 12359 - DNA, 20 bp, synthetic construct
  source 1..20: mol_type = other DNA
ggaagtctttcacttctgca

SEQ ID NO: 12360 - DNA, 20 bp, synthetic construct
  source 1..20: mol_type = other DNA
aatcgtggaaagtgtgcggg

SEQ ID NO: 12361 - DNA, 20 bp, synthetic construct
  source 1..20: mol_type = other DNA
ccggactcgttgagtatgcg

SEQ ID NO: 12362 - DNA, 20 bp, synthetic construct
  source 1..20: mol_type = other DNA
gcatccgagtgcgtgcaagg

SEQ ID NO: 12363 - DNA, 20 bp, synthetic construct
  source 1..20: mol_type = other DNA
gtaagaaagggtgggcacat

SEQ ID NO: 12364 - DNA, 20 bp, synthetic construct
  source 1..20: mol_type = other DNA
aagtagtgcggtatagacaa

SEQ ID NO: 12365 - DNA, 20 bp, synthetic construct
  source 1..20: mol_type = other DNA
ctgctaatttatggaactga

SEQ ID NO: 12366 - DNA, 20 bp, synthetic construct
  source 1..20: mol_type = other DNA
aatgcgcagggtatatacaa

SEQ ID NO: 12367 - DNA, 20 bp, synthetic construct
  source 1..20: mol_type = other DNA
ggtgttgtgtgagaaaccgc

SEQ ID NO: 12368 - DNA, 20 bp, synthetic construct
  source 1..20: mol_type = other DNA
cacttcgcacgagacaagaa

SEQ ID NO: 12369 - DNA, 20 bp, synthetic construct
  source 1..20: mol_type = other DNA
cgcgagtcagatcttaactg

SEQ ID NO: 12370 - DNA, 20 bp, synthetic construct
  source 1..20: mol_type = other DNA
agatggcctgtttattaatc

SEQ ID NO: 12371 - DNA, 20 bp, synthetic construct
  source 1..20: mol_type = other DNA
ttcacggctaggacccgttc

SEQ ID NO: 12372 - DNA, 20 bp, synthetic construct
  source 1..20: mol_type = other DNA
agaacacagaagaatgggtt

SEQ ID NO: 12373 - DNA, 20 bp, synthetic construct
  source 1..20: mol_type = other DNA
ggtccggtattgcgtgctgt

SEQ ID NO: 12374 - DNA, 20 bp, synthetic construct
  source 1..20: mol_type = other DNA
ccgtccgataactcgcgaac

SEQ ID NO: 12375 - DNA, 20 bp, synthetic construct
  source 1..20: mol_type = other DNA
tcagcacagagatattgagc

SEQ ID NO: 12376 - DNA, 20 bp, synthetic construct
  source 1..20: mol_type = other DNA
acggcatggagtgcgtcgaa

SEQ ID NO: 12377 - DNA, 20 bp, synthetic construct
  source 1..20: mol_type = other DNA
gccaacgaagaacactcgcg

SEQ ID NO: 12378 - DNA, 20 bp, synthetic construct
  source 1..20: mol_type = other DNA
tttgacgggcaaccgtctct

SEQ ID NO: 12379 - DNA, 20 bp, synthetic construct
  source 1..20: mol_type = other DNA
aaacgtaatgtacatccaca

SEQ ID NO: 12380 - DNA, 20 bp, synthetic construct
  source 1..20: mol_type = other DNA
aagagatcgcaaggataaat

SEQ ID NO: 12381 - DNA, 20 bp, synthetic construct
  source 1..20: mol_type = other DNA
acccaggttggcaggtttat

SEQ ID NO: 12382 - DNA, 20 bp, synthetic construct
  source 1..20: mol_type = other DNA
gtccctgattagtgattcgt

SEQ ID NO: 12383 - DNA, 20 bp, synthetic construct
  source 1..20: mol_type = other DNA
gagccggtctgacagttatt

SEQ ID NO: 12384 - DNA, 20 bp, synthetic construct
  source 1..20: mol_type = other DNA
ggtgctgttactctctggga

SEQ ID NO: 12385 - DNA, 20 bp, synthetic construct
  source 1..20: mol_type = other DNA
tcattacactgggagccgtc

SEQ ID NO: 12386 - DNA, 20 bp, synthetic construct
  source 1..20: mol_type = other DNA
gtgcggaaccagagttcaca

SEQ ID NO: 12387 - DNA, 20 bp, synthetic construct
  source 1..20: mol_type = other DNA
gtgtctcatccgtcaaatat

SEQ ID NO: 12388 - DNA, 20 bp, synthetic construct
  source 1..20: mol_type = other DNA
ggcaaactgtgatgaggttc

SEQ ID NO: 12389 - DNA, 20 bp, synthetic construct
  source 1..20: mol_type = other DNA
accctgccgtactaggtata

SEQ ID NO: 12390 - DNA, 20 bp, synthetic construct
  source 1..20: mol_type = other DNA
gtcctaattcgtcatctagt

SEQ ID NO: 12391 - DNA, 20 bp, synthetic construct
  source 1..20: mol_type = other DNA
tggagtatagtcagttggtc

SEQ ID NO: 12392 - DNA, 20 bp, synthetic construct
  source 1..20: mol_type = other DNA
gagcaagttggtcctctgct

SEQ ID NO: 12393 - DNA, 20 bp, synthetic construct
  source 1..20: mol_type = other DNA
gaatacgacttgtgctgcca

SEQ ID NO: 12394 - DNA, 20 bp, synthetic construct
  source 1..20: mol_type = other DNA
actactgacaggtccacgga

SEQ ID NO: 12395 - DNA, 20 bp, synthetic construct
  source 1..20: mol_type = other DNA
agctatcatggcaaatgact

SEQ ID NO: 12396 - DNA, 20 bp, synthetic construct
  source 1..20: mol_type = other DNA
acagaaacccttaccacaga

SEQ ID NO: 12397 - DNA, 20 bp, synthetic construct
  source 1..20: mol_type = other DNA
caagagagatgccgcggtac

SEQ ID NO: 12398 - DNA, 20 bp, synthetic construct
  source 1..20: mol_type = other DNA
gatcctgacctgttatcagt

SEQ ID NO: 12399 - DNA, 20 bp, synthetic construct
  source 1..20: mol_type = other DNA
actttaggccaagggtgaca

SEQ ID NO: 12400 - DNA, 20 bp, synthetic construct
  source 1..20: mol_type = other DNA
tgtgtatcatcgagatgggc

SEQ ID NO: 12401 - DNA, 20 bp, synthetic construct
  source 1..20: mol_type = other DNA
acccttcccactggtgcgct

SEQ ID NO: 12402 - DNA, 20 bp, synthetic construct
  source 1..20: mol_type = other DNA
tatatatgaggcatggatgc

SEQ ID NO: 12403 - DNA, 20 bp, synthetic construct
  source 1..20: mol_type = other DNA
tgctgccatgttagtcgaag

SEQ ID NO: 12404 - DNA, 20 bp, synthetic construct
  source 1..20: mol_type = other DNA
attctgtcgagcacaggttc

SEQ ID NO: 12405 - DNA, 20 bp, synthetic construct
  source 1..20: mol_type = other DNA
tatactatagcagctggttg

SEQ ID NO: 12406 - DNA, 20 bp, synthetic construct
  source 1..20: mol_type = other DNA
tcacgaaatgacatgtatca

SEQ ID NO: 12407 - DNA, 20 bp, synthetic construct
  source 1..20: mol_type = other DNA
aagtgctggctcgacgattg

SEQ ID NO: 12408 - DNA, 20 bp, synthetic construct
  source 1..20: mol_type = other DNA
tacgccgatggcttacagag

SEQ ID NO: 12409 - DNA, 20 bp, synthetic construct
  source 1..20: mol_type = other DNA
aagccaggcctagtctaccg

SEQ ID NO: 12410 - DNA, 20 bp, synthetic construct
  source 1..20: mol_type = other DNA
gacccgatgacatcaccaaa

SEQ ID NO: 12411 - DNA, 20 bp, synthetic construct
  source 1..20: mol_type = other DNA
ccgcaatggtcgagagtaac

SEQ ID NO: 12412 - DNA, 20 bp, synthetic construct
  source 1..20: mol_type = other DNA
accgcaaaggcctcatgcta

SEQ ID NO: 12413 - DNA, 20 bp, synthetic construct
  source 1..20: mol_type = other DNA
aggtccatgtcagaatgtac

SEQ ID NO: 12414 - DNA, 20 bp, synthetic construct
  source 1..20: mol_type = other DNA
gtcgtgtcagacaaatgtct

SEQ ID NO: 12415 - DNA, 20 bp, synthetic construct
  source 1..20: mol_type = other DNA
agcattaaactctctaatcg

SEQ ID NO: 12416 - DNA, 20 bp, synthetic construct
  source 1..20: mol_type = other DNA
gcctaagtagcttgataatc

SEQ ID NO: 12417 - DNA, 20 bp, synthetic construct
  source 1..20: mol_type = other DNA
gagacgatctagttgtaccg

SEQ ID NO: 12418 - DNA, 20 bp, synthetic construct
  source 1..20: mol_type = other DNA
tcctcaattgcacctctgac

SEQ ID NO: 12419 - DNA, 20 bp, synthetic construct
  source 1..20: mol_type = other DNA
atgagcaattacctcaggta

SEQ ID NO: 12420 - DNA, 20 bp, synthetic construct
  source 1..20: mol_type = other DNA
actgcactaagaaatacgac

SEQ ID NO: 12421 - DNA, 20 bp, synthetic construct
  source 1..20: mol_type = other DNA
gcattgtgtgagtgtcgaac

SEQ ID NO: 12422 - DNA, 20 bp, synthetic construct
  source 1..20: mol_type = other DNA
gcccacttcatcatcaacgt

SEQ ID NO: 12423 - DNA, 20 bp, synthetic construct
  source 1..20: mol_type = other DNA
gctccgcatcgcgtaaagtc

SEQ ID NO: 12424 - DNA, 20 bp, synthetic construct
  source 1..20: mol_type = other DNA
ccggcaaagtttagtagctc

SEQ ID NO: 12425 - DNA, 20 bp, synthetic construct
  source 1..20: mol_type = other DNA
actcagcggtattccggtgg

SEQ ID NO: 12426 - DNA, 20 bp, synthetic construct
  source 1..20: mol_type = other DNA
cgcccgtcacacccgtctat

SEQ ID NO: 12427 - DNA, 20 bp, synthetic construct
  source 1..20: mol_type = other DNA
gaaatagatcaggccgtggg

SEQ ID NO: 12428 - DNA, 20 bp, synthetic construct
  source 1..20: mol_type = other DNA
aatactagccgatctttgac

SEQ ID NO: 12429 - DNA, 20 bp, synthetic construct
  source 1..20: mol_type = other DNA
tccagccagccgtaggtaat

SEQ ID NO: 12430 - DNA, 20 bp, synthetic construct
  source 1..20: mol_type = other DNA
cttaggacagcaaacaggcg

SEQ ID NO: 12431 - DNA, 20 bp, synthetic construct
  source 1..20: mol_type = other DNA
ataatgcggcccagagcctc

SEQ ID NO: 12432 - DNA, 20 bp, synthetic construct
  source 1..20: mol_type = other DNA
tgcttagtacatgactttac

SEQ ID NO: 12433 - DNA, 20 bp, synthetic construct
  source 1..20: mol_type = other DNA
tagcgagtttctatgtaggg

SEQ ID NO: 12434 - DNA, 20 bp, synthetic construct
  source 1..20: mol_type = other DNA
caaggtactagggtgctaca

SEQ ID NO: 12435 - DNA, 20 bp, synthetic construct
  source 1..20: mol_type = other DNA
acccatcgagcgaagcaact

SEQ ID NO: 12436 - DNA, 20 bp, synthetic construct
  source 1..20: mol_type = other DNA
gggttggtcggccagatcct

SEQ ID NO: 12437 - DNA, 20 bp, synthetic construct
  source 1..20: mol_type = other DNA
ccaaacatattcatccgtaa

SEQ ID NO: 12438 - DNA, 20 bp, synthetic construct
  source 1..20: mol_type = other DNA
agcggatagtcttgtggatt

SEQ ID NO: 12439 - DNA, 20 bp, synthetic construct
  source 1..20: mol_type = other DNA
atatatgtggccttcccttc

SEQ ID NO: 12440 - DNA, 20 bp, synthetic construct
  source 1..20: mol_type = other DNA
ttgcggcagcctttgacgtg

SEQ ID NO: 12441 - DNA, 20 bp, synthetic construct
  source 1..20: mol_type = other DNA
ccatcccttgtacaaatatc

SEQ ID NO: 12442 - DNA, 20 bp, synthetic construct
  source 1..20: mol_type = other DNA
ctcgttgcataaagtccagg

SEQ ID NO: 12443 - DNA, 20 bp, synthetic construct
  source 1..20: mol_type = other DNA
gcgcgcctttcgagcgtgtc

SEQ ID NO: 12444 - DNA, 20 bp, synthetic construct
  source 1..20: mol_type = other DNA
gtgattctacactgggccta

SEQ ID NO: 12445 - DNA, 20 bp, synthetic construct
  source 1..20: mol_type = other DNA
acgagtgttcctgcaagctc

SEQ ID NO: 12446 - DNA, 20 bp, synthetic construct
  source 1..20: mol_type = other DNA
cgcgctcaaatgcatagcaa

SEQ ID NO: 12447 - DNA, 20 bp, synthetic construct
  source 1..20: mol_type = other DNA
cggcgacacaccattaacgc

SEQ ID NO: 12448 - DNA, 20 bp, synthetic construct
  source 1..20: mol_type = other DNA
tcaggcatggcagctttatt

SEQ ID NO: 12449 - DNA, 20 bp, synthetic construct
  source 1..20: mol_type = other DNA
gcgggtatatgtacggactc

SEQ ID NO: 12450 - DNA, 20 bp, synthetic construct
  source 1..20: mol_type = other DNA
cttaggatagacgcagttag

SEQ ID NO: 12451 - DNA, 20 bp, synthetic construct
  source 1..20: mol_type = other DNA
cccataggtcaaggactccc

SEQ ID NO: 12452 - DNA, 20 bp, synthetic construct
  source 1..20: mol_type = other DNA
gtcgaatagagtaatgcttg

SEQ ID NO: 12453 - DNA, 20 bp, synthetic construct
  source 1..20: mol_type = other DNA
tattgacgatgtgtatgcgc

SEQ ID NO: 12454 - DNA, 20 bp, synthetic construct
  source 1..20: mol_type = other DNA
tacggagattgatctattgg

SEQ ID NO: 12455 - DNA, 20 bp, synthetic construct
  source 1..20: mol_type = other DNA
tagaaccttgccctaccaga

SEQ ID NO: 12456 - DNA, 20 bp, synthetic construct
  source 1..20: mol_type = other DNA
cacatcgggaagttgccgga

SEQ ID NO: 12457 - DNA, 20 bp, synthetic construct
  source 1..20: mol_type = other DNA
tataagtcgcacaccagtgg

SEQ ID NO: 12458 - DNA, 20 bp, synthetic construct
  source 1..20: mol_type = other DNA
gagacgaatcttaagagccg

SEQ ID NO: 12459 - DNA, 20 bp, synthetic construct
  source 1..20: mol_type = other DNA
ctaagacgcttgcctcaccg

SEQ ID NO: 12460 - DNA, 20 bp, synthetic construct
  source 1..20: mol_type = other DNA
tcgccgtgagtaacctattg

SEQ ID NO: 12461 - DNA, 20 bp, synthetic construct
  source 1..20: mol_type = other DNA
ggctaaaggctacagggaag

SEQ ID NO: 12462 - DNA, 20 bp, synthetic construct
  source 1..20: mol_type = other DNA
cgcacactttcggtcaccaa

SEQ ID NO: 12463 - DNA, 20 bp, synthetic construct
  source 1..20: mol_type = other DNA
gcgtaggtgtatatgaggag

SEQ ID NO: 12464 - DNA, 20 bp, synthetic construct
  source 1..20: mol_type = other DNA
cttcgggcaccactggcaat

SEQ ID NO: 12465 - DNA, 20 bp, synthetic construct
  source 1..20: mol_type = other DNA
ttaagtctattcattgaggc

SEQ ID NO: 12466 - DNA, 20 bp, synthetic construct
  source 1..20: mol_type = other DNA
gattacgaagttgtatcttg

SEQ ID NO: 12467 - DNA, 20 bp, synthetic construct
  source 1..20: mol_type = other DNA
tgccgcataaagaactacca

SEQ ID NO: 12468 - DNA, 20 bp, synthetic construct
  source 1..20: mol_type = other DNA
aagtatcagcaactgcattc

SEQ ID NO: 12469 - DNA, 20 bp, synthetic construct
  source 1..20: mol_type = other DNA
gctcaacgccgtctgactaa

SEQ ID NO: 12470 - DNA, 20 bp, synthetic construct
  source 1..20: mol_type = other DNA
ctgatacaccgatagtcggt

SEQ ID NO: 12471 - DNA, 20 bp, synthetic construct
  source 1..20: mol_type = other DNA
gttcaccatatagatgtgcg

SEQ ID NO: 12472 - DNA, 20 bp, synthetic construct
  source 1..20: mol_type = other DNA
tcacagcaccactccgcaag

SEQ ID NO: 12473 - DNA, 20 bp, synthetic construct
  source 1..20: mol_type = other DNA
ctttcggtgtaatttccgac

SEQ ID NO: 12474 - DNA, 20 bp, synthetic construct
  source 1..20: mol_type = other DNA
ggtgctttgtgcgagctagg

SEQ ID NO: 12475 - DNA, 20 bp, synthetic construct
  source 1..20: mol_type = other DNA
attgcgaccaccgagacagt

SEQ ID NO: 12476 - DNA, 20 bp, synthetic construct
  source 1..20: mol_type = other DNA
ttctggttgctgagtgcgtg

SEQ ID NO: 12477 - DNA, 20 bp, synthetic construct
  source 1..20: mol_type = other DNA
gcctcacccattcactagct

SEQ ID NO: 12478 - DNA, 20 bp, synthetic construct
  source 1..20: mol_type = other DNA
gcccatgcgctttgggcagt

SEQ ID NO: 12479 - DNA, 20 bp, synthetic construct
  source 1..20: mol_type = other DNA
tggatacactgcctctcctc

SEQ ID NO: 12480 - DNA, 20 bp, synthetic construct
  source 1..20: mol_type = other DNA
gatacctatacagccagttc

SEQ ID NO: 12481 - DNA, 20 bp, synthetic construct
  source 1..20: mol_type = other DNA
tcatccttcaatttaagccg

SEQ ID NO: 12482 - DNA, 20 bp, synthetic construct
  source 1..20: mol_type = other DNA
gtttaatataggcgcgcgcc

SEQ ID NO: 12483 - DNA, 20 bp, synthetic construct
  source 1..20: mol_type = other DNA
gaagtcaggcgtcacagaca

SEQ ID NO: 12484 - DNA, 20 bp, synthetic construct
  source 1..20: mol_type = other DNA
cagaaccataaactttcggt

SEQ ID NO: 12485 - DNA, 20 bp, synthetic construct
  source 1..20: mol_type = other DNA
aataccgacaattaggtacg

SEQ ID NO: 12486 - DNA, 20 bp, synthetic construct
  source 1..20: mol_type = other DNA
tctcattgccgtagaccgac

SEQ ID NO: 12487 - DNA, 20 bp, synthetic construct
  source 1..20: mol_type = other DNA
cattactacgacgggctatt

SEQ ID NO: 12488 - DNA, 20 bp, synthetic construct
  source 1..20: mol_type = other DNA
acatagtagcggctccactc

SEQ ID NO: 12489 - DNA, 20 bp, synthetic construct
  source 1..20: mol_type = other DNA
ctagagcgccctgcattgtt

SEQ ID NO: 12490 - DNA, 20 bp, synthetic construct
  source 1..20: mol_type = other DNA
catcgtcctcaagtggcatt

SEQ ID NO: 12491 - DNA, 20 bp, synthetic construct
  source 1..20: mol_type = other DNA
acattgcgcctgcgtgtcac

SEQ ID NO: 12492 - DNA, 20 bp, synthetic construct
  source 1..20: mol_type = other DNA
gtcgaacacagtcggttctc

SEQ ID NO: 12493 - DNA, 20 bp, synthetic construct
  source 1..20: mol_type = other DNA
tagcccgagctgcgggttaa

SEQ ID NO: 12494 - DNA, 20 bp, synthetic construct
  source 1..20: mol_type = other DNA
gggtcctagggcatccttta

SEQ ID NO: 12495 - DNA, 20 bp, synthetic construct
  source 1..20: mol_type = other DNA
tgggcaagttgcttaagatt

SEQ ID NO: 12496 - DNA, 20 bp, synthetic construct
  source 1..20: mol_type = other DNA
tcacgggtgcaaacacttcg

SEQ ID NO: 12497 - DNA, 20 bp, synthetic construct
  source 1..20: mol_type = other DNA
ctattgtaacgtcgaggtct

SEQ ID NO: 12498 - DNA, 20 bp, synthetic construct
  source 1..20: mol_type = other DNA
gattcctgtcaaccacgtgc

SEQ ID NO: 12499 - DNA, 20 bp, synthetic construct
  source 1..20: mol_type = other DNA
aacactgcaaactatcctac

SEQ ID NO: 12500 - DNA, 20 bp, synthetic construct
  source 1..20: mol_type = other DNA
atcaattaggccctacacaa

SEQ ID NO: 12501 - DNA, 20 bp, synthetic construct
  source 1..20: mol_type = other DNA
acacgttcgttggtaactgg

SEQ ID NO: 12502 - DNA, 20 bp, synthetic construct
  source 1..20: mol_type = other DNA
gctgcggtgagtgtgcgttt

SEQ ID NO: 12503 - DNA, 20 bp, synthetic construct
  source 1..20: mol_type = other DNA
gggtaagtccatattggatc

SEQ ID NO: 12504 - DNA, 20 bp, synthetic construct
  source 1..20: mol_type = other DNA
cgtttagcggtcatgaatta

SEQ ID NO: 12505 - DNA, 20 bp, synthetic construct
  source 1..20: mol_type = other DNA
tcgccttgcgctaatacagc

SEQ ID NO: 12506 - DNA, 20 bp, synthetic construct
  source 1..20: mol_type = other DNA
caggtgtataatcgaggacg

SEQ ID NO: 12507 - DNA, 20 bp, synthetic construct
  source 1..20: mol_type = other DNA
ctttcggtgattgctagaag

SEQ ID NO: 12508 - DNA, 20 bp, synthetic construct
  source 1..20: mol_type = other DNA
ggagagctatcatcgatagt

SEQ ID NO: 12509 - DNA, 20 bp, synthetic construct
  source 1..20: mol_type = other DNA
cgtgaatcgagagagcaggt

SEQ ID NO: 12510 - DNA, 20 bp, synthetic construct
  source 1..20: mol_type = other DNA
tacaaagcacacccacagtt

SEQ ID NO: 12511 - DNA, 20 bp, synthetic construct
  source 1..20: mol_type = other DNA
ccgccgaggtcctgaacagg

SEQ ID NO: 12512 - DNA, 20 bp, synthetic construct
  source 1..20: mol_type = other DNA
tatgagaaatcgcagttacg

SEQ ID NO: 12513 - DNA, 20 bp, synthetic construct
  source 1..20: mol_type = other DNA
ggtagcaatggatcttccac

SEQ ID NO: 12514 - DNA, 20 bp, synthetic construct
  source 1..20: mol_type = other DNA
agttgtgaggtttggcgcga

SEQ ID NO: 12515 - DNA, 20 bp, synthetic construct
  source 1..20: mol_type = other DNA
ccttgtattgaatgcttcgc

SEQ ID NO: 12516 - DNA, 20 bp, synthetic construct
  source 1..20: mol_type = other DNA
tgacggcagttatatccagc

SEQ ID NO: 12517 - DNA, 20 bp, synthetic construct
  source 1..20: mol_type = other DNA
gtgcgatttgcgatgatctt

SEQ ID NO: 12518 - DNA, 20 bp, synthetic construct
  source 1..20: mol_type = other DNA
ttcattcatctattggcgga

SEQ ID NO: 12519 - DNA, 20 bp, synthetic construct
  source 1..20: mol_type = other DNA
tcctcgttaaaccgtttaag

SEQ ID NO: 12520 - DNA, 20 bp, synthetic construct
  source 1..20: mol_type = other DNA
aaagtgcgattgaaaccgat

SEQ ID NO: 12521 - DNA, 20 bp, synthetic construct
  source 1..20: mol_type = other DNA
agagggcagactattggcgc

SEQ ID NO: 12522 - DNA, 20 bp, synthetic construct
  source 1..20: mol_type = other DNA
actatggtcactaagctaga

SEQ ID NO: 12523 - DNA, 20 bp, synthetic construct
  source 1..20: mol_type = other DNA
ggccgtcccaagtgtgtaga

SEQ ID NO: 12524 - DNA, 20 bp, synthetic construct
  source 1..20: mol_type = other DNA
gatgacagttcccggtgtga

SEQ ID NO: 12525 - DNA, 20 bp, synthetic construct
  source 1..20: mol_type = other DNA
tgttggctacaaaggctctc

SEQ ID NO: 12526 - DNA, 20 bp, synthetic construct
  source 1..20: mol_type = other DNA
aagtgatgtgtcgttcccgt

SEQ ID NO: 12527 - DNA, 20 bp, synthetic construct
  source 1..20: mol_type = other DNA
aactctttgcgccgcctagc

SEQ ID NO: 12528 - DNA, 20 bp, synthetic construct
  source 1..20: mol_type = other DNA
acggacattctggcgggagt

SEQ ID NO: 12529 - DNA, 20 bp, synthetic construct
  source 1..20: mol_type = other DNA
ttcgcgctacggactctgac

SEQ ID NO: 12530 - DNA, 20 bp, synthetic construct
  source 1..20: mol_type = other DNA
ctacgagactcccagacata

SEQ ID NO: 12531 - DNA, 20 bp, synthetic construct
  source 1..20: mol_type = other DNA
tttctaggaatcattgcctg

SEQ ID NO: 12532 - DNA, 20 bp, synthetic construct
  source 1..20: mol_type = other DNA
acatttggatgggccattga

SEQ ID NO: 12533 - DNA, 20 bp, synthetic construct
  source 1..20: mol_type = other DNA
gctactcacggtaccaaatc

SEQ ID NO: 12534 - DNA, 20 bp, synthetic construct
  source 1..20: mol_type = other DNA
gactcacacacaaacatatt

SEQ ID NO: 12535 - DNA, 20 bp, synthetic construct
  source 1..20: mol_type = other DNA
ctcgtcacaggagtaacacg

SEQ ID NO: 12536 - DNA, 20 bp, synthetic construct
  source 1..20: mol_type = other DNA
ataacccgctcttagggtct

SEQ ID NO: 12537 - DNA, 20 bp, synthetic construct
  source 1..20: mol_type = other DNA
ggtctacccgagtgcctaac

SEQ ID NO: 12538 - DNA, 20 bp, synthetic construct
  source 1..20: mol_type = other DNA
cacacttacgaagaaagccc

SEQ ID NO: 12539 - DNA, 20 bp, synthetic construct
  source 1..20: mol_type = other DNA
aaacgcgatgtgtcgcttag

SEQ ID NO: 12540 - DNA, 20 bp, synthetic construct
  source 1..20: mol_type = other DNA
ctcctatccagcaaccctaa

SEQ ID NO: 12541 - DNA, 20 bp, synthetic construct
  source 1..20: mol_type = other DNA
ataatgccattgcgtttggt

SEQ ID NO: 12542 - DNA, 20 bp, synthetic construct
  source 1..20: mol_type = other DNA
gggactctacataaggacta

SEQ ID NO: 12543 - DNA, 20 bp, synthetic construct
  source 1..20: mol_type = other DNA
gcagatacataattaactgg

SEQ ID NO: 12544 - DNA, 20 bp, synthetic construct
  source 1..20: mol_type = other DNA
tcccgccgagactgatgtgg

SEQ ID NO: 12545 - DNA, 20 bp, synthetic construct
  source 1..20: mol_type = other DNA
tacgacatagccgtgaagca

SEQ ID NO: 12546 - DNA, 20 bp, synthetic construct
  source 1..20: mol_type = other DNA
tcccatttgctagctctcta

SEQ ID NO: 12547 - DNA, 20 bp, synthetic construct
  source 1..20: mol_type = other DNA
ggagctcggcgtcagatgtg

SEQ ID NO: 12548 - DNA, 20 bp, synthetic construct
  source 1..20: mol_type = other DNA
gccttgttgaatattggtca

SEQ ID NO: 12549 - DNA, 20 bp, synthetic construct
  source 1..20: mol_type = other DNA
atccgacctaggtatgtgag

SEQ ID NO: 12550 - DNA, 20 bp, synthetic construct
  source 1..20: mol_type = other DNA
tcctggtgtggctcttggct

SEQ ID NO: 12551 - DNA, 20 bp, synthetic construct
  source 1..20: mol_type = other DNA
atacttggcgaagcgaacgt

SEQ ID NO: 12552 - DNA, 20 bp, synthetic construct
  source 1..20: mol_type = other DNA
tgaccaacagccctagacta

SEQ ID NO: 12553 - DNA, 20 bp, synthetic construct
  source 1..20: mol_type = other DNA
cgatcggtttcacgtaatag

SEQ ID NO: 12554 - DNA, 20 bp, synthetic construct
  source 1..20: mol_type = other DNA
cataaggaacttggactgat

SEQ ID NO: 12555 - DNA, 20 bp, synthetic construct
  source 1..20: mol_type = other DNA
cggtttcggcttaagctata

SEQ ID NO: 12556 - DNA, 20 bp, synthetic construct
  source 1..20: mol_type = other DNA
taccgcactaattcaagtcc

SEQ ID NO: 12557 - DNA, 20 bp, synthetic construct
  source 1..20: mol_type = other DNA
gcccaaccgtcattcataga

SEQ ID NO: 12558 - DNA, 20 bp, synthetic construct
  source 1..20: mol_type = other DNA
gatctatcaccttgagataa

SEQ ID NO: 12559 - DNA, 20 bp, synthetic construct
  source 1..20: mol_type = other DNA
ccaaactaatctggcgcatc

SEQ ID NO: 12560 - DNA, 20 bp, synthetic construct
  source 1..20: mol_type = other DNA
attcctgtaagcgcgaatta

SEQ ID NO: 12561 - DNA, 20 bp, synthetic construct
  source 1..20: mol_type = other DNA
tcactgctactactgcaact

SEQ ID NO: 12562 - DNA, 20 bp, synthetic construct
  source 1..20: mol_type = other DNA
cgctacgcgatgatcagggt

SEQ ID NO: 12563 - DNA, 20 bp, synthetic construct
  source 1..20: mol_type = other DNA
gcaatcagaccgtagttgcg

SEQ ID NO: 12564 - DNA, 20 bp, synthetic construct
  source 1..20: mol_type = other DNA
gaatgtagttcattgacaca

SEQ ID NO: 12565 - DNA, 20 bp, synthetic construct
  source 1..20: mol_type = other DNA
gttcattcgcgggtcattat

SEQ ID NO: 12566 - DNA, 20 bp, synthetic construct
  source 1..20: mol_type = other DNA
catgctagtaaacttaatgc

SEQ ID NO: 12567 - DNA, 20 bp, synthetic construct
  source 1..20: mol_type = other DNA
tacgggatgccgcttgccgt

SEQ ID NO: 12568 - DNA, 20 bp, synthetic construct
  source 1..20: mol_type = other DNA
tgaacacgggaacacgcttt

SEQ ID NO: 12569 - DNA, 20 bp, synthetic construct
  source 1..20: mol_type = other DNA
attgatccttaaactccagg

SEQ ID NO: 12570 - DNA, 20 bp, synthetic construct
  source 1..20: mol_type = other DNA
gttgggtggccttcataggc

SEQ ID NO: 12571 - DNA, 20 bp, synthetic construct
  source 1..20: mol_type = other DNA
tatggtgtaacagtttaggc

SEQ ID NO: 12572 - DNA, 20 bp, synthetic construct
  source 1..20: mol_type = other DNA
acccagcaagaataggactc

SEQ ID NO: 12573 - DNA, 20 bp, synthetic construct
  source 1..20: mol_type = other DNA
gtacagaatcttcacaccga

SEQ ID NO: 12574 - DNA, 20 bp, synthetic construct
  source 1..20: mol_type = other DNA
atgagaagcagggcactctc

SEQ ID NO: 12575 - DNA, 20 bp, synthetic construct
  source 1..20: mol_type = other DNA
tgtgttcaaatccgcgtcgg

SEQ ID NO: 12576 - DNA, 20 bp, synthetic construct
  source 1..20: mol_type = other DNA
ccgatagtcgcagccacttt

SEQ ID NO: 12577 - DNA, 20 bp, synthetic construct
  source 1..20: mol_type = other DNA
ccgagtccgccgaaagagta

SEQ ID NO: 12578 - DNA, 20 bp, synthetic construct
  source 1..20: mol_type = other DNA
taagacatgagccggaatag

SEQ ID NO: 12579 - DNA, 20 bp, synthetic construct
  source 1..20: mol_type = other DNA
tgttcgagggaatcaacgaa

SEQ ID NO: 12580 - DNA, 20 bp, synthetic construct
  source 1..20: mol_type = other DNA
actccgcccggctaatactg

SEQ ID NO: 12581 - DNA, 20 bp, synthetic construct
  source 1..20: mol_type = other DNA
aaacgctcaggcggtgcaac

SEQ ID NO: 12582 - DNA, 20 bp, synthetic construct
  source 1..20: mol_type = other DNA
agttgtgatgatctaagcgg

SEQ ID NO: 12583 - DNA, 20 bp, synthetic construct
  source 1..20: mol_type = other DNA
gcttgcttaggttacggaac

SEQ ID NO: 12584 - DNA, 20 bp, synthetic construct
  source 1..20: mol_type = other DNA
tctgaacggatccatggtca

SEQ ID NO: 12585 - DNA, 20 bp, synthetic construct
  source 1..20: mol_type = other DNA
tttcttgtgccactcgataa

SEQ ID NO: 12586 - DNA, 20 bp, synthetic construct
  source 1..20: mol_type = other DNA
taacagccgacacagacgac

SEQ ID NO: 12587 - DNA, 20 bp, synthetic construct
  source 1..20: mol_type = other DNA
ttgtcggcaagcaacctcac

SEQ ID NO: 12588 - DNA, 20 bp, synthetic construct
  source 1..20: mol_type = other DNA
agaatatactgagtcctaac

SEQ ID NO: 12589 - DNA, 20 bp, synthetic construct
  source 1..20: mol_type = other DNA
tggcggaggaaagaaaggag

SEQ ID NO: 12590 - DNA, 20 bp, synthetic construct
  source 1..20: mol_type = other DNA
agtggagcgttcatatgagg

SEQ ID NO: 12591 - DNA, 20 bp, synthetic construct
  source 1..20: mol_type = other DNA
taagcatgtttcgaaggtga

SEQ ID NO: 12592 - DNA, 20 bp, synthetic construct
  source 1..20: mol_type = other DNA
cggacgtatgaaagtaagtt

SEQ ID NO: 12593 - DNA, 20 bp, synthetic construct
  source 1..20: mol_type = other DNA
cccgtggaggatgtttcaac

SEQ ID NO: 12594 - DNA, 20 bp, synthetic construct
  source 1..20: mol_type = other DNA
ttcatacaatggcctcccgg

SEQ ID NO: 12595 - DNA, 20 bp, synthetic construct
  source 1..20: mol_type = other DNA
ctcactcaggtcccgtgata

SEQ ID NO: 12596 - DNA, 20 bp, synthetic construct
  source 1..20: mol_type = other DNA
gcagatcacaatcgaccaga

SEQ ID NO: 12597 - DNA, 20 bp, synthetic construct
  source 1..20: mol_type = other DNA
atcggtaagcgaccggtcgt

SEQ ID NO: 12598 - DNA, 20 bp, synthetic construct
  source 1..20: mol_type = other DNA
cattagtcatggtgctgggc

SEQ ID NO: 12599 - DNA, 20 bp, synthetic construct
  source 1..20: mol_type = other DNA
atgtcgagaacagtgagtac

SEQ ID NO: 12600 - DNA, 20 bp, synthetic construct
  source 1..20: mol_type = other DNA
tgataggtgctcggcataag

SEQ ID NO: 12601 - DNA, 20 bp, synthetic construct
  source 1..20: mol_type = other DNA
cccaatgttacgcaatgaaa

SEQ ID NO: 12602 - DNA, 20 bp, synthetic construct
  source 1..20: mol_type = other DNA
gtagtgtctccattctagca

SEQ ID NO: 12603 - DNA, 20 bp, synthetic construct
  source 1..20: mol_type = other DNA
ggtcctcaacgacttacgtg

SEQ ID NO: 12604 - DNA, 20 bp, synthetic construct
  source 1..20: mol_type = other DNA
ggagatatagaggacctctg

SEQ ID NO: 12605 - DNA, 20 bp, synthetic construct
  source 1..20: mol_type = other DNA
cagcttcattagtggagaca

SEQ ID NO: 12606 - DNA, 20 bp, synthetic construct
  source 1..20: mol_type = other DNA
gagctgtgcgatcaacgaag

SEQ ID NO: 12607 - DNA, 20 bp, synthetic construct
  source 1..20: mol_type = other DNA
agattgtacgtaattaggct

SEQ ID NO: 12608 - DNA, 20 bp, synthetic construct
  source 1..20: mol_type = other DNA
cagatttaattcagttactg

SEQ ID NO: 12609 - DNA, 20 bp, synthetic construct
  source 1..20: mol_type = other DNA
cacaccagcttgcgtcatca

SEQ ID NO: 12610 - DNA, 20 bp, synthetic construct
  source 1..20: mol_type = other DNA
gtttatcgttagccacgtat

SEQ ID NO: 12611 - DNA, 20 bp, synthetic construct
  source 1..20: mol_type = other DNA
ctgcctagttccgagacact

SEQ ID NO: 12612 - DNA, 20 bp, synthetic construct
  source 1..20: mol_type = other DNA
tactgacaacccggcctagc

SEQ ID NO: 12613 - DNA, 20 bp, synthetic construct
  source 1..20: mol_type = other DNA
tcgcttggctactgactatc

SEQ ID NO: 12614 - DNA, 20 bp, synthetic construct
  source 1..20: mol_type = other DNA
ttgtgtcataatcgcagtca

SEQ ID NO: 12615 - DNA, 20 bp, synthetic construct
  source 1..20: mol_type = other DNA
cgacatacttcacgtgatat

SEQ ID NO: 12616 - DNA, 20 bp, synthetic construct
  source 1..20: mol_type = other DNA
tccggacagtgtcaccgtcc

SEQ ID NO: 12617 - DNA, 20 bp, synthetic construct
  source 1..20: mol_type = other DNA
agacgtttgactgggactcg

SEQ ID NO: 12618 - DNA, 20 bp, synthetic construct
  source 1..20: mol_type = other DNA
ataggtttcctaccggcctg

SEQ ID NO: 12619 - DNA, 20 bp, synthetic construct
  source 1..20: mol_type = other DNA
accacgactaaaccagtatc

SEQ ID NO: 12620 - DNA, 20 bp, synthetic construct
  source 1..20: mol_type = other DNA
cccagagcgtatgaactgtc

SEQ ID NO: 12621 - DNA, 20 bp, synthetic construct
  source 1..20: mol_type = other DNA
tggaatttcgcgacctacac

SEQ ID NO: 12622 - DNA, 20 bp, synthetic construct
  source 1..20: mol_type = other DNA
ccatgtatcatgatgtcagc

SEQ ID NO: 12623 - DNA, 20 bp, synthetic construct
  source 1..20: mol_type = other DNA
tagagatacctggtacgcac

SEQ ID NO: 12624 - DNA, 20 bp, synthetic construct
  source 1..20: mol_type = other DNA
cgagtcctgaggtagactag

SEQ ID NO: 12625 - DNA, 20 bp, synthetic construct
  source 1..20: mol_type = other DNA
atatagacatcggccgagtc

SEQ ID NO: 12626 - DNA, 20 bp, synthetic construct
  source 1..20: mol_type = other DNA
ctttgcggcggaacagtaaa

SEQ ID NO: 12627 - DNA, 20 bp, synthetic construct
  source 1..20: mol_type = other DNA
cttaagcatctacatcacgg

SEQ ID NO: 12628 - DNA, 20 bp, synthetic construct
  source 1..20: mol_type = other DNA
acgtggtaagttattggctt

SEQ ID NO: 12629 - DNA, 20 bp, synthetic construct
  source 1..20: mol_type = other DNA
gagaaaggaagtatgagaaa

SEQ ID NO: 12630 - DNA, 20 bp, synthetic construct
  source 1..20: mol_type = other DNA
ttcgcctcttgtatcccgct

SEQ ID NO: 12631 - DNA, 20 bp, synthetic construct
  source 1..20: mol_type = other DNA
tattgtgtgtgattgcagta

SEQ ID NO: 12632 - DNA, 20 bp, synthetic construct
  source 1..20: mol_type = other DNA
acactcactagggattcagg

SEQ ID NO: 12633 - DNA, 20 bp, synthetic construct
  source 1..20: mol_type = other DNA
accctataatagtgaccttg

SEQ ID NO: 12634 - DNA, 20 bp, synthetic construct
  source 1..20: mol_type = other DNA
taatattgatagccggcacg

SEQ ID NO: 12635 - DNA, 20 bp, synthetic construct
  source 1..20: mol_type = other DNA
agatcttctgtcggcagcaa

SEQ ID NO: 12636 - DNA, 20 bp, synthetic construct
  source 1..20: mol_type = other DNA
ctactctcgtaggaaatggg

SEQ ID NO: 12637 - DNA, 20 bp, synthetic construct
  source 1..20: mol_type = other DNA
actatacccagttcaagaag

SEQ ID NO: 12638 - DNA, 20 bp, synthetic construct
  source 1..20: mol_type = other DNA
ctatatacaagtacggcata

SEQ ID NO: 12639 - DNA, 20 bp, synthetic construct
  source 1..20: mol_type = other DNA
ggtagcggagatagcacgcg

SEQ ID NO: 12640 - DNA, 20 bp, synthetic construct
  source 1..20: mol_type = other DNA
ataatcaccgttcgtcgaag

SEQ ID NO: 12641 - DNA, 20 bp, synthetic construct
  source 1..20: mol_type = other DNA
ttataagcaggttagtcgcg

SEQ ID NO: 12642 - DNA, 20 bp, synthetic construct
  source 1..20: mol_type = other DNA
gcgatgtacgttgtcttgcc

SEQ ID NO: 12643 - DNA, 20 bp, synthetic construct
  source 1..20: mol_type = other DNA
gttaaggcatatgccagaac

SEQ ID NO: 12644 - DNA, 20 bp, synthetic construct
  source 1..20: mol_type = other DNA
tggacagaggcatcgccggc

SEQ ID NO: 12645 - DNA, 20 bp, synthetic construct
  source 1..20: mol_type = other DNA
taggcgcattaacatctacg

SEQ ID NO: 12646 - DNA, 20 bp, synthetic construct
  source 1..20: mol_type = other DNA
gtctcaatgcaccaagtaga

SEQ ID NO: 12647 - DNA, 20 bp, synthetic construct
  source 1..20: mol_type = other DNA
tcgcccaaggacaatcggtt

SEQ ID NO: 12648 - DNA, 20 bp, synthetic construct
  source 1..20: mol_type = other DNA
cttcttcctgagcccggact

SEQ ID NO: 12649 - DNA, 20 bp, synthetic construct
  source 1..20: mol_type = other DNA
atgtgggatgtagccactca

SEQ ID NO: 12650 - DNA, 20 bp, synthetic construct
  source 1..20: mol_type = other DNA
cggcgtaatacatcacctat

SEQ ID NO: 12651 - DNA, 20 bp, synthetic construct
  source 1..20: mol_type = other DNA
atatcgcatgagatcgacac

SEQ ID NO: 12652 - DNA, 20 bp, synthetic construct
  source 1..20: mol_type = other DNA
tggccgcaccgtaccgtgaa

SEQ ID NO: 12653 - DNA, 20 bp, synthetic construct
  source 1..20: mol_type = other DNA
tttctgcactatatctgatg

SEQ ID NO: 12654 - DNA, 20 bp, synthetic construct
  source 1..20: mol_type = other DNA
tataacagaaggtggcaaat

SEQ ID NO: 12655 - DNA, 20 bp, synthetic construct
  source 1..20: mol_type = other DNA
gatccgaccatatcacttgt

SEQ ID NO: 12656 - DNA, 20 bp, synthetic construct
  source 1..20: mol_type = other DNA
aaggtctgaccacacaagtt

SEQ ID NO: 12657 - DNA, 20 bp, synthetic construct
  source 1..20: mol_type = other DNA
tctactgtggtggccagagc

SEQ ID NO: 12658 - DNA, 20 bp, synthetic construct
  source 1..20: mol_type = other DNA
tacgttaccggctagattgc

SEQ ID NO: 12659 - DNA, 20 bp, synthetic construct
  source 1..20: mol_type = other DNA
gcttattagttcttactgtc

SEQ ID NO: 12660 - DNA, 20 bp, synthetic construct
  source 1..20: mol_type = other DNA
ggatggtaaacagttaccgc

SEQ ID NO: 12661 - DNA, 20 bp, synthetic construct
  source 1..20: mol_type = other DNA
ttcttcgctacgtagccaag

SEQ ID NO: 12662 - DNA, 20 bp, synthetic construct
  source 1..20: mol_type = other DNA
cttgcttcggtgagtgtagc

SEQ ID NO: 12663 - DNA, 20 bp, synthetic construct
  source 1..20: mol_type = other DNA
gtaagtcagccgagccctgg

SEQ ID NO: 12664 - DNA, 20 bp, synthetic construct
  source 1..20: mol_type = other DNA
ttgtgccgtgggcctagtta

SEQ ID NO: 12665 - DNA, 20 bp, synthetic construct
  source 1..20: mol_type = other DNA
tggtgtaatgctaagtcgca

SEQ ID NO: 12666 - DNA, 20 bp, synthetic construct
  source 1..20: mol_type = other DNA
gctgatcttcgtgccgcatc

SEQ ID NO: 12667 - DNA, 20 bp, synthetic construct
  source 1..20: mol_type = other DNA
tatgctaagggtgtaagggt

SEQ ID NO: 12668 - DNA, 20 bp, synthetic construct
  source 1..20: mol_type = other DNA
tgtcgaaatactgttcaagg

SEQ ID NO: 12669 - DNA, 20 bp, synthetic construct
  source 1..20: mol_type = other DNA
atgagacccgcaccgctgcg

SEQ ID NO: 12670 - DNA, 20 bp, synthetic construct
  source 1..20: mol_type = other DNA
tcagcggagttaaagctgtt

SEQ ID NO: 12671 - DNA, 20 bp, synthetic construct
  source 1..20: mol_type = other DNA
agtgacccggtgctagttac

SEQ ID NO: 12672 - DNA, 20 bp, synthetic construct
  source 1..20: mol_type = other DNA
taaggtgcccgcaaatgtac

SEQ ID NO: 12673 - DNA, 20 bp, synthetic construct
  source 1..20: mol_type = other DNA
cgtcgctaattggaactaca

SEQ ID NO: 12674 - DNA, 20 bp, synthetic construct
  source 1..20: mol_type = other DNA
gtgcataatctaattctagg

SEQ ID NO: 12675 - DNA, 20 bp, synthetic construct
  source 1..20: mol_type = other DNA
acctaattcgtaaccacaaa

SEQ ID NO: 12676 - DNA, 20 bp, synthetic construct
  source 1..20: mol_type = other DNA
gacccatcgtcctgcattct

SEQ ID NO: 12677 - DNA, 20 bp, synthetic construct
  source 1..20: mol_type = other DNA
aacaggaccatccaatgatc

SEQ ID NO: 12678 - DNA, 20 bp, synthetic construct
  source 1..20: mol_type = other DNA
caagtctgacagacaataca

SEQ ID NO: 12679 - DNA, 20 bp, synthetic construct
  source 1..20: mol_type = other DNA
tctccgtgggacgagggcat

SEQ ID NO: 12680 - DNA, 20 bp, synthetic construct
  source 1..20: mol_type = other DNA
agcttactataggtcattgg

SEQ ID NO: 12681 - DNA, 20 bp, synthetic construct
  source 1..20: mol_type = other DNA
gcgattataaagtgacctgg

SEQ ID NO: 12682 - DNA, 20 bp, synthetic construct
  source 1..20: mol_type = other DNA
tgatttagggctggacgcat

SEQ ID NO: 12683 - DNA, 20 bp, synthetic construct
  source 1..20: mol_type = other DNA
cagcacatatattaacggga

SEQ ID NO: 12684 - DNA, 20 bp, synthetic construct
  source 1..20: mol_type = other DNA
ttcccggtatgctcggtgca

SEQ ID NO: 12685 - DNA, 20 bp, synthetic construct
  source 1..20: mol_type = other DNA
caccgtctaacctgtgtagg

SEQ ID NO: 12686 - DNA, 20 bp, synthetic construct
  source 1..20: mol_type = other DNA
gtgagtcaatagcattacta

SEQ ID NO: 12687 - DNA, 20 bp, synthetic construct
  source 1..20: mol_type = other DNA
atttatgagcgcggcaagat

SEQ ID NO: 12688 - DNA, 20 bp, synthetic construct
  source 1..20: mol_type = other DNA
aaagcacagcgttaactgac

SEQ ID NO: 12689 - DNA, 20 bp, synthetic construct
  source 1..20: mol_type = other DNA
caccgcggttacataggtcc

SEQ ID NO: 12690 - DNA, 20 bp, synthetic construct
  source 1..20: mol_type = other DNA
ggatgcggctaagctaacca

SEQ ID NO: 12691 - DNA, 20 bp, synthetic construct
  source 1..20: mol_type = other DNA
tcgtacacggcgttgcagtc

SEQ ID NO: 12692 - DNA, 20 bp, synthetic construct
  source 1..20: mol_type = other DNA
gtgaatacaagggcgggata

SEQ ID NO: 12693 - DNA, 20 bp, synthetic construct
  source 1..20: mol_type = other DNA
agatggcaatacctacgtgt

SEQ ID NO: 12694 - DNA, 20 bp, synthetic construct
  source 1..20: mol_type = other DNA
cgttgctgctcagagttgag

SEQ ID NO: 12695 - DNA, 20 bp, synthetic construct
  source 1..20: mol_type = other DNA
cttggagttgtatgcctact

SEQ ID NO: 12696 - DNA, 20 bp, synthetic construct
  source 1..20: mol_type = other DNA
cttaaccacgaaagatgtat

SEQ ID NO: 12697 - DNA, 20 bp, synthetic construct
  source 1..20: mol_type = other DNA
tccgcacagctattccctca

SEQ ID NO: 12698 - DNA, 20 bp, synthetic construct
  source 1..20: mol_type = other DNA
gctcgcgatgtctgacttct

SEQ ID NO: 12699 - DNA, 20 bp, synthetic construct
  source 1..20: mol_type = other DNA
aataaagctctgttggctgt

SEQ ID NO: 12700 - DNA, 20 bp, synthetic construct
  source 1..20: mol_type = other DNA
acctccactgcgacgtatgg

SEQ ID NO: 12701 - DNA, 20 bp, synthetic construct
  source 1..20: mol_type = other DNA
gaccggtataggagcaggtt

SEQ ID NO: 12702 - DNA, 20 bp, synthetic construct
  source 1..20: mol_type = other DNA
cggagcattctctttgctgt

SEQ ID NO: 12703 - DNA, 20 bp, synthetic construct
  source 1..20: mol_type = other DNA
gaggagcgaatcgaaatgtg

SEQ ID NO: 12704 - DNA, 20 bp, synthetic construct
  source 1..20: mol_type = other DNA
acggtagtttagaacgagtg

SEQ ID NO: 12705 - DNA, 20 bp, synthetic construct
  source 1..20: mol_type = other DNA
atgctcacccgctacaatgc

SEQ ID NO: 12706 - DNA, 20 bp, synthetic construct
  source 1..20: mol_type = other DNA
tcgtggactgtatactagat

SEQ ID NO: 12707 - DNA, 20 bp, synthetic construct
  source 1..20: mol_type = other DNA
acatcgcctattgacgcgaa

SEQ ID NO: 12708 - DNA, 20 bp, synthetic construct
  source 1..20: mol_type = other DNA
tgtgcgtggccgttaacaag

SEQ ID NO: 12709 - DNA, 20 bp, synthetic construct
  source 1..20: mol_type = other DNA
ggactgacgaaatagctggg

SEQ ID NO: 12710 - DNA, 20 bp, synthetic construct
  source 1..20: mol_type = other DNA
gccagtagcaggatagccgt

SEQ ID NO: 12711 - DNA, 20 bp, synthetic construct
  source 1..20: mol_type = other DNA
tcgcagtccgaacctcacac

SEQ ID NO: 12712 - DNA, 20 bp, synthetic construct
  source 1..20: mol_type = other DNA
ttgattcatgcaaagagaca

SEQ ID NO: 12713 - DNA, 20 bp, synthetic construct
  source 1..20: mol_type = other DNA
aatgtcgccacaatgcgttt

SEQ ID NO: 12714 - DNA, 20 bp, synthetic construct
  source 1..20: mol_type = other DNA
cttgggttgcgctttagtga

SEQ ID NO: 12715 - DNA, 20 bp, synthetic construct
  source 1..20: mol_type = other DNA
ccagagagttcctccgcacg

SEQ ID NO: 12716 - DNA, 20 bp, synthetic construct
  source 1..20: mol_type = other DNA
caatgagtcagacgttgagg

SEQ ID NO: 12717 - DNA, 20 bp, synthetic construct
  source 1..20: mol_type = other DNA
tatcattccgagcgtcccgg

SEQ ID NO: 12718 - DNA, 20 bp, synthetic construct
  source 1..20: mol_type = other DNA
aggcgggtctgtgccgtaaa

SEQ ID NO: 12719 - DNA, 20 bp, synthetic construct
  source 1..20: mol_type = other DNA
ccgcgagatgctcggtctaa

SEQ ID NO: 12720 - DNA, 20 bp, synthetic construct
  source 1..20: mol_type = other DNA
aaatagtaggtgaggaccgc

SEQ ID NO: 12721 - DNA, 20 bp, synthetic construct
  source 1..20: mol_type = other DNA
cttgttgagctgagaagtcg

SEQ ID NO: 12722 - DNA, 20 bp, synthetic construct
  source 1..20: mol_type = other DNA
ctcccgctagcgtatgttta

SEQ ID NO: 12723 - DNA, 20 bp, synthetic construct
  source 1..20: mol_type = other DNA
gagagcgataattcaatgtg

SEQ ID NO: 12724 - DNA, 20 bp, synthetic construct
  source 1..20: mol_type = other DNA
attagcacgtactgttcatg

SEQ ID NO: 12725 - DNA, 20 bp, synthetic construct
  source 1..20: mol_type = other DNA
gaacgtacgtgggtcgtgta

SEQ ID NO: 12726 - DNA, 20 bp, synthetic construct
  source 1..20: mol_type = other DNA
gttcactatgttggcggtca

SEQ ID NO: 12727 - DNA, 20 bp, synthetic construct
  source 1..20: mol_type = other DNA
ggagtgtatcccacgaggac

SEQ ID NO: 12728 - DNA, 20 bp, synthetic construct
  source 1..20: mol_type = other DNA
ctaagtgaaagtgcaggtag

SEQ ID NO: 12729 - DNA, 20 bp, synthetic construct
  source 1..20: mol_type = other DNA
acggagccgccggagtctct

SEQ ID NO: 12730 - DNA, 20 bp, synthetic construct
  source 1..20: mol_type = other DNA
gtgatttagccgtctgctac

SEQ ID NO: 12731 - DNA, 20 bp, synthetic construct
  source 1..20: mol_type = other DNA
ctcgtaaccggactcaggag

SEQ ID NO: 12732 - DNA, 20 bp, synthetic construct
  source 1..20: mol_type = other DNA
gtaactgcttgagtagtatc

SEQ ID NO: 12733 - DNA, 20 bp, synthetic construct
  source 1..20: mol_type = other DNA
tcgcctatataagctgaaac

SEQ ID NO: 12734 - DNA, 20 bp, synthetic construct
  source 1..20: mol_type = other DNA
tctgacgctgcgagacaggg

SEQ ID NO: 12735 - DNA, 20 bp, synthetic construct
  source 1..20: mol_type = other DNA
ctattgggcaagtaattcat

SEQ ID NO: 12736 - DNA, 20 bp, synthetic construct
  source 1..20: mol_type = other DNA
cacacttagggtcggtgtga

SEQ ID NO: 12737 - DNA, 20 bp, synthetic construct
  source 1..20: mol_type = other DNA
caagacaaggacaatcccgg

SEQ ID NO: 12738 - DNA, 20 bp, synthetic construct
  source 1..20: mol_type = other DNA
agcgttgacggtccctcacc

SEQ ID NO: 12739 - DNA, 20 bp, synthetic construct
  source 1..20: mol_type = other DNA
agcagaactttcgagcattg

SEQ ID NO: 12740 - DNA, 20 bp, synthetic construct
  source 1..20: mol_type = other DNA
attgtctgggtagtcgaacg

SEQ ID NO: 12741 - DNA, 20 bp, synthetic construct
  source 1..20: mol_type = other DNA
cagttccgccaatgtgccgg

SEQ ID NO: 12742 - DNA, 20 bp, synthetic construct
  source 1..20: mol_type = other DNA
ttccgagttaaaccaggcaa

SEQ ID NO: 12743 - DNA, 20 bp, synthetic construct
  source 1..20: mol_type = other DNA
gagggaaaccattgtgggag

SEQ ID NO: 12744 - DNA, 20 bp, synthetic construct
  source 1..20: mol_type = other DNA
gtatgcctactgtccaggag

SEQ ID NO: 12745 - DNA, 20 bp, synthetic construct
  source 1..20: mol_type = other DNA
gcagtattcaagccggttta

SEQ ID NO: 12746 - DNA, 20 bp, synthetic construct
  source 1..20: mol_type = other DNA
tgcatgaagggttcataagc

SEQ ID NO: 12747 - DNA, 20 bp, synthetic construct
  source 1..20: mol_type = other DNA
gctcttgtgtaagttagact

SEQ ID NO: 12748 - DNA, 20 bp, synthetic construct
  source 1..20: mol_type = other DNA
tatggtgcccgcattgaggt

SEQ ID NO: 12749 - DNA, 20 bp, synthetic construct
  source 1..20: mol_type = other DNA
cagccgaaggaaggcagata

SEQ ID NO: 12750 - DNA, 20 bp, synthetic construct
  source 1..20: mol_type = other DNA
attgcttcattgttgcgacg

SEQ ID NO: 12751 - DNA, 20 bp, synthetic construct
  source 1..20: mol_type = other DNA
taggtagagctttatgacct

SEQ ID NO: 12752 - DNA, 20 bp, synthetic construct
  source 1..20: mol_type = other DNA
gatacgcaaccatcctcaca

SEQ ID NO: 12753 - DNA, 20 bp, synthetic construct
  source 1..20: mol_type = other DNA
ctttgactgcacagccaatg

SEQ ID NO: 12754 - DNA, 20 bp, synthetic construct
  source 1..20: mol_type = other DNA
taggatttgcgtgaaggctt

SEQ ID NO: 12755 - DNA, 20 bp, synthetic construct
  source 1..20: mol_type = other DNA
aggactcgttcttacgtcat

SEQ ID NO: 12756 - DNA, 20 bp, synthetic construct
  source 1..20: mol_type = other DNA
cgcccgttatggtcgtacgt

SEQ ID NO: 12757 - DNA, 20 bp, synthetic construct
  source 1..20: mol_type = other DNA
agccacgattcaattcaggg

SEQ ID NO: 12758 - DNA, 20 bp, synthetic construct
  source 1..20: mol_type = other DNA
ggatccttccattattctta

SEQ ID NO: 12759 - DNA, 20 bp, synthetic construct
  source 1..20: mol_type = other DNA
tacgctgaggctgaatttcg

SEQ ID NO: 12760 - DNA, 20 bp, synthetic construct
  source 1..20: mol_type = other DNA
taatccaagattcggtactc

SEQ ID NO: 12761 - DNA, 20 bp, synthetic construct
  source 1..20: mol_type = other DNA
tatctacgacctataacacc

SEQ ID NO: 12762 - DNA, 20 bp, synthetic construct
  source 1..20: mol_type = other DNA
ccactgtgctgacaactaac

SEQ ID NO: 12763 - DNA, 20 bp, synthetic construct
  source 1..20: mol_type = other DNA
cttccgatcgtgcgcaatgc

SEQ ID NO: 12764 - DNA, 20 bp, synthetic construct
  source 1..20: mol_type = other DNA
tcacctggcaaactccttct

SEQ ID NO: 12765 - DNA, 20 bp, synthetic construct
  source 1..20: mol_type = other DNA
agcttccctatgtgatagtt

SEQ ID NO: 12766 - DNA, 20 bp, synthetic construct
  source 1..20: mol_type = other DNA
gaacgtaatgaatatagtcg

SEQ ID NO: 12767 - DNA, 20 bp, synthetic construct
  source 1..20: mol_type = other DNA
gaagtaattgattagtctag

SEQ ID NO: 12768 - DNA, 20 bp, synthetic construct
  source 1..20: mol_type = other DNA
cctggctttaatgtccaaga

SEQ ID NO: 12769 - DNA, 20 bp, synthetic construct
  source 1..20: mol_type = other DNA
cgcggcaatatggcgtctcg

SEQ ID NO: 12770 - DNA, 20 bp, synthetic construct
  source 1..20: mol_type = other DNA
gtgaggcagcaagtgcagcg

SEQ ID NO: 12771 - DNA, 20 bp, synthetic construct
  source 1..20: mol_type = other DNA
actacgatttgtgcgtccac

SEQ ID NO: 12772 - DNA, 20 bp, synthetic construct
  source 1..20: mol_type = other DNA
ttattaggtagtgcggtaac

SEQ ID NO: 12773 - DNA, 20 bp, synthetic construct
  source 1..20: mol_type = other DNA
tgcacgatcaactgtcattc

SEQ ID NO: 12774 - DNA, 20 bp, synthetic construct
  source 1..20: mol_type = other DNA
gggtcgcctagatcctcgct

SEQ ID NO: 12775 - DNA, 20 bp, synthetic construct
  source 1..20: mol_type = other DNA
ctgttggtttctatactggc

SEQ ID NO: 12776 - DNA, 20 bp, synthetic construct
  source 1..20: mol_type = other DNA
cttcattacagggcgatctt

SEQ ID NO: 12777 - DNA, 20 bp, synthetic construct
  source 1..20: mol_type = other DNA
atggagtagaaacctgctga

SEQ ID NO: 12778 - DNA, 20 bp, synthetic construct
  source 1..20: mol_type = other DNA
ctgaagcgcattcgctacat

SEQ ID NO: 12779 - DNA, 20 bp, synthetic construct
  source 1..20: mol_type = other DNA
ccgaatctttacgcaacccg

SEQ ID NO: 12780 - DNA, 20 bp, synthetic construct
  source 1..20: mol_type = other DNA
acatccatgggcaaactgga

SEQ ID NO: 12781 - DNA, 20 bp, synthetic construct
  source 1..20: mol_type = other DNA
aggccgtaacaggtaactgc

SEQ ID NO: 12782 - DNA, 20 bp, synthetic construct
  source 1..20: mol_type = other DNA
tgaagaatagacgtgtcaag

SEQ ID NO: 12783 - DNA, 20 bp, synthetic construct
  source 1..20: mol_type = other DNA
ccaaggattcttctgagatt

SEQ ID NO: 12784 - DNA, 20 bp, synthetic construct
  source 1..20: mol_type = other DNA
agctaagggcccattcaact

SEQ ID NO: 12785 - DNA, 20 bp, synthetic construct
  source 1..20: mol_type = other DNA
ctctcatctcacatcgggct

SEQ ID NO: 12786 - DNA, 20 bp, synthetic construct
  source 1..20: mol_type = other DNA
gggatggcgttaatatatct

SEQ ID NO: 12787 - DNA, 20 bp, synthetic construct
  source 1..20: mol_type = other DNA
ttcgtccgctcagacgttga

SEQ ID NO: 12788 - DNA, 20 bp, synthetic construct
  source 1..20: mol_type = other DNA
gtaccttcaaagtaatcgcc

SEQ ID NO: 12789 - DNA, 20 bp, synthetic construct
  source 1..20: mol_type = other DNA
cctgcatcaggtactgccct

SEQ ID NO: 12790 - DNA, 20 bp, synthetic construct
  source 1..20: mol_type = other DNA
cgaagtgtcgccgtagggtt

SEQ ID NO: 12791 - DNA, 20 bp, synthetic construct
  source 1..20: mol_type = other DNA
tctaggtatatctccatgat

SEQ ID NO: 12792 - DNA, 20 bp, synthetic construct
  source 1..20: mol_type = other DNA
gcaagccggacacgcacaaa

SEQ ID NO: 12793 - DNA, 20 bp, synthetic construct
  source 1..20: mol_type = other DNA
tgttcccgctttcatgttat

SEQ ID NO: 12794 - DNA, 20 bp, synthetic construct
  source 1..20: mol_type = other DNA
catacgagctccgcctgcta

SEQ ID NO: 12795 - DNA, 20 bp, synthetic construct
  source 1..20: mol_type = other DNA
agcgggtggaaaccgaatag

SEQ ID NO: 12796 - DNA, 20 bp, synthetic construct
  source 1..20: mol_type = other DNA
acgcattccatgaaatatca

SEQ ID NO: 12797 - DNA, 20 bp, synthetic construct
  source 1..20: mol_type = other DNA
tgcccactcgtctgagagag

SEQ ID NO: 12798 - DNA, 20 bp, synthetic construct
  source 1..20: mol_type = other DNA
cagaacttgtgtcgtggata

SEQ ID NO: 12799 - DNA, 20 bp, synthetic construct
  source 1..20: mol_type = other DNA
gggagggcgcgatcctttag

SEQ ID NO: 12800 - DNA, 20 bp, synthetic construct
  source 1..20: mol_type = other DNA
tcgtacgattggtgtaaact

SEQ ID NO: 12801 - DNA, 20 bp, synthetic construct
  source 1..20: mol_type = other DNA
tgaaagataagctaccttgc

SEQ ID NO: 12802 - DNA, 20 bp, synthetic construct
  source 1..20: mol_type = other DNA
caaacgccctttcgtaagtg

SEQ ID NO: 12803 - DNA, 20 bp, synthetic construct
  source 1..20: mol_type = other DNA
ggaaacgcgaatgcagattc

SEQ ID NO: 12804 - DNA, 20 bp, synthetic construct
  source 1..20: mol_type = other DNA
ttaccgagaatatcgtttac

SEQ ID NO: 12805 - DNA, 20 bp, synthetic construct
  source 1..20: mol_type = other DNA
taaaggcccggaatggattg

SEQ ID NO: 12806 - DNA, 20 bp, synthetic construct
  source 1..20: mol_type = other DNA
tcggcgctcggtgattgatt

SEQ ID NO: 12807 - DNA, 20 bp, synthetic construct
  source 1..20: mol_type = other DNA
ctgaggatagcgctgccgaa

SEQ ID NO: 12808 - DNA, 20 bp, synthetic construct
  source 1..20: mol_type = other DNA
agcccatcattgctctacca

SEQ ID NO: 12809 - DNA, 20 bp, synthetic construct
  source 1..20: mol_type = other DNA
gacgtgatacaatctttgtt

SEQ ID NO: 12810 - DNA, 20 bp, synthetic construct
  source 1..20: mol_type = other DNA
gcgggttcctcagagagccc

SEQ ID NO: 12811 - DNA, 20 bp, synthetic construct
  source 1..20: mol_type = other DNA
aacgtaacgccaacttgcaa

SEQ ID NO: 12812 - DNA, 20 bp, synthetic construct
  source 1..20: mol_type = other DNA
acttgtttgtatggcctcgg

SEQ ID NO: 12813 - DNA, 20 bp, synthetic construct
  source 1..20: mol_type = other DNA
cggtttgctgtaagaggcgg

SEQ ID NO: 12814 - DNA, 20 bp, synthetic construct
  source 1..20: mol_type = other DNA
gattgcacttaggactcatg

SEQ ID NO: 12815 - DNA, 20 bp, synthetic construct
  source 1..20: mol_type = other DNA
tcaggccacttaccgcggat

SEQ ID NO: 12816 - DNA, 20 bp, synthetic construct
  source 1..20: mol_type = other DNA
cacttacttcgtcctcgcct

SEQ ID NO: 12817 - DNA, 20 bp, synthetic construct
  source 1..20: mol_type = other DNA
tgcggaatcgaacagacatt

SEQ ID NO: 12818 - DNA, 20 bp, synthetic construct
  source 1..20: mol_type = other DNA
ggctactatcgcccgagtaa

SEQ ID NO: 12819 - DNA, 20 bp, synthetic construct
  source 1..20: mol_type = other DNA
gatctatggtccgaataaca

SEQ ID NO: 12820 - DNA, 20 bp, synthetic construct
  source 1..20: mol_type = other DNA
actccatcgcctgtctaggg

SEQ ID NO: 12821 - DNA, 20 bp, synthetic construct
  source 1..20: mol_type = other DNA
agccgcaatgattggatatt

SEQ ID NO: 12822 - DNA, 20 bp, synthetic construct
  source 1..20: mol_type = other DNA
cctaactctgctcacaagga

SEQ ID NO: 12823 - DNA, 20 bp, synthetic construct
  source 1..20: mol_type = other DNA
gatgaaggcactatcaattt

SEQ ID NO: 12824 - DNA, 20 bp, synthetic construct
  source 1..20: mol_type = other DNA
tcacttccatatccaatcgg

SEQ ID NO: 12825 - DNA, 20 bp, synthetic construct
  source 1..20: mol_type = other DNA
cgttactggctgggacgaaa

SEQ ID NO: 12826 - DNA, 20 bp, synthetic construct
  source 1..20: mol_type = other DNA
atacctatgtcacttgagca

SEQ ID NO: 12827 - DNA, 20 bp, synthetic construct
  source 1..20: mol_type = other DNA
ttgtagtatcaagatagagc

SEQ ID NO: 12828 - DNA, 20 bp, synthetic construct
  source 1..20: mol_type = other DNA
gcagagtagcgagttgtatt

SEQ ID NO: 12829 - DNA, 20 bp, synthetic construct
  source 1..20: mol_type = other DNA
taatagagactgagggacct

SEQ ID NO: 12830 - DNA, 20 bp, synthetic construct
  source 1..20: mol_type = other DNA
tatatgatcgggttctggga

SEQ ID NO: 12831 - DNA, 20 bp, synthetic construct
  source 1..20: mol_type = other DNA
ttctccgttgaaagtccagt

SEQ ID NO: 12832 - DNA, 20 bp, synthetic construct
  source 1..20: mol_type = other DNA
atcacagcgatgtaggtgtt

SEQ ID NO: 12833 - DNA, 20 bp, synthetic construct
  source 1..20: mol_type = other DNA
tcgtcactagcctagtctct

SEQ ID NO: 12834 - DNA, 20 bp, synthetic construct
  source 1..20: mol_type = other DNA
ttgcgtaaggaggttgcacc

SEQ ID NO: 12835 - DNA, 20 bp, synthetic construct
  source 1..20: mol_type = other DNA
tttcgatcatccttggctta

SEQ ID NO: 12836 - DNA, 20 bp, synthetic construct
  source 1..20: mol_type = other DNA
acccttctgaggctcgattg

SEQ ID NO: 12837 - DNA, 20 bp, synthetic construct
  source 1..20: mol_type = other DNA
tacctaatgtttaagggcct

SEQ ID NO: 12838 - DNA, 20 bp, synthetic construct
  source 1..20: mol_type = other DNA
ataagtttcgtgctaatgca

SEQ ID NO: 12839 - DNA, 20 bp, synthetic construct
  source 1..20: mol_type = other DNA
agtaaggcgaagatgcactt

SEQ ID NO: 12840 - DNA, 20 bp, synthetic construct
  source 1..20: mol_type = other DNA
gttgcgttacatgtctacct

SEQ ID NO: 12841 - DNA, 20 bp, synthetic construct
  source 1..20: mol_type = other DNA
gtatccttgtcaccttaatc

SEQ ID NO: 12842 - DNA, 20 bp, synthetic construct
  source 1..20: mol_type = other DNA
cgtgattaccagaagcagta

SEQ ID NO: 12843 - DNA, 20 bp, synthetic construct
  source 1..20: mol_type = other DNA
gtcatcttgtaagcgcccgc

SEQ ID NO: 12844 - DNA, 20 bp, synthetic construct
  source 1..20: mol_type = other DNA
agtaaccgacacggactcat

SEQ ID NO: 12845 - DNA, 20 bp, synthetic construct
  source 1..20: mol_type = other DNA
cgtaagatgtggcgacccac

SEQ ID NO: 12846 - DNA, 20 bp, synthetic construct
  source 1..20: mol_type = other DNA
gcaagcaatccagaacacag

SEQ ID NO: 12847 - DNA, 20 bp, synthetic construct
  source 1..20: mol_type = other DNA
tgcaccttatttaacctttc

SEQ ID NO: 12848 - DNA, 20 bp, synthetic construct
  source 1..20: mol_type = other DNA
tggtaaagccaggagccaac

SEQ ID NO: 12849 - DNA, 20 bp, synthetic construct
  source 1..20: mol_type = other DNA
gagttggcgtttgtgccacg

SEQ ID NO: 12850 - DNA, 20 bp, synthetic construct
  source 1..20: mol_type = other DNA
cctgggcatccctgggttac

SEQ ID NO: 12851 - DNA, 20 bp, synthetic construct
  source 1..20: mol_type = other DNA
tgctatgccgcagatgcgga

SEQ ID NO: 12852 - DNA, 20 bp, synthetic construct
  source 1..20: mol_type = other DNA
ctgagaggatttcggttact

SEQ ID NO: 12853 - DNA, 20 bp, synthetic construct
  source 1..20: mol_type = other DNA
gggaacggcagttgctaccg

SEQ ID NO: 12854 - DNA, 20 bp, synthetic construct
  source 1..20: mol_type = other DNA
gatatacaacacacggaagt

SEQ ID NO: 12855 - DNA, 20 bp, synthetic construct
  source 1..20: mol_type = other DNA
tggacaatctatgataatcg

SEQ ID NO: 12856 - DNA, 20 bp, synthetic construct
  source 1..20: mol_type = other DNA
cattctatagtctgagtgca

SEQ ID NO: 12857 - DNA, 20 bp, synthetic construct
  source 1..20: mol_type = other DNA
tagccagaggtatgcactgt

SEQ ID NO: 12858 - DNA, 20 bp, synthetic construct
  source 1..20: mol_type = other DNA
cttagccctaacccgtgatc

SEQ ID NO: 12859 - DNA, 20 bp, synthetic construct
  source 1..20: mol_type = other DNA
actccagttctaggctgaaa

SEQ ID NO: 12860 - DNA, 20 bp, synthetic construct
  source 1..20: mol_type = other DNA
aattgcaagggttccagaat

SEQ ID NO: 12861 - DNA, 20 bp, synthetic construct
  source 1..20: mol_type = other DNA
tccactgattcaacatcgcg

SEQ ID NO: 12862 - DNA, 20 bp, synthetic construct
  source 1..20: mol_type = other DNA
agtctttgagaaagcctgag

SEQ ID NO: 12863 - DNA, 20 bp, synthetic construct
  source 1..20: mol_type = other DNA
ctcacgttgagttcgtagtt

SEQ ID NO: 12864 - DNA, 20 bp, synthetic construct
  source 1..20: mol_type = other DNA
acaaccaccataggagtggc

SEQ ID NO: 12865 - DNA, 20 bp, synthetic construct
  source 1..20: mol_type = other DNA
gattgcactatttctcctgt

SEQ ID NO: 12866 - DNA, 20 bp, synthetic construct
  source 1..20: mol_type = other DNA
ttatctaaggagcaggcgga

SEQ ID NO: 12867 - DNA, 20 bp, synthetic construct
  source 1..20: mol_type = other DNA
tctaagggctggaatgttca

SEQ ID NO: 12868 - DNA, 20 bp, synthetic construct
  source 1..20: mol_type = other DNA
atgcggaaacagggagcagg

SEQ ID NO: 12869 - DNA, 20 bp, synthetic construct
  source 1..20: mol_type = other DNA
gcctacctatgtcggaccgt

SEQ ID NO: 12870 - DNA, 20 bp, synthetic construct
  source 1..20: mol_type = other DNA
ctctttaaggtacacgatta

SEQ ID NO: 12871 - DNA, 20 bp, synthetic construct
  source 1..20: mol_type = other DNA
gaacagcgaactcctgcttt

SEQ ID NO: 12872 - DNA, 20 bp, synthetic construct
  source 1..20: mol_type = other DNA
ggctcggtgatatgagcggt

SEQ ID NO: 12873 - DNA, 20 bp, synthetic construct
  source 1..20: mol_type = other DNA
agcagtgagtatactagaac

SEQ ID NO: 12874 - DNA, 20 bp, synthetic construct
  source 1..20: mol_type = other DNA
gttaatcaaatgggcactcc

SEQ ID NO: 12875 - DNA, 20 bp, synthetic construct
  source 1..20: mol_type = other DNA
gttaggtagcgaaggacgct

SEQ ID NO: 12876 - DNA, 20 bp, synthetic construct
  source 1..20: mol_type = other DNA
cgcccaagatgtctcctgta

SEQ ID NO: 12877 - DNA, 20 bp, synthetic construct
  source 1..20: mol_type = other DNA
cttcttctaaagcctttagc

SEQ ID NO: 12878 - DNA, 20 bp, synthetic construct
  source 1..20: mol_type = other DNA
aatagtcattacttccagga

SEQ ID NO: 12879 - DNA, 20 bp, synthetic construct
  source 1..20: mol_type = other DNA
cgtggcccttgacgtttacc

SEQ ID NO: 12880 - DNA, 20 bp, synthetic construct
  source 1..20: mol_type = other DNA
agactatacaaagatcacag

SEQ ID NO: 12881 - DNA, 20 bp, synthetic construct
  source 1..20: mol_type = other DNA
ttgtactgtccttgtaatgc

SEQ ID NO: 12882 - DNA, 20 bp, synthetic construct
  source 1..20: mol_type = other DNA
tgcttgatctcctgtcaacc

SEQ ID NO: 12883 - DNA, 20 bp, synthetic construct
  source 1..20: mol_type = other DNA
taaggttcagataggcctgt

SEQ ID NO: 12884 - DNA, 20 bp, synthetic construct
  source 1..20: mol_type = other DNA
accgatgggacggcaaatgg

SEQ ID NO: 12885 - DNA, 20 bp, synthetic construct
  source 1..20: mol_type = other DNA
gatgaccctgtgattcgttt

SEQ ID NO: 12886 - DNA, 20 bp, synthetic construct
  source 1..20: mol_type = other DNA
ccatggcacactagcgaatg

SEQ ID NO: 12887 - DNA, 20 bp, synthetic construct
  source 1..20: mol_type = other DNA
tgcgacgtgggcaggaccat

SEQ ID NO: 12888 - DNA, 20 bp, synthetic construct
  source 1..20: mol_type = other DNA
tcactaggtctcgggacagc

SEQ ID NO: 12889 - DNA, 20 bp, synthetic construct
  source 1..20: mol_type = other DNA
gtgaacactatgagcacccg

SEQ ID NO: 12890 - DNA, 20 bp, synthetic construct
  source 1..20: mol_type = other DNA
gctaaacatcgcgatcccgg

SEQ ID NO: 12891 - DNA, 20 bp, synthetic construct
  source 1..20: mol_type = other DNA
ttacaggatccgcgtcgaat

SEQ ID NO: 12892 - DNA, 20 bp, synthetic construct
  source 1..20: mol_type = other DNA
ctatggaacctatgaagtcc

SEQ ID NO: 12893 - DNA, 20 bp, synthetic construct
  source 1..20: mol_type = other DNA
gggctttggagaggtgatct

SEQ ID NO: 12894 - DNA, 20 bp, synthetic construct
  source 1..20: mol_type = other DNA
ccgaactacgaagatatgtc

SEQ ID NO: 12895 - DNA, 20 bp, synthetic construct
  source 1..20: mol_type = other DNA
atttcttgcgaaactgattg

SEQ ID NO: 12896 - DNA, 20 bp, synthetic construct
  source 1..20: mol_type = other DNA
gagagagtgtgcgcaggtca

SEQ ID NO: 12897 - DNA, 20 bp, synthetic construct
  source 1..20: mol_type = other DNA
acgatgccagtgctgcttcg

SEQ ID NO: 12898 - DNA, 20 bp, synthetic construct
  source 1..20: mol_type = other DNA
tatcggtcctccgcctaagc

SEQ ID NO: 12899 - DNA, 20 bp, synthetic construct
  source 1..20: mol_type = other DNA
cagtaagacagaacgtggaa

SEQ ID NO: 12900 - DNA, 20 bp, synthetic construct
  source 1..20: mol_type = other DNA
acccacacggtttagtgtgc

SEQ ID NO: 12901 - DNA, 20 bp, synthetic construct
  source 1..20: mol_type = other DNA
tacaagaataaagcccgcaa

SEQ ID NO: 12902 - DNA, 20 bp, synthetic construct
  source 1..20: mol_type = other DNA
tcggcgacaattgttccata

SEQ ID NO: 12903 - DNA, 20 bp, synthetic construct
  source 1..20: mol_type = other DNA
tagtcccatctcgcgggatg

SEQ ID NO: 12904 - DNA, 20 bp, synthetic construct
  source 1..20: mol_type = other DNA
ataagatctgccgctctccg

SEQ ID NO: 12905 - DNA, 20 bp, synthetic construct
  source 1..20: mol_type = other DNA
ctaatcccatcacatagaag

SEQ ID NO: 12906 - DNA, 20 bp, synthetic construct
  source 1..20: mol_type = other DNA
accagacatgcgtatacatg

SEQ ID NO: 12907 - DNA, 20 bp, synthetic construct
  source 1..20: mol_type = other DNA
gccctgtaccttacttaagt

SEQ ID NO: 12908 - DNA, 20 bp, synthetic construct
  source 1..20: mol_type = other DNA
gcaataatggccacgctttg

SEQ ID NO: 12909 - DNA, 20 bp, synthetic construct
  source 1..20: mol_type = other DNA
tgatactgttgttaccgtat

SEQ ID NO: 12910 - DNA, 20 bp, synthetic construct
  source 1..20: mol_type = other DNA
acatatagcccgcgattccc

SEQ ID NO: 12911 - DNA, 20 bp, synthetic construct
  source 1..20: mol_type = other DNA
cgcgtttgatggcaataacg

SEQ ID NO: 12912 - DNA, 20 bp, synthetic construct
  source 1..20: mol_type = other DNA
aaacaccactcgcaccatca

SEQ ID NO: 12913 - DNA, 20 bp, synthetic construct
  source 1..20: mol_type = other DNA
atatgcgatatgcgtgtaat

SEQ ID NO: 12914 - DNA, 20 bp, synthetic construct
  source 1..20: mol_type = other DNA
gtaccctgacaccggcgatt

SEQ ID NO: 12915 - DNA, 20 bp, synthetic construct
  source 1..20: mol_type = other DNA
tccgtgaccagggccttcat

SEQ ID NO: 12916 - DNA, 20 bp, synthetic construct
  source 1..20: mol_type = other DNA
cggtcgggagaactccgtat

SEQ ID NO: 12917 - DNA, 20 bp, synthetic construct
  source 1..20: mol_type = other DNA
acgtaagacttgagtcccta

SEQ ID NO: 12918 - DNA, 20 bp, synthetic construct
  source 1..20: mol_type = other DNA
cttgtacagatacacctcca

SEQ ID NO: 12919 - DNA, 20 bp, synthetic construct
  source 1..20: mol_type = other DNA
cttaacaacctttgtaaacc

SEQ ID NO: 12920 - DNA, 20 bp, synthetic construct
  source 1..20: mol_type = other DNA
gtatcgtctggatagagaaa

SEQ ID NO: 12921 - DNA, 20 bp, synthetic construct
  source 1..20: mol_type = other DNA
cgactctgtctgacggtctt

SEQ ID NO: 12922 - DNA, 20 bp, synthetic construct
  source 1..20: mol_type = other DNA
tgcccgtaaagcgcatgtaa

SEQ ID NO: 12923 - DNA, 20 bp, synthetic construct
  source 1..20: mol_type = other DNA
gcccgttagaagcatttcga

SEQ ID NO: 12924 - DNA, 20 bp, synthetic construct
  source 1..20: mol_type = other DNA
ggttgtgcttgataagctca

SEQ ID NO: 12925 - DNA, 20 bp, synthetic construct
  source 1..20: mol_type = other DNA
tcggtttcgagggaacacct

SEQ ID NO: 12926 - DNA, 20 bp, synthetic construct
  source 1..20: mol_type = other DNA
accgcacattcgtgcgtgca

SEQ ID NO: 12927 - DNA, 20 bp, synthetic construct
  source 1..20: mol_type = other DNA
gggataacgccacgtgtctt

SEQ ID NO: 12928 - DNA, 20 bp, synthetic construct
  source 1..20: mol_type = other DNA
cccaaccagtcagagctgtg

SEQ ID NO: 12929 - DNA, 20 bp, synthetic construct
  source 1..20: mol_type = other DNA
gacagcgggtaatgaacgga

SEQ ID NO: 12930 - DNA, 20 bp, synthetic construct
  source 1..20: mol_type = other DNA
tgagattgggcgcgctttca

SEQ ID NO: 12931 - DNA, 20 bp, synthetic construct
  source 1..20: mol_type = other DNA
tctcaacaaggtccaataca

SEQ ID NO: 12932 - DNA, 20 bp, synthetic construct
  source 1..20: mol_type = other DNA
tatcgaagtgacgcacccgg

SEQ ID NO: 12933 - DNA, 20 bp, synthetic construct
  source 1..20: mol_type = other DNA
taccggacagatgttagtat

SEQ ID NO: 12934 - DNA, 20 bp, synthetic construct
  source 1..20: mol_type = other DNA
tcgaatctggtgcatacctt

SEQ ID NO: 12935 - DNA, 20 bp, synthetic construct
  source 1..20: mol_type = other DNA
atttctccgcagataaatgt

SEQ ID NO: 12936 - DNA, 20 bp, synthetic construct
  source 1..20: mol_type = other DNA
tagtcggagcttaagtgatt

SEQ ID NO: 12937 - DNA, 20 bp, synthetic construct
  source 1..20: mol_type = other DNA
taatgacctacgaaaggagg

SEQ ID NO: 12938 - DNA, 20 bp, synthetic construct
  source 1..20: mol_type = other DNA
tgttaagggatccagtgctt

SEQ ID NO: 12939 - DNA, 20 bp, synthetic construct
  source 1..20: mol_type = other DNA
gatgtccgttcgcgatcgag

SEQ ID NO: 12940 - DNA, 20 bp, synthetic construct
  source 1..20: mol_type = other DNA
agcccaagctcgcctcttcc

SEQ ID NO: 12941 - DNA, 20 bp, synthetic construct
  source 1..20: mol_type = other DNA
ccttcttggagccggtcaaa

SEQ ID NO: 12942 - DNA, 20 bp, synthetic construct
  source 1..20: mol_type = other DNA
tcgtagagcgacccaagaat

SEQ ID NO: 12943 - DNA, 20 bp, synthetic construct
  source 1..20: mol_type = other DNA
gacatcgtaaccagcctggg

SEQ ID NO: 12944 - DNA, 20 bp, synthetic construct
  source 1..20: mol_type = other DNA
tcctaggcaacgagttctat

SEQ ID NO: 12945 - DNA, 20 bp, synthetic construct
  source 1..20: mol_type = other DNA
tcactgcgcttcgacttctg

SEQ ID NO: 12946 - DNA, 20 bp, synthetic construct
  source 1..20: mol_type = other DNA
gatgatcaggcgctattaga

SEQ ID NO: 12947 - DNA, 20 bp, synthetic construct
  source 1..20: mol_type = other DNA
ctcatgtgatatatgcgatg

SEQ ID NO: 12948 - DNA, 20 bp, synthetic construct
  source 1..20: mol_type = other DNA
gctaacgcatagtattccta

SEQ ID NO: 12949 - DNA, 20 bp, synthetic construct
  source 1..20: mol_type = other DNA
ctagaacagcttcttcgcca

SEQ ID NO: 12950 - DNA, 20 bp, synthetic construct
  source 1..20: mol_type = other DNA
ctgtgtcgcgtcaatctccc

SEQ ID NO: 12951 - DNA, 20 bp, synthetic construct
  source 1..20: mol_type = other DNA
cattatcagtgggcttgaga

SEQ ID NO: 12952 - DNA, 20 bp, synthetic construct
  source 1..20: mol_type = other DNA
tgggtaaattgtgactaccg

SEQ ID NO: 12953 - DNA, 20 bp, synthetic construct
  source 1..20: mol_type = other DNA
gctgtgatggtctaacatgg

SEQ ID NO: 12954 - DNA, 20 bp, synthetic construct
  source 1..20: mol_type = other DNA
gtcttacgcacttcaggttg

SEQ ID NO: 12955 - DNA, 20 bp, synthetic construct
  source 1..20: mol_type = other DNA
cgaacaatataagaacacga

SEQ ID NO: 12956 - DNA, 20 bp, synthetic construct
  source 1..20: mol_type = other DNA
gatcagtgttccgcaaatgc

SEQ ID NO: 12957 - DNA, 20 bp, synthetic construct
  source 1..20: mol_type = other DNA
tggttacaattgaagagagc

SEQ ID NO: 12958 - DNA, 20 bp, synthetic construct
  source 1..20: mol_type = other DNA
gggtcataccacataggtcg

SEQ ID NO: 12959 - DNA, 20 bp, synthetic construct
  source 1..20: mol_type = other DNA
actcctgctcgtaagcgtgg

SEQ ID NO: 12960 - DNA, 20 bp, synthetic construct
  source 1..20: mol_type = other DNA
agaaggttgtgcacgtctcc

SEQ ID NO: 12961 - DNA, 20 bp, synthetic construct
  source 1..20: mol_type = other DNA
gtctactttcgaagcaatat

SEQ ID NO: 12962 - DNA, 20 bp, synthetic construct
  source 1..20: mol_type = other DNA
actcggcagccaacgtaccg

SEQ ID NO: 12963 - DNA, 20 bp, synthetic construct
  source 1..20: mol_type = other DNA
catggctgcttgtggagtac

SEQ ID NO: 12964 - DNA, 20 bp, synthetic construct
  source 1..20: mol_type = other DNA
ggtcaaatgccatttaagag

SEQ ID NO: 12965 - DNA, 20 bp, synthetic construct
  source 1..20: mol_type = other DNA
ataatcttcccaacatcgca

SEQ ID NO: 12966 - DNA, 20 bp, synthetic construct
  source 1..20: mol_type = other DNA
accttccataccgatgttca

SEQ ID NO: 12967 - DNA, 20 bp, synthetic construct
  source 1..20: mol_type = other DNA
aattatggtcggcggagcct

SEQ ID NO: 12968 - DNA, 20 bp, synthetic construct
  source 1..20: mol_type = other DNA
gaatgaatgccttgttgtat

SEQ ID NO: 12969 - DNA, 20 bp, synthetic construct
  source 1..20: mol_type = other DNA
ctaagaaggagcgcttcgcg

SEQ ID NO: 12970 - DNA, 20 bp, synthetic construct
  source 1..20: mol_type = other DNA
ctattcttccaacgtgtatt

SEQ ID NO: 12971 - DNA, 20 bp, synthetic construct
  source 1..20: mol_type = other DNA
cggtcattggtcatatggcg

SEQ ID NO: 12972 - DNA, 20 bp, synthetic construct
  source 1..20: mol_type = other DNA
tcgaggttacgacgccagac

SEQ ID NO: 12973 - DNA, 20 bp, synthetic construct
  source 1..20: mol_type = other DNA
tgagcatgaactggaaacgg

SEQ ID NO: 12974 - DNA, 20 bp, synthetic construct
  source 1..20: mol_type = other DNA
cggtgtcaaggagcacaccg

SEQ ID NO: 12975 - DNA, 20 bp, synthetic construct
  source 1..20: mol_type = other DNA
cagtaagctgaaagcattga

SEQ ID NO: 12976 - DNA, 20 bp, synthetic construct
  source 1..20: mol_type = other DNA
gatagatctaggctaaggac

SEQ ID NO: 12977 - DNA, 20 bp, synthetic construct
  source 1..20: mol_type = other DNA
attcagaaacgtacagcagt

SEQ ID NO: 12978 - DNA, 20 bp, synthetic construct
  source 1..20: mol_type = other DNA
cgacatcgctcaggacatta

SEQ ID NO: 12979 - DNA, 20 bp, synthetic construct
  source 1..20: mol_type = other DNA
ggtgctaccgcatccgtgtg

SEQ ID NO: 12980 - DNA, 20 bp, synthetic construct
  source 1..20: mol_type = other DNA
acgcgaattagttcggcttc

SEQ ID NO: 12981 - DNA, 20 bp, synthetic construct
  source 1..20: mol_type = other DNA
cctttgaattacacaaccaa

SEQ ID NO: 12982 - DNA, 20 bp, synthetic construct
  source 1..20: mol_type = other DNA
atcgagcccttaatgaacag

SEQ ID NO: 12983 - DNA, 20 bp, synthetic construct
  source 1..20: mol_type = other DNA
cacccatcatggacagtagt

SEQ ID NO: 12984 - DNA, 20 bp, synthetic construct
  source 1..20: mol_type = other DNA
gttgaccacctatgttacca

SEQ ID NO: 12985 - DNA, 20 bp, synthetic construct
  source 1..20: mol_type = other DNA
tggaagctagagggtctcaa

SEQ ID NO: 12986 - DNA, 20 bp, synthetic construct
  source 1..20: mol_type = other DNA
gctggtaggtgcgcccaagt

SEQ ID NO: 12987 - DNA, 20 bp, synthetic construct
  source 1..20: mol_type = other DNA
tcgtgttcacaatataccga

SEQ ID NO: 12988 - DNA, 20 bp, synthetic construct
  source 1..20: mol_type = other DNA
tctcattccgcataagactt

SEQ ID NO: 12989 - DNA, 20 bp, synthetic construct
  source 1..20: mol_type = other DNA
tcgttccttctaagaagcgg

SEQ ID NO: 12990 - DNA, 20 bp, synthetic construct
  source 1..20: mol_type = other DNA
tagggatgatcatgtatgat

SEQ ID NO: 12991 - DNA, 20 bp, synthetic construct
  source 1..20: mol_type = other DNA
gataagtcgccagcgccagt

SEQ ID NO: 12992 - DNA, 20 bp, synthetic construct
  source 1..20: mol_type = other DNA
atgacaagggagtagacggt

SEQ ID NO: 12993 - DNA, 20 bp, synthetic construct
  source 1..20: mol_type = other DNA
gacaaattcgcctaactagg

SEQ ID NO: 12994 - DNA, 20 bp, synthetic construct
  source 1..20: mol_type = other DNA
cctacaggatacgtggcgga

SEQ ID NO: 12995 - DNA, 20 bp, synthetic construct
  source 1..20: mol_type = other DNA
ttagcgagggtcatgggatc

SEQ ID NO: 12996 - DNA, 20 bp, synthetic construct
  source 1..20: mol_type = other DNA
agattgtcccataaccgaca

SEQ ID NO: 12997 - DNA, 20 bp, synthetic construct
  source 1..20: mol_type = other DNA
acaggcgtgcaattctcgac

SEQ ID NO: 12998 - DNA, 20 bp, synthetic construct
  source 1..20: mol_type = other DNA
agcacacgatcctgccatcg

SEQ ID NO: 12999 - DNA, 20 bp, synthetic construct
  source 1..20: mol_type = other DNA
ttatgctcacggcaagactc

SEQ ID NO: 13000 - DNA, 20 bp, synthetic construct
  source 1..20: mol_type = other DNA
cgggcaaatcgaaatggaat

SEQ ID NO: 13001 - DNA, 20 bp, synthetic construct
  source 1..20: mol_type = other DNA
accttgtatctggagagtac

SEQ ID NO: 13002 - DNA, 20 bp, synthetic construct
  source 1..20: mol_type = other DNA
cgttgagtctgcggaatcca

SEQ ID NO: 13003 - DNA, 20 bp, synthetic construct
  source 1..20: mol_type = other DNA
ccatttactggtcgcggcta

SEQ ID NO: 13004 - DNA, 20 bp, synthetic construct
  source 1..20: mol_type = other DNA
tgcgagcatagtcccgatca

SEQ ID NO: 13005 - DNA, 20 bp, synthetic construct
  source 1..20: mol_type = other DNA
aggtaaacggatcctttgtc

SEQ ID NO: 13006 - DNA, 20 bp, synthetic construct
  source 1..20: mol_type = other DNA
cctcgttgcggcacctcatt

SEQ ID NO: 13007 - DNA, 20 bp, synthetic construct
  source 1..20: mol_type = other DNA
gtttcattcatcccggatat

SEQ ID NO: 13008 - DNA, 20 bp, synthetic construct
  source 1..20: mol_type = other DNA
gccggtcttaattctactta

SEQ ID NO: 13009 - DNA, 20 bp, synthetic construct
  source 1..20: mol_type = other DNA
gctacactcccgtctaggat

SEQ ID NO: 13010 - DNA, 20 bp, synthetic construct
  source 1..20: mol_type = other DNA
gtcggtggaagtatgcaatc

SEQ ID NO: 13011 - DNA, 20 bp, synthetic construct
  source 1..20: mol_type = other DNA
cgcgctgtatatacagcacc

SEQ ID NO: 13012 - DNA, 20 bp, synthetic construct
  source 1..20: mol_type = other DNA
taaccgtcatagtctgcgat

SEQ ID NO: 13013 - DNA, 20 bp, synthetic construct
  source 1..20: mol_type = other DNA
ccgacgcatggaatccagta

SEQ ID NO: 13014 - DNA, 20 bp, synthetic construct
  source 1..20: mol_type = other DNA
gcttcagacgggaatcacag

SEQ ID NO: 13015 - DNA, 20 bp, synthetic construct
  source 1..20: mol_type = other DNA
ccttgtaatcctgaagtgaa

SEQ ID NO: 13016 - DNA, 20 bp, synthetic construct
  source 1..20: mol_type = other DNA
gtggtatgtgcccaactcat

SEQ ID NO: 13017 - DNA, 20 bp, synthetic construct
  source 1..20: mol_type = other DNA
acatgatgcttcccatagtc

SEQ ID NO: 13018 - DNA, 20 bp, synthetic construct
  source 1..20: mol_type = other DNA
aaacacggctaattcaatgt

SEQ ID NO: 13019 - DNA, 20 bp, synthetic construct
  source 1..20: mol_type = other DNA
acccagtgaacacgtcgttc

SEQ ID NO: 13020 - DNA, 20 bp, synthetic construct
  source 1..20: mol_type = other DNA
ggaacgatgcaagcgggcaa

SEQ ID NO: 13021 - DNA, 20 bp, synthetic construct
  source 1..20: mol_type = other DNA
cagccgcccaacaagtgttt

SEQ ID NO: 13022 - DNA, 20 bp, synthetic construct
  source 1..20: mol_type = other DNA
gctgcggtgtacaggctagt

SEQ ID NO: 13023 - DNA, 20 bp, synthetic construct
  source 1..20: mol_type = other DNA
ctcgactcgtctccatatcc

SEQ ID NO: 13024 - DNA, 20 bp, synthetic construct
  source 1..20: mol_type = other DNA
gcatgcacaattaccggcga

SEQ ID NO: 13025 - DNA, 20 bp, synthetic construct
  source 1..20: mol_type = other DNA
gggattctcagtacgaggaa

SEQ ID NO: 13026 - DNA, 20 bp, synthetic construct
  source 1..20: mol_type = other DNA
gtagtgataaccttcacggt

SEQ ID NO: 13027 - DNA, 20 bp, synthetic construct
  source 1..20: mol_type = other DNA
cccattctactaaccctgag

SEQ ID NO: 13028 - DNA, 20 bp, synthetic construct
  source 1..20: mol_type = other DNA
ctttacagcaagctgatgtg

SEQ ID NO: 13029 - DNA, 20 bp, synthetic construct
  source 1..20: mol_type = other DNA
tttacggtttgtctactagc

SEQ ID NO: 13030 - DNA, 20 bp, synthetic construct
  source 1..20: mol_type = other DNA
tgtggaaggattaaccgact

SEQ ID NO: 13031 - DNA, 20 bp, synthetic construct
  source 1..20: mol_type = other DNA
aaagtcgcaaccacgacttt

SEQ ID NO: 13032 - DNA, 20 bp, synthetic construct
  source 1..20: mol_type = other DNA
tgcgtagaacgcggtcttca

SEQ ID NO: 13033 - DNA, 20 bp, synthetic construct
  source 1..20: mol_type = other DNA
ctgcagcacactcctggttc

SEQ ID NO: 13034 - DNA, 20 bp, synthetic construct
  source 1..20: mol_type = other DNA
aggcctggttgaaacgacag

SEQ ID NO: 13035 - DNA, 20 bp, synthetic construct
  source 1..20: mol_type = other DNA
gaacgcgggcggtcgtatca

SEQ ID NO: 13036 - DNA, 20 bp, synthetic construct
  source 1..20: mol_type = other DNA
tgttgttaaagagccacgag

SEQ ID NO: 13037 - DNA, 20 bp, synthetic construct
  source 1..20: mol_type = other DNA
actggacgggacgttagcgc

SEQ ID NO: 13038 - DNA, 20 bp, synthetic construct
  source 1..20: mol_type = other DNA
attagcatttgggtggatct

SEQ ID NO: 13039 - DNA, 20 bp, synthetic construct
  source 1..20: mol_type = other DNA
ctaacgccggttctgacagg

SEQ ID NO: 13040 - DNA, 20 bp, synthetic construct
  source 1..20: mol_type = other DNA
gaccaaataacaaccgatag

SEQ ID NO: 13041 - DNA, 20 bp, synthetic construct
  source 1..20: mol_type = other DNA
ggatagaggtttactatact

SEQ ID NO: 13042 - DNA, 20 bp, synthetic construct
  source 1..20: mol_type = other DNA
cggcatagccgtataagagt

SEQ ID NO: 13043 - DNA, 20 bp, synthetic construct
  source 1..20: mol_type = other DNA
tgtggacggaaagccttaat

SEQ ID NO: 13044 - DNA, 20 bp, synthetic construct
  source 1..20: mol_type = other DNA
gcacgtaatccaccaggtgg

SEQ ID NO: 13045 - DNA, 20 bp, synthetic construct
  source 1..20: mol_type = other DNA
acgagacatcgttagaaagc

SEQ ID NO: 13046 - DNA, 20 bp, synthetic construct
  source 1..20: mol_type = other DNA
aaatagggagccgctaaact

SEQ ID NO: 13047 - DNA, 20 bp, synthetic construct
  source 1..20: mol_type = other DNA
aggccatcctcattgtcgtt

SEQ ID NO: 13048 - DNA, 20 bp, synthetic construct
  source 1..20: mol_type = other DNA
ttcgacagttccatgcactt

SEQ ID NO: 13049 - DNA, 20 bp, synthetic construct
  source 1..20: mol_type = other DNA
aaatatagcaagcgccgagc

SEQ ID NO: 13050 - DNA, 20 bp, synthetic construct
  source 1..20: mol_type = other DNA
aaatatgatcagtcaggata

SEQ ID NO: 13051 - DNA, 20 bp, synthetic construct
  source 1..20: mol_type = other DNA
cctagcgggatattagtcgg

SEQ ID NO: 13052 - DNA, 20 bp, synthetic construct
  source 1..20: mol_type = other DNA
gtattgctgtcgggtatctc

SEQ ID NO: 13053 - DNA, 20 bp, synthetic construct
  source 1..20: mol_type = other DNA
gcaacatcggaagctaaccc

SEQ ID NO: 13054 - DNA, 20 bp, synthetic construct
  source 1..20: mol_type = other DNA
gcgacagaccaaacactctg

SEQ ID NO: 13055 - DNA, 20 bp, synthetic construct
  source 1..20: mol_type = other DNA
ggtgataatcccacagtatt

SEQ ID NO: 13056 - DNA, 20 bp, synthetic construct
  source 1..20: mol_type = other DNA
cgcagggagcacaatgcact

SEQ ID NO: 13057 - DNA, 20 bp, synthetic construct
  source 1..20: mol_type = other DNA
ggatccgtttcagccgacgg

SEQ ID NO: 13058 - DNA, 20 bp, synthetic construct
  source 1..20: mol_type = other DNA
gcttattcgagcttgtgata

SEQ ID NO: 13059 - DNA, 20 bp, synthetic construct
  source 1..20: mol_type = other DNA
ccgctaaagaatttattcgc

SEQ ID NO: 13060 - DNA, 20 bp, synthetic construct
  source 1..20: mol_type = other DNA
ctatgaaccatatttcctgt

SEQ ID NO: 13061 - DNA, 20 bp, synthetic construct
  source 1..20: mol_type = other DNA
accggtattagcgagatgga

SEQ ID NO: 13062 - DNA, 20 bp, synthetic construct
  source 1..20: mol_type = other DNA
taggtgaacggcgcagttgt

SEQ ID NO: 13063 - DNA, 20 bp, synthetic construct
  source 1..20: mol_type = other DNA
ttaagggtgcacataggact

SEQ ID NO: 13064 - DNA, 20 bp, synthetic construct
  source 1..20: mol_type = other DNA
agtttgagcgccgggcatgt

SEQ ID NO: 13065 - DNA, 20 bp, synthetic construct
  source 1..20: mol_type = other DNA
cattaacgtatgtcttgata

SEQ ID NO: 13066 - DNA, 20 bp, synthetic construct
  source 1..20: mol_type = other DNA
ggtgaagcgttggcaccact

SEQ ID NO: 13067 - DNA, 20 bp, synthetic construct
  source 1..20: mol_type = other DNA
tgatttccaactcttccaac

SEQ ID NO: 13068 - DNA, 20 bp, synthetic construct
  source 1..20: mol_type = other DNA
ttctgatgcctagggtgaaa

SEQ ID NO: 13069 - DNA, 20 bp, synthetic construct
  source 1..20: mol_type = other DNA
gtgcgtcgaataggcatccc

SEQ ID NO: 13070 - DNA, 20 bp, synthetic construct
  source 1..20: mol_type = other DNA
agtggtggcgtaggcaagtg

SEQ ID NO: 13071 - DNA, 20 bp, synthetic construct
  source 1..20: mol_type = other DNA
ctaacgaacctgcgcgtagt

SEQ ID NO: 13072 - DNA, 20 bp, synthetic construct
  source 1..20: mol_type = other DNA
cctctctatgccagcttggg

SEQ ID NO: 13073 - DNA, 20 bp, synthetic construct
  source 1..20: mol_type = other DNA
ggacccggattagacataac

SEQ ID NO: 13074 - DNA, 20 bp, synthetic construct
  source 1..20: mol_type = other DNA
caggataggcatggcctcgg

SEQ ID NO: 13075 - DNA, 20 bp, synthetic construct
  source 1..20: mol_type = other DNA
taagtctctcagaggttgct

SEQ ID NO: 13076 - DNA, 20 bp, synthetic construct
  source 1..20: mol_type = other DNA
acggtgtcggtgcgattaga

SEQ ID NO: 13077 - DNA, 20 bp, synthetic construct
  source 1..20: mol_type = other DNA
cccgccctttcgagtatgtt

SEQ ID NO: 13078 - DNA, 20 bp, synthetic construct
  source 1..20: mol_type = other DNA
ttccaatgctgttcggttta

SEQ ID NO: 13079 - DNA, 20 bp, synthetic construct
  source 1..20: mol_type = other DNA
tgatcgggcgttccgatggc

SEQ ID NO: 13080 - DNA, 20 bp, synthetic construct
  source 1..20: mol_type = other DNA
gcctacctagtaaatcggtc

SEQ ID NO: 13081 - DNA, 20 bp, synthetic construct
  source 1..20: mol_type = other DNA
gagtcgctcttgccaggtgg

SEQ ID NO: 13082 - DNA, 20 bp, synthetic construct
  source 1..20: mol_type = other DNA
gcacaacggtcaccggtgac

SEQ ID NO: 13083 - DNA, 20 bp, synthetic construct
  source 1..20: mol_type = other DNA
gtattaaccaggccaggacc

SEQ ID NO: 13084 - DNA, 20 bp, synthetic construct
  source 1..20: mol_type = other DNA
aaatgaggaaccagcggtat

SEQ ID NO: 13085 - DNA, 20 bp, synthetic construct
  source 1..20: mol_type = other DNA
atgcctcatccacacgacgc

SEQ ID NO: 13086 - DNA, 20 bp, synthetic construct
  source 1..20: mol_type = other DNA
atgcgtccatagagttctac

SEQ ID NO: 13087 - DNA, 20 bp, synthetic construct
  source 1..20: mol_type = other DNA
gaaactagtgcgcgtaaggc

SEQ ID NO: 13088 - DNA, 20 bp, synthetic construct
  source 1..20: mol_type = other DNA
acttgcttagtcaaagaccg

SEQ ID NO: 13089 - DNA, 20 bp, synthetic construct
  source 1..20: mol_type = other DNA
acctcacaaacgcctgcggg

SEQ ID NO: 13090 - DNA, 20 bp, synthetic construct
  source 1..20: mol_type = other DNA
cacacttgaaatgccgaccc

SEQ ID NO: 13091 - DNA, 20 bp, synthetic construct
  source 1..20: mol_type = other DNA
caaccgctcgcgctaaggaa

SEQ ID NO: 13092 - DNA, 20 bp, synthetic construct
  source 1..20: mol_type = other DNA
actattgccatcttagtacg

SEQ ID NO: 13093 - DNA, 20 bp, synthetic construct
  source 1..20: mol_type = other DNA
tttgtagtgatctatgctga

SEQ ID NO: 13094 - DNA, 20 bp, synthetic construct
  source 1..20: mol_type = other DNA
cgcagtgtagtatcaatgca

SEQ ID NO: 13095 - DNA, 20 bp, synthetic construct
  source 1..20: mol_type = other DNA
cttcctcatgacagcgcgaa

SEQ ID NO: 13096 - DNA, 20 bp, synthetic construct
  source 1..20: mol_type = other DNA
cggcaatgggatcggagcct

SEQ ID NO: 13097 - DNA, 20 bp, synthetic construct
  source 1..20: mol_type = other DNA
gcccggcgctttatccagta

SEQ ID NO: 13098 - DNA, 20 bp, synthetic construct
  source 1..20: mol_type = other DNA
aaagcgaacaggcgcaccgg

SEQ ID NO: 13099 - DNA, 20 bp, synthetic construct
  source 1..20: mol_type = other DNA
cgtcaagctgtgacggcatt

SEQ ID NO: 13100 - DNA, 20 bp, synthetic construct
  source 1..20: mol_type = other DNA
cgtgaatctcggcatcccat

SEQ ID NO: 13101 - DNA, 20 bp, synthetic construct
  source 1..20: mol_type = other DNA
gctactactcttatcccacg

SEQ ID NO: 13102 - DNA, 20 bp, synthetic construct
  source 1..20: mol_type = other DNA
gcgacctaccgcctacatta

SEQ ID NO: 13103 - DNA, 20 bp, synthetic construct
  source 1..20: mol_type = other DNA
tgtatcaatatatctctggt

SEQ ID NO: 13104 - DNA, 20 bp, synthetic construct
  source 1..20: mol_type = other DNA
gctcattggtagaattgcaa

SEQ ID NO: 13105 - DNA, 20 bp, synthetic construct
  source 1..20: mol_type = other DNA
ctctacgtgatacaatcctc

SEQ ID NO: 13106 - DNA, 20 bp, synthetic construct
  source 1..20: mol_type = other DNA
acagatacagacgaaacgca

SEQ ID NO: 13107 - DNA, 20 bp, synthetic construct
  source 1..20: mol_type = other DNA
ctgcgctataccttgtaatg

SEQ ID NO: 13108 - DNA, 20 bp, synthetic construct
  source 1..20: mol_type = other DNA
gaatagaccaagacgggagg

SEQ ID NO: 13109 - DNA, 20 bp, synthetic construct
  source 1..20: mol_type = other DNA
tgaatacccagggtccttgg

SEQ ID NO: 13110 - DNA, 20 bp, synthetic construct
  source 1..20: mol_type = other DNA
cgtaacctgtcgctattcgg

SEQ ID NO: 13111 - DNA, 20 bp, synthetic construct
  source 1..20: mol_type = other DNA
actctgaactctgcgtccta

SEQ ID NO: 13112 - DNA, 20 bp, synthetic construct
  source 1..20: mol_type = other DNA
ctaaacatcctcgactggac

SEQ ID NO: 13113 - DNA, 20 bp, synthetic construct
  source 1..20: mol_type = other DNA
ttgagatcttggcacaaatc

SEQ ID NO: 13114 - DNA, 20 bp, synthetic construct
  source 1..20: mol_type = other DNA
ttggatcattagaaagggtg

SEQ ID NO: 13115 - DNA, 20 bp, synthetic construct
  source 1..20: mol_type = other DNA
cgggtgtgagtatgctcatg

SEQ ID NO: 13116 - DNA, 20 bp, synthetic construct
  source 1..20: mol_type = other DNA
gctcctccagttactggtag

SEQ ID NO: 13117 - DNA, 20 bp, synthetic construct
  source 1..20: mol_type = other DNA
ggtagtttcccatcagcatt

SEQ ID NO: 13118 - DNA, 20 bp, synthetic construct
  source 1..20: mol_type = other DNA
agatcccggtgtgggttcac

SEQ ID NO: 13119 - DNA, 20 bp, synthetic construct
  source 1..20: mol_type = other DNA
gagttctgaggccgagggat

SEQ ID NO: 13120 - DNA, 20 bp, synthetic construct
  source 1..20: mol_type = other DNA
agtgatgtgtgcctagattt

SEQ ID NO: 13121 - DNA, 20 bp, synthetic construct
  source 1..20: mol_type = other DNA
taccttatgacggtacgacc

SEQ ID NO: 13122 - DNA, 20 bp, synthetic construct
  source 1..20: mol_type = other DNA
tcgtgggccaagttcaaaga

SEQ ID NO: 13123 - DNA, 20 bp, synthetic construct
  source 1..20: mol_type = other DNA
ttgcacggtcgcggcattaa

SEQ ID NO: 13124 - DNA, 20 bp, synthetic construct
  source 1..20: mol_type = other DNA
gctgcccgctacaggatgtt

SEQ ID NO: 13125 - DNA, 20 bp, synthetic construct
  source 1..20: mol_type = other DNA
actcgatggcaggaggttcc

SEQ ID NO: 13126 - DNA, 20 bp, synthetic construct
  source 1..20: mol_type = other DNA
tattagcagccgcctccatt

SEQ ID NO: 13127 - DNA, 20 bp, synthetic construct
  source 1..20: mol_type = other DNA
cactaagttggctgaaacca

SEQ ID NO: 13128 - DNA, 20 bp, synthetic construct
  source 1..20: mol_type = other DNA
ttgttactcagtgggatttg

SEQ ID NO: 13129 - DNA, 20 bp, synthetic construct
  source 1..20: mol_type = other DNA
ttccgacgggcccactacga

SEQ ID NO: 13130 - DNA, 20 bp, synthetic construct
  source 1..20: mol_type = other DNA
gggtcttagcttgtaagaca

SEQ ID NO: 13131 - DNA, 20 bp, synthetic construct
  source 1..20: mol_type = other DNA
gtgcctctaataatatccgg

SEQ ID NO: 13132 - DNA, 20 bp, synthetic construct
  source 1..20: mol_type = other DNA
tgtctgtcatgccgttgcca

SEQ ID NO: 13133 - DNA, 20 bp, synthetic construct
  source 1..20: mol_type = other DNA
ttggttgcgtgaggttggtg

SEQ ID NO: 13134 - DNA, 20 bp, synthetic construct
  source 1..20: mol_type = other DNA
ttgagcgtagattaccttga

SEQ ID NO: 13135 - DNA, 20 bp, synthetic construct
  source 1..20: mol_type = other DNA
aatacaattgcgcacactcg

SEQ ID NO: 13136 - DNA, 20 bp, synthetic construct
  source 1..20: mol_type = other DNA
agctcagagatgtctacctt

SEQ ID NO: 13137 - DNA, 20 bp, synthetic construct
  source 1..20: mol_type = other DNA
acttacaatccaccaagcga

SEQ ID NO: 13138 - DNA, 20 bp, synthetic construct
  source 1..20: mol_type = other DNA
ttcttcgttgggcctttaga

SEQ ID NO: 13139 - DNA, 20 bp, synthetic construct
  source 1..20: mol_type = other DNA
tcatcacgtagcttggacta

SEQ ID NO: 13140 - DNA, 20 bp, synthetic construct
  source 1..20: mol_type = other DNA
gctgacaatgccatataacc

SEQ ID NO: 13141 - DNA, 20 bp, synthetic construct
  source 1..20: mol_type = other DNA
gaaacaagctacgaattatg

SEQ ID NO: 13142 - DNA, 20 bp, synthetic construct
  source 1..20: mol_type = other DNA
ctcgtatctcaccaaatctt

SEQ ID NO: 13143 - DNA, 20 bp, synthetic construct
  source 1..20: mol_type = other DNA
tctgcgtgtgaagcaaggtt

SEQ ID NO: 13144 - DNA, 20 bp, synthetic construct
  source 1..20: mol_type = other DNA
ggaatggagcaatccttgtg

SEQ ID NO: 13145 - DNA, 20 bp, synthetic construct
  source 1..20: mol_type = other DNA
cacctactctttatgatgca

SEQ ID NO: 13146 - DNA, 20 bp, synthetic construct
  source 1..20: mol_type = other DNA
ggaatctgagtttgcactat

SEQ ID NO: 13147 - DNA, 20 bp, synthetic construct
  source 1..20: mol_type = other DNA
caagaacaaagaacgccggc

SEQ ID NO: 13148 - DNA, 20 bp, synthetic construct
  source 1..20: mol_type = other DNA
cgcaacggttagtataaatc

SEQ ID NO: 13149 - DNA, 20 bp, synthetic construct
  source 1..20: mol_type = other DNA
ggttcgattccatgagtgat

SEQ ID NO: 13150 - DNA, 20 bp, synthetic construct
  source 1..20: mol_type = other DNA
ggtctgctgtcaaccctgac

SEQ ID NO: 13151 - DNA, 20 bp, synthetic construct
  source 1..20: mol_type = other DNA
tgtatttctagcggaatcta

SEQ ID NO: 13152 - DNA, 20 bp, synthetic construct
  source 1..20: mol_type = other DNA
gttcgtcatgccgcacgcta

SEQ ID NO: 13153 - DNA, 20 bp, synthetic construct
  source 1..20: mol_type = other DNA
ccgggaatgaaggccgagcg

SEQ ID NO: 13154 - DNA, 20 bp, synthetic construct
  source 1..20: mol_type = other DNA
caaagagggcaacacaacaa

SEQ ID NO: 13155 - DNA, 20 bp, synthetic construct
  source 1..20: mol_type = other DNA
cagtcccaaacgactagcgg

SEQ ID NO: 13156 - DNA, 20 bp, synthetic construct
  source 1..20: mol_type = other DNA
cgacacatcagtcttctagt

SEQ ID NO: 13157 - DNA, 20 bp, synthetic construct
  source 1..20: mol_type = other DNA
cttctaagagcagacacgtg

SEQ ID NO: 13158 - DNA, 20 bp, synthetic construct
  source 1..20: mol_type = other DNA
ttgggtacgcgtcagtcgct

SEQ ID NO: 13159 - DNA, 20 bp, synthetic construct
  source 1..20: mol_type = other DNA
ccagagaaagcggtactagc

SEQ ID NO: 13160 - DNA, 20 bp, synthetic construct
  source 1..20: mol_type = other DNA
ttcgcagacccatttactcg

SEQ ID NO: 13161 - DNA, 20 bp, synthetic construct
  source 1..20: mol_type = other DNA
caaaggtacagcggtacgcg

SEQ ID NO: 13162 - DNA, 20 bp, synthetic construct
  source 1..20: mol_type = other DNA
ccttgacttgaccttaacta

SEQ ID NO: 13163 - DNA, 20 bp, synthetic construct
  source 1..20: mol_type = other DNA
ctctcctcgcgaccactgag

SEQ ID NO: 13164 - DNA, 20 bp, synthetic construct
  source 1..20: mol_type = other DNA
ccgggtctcgatagagtgtt

SEQ ID NO: 13165 - DNA, 20 bp, synthetic construct
  source 1..20: mol_type = other DNA
ctactagacaatgttagctt

SEQ ID NO: 13166 - DNA, 20 bp, synthetic construct
  source 1..20: mol_type = other DNA
cttgatcatcgaaccatact

SEQ ID NO: 13167 - DNA, 20 bp, synthetic construct
  source 1..20: mol_type = other DNA
aggcagttgggtaccgtgtt

SEQ ID NO: 13168 - DNA, 20 bp, synthetic construct
  source 1..20: mol_type = other DNA
ttcccttgaagctgattcga

SEQ ID NO: 13169 - DNA, 20 bp, synthetic construct
  source 1..20: mol_type = other DNA
cggagtaggcatataggaac

SEQ ID NO: 13170 - DNA, 20 bp, synthetic construct
  source 1..20: mol_type = other DNA
cgtgatgaggacactgtatt

SEQ ID NO: 13171 - DNA, 20 bp, synthetic construct
  source 1..20: mol_type = other DNA
ttgggctgggaataaacata

SEQ ID NO: 13172 - DNA, 20 bp, synthetic construct
  source 1..20: mol_type = other DNA
tgaaatagacgtaacactcg

SEQ ID NO: 13173 - DNA, 20 bp, synthetic construct
  source 1..20: mol_type = other DNA
tcaaacatttcgcaagcatc

SEQ ID NO: 13174 - DNA, 20 bp, synthetic construct
  source 1..20: mol_type = other DNA
ctaccatggacaagtgaata

SEQ ID NO: 13175 - DNA, 20 bp, synthetic construct
  source 1..20: mol_type = other DNA
ctcgactgcacccgtgcaaa

SEQ ID NO: 13176 - DNA, 20 bp, synthetic construct
  source 1..20: mol_type = other DNA
gggagttaatggacaagttt

SEQ ID NO: 13177 - DNA, 20 bp, synthetic construct
  source 1..20: mol_type = other DNA
cacatcggctgacgttagtc

SEQ ID NO: 13178 - DNA, 20 bp, synthetic construct
  source 1..20: mol_type = other DNA
ttcctttctagcgactttac

SEQ ID NO: 13179 - DNA, 20 bp, synthetic construct
  source 1..20: mol_type = other DNA
gattggaatactttagcggg

SEQ ID NO: 13180 - DNA, 20 bp, synthetic construct
  source 1..20: mol_type = other DNA
gtcggaggttctgcagtcat

SEQ ID NO: 13181 - DNA, 20 bp, synthetic construct
  source 1..20: mol_type = other DNA
cggtttgaggataggatctt

SEQ ID NO: 13182 - DNA, 20 bp, synthetic construct
  source 1..20: mol_type = other DNA
tatttgcatgtatgggctgg

SEQ ID NO: 13183 - DNA, 20 bp, synthetic construct
  source 1..20: mol_type = other DNA
atccaactgtcagaacccga

SEQ ID NO: 13184 - DNA, 20 bp, synthetic construct
  source 1..20: mol_type = other DNA
ccacgtttcgaagctagact

SEQ ID NO: 13185 - DNA, 20 bp, synthetic construct
  source 1..20: mol_type = other DNA
acagccttagtcccaatagg

SEQ ID NO: 13186 - DNA, 20 bp, synthetic construct
  source 1..20: mol_type = other DNA
aggtgcgattccctccattt

SEQ ID NO: 13187 - DNA, 20 bp, synthetic construct
  source 1..20: mol_type = other DNA
agcgccttgaagcatgagga

SEQ ID NO: 13188 - DNA, 20 bp, synthetic construct
  source 1..20: mol_type = other DNA
cgtcgtatttcggagcgctt

SEQ ID NO: 13189 - DNA, 20 bp, synthetic construct
  source 1..20: mol_type = other DNA
cctggtaggaatacggaccg

SEQ ID NO: 13190 - DNA, 20 bp, synthetic construct
  source 1..20: mol_type = other DNA
gctgtaataatctccctcac

SEQ ID NO: 13191 - DNA, 20 bp, synthetic construct
  source 1..20: mol_type = other DNA
atctctgacggcaaggttcc

SEQ ID NO: 13192 - DNA, 20 bp, synthetic construct
  source 1..20: mol_type = other DNA
gtgtgttggtttccatcgga

SEQ ID NO: 13193 - DNA, 20 bp, synthetic construct
  source 1..20: mol_type = other DNA
gcgtcagcgtatcacgaagt

SEQ ID NO: 13194 - DNA, 20 bp, synthetic construct
  source 1..20: mol_type = other DNA
tttcacaatctagttatccg

SEQ ID NO: 13195 - DNA, 20 bp, synthetic construct
  source 1..20: mol_type = other DNA
ctacgcccgccgataaggat

SEQ ID NO: 13196 - DNA, 20 bp, synthetic construct
  source 1..20: mol_type = other DNA
ctgacactattaaccgtcgt

SEQ ID NO: 13197 - DNA, 20 bp, synthetic construct
  source 1..20: mol_type = other DNA
tacgtagtacatactacgag

SEQ ID NO: 13198 - DNA, 20 bp, synthetic construct
  source 1..20: mol_type = other DNA
cccagctcttcagtacaaga

SEQ ID NO: 13199 - DNA, 20 bp, synthetic construct
  source 1..20: mol_type = other DNA
gcgtaagtccctcagcgtga

SEQ ID NO: 13200 - DNA, 20 bp, synthetic construct
  source 1..20: mol_type = other DNA
tcgcagtgtcggagttatct

SEQ ID NO: 13201 - DNA, 20 bp, synthetic construct
  source 1..20: mol_type = other DNA
tatgcgtgtaacattcaaac

SEQ ID NO: 13202 - DNA, 20 bp, synthetic construct
  source 1..20: mol_type = other DNA
atcggtttccttctcaaagc

SEQ ID NO: 13203 - DNA, 20 bp, synthetic construct
  source 1..20: mol_type = other DNA
tggagccatcaaacatagcg

SEQ ID NO: 13204 - DNA, 20 bp, synthetic construct
  source 1..20: mol_type = other DNA
tcgcagaaacggtcgcgagg

SEQ ID NO: 13205 - DNA, 20 bp, synthetic construct
  source 1..20: mol_type = other DNA
tggaggtgctctgatgcgga

SEQ ID NO: 13206 - DNA, 20 bp, synthetic construct
  source 1..20: mol_type = other DNA
ggtgacggatagatcaggac

SEQ ID NO: 13207 - DNA, 20 bp, synthetic construct
  source 1..20: mol_type = other DNA
tgtaggccgtggactgggtt

SEQ ID NO: 13208 - DNA, 20 bp, synthetic construct
  source 1..20: mol_type = other DNA
ttgcaatttcgggcggataa

SEQ ID NO: 13209 - DNA, 20 bp, synthetic construct
  source 1..20: mol_type = other DNA
cgaacggacttatccgtccc

SEQ ID NO: 13210 - DNA, 20 bp, synthetic construct
  source 1..20: mol_type = other DNA
tgagctgagaatttcgaagc

SEQ ID NO: 13211 - DNA, 20 bp, synthetic construct
  source 1..20: mol_type = other DNA
gtgttgtatgtgctttcgtc

SEQ ID NO: 13212 - DNA, 20 bp, synthetic construct
  source 1..20: mol_type = other DNA
tgtatctggaacatgaagcg

SEQ ID NO: 13213 - DNA, 20 bp, synthetic construct
  source 1..20: mol_type = other DNA
catgcaatcaagcgtcagcg

SEQ ID NO: 13214 - DNA, 20 bp, synthetic construct
  source 1..20: mol_type = other DNA
cacaagggctgggttccaaa

SEQ ID NO: 13215 - DNA, 20 bp, synthetic construct
  source 1..20: mol_type = other DNA
ccctacccagatctcgtcac

SEQ ID NO: 13216 - DNA, 20 bp, synthetic construct
  source 1..20: mol_type = other DNA
ttacgacaaggctacatgtg

SEQ ID NO: 13217 - DNA, 20 bp, synthetic construct
  source 1..20: mol_type = other DNA
tctctctgcaatcatgtccg

SEQ ID NO: 13218 - DNA, 20 bp, synthetic construct
  source 1..20: mol_type = other DNA
aagattggtcgtctatgctt

SEQ ID NO: 13219 - DNA, 20 bp, synthetic construct
  source 1..20: mol_type = other DNA
agttggattagtccgtaatc

SEQ ID NO: 13220 - DNA, 20 bp, synthetic construct
  source 1..20: mol_type = other DNA
ttaacaagtattcaacggca

SEQ ID NO: 13221 - DNA, 20 bp, synthetic construct
  source 1..20: mol_type = other DNA
gaccagcaataacgcaagtc

SEQ ID NO: 13222 - DNA, 20 bp, synthetic construct
  source 1..20: mol_type = other DNA
cggccacatacgaatttgaa

SEQ ID NO: 13223 - DNA, 20 bp, synthetic construct
  source 1..20: mol_type = other DNA
ccgaatgcttggtccctgga

SEQ ID NO: 13224 - DNA, 20 bp, synthetic construct
  source 1..20: mol_type = other DNA
gtgggcaactaaacgaacgc

SEQ ID NO: 13225 - DNA, 20 bp, synthetic construct
  source 1..20: mol_type = other DNA
gccaaggaaagtggcgacat

SEQ ID NO: 13226 - DNA, 20 bp, synthetic construct
  source 1..20: mol_type = other DNA
tcaacaggcaaccgacatca

SEQ ID NO: 13227 - DNA, 20 bp, synthetic construct
  source 1..20: mol_type = other DNA
gagggcttgaccctggcttg

SEQ ID NO: 13228 - DNA, 20 bp, synthetic construct
  source 1..20: mol_type = other DNA
cactcgtctaccttgtgaaa

SEQ ID NO: 13229 - DNA, 20 bp, synthetic construct
  source 1..20: mol_type = other DNA
taggcgcacgctgggaatga

SEQ ID NO: 13230 - DNA, 20 bp, synthetic construct
  source 1..20: mol_type = other DNA
agataccaagcggtgctagt

SEQ ID NO: 13231 - DNA, 20 bp, synthetic construct
  source 1..20: mol_type = other DNA
tgacgcgtgggtgtgacatg

SEQ ID NO: 13232 - DNA, 20 bp, synthetic construct
  source 1..20: mol_type = other DNA
agtaaatgagttaggatcgt

SEQ ID NO: 13233 - DNA, 20 bp, synthetic construct
  source 1..20: mol_type = other DNA
cggccacggaatacggcgaa

SEQ ID NO: 13234 - DNA, 20 bp, synthetic construct
  source 1..20: mol_type = other DNA
cgcccggaactcaatactct

SEQ ID NO: 13235 - DNA, 20 bp, synthetic construct
  source 1..20: mol_type = other DNA
cgttacgaaagtacgaacta

SEQ ID NO: 13236 - DNA, 20 bp, synthetic construct
  source 1..20: mol_type = other DNA
ttgaattgcggttggatagc

SEQ ID NO: 13237 - DNA, 20 bp, synthetic construct
  source 1..20: mol_type = other DNA
gttattcccgtgtggaatac

SEQ ID NO: 13238 - DNA, 20 bp, synthetic construct
  source 1..20: mol_type = other DNA
acggtaaagattacaaccgg

SEQ ID NO: 13239 - DNA, 20 bp, synthetic construct
  source 1..20: mol_type = other DNA
gtctacgggaataactgcac

SEQ ID NO: 13240 - DNA, 20 bp, synthetic construct
  source 1..20: mol_type = other DNA
caattagttcagtgactgat

SEQ ID NO: 13241 - DNA, 20 bp, synthetic construct
  source 1..20: mol_type = other DNA
aaacgcagttgtcagtcagg

SEQ ID NO: 13242 - DNA, 20 bp, synthetic construct
  source 1..20: mol_type = other DNA
ttgtgtgtgatataggcgtc

SEQ ID NO: 13243 - DNA, 20 bp, synthetic construct
  source 1..20: mol_type = other DNA
ggtaggccttgctctgctgc

SEQ ID NO: 13244 - DNA, 20 bp, synthetic construct
  source 1..20: mol_type = other DNA
gtccgtccaggccaacttga

SEQ ID NO: 13245 - DNA, 20 bp, synthetic construct
  source 1..20: mol_type = other DNA
gtagcaagcacaagtggtct

SEQ ID NO: 13246 - DNA, 20 bp, synthetic construct
  source 1..20: mol_type = other DNA
gtaagcacatcacaggcacc

SEQ ID NO: 13247 - DNA, 20 bp, synthetic construct
  source 1..20: mol_type = other DNA
taccgcctcagcgcgattgc

SEQ ID NO: 13248 - DNA, 20 bp, synthetic construct
  source 1..20: mol_type = other DNA
ggtaaccgtcctaaggacca

SEQ ID NO: 13249 - DNA, 20 bp, synthetic construct
  source 1..20: mol_type = other DNA
aaacaagctgtgctctctgt

SEQ ID NO: 13250 - DNA, 20 bp, synthetic construct
  source 1..20: mol_type = other DNA
attgcacacttctgcggcga

SEQ ID NO: 13251 - DNA, 20 bp, synthetic construct
  source 1..20: mol_type = other DNA
gaatgatcgggtgatgatca

SEQ ID NO: 13252 - DNA, 20 bp, synthetic construct
  source 1..20: mol_type = other DNA
ccaaatcgcgtccggttgcc

SEQ ID NO: 13253 - DNA, 20 bp, synthetic construct
  source 1..20: mol_type = other DNA
tttgcacaaagccgtctgca

SEQ ID NO: 13254 - DNA, 20 bp, synthetic construct
  source 1..20: mol_type = other DNA
gctgcacttggagataagca

SEQ ID NO: 13255 - DNA, 20 bp, synthetic construct
  source 1..20: mol_type = other DNA
tatagtgtaccctcaagcgc

SEQ ID NO: 13256 - DNA, 20 bp, synthetic construct
  source 1..20: mol_type = other DNA
caggaatgctattccttgct

SEQ ID NO: 13257 - DNA, 20 bp, synthetic construct
  source 1..20: mol_type = other DNA
cataaggatgccctctgttc

SEQ ID NO: 13258 - DNA, 20 bp, synthetic construct
  source 1..20: mol_type = other DNA
accgcggccggtataaatga

SEQ ID NO: 13259 - DNA, 20 bp, synthetic construct
  source 1..20: mol_type = other DNA
ttagggaactcaacaacgac

SEQ ID NO: 13260 - DNA, 20 bp, synthetic construct
  source 1..20: mol_type = other DNA
acgttgttaatggttgtacg

SEQ ID NO: 13261 - DNA, 20 bp, synthetic construct
  source 1..20: mol_type = other DNA
ttcctttgtgactcgtaggg

SEQ ID NO: 13262 - DNA, 20 bp, synthetic construct
  source 1..20: mol_type = other DNA
accaccgtgaatgcgacaat

SEQ ID NO: 13263 - DNA, 20 bp, synthetic construct
  source 1..20: mol_type = other DNA
gatagaatgagacctggcag

SEQ ID NO: 13264 - DNA, 20 bp, synthetic construct
  source 1..20: mol_type = other DNA
tagtgagaggagagtccgat

SEQ ID NO: 13265 - DNA, 20 bp, synthetic construct
  source 1..20: mol_type = other DNA
tgagggagatactaaccctg

SEQ ID NO: 13266 - DNA, 20 bp, synthetic construct
  source 1..20: mol_type = other DNA
atatgtgcgggagtagggcc

SEQ ID NO: 13267 - DNA, 20 bp, synthetic construct
  source 1..20: mol_type = other DNA
cactaagctactgaactaca

SEQ ID NO: 13268 - DNA, 20 bp, synthetic construct
  source 1..20: mol_type = other DNA
ctataagtcccaatgaggtt

SEQ ID NO: 13269 - DNA, 20 bp, synthetic construct
  source 1..20: mol_type = other DNA
tctttaaacaggaagtcgat

SEQ ID NO: 13270 - DNA, 20 bp, synthetic construct
  source 1..20: mol_type = other DNA
ccaaagcgcgtgagaagtac

SEQ ID NO: 13271 - DNA, 20 bp, synthetic construct
  source 1..20: mol_type = other DNA
aagcggaaaggcatcacggg

SEQ ID NO: 13272 - DNA, 20 bp, synthetic construct
  source 1..20: mol_type = other DNA
cgtagagaagcagtttcagg

SEQ ID NO: 13273 - DNA, 20 bp, synthetic construct
  source 1..20: mol_type = other DNA
ccatcaccagaagcataatt

SEQ ID NO: 13274 - DNA, 20 bp, synthetic construct
  source 1..20: mol_type = other DNA
caacccaccaacggtacacc

SEQ ID NO: 13275 - DNA, 20 bp, synthetic construct
  source 1..20: mol_type = other DNA
ctgttaccctaaagtcttgt

SEQ ID NO: 13276 - DNA, 20 bp, synthetic construct
  source 1..20: mol_type = other DNA
tggccgggaaacatggttga

SEQ ID NO: 13277 - DNA, 20 bp, synthetic construct
  source 1..20: mol_type = other DNA
gttatatacgagtttcgggc

SEQ ID NO: 13278 - DNA, 20 bp, synthetic construct
  source 1..20: mol_type = other DNA
ttccgtcgagtatcttacaa

SEQ ID NO: 13279 - DNA, 20 bp, synthetic construct
  source 1..20: mol_type = other DNA
agcattgttgtaacctaacc

SEQ ID NO: 13280 - DNA, 20 bp, synthetic construct
  source 1..20: mol_type = other DNA
aggttaccgctacatttgcg

SEQ ID NO: 13281 - DNA, 20 bp, synthetic construct
  source 1..20: mol_type = other DNA
ccatgacatgctatcataag

SEQ ID NO: 13282 - DNA, 20 bp, synthetic construct
  source 1..20: mol_type = other DNA
tatcagcaacgggcacctcc

SEQ ID NO: 13283 - DNA, 20 bp, synthetic construct
  source 1..20: mol_type = other DNA
cgtaattccgaaaccacaga

SEQ ID NO: 13284 - DNA, 20 bp, synthetic construct
  source 1..20: mol_type = other DNA
ataaaggtcgtgaggtaatg

SEQ ID NO: 13285 - DNA, 20 bp, synthetic construct
  source 1..20: mol_type = other DNA
cctcctgcctattgaaagtc

SEQ ID NO: 13286 - DNA, 20 bp, synthetic construct
  source 1..20: mol_type = other DNA
gttggaggctaactacgaca

SEQ ID NO: 13287 - DNA, 20 bp, synthetic construct
  source 1..20: mol_type = other DNA
gaagattaccagtgcaatca

SEQ ID NO: 13288 - DNA, 20 bp, synthetic construct
  source 1..20: mol_type = other DNA
agatgtggagataagtcgca

SEQ ID NO: 13289 - DNA, 20 bp, synthetic construct
  source 1..20: mol_type = other DNA
atacctaatccgcaagacgt

SEQ ID NO: 13290 - DNA, 20 bp, synthetic construct
  source 1..20: mol_type = other DNA
tctccgttaactgaacaagg

SEQ ID NO: 13291 - DNA, 20 bp, synthetic construct
  source 1..20: mol_type = other DNA
agcgcagatgctggagtcgg

SEQ ID NO: 13292 - DNA, 20 bp, synthetic construct
  source 1..20: mol_type = other DNA
gcatcgaagtgcgatcgggt

SEQ ID NO: 13293 - DNA, 20 bp, synthetic construct
  source 1..20: mol_type = other DNA
cctataatttgaccagacga

SEQ ID NO: 13294 - DNA, 20 bp, synthetic construct
  source 1..20: mol_type = other DNA
gtcgccactacaccgtttgt

SEQ ID NO: 13295 - DNA, 20 bp, synthetic construct
  source 1..20: mol_type = other DNA
ggctttgattatcatcgggc

SEQ ID NO: 13296 - DNA, 20 bp, synthetic construct
  source 1..20: mol_type = other DNA
cgcatgatgaatggaagcgc

SEQ ID NO: 13297 - DNA, 20 bp, synthetic construct
  source 1..20: mol_type = other DNA
tccatgcaccaatttctaat

SEQ ID NO: 13298 - DNA, 20 bp, synthetic construct
  source 1..20: mol_type = other DNA
tagtctgcaccctgggtgag

SEQ ID NO: 13299 - DNA, 20 bp, synthetic construct
  source 1..20: mol_type = other DNA
aggtacatttaggtcgtgag

SEQ ID NO: 13300 - DNA, 20 bp, synthetic construct
  source 1..20: mol_type = other DNA
ccgaccacaaagttgtccga

SEQ ID NO: 13301 - DNA, 20 bp, synthetic construct
  source 1..20: mol_type = other DNA
cagtctcggtagtgactagg

SEQ ID NO: 13302 - DNA, 20 bp, synthetic construct
  source 1..20: mol_type = other DNA
aggcataaagcaaatccaaa

SEQ ID NO: 13303 - DNA, 20 bp, synthetic construct
  source 1..20: mol_type = other DNA
gattcaggtcgttgtggaca

SEQ ID NO: 13304 - DNA, 20 bp, synthetic construct
  source 1..20: mol_type = other DNA
cactgtagccgaccggacaa

SEQ ID NO: 13305 - DNA, 20 bp, synthetic construct
  source 1..20: mol_type = other DNA
catcagcaactacgatgagt

SEQ ID NO: 13306 - DNA, 20 bp, synthetic construct
  source 1..20: mol_type = other DNA
agatcggagccggttcgcta

SEQ ID NO: 13307 - DNA, 20 bp, synthetic construct
  source 1..20: mol_type = other DNA
gagagcggatcgcgatagtt

SEQ ID NO: 13308 - DNA, 20 bp, synthetic construct
  source 1..20: mol_type = other DNA
gcggcttaagctgggagcta

SEQ ID NO: 13309 - DNA, 20 bp, synthetic construct
  source 1..20: mol_type = other DNA
cttgaatcattacgtgaggc

SEQ ID NO: 13310 - DNA, 20 bp, synthetic construct
  source 1..20: mol_type = other DNA
cccaagtcatccgaggcgag

SEQ ID NO: 13311 - DNA, 20 bp, synthetic construct
  source 1..20: mol_type = other DNA
cggtgagatcatgacacata

SEQ ID NO: 13312 - DNA, 20 bp, synthetic construct
  source 1..20: mol_type = other DNA
cgcaaggatgaagtcagcat

SEQ ID NO: 13313 - DNA, 20 bp, synthetic construct
  source 1..20: mol_type = other DNA
gtcggttcccatcacgtgct

SEQ ID NO: 13314 - DNA, 20 bp, synthetic construct
  source 1..20: mol_type = other DNA
tcagccgacgaatcgttctg

SEQ ID NO: 13315 - DNA, 20 bp, synthetic construct
  source 1..20: mol_type = other DNA
tatcaggatcaaccacacag

SEQ ID NO: 13316 - DNA, 20 bp, synthetic construct
  source 1..20: mol_type = other DNA
ttacactaaacttcacatct

SEQ ID NO: 13317 - DNA, 20 bp, synthetic construct
  source 1..20: mol_type = other DNA
cagcacggcagaataattgc

SEQ ID NO: 13318 - DNA, 20 bp, synthetic construct
  source 1..20: mol_type = other DNA
accacagcatccgtcccatt

SEQ ID NO: 13319 - DNA, 20 bp, synthetic construct
  source 1..20: mol_type = other DNA
aaagcgttcggtaaatcgta

SEQ ID NO: 13320 - DNA, 20 bp, synthetic construct
  source 1..20: mol_type = other DNA
gtagcgtgctgctgctagtg

SEQ ID NO: 13321 - DNA, 20 bp, synthetic construct
  source 1..20: mol_type = other DNA
ctcagctgtacggaacatac

SEQ ID NO: 13322 - DNA, 20 bp, synthetic construct
  source 1..20: mol_type = other DNA
agaagcattcttcactcggt

SEQ ID NO: 13323 - DNA, 20 bp, synthetic construct
  source 1..20: mol_type = other DNA
tgctgcgagtgaaattgata

SEQ ID NO: 13324 - DNA, 20 bp, synthetic construct
  source 1..20: mol_type = other DNA
gtggcttcagattattctac

SEQ ID NO: 13325 - DNA, 20 bp, synthetic construct
  source 1..20: mol_type = other DNA
cttatgaggacagggcaacg

SEQ ID NO: 13326 - DNA, 20 bp, synthetic construct
  source 1..20: mol_type = other DNA
atcaatctgggacttagcat

SEQ ID NO: 13327 - DNA, 20 bp, synthetic construct
  source 1..20: mol_type = other DNA
agttaccatactatcacatg

SEQ ID NO: 13328 - DNA, 20 bp, synthetic construct
  source 1..20: mol_type = other DNA
gcatctaccgatagtcggct

SEQ ID NO: 13329 - DNA, 20 bp, synthetic construct
  source 1..20: mol_type = other DNA
ccctcaagatggctccctcg

SEQ ID NO: 13330 - DNA, 20 bp, synthetic construct
  source 1..20: mol_type = other DNA
gatcgaccaactgtagatgc

SEQ ID NO: 13331 - DNA, 20 bp, synthetic construct
  source 1..20: mol_type = other DNA
ttacacccagtatccatcag

SEQ ID NO: 13332 - DNA, 20 bp, synthetic construct
  source 1..20: mol_type = other DNA
gtcgagtaattctcggtcct

SEQ ID NO: 13333 - DNA, 20 bp, synthetic construct
  source 1..20: mol_type = other DNA
tctatgaaagggtccggttt

SEQ ID NO: 13334 - DNA, 20 bp, synthetic construct
  source 1..20: mol_type = other DNA
ccagtcaatacgcttattga

SEQ ID NO: 13335 - DNA, 20 bp, synthetic construct
  source 1..20: mol_type = other DNA
taagaggcagtatgtggctg

SEQ ID NO: 13336 - DNA, 20 bp, synthetic construct
  source 1..20: mol_type = other DNA
ggtcgataagttgatgcaga

SEQ ID NO: 13337 - DNA, 20 bp, synthetic construct
  source 1..20: mol_type = other DNA
cggacttcgactctacccga

SEQ ID NO: 13338 - DNA, 20 bp, synthetic construct
  source 1..20: mol_type = other DNA
tgctcacacacgagttcgtc

SEQ ID NO: 13339 - DNA, 20 bp, synthetic construct
  source 1..20: mol_type = other DNA
aactcgcccagcacaaagag

SEQ ID NO: 13340 - DNA, 20 bp, synthetic construct
  source 1..20: mol_type = other DNA
tgaagcgaaagtaggtaacc

SEQ ID NO: 13341 - DNA, 20 bp, synthetic construct
  source 1..20: mol_type = other DNA
cgtgggcacagaatacttaa

SEQ ID NO: 13342 - DNA, 20 bp, synthetic construct
  source 1..20: mol_type = other DNA
aaggacctaagagcaaaggc

SEQ ID NO: 13343 - DNA, 20 bp, synthetic construct
  source 1..20: mol_type = other DNA
ctagcgctgaagaaacgaga

SEQ ID NO: 13344 - DNA, 20 bp, synthetic construct
  source 1..20: mol_type = other DNA
cgcccgttctatacgaatgc

SEQ ID NO: 13345 - DNA, 20 bp, synthetic construct
  source 1..20: mol_type = other DNA
ataacggtgccttgatgaga

SEQ ID NO: 13346 - DNA, 20 bp, synthetic construct
  source 1..20: mol_type = other DNA
ggaggccatagtatttgccc

SEQ ID NO: 13347 - DNA, 20 bp, synthetic construct
  source 1..20: mol_type = other DNA
agccatgtcgatgttgtagg

SEQ ID NO: 13348 - DNA, 20 bp, synthetic construct
  source 1..20: mol_type = other DNA
gagaaattccgcagctgaac

SEQ ID NO: 13349 - DNA, 20 bp, synthetic construct
  source 1..20: mol_type = other DNA
acgacatcacggtgattctt

SEQ ID NO: 13350 - DNA, 20 bp, synthetic construct
  source 1..20: mol_type = other DNA
tagcagttacttgcccgaaa

SEQ ID NO: 13351 - DNA, 20 bp, synthetic construct
  source 1..20: mol_type = other DNA
gacaagatcaagatccctcg

SEQ ID NO: 13352 - DNA, 20 bp, synthetic construct
  source 1..20: mol_type = other DNA
caatatccgatctgtaccgt

SEQ ID NO: 13353 - DNA, 20 bp, synthetic construct
  source 1..20: mol_type = other DNA
actctgcaaagcgctgctac

SEQ ID NO: 13354 - DNA, 20 bp, synthetic construct
  source 1..20: mol_type = other DNA
gtgtcacttgttatccgagt

SEQ ID NO: 13355 - DNA, 20 bp, synthetic construct
  source 1..20: mol_type = other DNA
gacgatcttacaactagcgg

SEQ ID NO: 13356 - DNA, 20 bp, synthetic construct
  source 1..20: mol_type = other DNA
ggcgaaggaaacggaacgac

SEQ ID NO: 13357 - DNA, 20 bp, synthetic construct
  source 1..20: mol_type = other DNA
tctggtgagatcccatcaca

SEQ ID NO: 13358 - DNA, 20 bp, synthetic construct
  source 1..20: mol_type = other DNA
cgtggtggcaaggtccagtg

SEQ ID NO: 13359 - DNA, 20 bp, synthetic construct
  source 1..20: mol_type = other DNA
aatcactaaaggaagagggt

SEQ ID NO: 13360 - DNA, 20 bp, synthetic construct
  source 1..20: mol_type = other DNA
ataggcgccgactctaatgg

SEQ ID NO: 13361 - DNA, 20 bp, synthetic construct
  source 1..20: mol_type = other DNA
taggcggataccatggcgta

SEQ ID NO: 13362 - DNA, 20 bp, synthetic construct
  source 1..20: mol_type = other DNA
gcggtgactgccatcatggg

SEQ ID NO: 13363 - DNA, 20 bp, synthetic construct
  source 1..20: mol_type = other DNA
tctatcaccagcattagaag

SEQ ID NO: 13364 - DNA, 20 bp, synthetic construct
  source 1..20: mol_type = other DNA
gggcaagcagagatcgttca

SEQ ID NO: 13365 - DNA, 20 bp, synthetic construct
  source 1..20: mol_type = other DNA
ggaccggcccggacttaatt

SEQ ID NO: 13366 - DNA, 20 bp, synthetic construct
  source 1..20: mol_type = other DNA
acaccaacttcggtgataac

SEQ ID NO: 13367 - DNA, 20 bp, synthetic construct
  source 1..20: mol_type = other DNA
gcgataatcctctacgcccg

SEQ ID NO: 13368 - DNA, 20 bp, synthetic construct
  source 1..20: mol_type = other DNA
gacaatcgtgattacatagc

SEQ ID NO: 13369 - DNA, 20 bp, synthetic construct
  source 1..20: mol_type = other DNA
accttgtattgcacctgctt

SEQ ID NO: 13370 - DNA, 20 bp, synthetic construct
  source 1..20: mol_type = other DNA
gaactgccaagcgcactcat

SEQ ID NO: 13371 - DNA, 20 bp, synthetic construct
  source 1..20: mol_type = other DNA
tgagcactgtcgtcgctaca

SEQ ID NO: 13372 - DNA, 20 bp, synthetic construct
  source 1..20: mol_type = other DNA
ggacggcggtctataggtta

SEQ ID NO: 13373 - DNA, 20 bp, synthetic construct
  source 1..20: mol_type = other DNA
gagcacctggtatggcacgt

SEQ ID NO: 13374 - DNA, 20 bp, synthetic construct
  source 1..20: mol_type = other DNA
aatgggtcccttgactagcg

SEQ ID NO: 13375 - DNA, 20 bp, synthetic construct
  source 1..20: mol_type = other DNA
ggttgagtacggtcctaggc

SEQ ID NO: 13376 - DNA, 20 bp, synthetic construct
  source 1..20: mol_type = other DNA
caacacctcgggataaagga

SEQ ID NO: 13377 - DNA, 20 bp, synthetic construct
  source 1..20: mol_type = other DNA
ccctgaccagttgcgggttt

SEQ ID NO: 13378 - DNA, 20 bp, synthetic construct
  source 1..20: mol_type = other DNA
tatcaccgctgcgggactag

SEQ ID NO: 13379 - DNA, 20 bp, synthetic construct
  source 1..20: mol_type = other DNA
ttggcaagcacgtgaatcga

SEQ ID NO: 13380 - DNA, 20 bp, synthetic construct
  source 1..20: mol_type = other DNA
atcgcaagtttcttaatcgc

SEQ ID NO: 13381 - DNA, 20 bp, synthetic construct
  source 1..20: mol_type = other DNA
tgacttgtggtgtggtgact

SEQ ID NO: 13382 - DNA, 20 bp, synthetic construct
  source 1..20: mol_type = other DNA
gactgtctatacgccttatc

SEQ ID NO: 13383 - DNA, 20 bp, synthetic construct
  source 1..20: mol_type = other DNA
ggagacattcgtcgtataat

SEQ ID NO: 13384 - DNA, 20 bp, synthetic construct
  source 1..20: mol_type = other DNA
taaatgagtcccacgggatc

SEQ ID NO: 13385 - DNA, 20 bp, synthetic construct
  source 1..20: mol_type = other DNA
accggccgatgcatgtaacg

SEQ ID NO: 13386 - DNA, 20 bp, synthetic construct
  source 1..20: mol_type = other DNA
ttgccgtcgggtgaatttcc

SEQ ID NO: 13387 - DNA, 20 bp, synthetic construct
  source 1..20: mol_type = other DNA
attggagatggacgtccgca

SEQ ID NO: 13388 - DNA, 20 bp, synthetic construct
  source 1..20: mol_type = other DNA
ttagtttcccagatccttcc

SEQ ID NO: 13389 - DNA, 20 bp, synthetic construct
  source 1..20: mol_type = other DNA
gttctctgatgaaggtacag

SEQ ID NO: 13390 - DNA, 20 bp, synthetic construct
  source 1..20: mol_type = other DNA
ggacagctagcgcgcaagga

SEQ ID NO: 13391 - DNA, 20 bp, synthetic construct
  source 1..20: mol_type = other DNA
ttgttgggagcttggcttcc

SEQ ID NO: 13392 - DNA, 20 bp, synthetic construct
  source 1..20: mol_type = other DNA
aaaggctgacgtcgtaattt

SEQ ID NO: 13393 - DNA, 20 bp, synthetic construct
  source 1..20: mol_type = other DNA
gtttagaaagcactggactg

SEQ ID NO: 13394 - DNA, 20 bp, synthetic construct
  source 1..20: mol_type = other DNA
cttagaactccacggttacg

SEQ ID NO: 13395 - DNA, 20 bp, synthetic construct
  source 1..20: mol_type = other DNA
agatgtcggccttcactgtg

SEQ ID NO: 13396 - DNA, 20 bp, synthetic construct
  source 1..20: mol_type = other DNA
tccggtaagggcgcggctat

SEQ ID NO: 13397 - DNA, 20 bp, synthetic construct
  source 1..20: mol_type = other DNA
cacctgtacaacacattgcc

SEQ ID NO: 13398 - DNA, 20 bp, synthetic construct
  source 1..20: mol_type = other DNA
gcgtttcccgaaagctccat

SEQ ID NO: 13399 - DNA, 20 bp, synthetic construct
  source 1..20: mol_type = other DNA
aaacaaggataggcgtgagg

SEQ ID NO: 13400 - DNA, 20 bp, synthetic construct
  source 1..20: mol_type = other DNA
ccgtggttatctaagtatat

SEQ ID NO: 13401 - DNA, 20 bp, synthetic construct
  source 1..20: mol_type = other DNA
aagctggcgccttcgcctaa

SEQ ID NO: 13402 - DNA, 20 bp, synthetic construct
  source 1..20: mol_type = other DNA
accggatctagcttgtttaa

SEQ ID NO: 13403 - DNA, 20 bp, synthetic construct
  source 1..20: mol_type = other DNA
atgtcgcttatggtgaacac

SEQ ID NO: 13404 - DNA, 20 bp, synthetic construct
  source 1..20: mol_type = other DNA
gctgaaacgggaccacggca

SEQ ID NO: 13405 - DNA, 20 bp, synthetic construct
  source 1..20: mol_type = other DNA
ggctgagccaacgtcctcag

SEQ ID NO: 13406 - DNA, 20 bp, synthetic construct
  source 1..20: mol_type = other DNA
cttgtggcattgcgcaataa

SEQ ID NO: 13407 - DNA, 20 bp, synthetic construct
  source 1..20: mol_type = other DNA
tctactcagattgagcggga

SEQ ID NO: 13408 - DNA, 20 bp, synthetic construct
  source 1..20: mol_type = other DNA
gtttgcactttgcattgaga

SEQ ID NO: 13409 - DNA, 20 bp, synthetic construct
  source 1..20: mol_type = other DNA
atctgaagtgccaactttct

SEQ ID NO: 13410 - DNA, 20 bp, synthetic construct
  source 1..20: mol_type = other DNA
catcaccctgcccgactttg

SEQ ID NO: 13411 - DNA, 20 bp, synthetic construct
  source 1..20: mol_type = other DNA
aaaggtggagtcttccaatt

SEQ ID NO: 13412 - DNA, 20 bp, synthetic construct
  source 1..20: mol_type = other DNA
cctatcagagcggttctcac

SEQ ID NO: 13413 - DNA, 20 bp, synthetic construct
  source 1..20: mol_type = other DNA
ctactataacgagtcaggag

SEQ ID NO: 13414 - DNA, 20 bp, synthetic construct
  source 1..20: mol_type = other DNA
ggcttctgaatataaggaca

SEQ ID NO: 13415 - DNA, 20 bp, synthetic construct
  source 1..20: mol_type = other DNA
ctgccaaacctcgcgtgcag

SEQ ID NO: 13416 - DNA, 20 bp, synthetic construct
  source 1..20: mol_type = other DNA
cagctgtacctattctaccc

SEQ ID NO: 13417 - DNA, 20 bp, synthetic construct
  source 1..20: mol_type = other DNA
catcacgctatcgggcttcc

SEQ ID NO: 13418 - DNA, 20 bp, synthetic construct
  source 1..20: mol_type = other DNA
cctacattacacaactaaca

SEQ ID NO: 13419 - DNA, 20 bp, synthetic construct
  source 1..20: mol_type = other DNA
acctctacgtggaacgagtg

SEQ ID NO: 13420 - DNA, 20 bp, synthetic construct
  source 1..20: mol_type = other DNA
cttattctcagtagcccaga

SEQ ID NO: 13421 - DNA, 20 bp, synthetic construct
  source 1..20: mol_type = other DNA
tcagtcgtaagtcagcatgt

SEQ ID NO: 13422 - DNA, 20 bp, synthetic construct
  source 1..20: mol_type = other DNA
cctaacagcaccatccttcc

SEQ ID NO: 13423 - DNA, 20 bp, synthetic construct
  source 1..20: mol_type = other DNA
agtcagctggtcagggagac

SEQ ID NO: 13424 - DNA, 20 bp, synthetic construct
  source 1..20: mol_type = other DNA
tacgccgtgcgagggatgtt

SEQ ID NO: 13425 - DNA, 20 bp, synthetic construct
  source 1..20: mol_type = other DNA
tctatcatagttactacacc

SEQ ID NO: 13426 - DNA, 20 bp, synthetic construct
  source 1..20: mol_type = other DNA
gcagtttcacctatccgtat

SEQ ID NO: 13427 - DNA, 20 bp, synthetic construct
  source 1..20: mol_type = other DNA
cctcctgtaggaataatgga

SEQ ID NO: 13428 - DNA, 20 bp, synthetic construct
  source 1..20: mol_type = other DNA
aacagcccgtcgattatgtc

SEQ ID NO: 13429 - DNA, 20 bp, synthetic construct
  source 1..20: mol_type = other DNA
gacagctagcaaataactgc

SEQ ID NO: 13430 - DNA, 20 bp, synthetic construct
  source 1..20: mol_type = other DNA
cggaggttccgagtacccac

SEQ ID NO: 13431 - DNA, 20 bp, synthetic construct
  source 1..20: mol_type = other DNA
ctgtccgttgcaagagccat

SEQ ID NO: 13432 - DNA, 20 bp, synthetic construct
  source 1..20: mol_type = other DNA
ctgaggctctataactcgcg

SEQ ID NO: 13433 - DNA, 20 bp, synthetic construct
  source 1..20: mol_type = other DNA
gtgccctctactggacatcg

SEQ ID NO: 13434 - DNA, 20 bp, synthetic construct
  source 1..20: mol_type = other DNA
tctactcgcagcagccaggt

SEQ ID NO: 13435 - DNA, 20 bp, synthetic construct
  source 1..20: mol_type = other DNA
gtcgtagcgatatatcgtaa

SEQ ID NO: 13436 - DNA, 20 bp, synthetic construct
  source 1..20: mol_type = other DNA
caaggtcgattgaacagtac

SEQ ID NO: 13437 - DNA, 20 bp, synthetic construct
  source 1..20: mol_type = other DNA
tgagtttccctatatgagga

SEQ ID NO: 13438 - DNA, 20 bp, synthetic construct
  source 1..20: mol_type = other DNA
gaatgctggaaacacttgca

SEQ ID NO: 13439 - DNA, 20 bp, synthetic construct
  source 1..20: mol_type = other DNA
gagggacatagtgtctacag

SEQ ID NO: 13440 - DNA, 20 bp, synthetic construct
  source 1..20: mol_type = other DNA
tatccctatcacgttgcact

SEQ ID NO: 13441 - DNA, 20 bp, synthetic construct
  source 1..20: mol_type = other DNA
acacgagcgcgaatggagaa

SEQ ID NO: 13442 - DNA, 20 bp, synthetic construct
  source 1..20: mol_type = other DNA
tctcactcggcttcagcagc

SEQ ID NO: 13443 - DNA, 20 bp, synthetic construct
  source 1..20: mol_type = other DNA
cgaagccatgagggtctagg

SEQ ID NO: 13444 - DNA, 20 bp, synthetic construct
  source 1..20: mol_type = other DNA
gaccgcactgatagatgtgg

SEQ ID NO: 13445 - DNA, 20 bp, synthetic construct
  source 1..20: mol_type = other DNA
cgacactctaccagctagct

SEQ ID NO: 13446 - DNA, 20 bp, synthetic construct
  source 1..20: mol_type = other DNA
cgcaagcgtgcctccttcag

SEQ ID NO: 13447 - DNA, 20 bp, synthetic construct
  source 1..20: mol_type = other DNA
ggtttgtctaacagtgttgt

SEQ ID NO: 13448 - DNA, 20 bp, synthetic construct
  source 1..20: mol_type = other DNA
accgggcattccatggacga

SEQ ID NO: 13449 - DNA, 20 bp, synthetic construct
  source 1..20: mol_type = other DNA
ttaacgcagcccgcgtgaaa

SEQ ID NO: 13450 - DNA, 20 bp, synthetic construct
  source 1..20: mol_type = other DNA
tcagaacagtcacagctacc

SEQ ID NO: 13451 - DNA, 20 bp, synthetic construct
  source 1..20: mol_type = other DNA
ccactcctggtaccgttggg

SEQ ID NO: 13452 - DNA, 20 bp, synthetic construct
  source 1..20: mol_type = other DNA
aatatcatcgcgggtgtccg

SEQ ID NO: 13453 - DNA, 20 bp, synthetic construct
  source 1..20: mol_type = other DNA
cagctgggaaccggcgtatc

SEQ ID NO: 13454 - DNA, 20 bp, synthetic construct
  source 1..20: mol_type = other DNA
taacgtaacgctcaagcagt

SEQ ID NO: 13455 - DNA, 20 bp, synthetic construct
  source 1..20: mol_type = other DNA
ctgccataacaattccactc

SEQ ID NO: 13456 - DNA, 20 bp, synthetic construct
  source 1..20: mol_type = other DNA
taagcggtattctagcttgc

SEQ ID NO: 13457 - DNA, 20 bp, synthetic construct
  source 1..20: mol_type = other DNA
ttaagatctcgtgagcgtta

SEQ ID NO: 13458 - DNA, 20 bp, synthetic construct
  source 1..20: mol_type = other DNA
gcgcaatacagatgtgtgag

SEQ ID NO: 13459 - DNA, 20 bp, synthetic construct
  source 1..20: mol_type = other DNA
aaacctgcggattatcggag

SEQ ID NO: 13460 - DNA, 20 bp, synthetic construct
  source 1..20: mol_type = other DNA
tgaagctggcaacgctgtta

SEQ ID NO: 13461 - DNA, 20 bp, synthetic construct
  source 1..20: mol_type = other DNA
atccatagggcgtggtcaaa

SEQ ID NO: 13462 - DNA, 20 bp, synthetic construct
  source 1..20: mol_type = other DNA
gcgtttaccagcctcttcgt

SEQ ID NO: 13463 - DNA, 20 bp, synthetic construct
  source 1..20: mol_type = other DNA
ccctacgtttcgttgcctac

SEQ ID NO: 13464 - DNA, 20 bp, synthetic construct
  source 1..20: mol_type = other DNA
atacgcagtagtagctatag

SEQ ID NO: 13465 - DNA, 20 bp, synthetic construct
  source 1..20: mol_type = other DNA
cagacttgttagatatagcc

SEQ ID NO: 13466 - DNA, 20 bp, synthetic construct
  source 1..20: mol_type = other DNA
ttggcttcgcttatggcgag

SEQ ID NO: 13467 - DNA, 20 bp, synthetic construct
  source 1..20: mol_type = other DNA
gccagtatttaactctacaa

SEQ ID NO: 13468 - DNA, 20 bp, synthetic construct
  source 1..20: mol_type = other DNA
ttgccaaaggaaacttcgag

SEQ ID NO: 13469 - DNA, 20 bp, synthetic construct
  source 1..20: mol_type = other DNA
gacgtgagacctagaccggc

SEQ ID NO: 13470 - DNA, 20 bp, synthetic construct
  source 1..20: mol_type = other DNA
gtcctgtaagcccattacaa

SEQ ID NO: 13471 - DNA, 20 bp, synthetic construct
  source 1..20: mol_type = other DNA
tcctccgcagtctctaagaa

SEQ ID NO: 13472 - DNA, 20 bp, synthetic construct
  source 1..20: mol_type = other DNA
cactggtacagatgtgtcta

SEQ ID NO: 13473 - DNA, 20 bp, synthetic construct
  source 1..20: mol_type = other DNA
gttagccggtgataggcaat

SEQ ID NO: 13474 - DNA, 20 bp, synthetic construct
  source 1..20: mol_type = other DNA
ccgcaatgagtaccgtcggt

SEQ ID NO: 13475 - DNA, 20 bp, synthetic construct
  source 1..20: mol_type = other DNA
cagttacttagggtcttatc

SEQ ID NO: 13476 - DNA, 20 bp, synthetic construct
  source 1..20: mol_type = other DNA
tgatgtatctcatcgtttgc

SEQ ID NO: 13477 - DNA, 20 bp, synthetic construct
  source 1..20: mol_type = other DNA
actcacggacacatgggccc

SEQ ID NO: 13478 - DNA, 20 bp, synthetic construct
  source 1..20: mol_type = other DNA
ggtggtagcctaaagagaag

SEQ ID NO: 13479 - DNA, 20 bp, synthetic construct
  source 1..20: mol_type = other DNA
tagtccaccttcgcatcgga

SEQ ID NO: 13480 - DNA, 20 bp, synthetic construct
  source 1..20: mol_type = other DNA
gtccatctgtttctgcgata

SEQ ID NO: 13481 - DNA, 20 bp, synthetic construct
  source 1..20: mol_type = other DNA
atattccactacggaaccgt

SEQ ID NO: 13482 - DNA, 20 bp, synthetic construct
  source 1..20: mol_type = other DNA
tcccgaagcatgagatttgt

SEQ ID NO: 13483 - DNA, 20 bp, synthetic construct
  source 1..20: mol_type = other DNA
aagtggatttcgtacgcggc

SEQ ID NO: 13484 - DNA, 20 bp, synthetic construct
  source 1..20: mol_type = other DNA
cggatgggtcaatcgagcgc

SEQ ID NO: 13485 - DNA, 20 bp, synthetic construct
  source 1..20: mol_type = other DNA
gcaaagtccagtatgatcag

SEQ ID NO: 13486 - DNA, 20 bp, synthetic construct
  source 1..20: mol_type = other DNA
taccacgccagaggaccctt

SEQ ID NO: 13487 - DNA, 20 bp, synthetic construct
  source 1..20: mol_type = other DNA
aactattgtgcccaaccaat

SEQ ID NO: 13488 - DNA, 20 bp, synthetic construct
  source 1..20: mol_type = other DNA
caagatctcgacccgtgtgt

SEQ ID NO: 13489 - DNA, 20 bp, synthetic construct
  source 1..20: mol_type = other DNA
gaggcacactaaagatttca

SEQ ID NO: 13490 - DNA, 20 bp, synthetic construct
  source 1..20: mol_type = other DNA
attctgggtagtggacgtgg

SEQ ID NO: 13491 - DNA, 20 bp, synthetic construct
  source 1..20: mol_type = other DNA
cctgtgcaagtgcagttgat

SEQ ID NO: 13492 - DNA, 20 bp, synthetic construct
  source 1..20: mol_type = other DNA
accgaatactactgaggctc

SEQ ID NO: 13493 - DNA, 20 bp, synthetic construct
  source 1..20: mol_type = other DNA
gaaggcaaactttaacgaaa

SEQ ID NO: 13494 - DNA, 20 bp, synthetic construct
  source 1..20: mol_type = other DNA
tgacgcgataatctggtact

SEQ ID NO: 13495 - DNA, 20 bp, synthetic construct
  source 1..20: mol_type = other DNA
atgcaaatgtcacaagcggc

SEQ ID NO: 13496 - DNA, 20 bp, synthetic construct
  source 1..20: mol_type = other DNA
tgaggattagggttcacagc

SEQ ID NO: 13497 - DNA, 20 bp, synthetic construct
  source 1..20: mol_type = other DNA
cttcttccagtcagcacacg

SEQ ID NO: 13498 - DNA, 20 bp, synthetic construct
  source 1..20: mol_type = other DNA
atactggtcaacgctattgc

SEQ ID NO: 13499 - DNA, 20 bp, synthetic construct
  source 1..20: mol_type = other DNA
tgctgaagttgcaccgaatc

SEQ ID NO: 13500 - DNA, 20 bp, synthetic construct
  source 1..20: mol_type = other DNA
ggagatataattagccgaac

SEQ ID NO: 13501 - DNA, 20 bp, synthetic construct
  source 1..20: mol_type = other DNA
acaaacgtagacaggccctg

SEQ ID NO: 13502 - DNA, 20 bp, synthetic construct
  source 1..20: mol_type = other DNA
tctcccgaacaatcatatac

SEQ ID NO: 13503 - DNA, 20 bp, synthetic construct
  source 1..20: mol_type = other DNA
tgatcctaacttcaatgagg

SEQ ID NO: 13504 - DNA, 20 bp, synthetic construct
  source 1..20: mol_type = other DNA
acagtaacaatatgtagccc

SEQ ID NO: 13505 - DNA, 20 bp, synthetic construct
  source 1..20: mol_type = other DNA
ctggagcaatccgcgagcaa

SEQ ID NO: 13506 - DNA, 20 bp, synthetic construct
  source 1..20: mol_type = other DNA
gggagcagtctaccactaat

SEQ ID NO: 13507 - DNA, 20 bp, synthetic construct
  source 1..20: mol_type = other DNA
ccaatgagcatttgccgtac

SEQ ID NO: 13508 - DNA, 20 bp, synthetic construct
  source 1..20: mol_type = other DNA
ttaacggtttgatcagccat

SEQ ID NO: 13509 - DNA, 20 bp, synthetic construct
  source 1..20: mol_type = other DNA
tccacgactagaagtggcta

SEQ ID NO: 13510 - DNA, 20 bp, synthetic construct
  source 1..20: mol_type = other DNA
taggtttaatccaactacct

SEQ ID NO: 13511 - DNA, 20 bp, synthetic construct
  source 1..20: mol_type = other DNA
tgtctctcgcgctaactagc

SEQ ID NO: 13512 - DNA, 20 bp, synthetic construct
  source 1..20: mol_type = other DNA
agcataagaagagctgcccg

SEQ ID NO: 13513 - DNA, 20 bp, synthetic construct
  source 1..20: mol_type = other DNA
cgccgtgctagccaaacctg

SEQ ID NO: 13514 - DNA, 20 bp, synthetic construct
  source 1..20: mol_type = other DNA
gttgatgggtgtgtaatgta

SEQ ID NO: 13515 - DNA, 20 bp, synthetic construct
  source 1..20: mol_type = other DNA
cctacagttgaacccatgaa

SEQ ID NO: 13516 - DNA, 20 bp, synthetic construct
  source 1..20: mol_type = other DNA
aaatcgctcgcccgacacct

SEQ ID NO: 13517 - DNA, 20 bp, synthetic construct
  source 1..20: mol_type = other DNA
cggagggtcgaatgagcttt

SEQ ID NO: 13518 - DNA, 20 bp, synthetic construct
  source 1..20: mol_type = other DNA
agctgccaaacaacgttaat

SEQ ID NO: 13519 - DNA, 20 bp, synthetic construct
  source 1..20: mol_type = other DNA
tgagctacttctcggcccgt

SEQ ID NO: 13520 - DNA, 20 bp, synthetic construct
  source 1..20: mol_type = other DNA
ttctatccgtgagcttcgtc

SEQ ID NO: 13521 - DNA, 20 bp, synthetic construct
  source 1..20: mol_type = other DNA
agaattggcgctctgcttgt

SEQ ID NO: 13522 - DNA, 20 bp, synthetic construct
  source 1..20: mol_type = other DNA
actggtaaacgtacactgcg

SEQ ID NO: 13523 - DNA, 20 bp, synthetic construct
  source 1..20: mol_type = other DNA
agctggctttctgagtaggt

SEQ ID NO: 13524 - DNA, 20 bp, synthetic construct
  source 1..20: mol_type = other DNA
agtggccaagcgtccatgga

SEQ ID NO: 13525 - DNA, 20 bp, synthetic construct
  source 1..20: mol_type = other DNA
tctatcctagagtagggtat

SEQ ID NO: 13526 - DNA, 20 bp, synthetic construct
  source 1..20: mol_type = other DNA
aagaggtggtctaggcatga

SEQ ID NO: 13527 - DNA, 20 bp, synthetic construct
  source 1..20: mol_type = other DNA
cgtgcagatattcctcccga

SEQ ID NO: 13528 - DNA, 20 bp, synthetic construct
  source 1..20: mol_type = other DNA
cttgcacaatcgagagtagc

SEQ ID NO: 13529 - DNA, 20 bp, synthetic construct
  source 1..20: mol_type = other DNA
cctggcaatgctagcagacc

SEQ ID NO: 13530 - DNA, 20 bp, synthetic construct
  source 1..20: mol_type = other DNA
tgaggagcatctctacctag

SEQ ID NO: 13531 - DNA, 20 bp, synthetic construct
  source 1..20: mol_type = other DNA
tattgtcggtggtgccattg

SEQ ID NO: 13532 - DNA, 20 bp, synthetic construct
  source 1..20: mol_type = other DNA
tagcgggccgtcggattgat

SEQ ID NO: 13533 - DNA, 20 bp, synthetic construct
  source 1..20: mol_type = other DNA
ggttgaactgagacttccat

SEQ ID NO: 13534 - DNA, 20 bp, synthetic construct
  source 1..20: mol_type = other DNA
tacaactgtaattctgggat

SEQ ID NO: 13535 - DNA, 20 bp, synthetic construct
  source 1..20: mol_type = other DNA
gtgggactgtctttctatcg

SEQ ID NO: 13536 - DNA, 20 bp, synthetic construct
  source 1..20: mol_type = other DNA
catttcaccaccgacaccac

SEQ ID NO: 13537 - DNA, 20 bp, synthetic construct
  source 1..20: mol_type = other DNA
gataacgtcagactaacgaa

SEQ ID NO: 13538 - DNA, 20 bp, synthetic construct
  source 1..20: mol_type = other DNA
ccaacctgctcctttagtga

SEQ ID NO: 13539 - DNA, 20 bp, synthetic construct
  source 1..20: mol_type = other DNA
gcacccggtagtacagttgc

SEQ ID NO: 13540 - DNA, 20 bp, synthetic construct
  source 1..20: mol_type = other DNA
gtgaccatgtcccgattaga

SEQ ID NO: 13541 - DNA, 20 bp, synthetic construct
  source 1..20: mol_type = other DNA
ctaactcctttggcggttca

SEQ ID NO: 13542 - DNA, 20 bp, synthetic construct
  source 1..20: mol_type = other DNA
aggagtacgaccgtcagcta

SEQ ID NO: 13543 - DNA, 20 bp, synthetic construct
  source 1..20: mol_type = other DNA
tccttcgggtgctgcacgta

SEQ ID NO: 13544 - DNA, 20 bp, synthetic construct
  source 1..20: mol_type = other DNA
ctcacctggacgcaacggcc

SEQ ID NO: 13545 - DNA, 20 bp, synthetic construct
  source 1..20: mol_type = other DNA
atttaccatgtgacccgtgt

SEQ ID NO: 13546 - DNA, 20 bp, synthetic construct
  source 1..20: mol_type = other DNA
cttcccaattgcacaagtgt

SEQ ID NO: 13547 - DNA, 20 bp, synthetic construct
  source 1..20: mol_type = other DNA
agattatagagggacgggca

SEQ ID NO: 13548 - DNA, 20 bp, synthetic construct
  source 1..20: mol_type = other DNA
gtacctgctagaccctaagt

SEQ ID NO: 13549 - DNA, 20 bp, synthetic construct
  source 1..20: mol_type = other DNA
gtgctctcgattgatcccga

SEQ ID NO: 13550 - DNA, 20 bp, synthetic construct
  source 1..20: mol_type = other DNA
ttgtgccagatatgtagggt

SEQ ID NO: 13551 - DNA, 20 bp, synthetic construct
  source 1..20: mol_type = other DNA
ctactgctggcatcattact

SEQ ID NO: 13552 - DNA, 20 bp, synthetic construct
  source 1..20: mol_type = other DNA
ttctctgaatctagcggcct

SEQ ID NO: 13553 - DNA, 20 bp, synthetic construct
  source 1..20: mol_type = other DNA
tgcgattgagctttaagacc

SEQ ID NO: 13554 - DNA, 20 bp, synthetic construct
  source 1..20: mol_type = other DNA
tgtattctgcccgccaccaa

SEQ ID NO: 13555 - DNA, 20 bp, synthetic construct
  source 1..20: mol_type = other DNA
aaggctgataaactacgggt

SEQ ID NO: 13556 - DNA, 20 bp, synthetic construct
  source 1..20: mol_type = other DNA
ctctgccgcaagccaatgga

SEQ ID NO: 13557 - DNA, 20 bp, synthetic construct
  source 1..20: mol_type = other DNA
gccacgagatattaactact

SEQ ID NO: 13558 - DNA, 20 bp, synthetic construct
  source 1..20: mol_type = other DNA
tgcgacgcgggtccagatta

SEQ ID NO: 13559 - DNA, 20 bp, synthetic construct
  source 1..20: mol_type = other DNA
gcgagtgggctgttctactt

SEQ ID NO: 13560 - DNA, 20 bp, synthetic construct
  source 1..20: mol_type = other DNA
ttaaagaccaggtttcactc

SEQ ID NO: 13561 - DNA, 20 bp, synthetic construct
  source 1..20: mol_type = other DNA
gtaccagtttccgtgcttat

SEQ ID NO: 13562 - DNA, 20 bp, synthetic construct
  source 1..20: mol_type = other DNA
gagcggaactcctgttcgtg

SEQ ID NO: 13563 - DNA, 20 bp, synthetic construct
  source 1..20: mol_type = other DNA
actcgggcgtcctgctgatg

SEQ ID NO: 13564 - DNA, 20 bp, synthetic construct
  source 1..20: mol_type = other DNA
catgcaagtcactcctcctt

SEQ ID NO: 13565 - DNA, 20 bp, synthetic construct
  source 1..20: mol_type = other DNA
tcccgtgtcaggccttacgc

SEQ ID NO: 13566 - DNA, 20 bp, synthetic construct
  source 1..20: mol_type = other DNA
ttacgacactattgtggctc

SEQ ID NO: 13567 - DNA, 20 bp, synthetic construct
  source 1..20: mol_type = other DNA
gtgttaatggcggctgatag

SEQ ID NO: 13568 - DNA, 20 bp, synthetic construct
  source 1..20: mol_type = other DNA
gttgggcggatactgacaac

SEQ ID NO: 13569 - DNA, 20 bp, synthetic construct
  source 1..20: mol_type = other DNA
gggcccagactgattggtaa

SEQ ID NO: 13570 - DNA, 20 bp, synthetic construct
  source 1..20: mol_type = other DNA
cgggcaacagatagagtaca

SEQ ID NO: 13571 - DNA, 20 bp, synthetic construct
  source 1..20: mol_type = other DNA
tgctacttaaagcgtatgag

SEQ ID NO: 13572 - DNA, 20 bp, synthetic construct
  source 1..20: mol_type = other DNA
ttccgaatcctaacgtgata

SEQ ID NO: 13573 - DNA, 20 bp, synthetic construct
  source 1..20: mol_type = other DNA
tgcaggtagaagtgaactcc

SEQ ID NO: 13574 - DNA, 20 bp, synthetic construct
  source 1..20: mol_type = other DNA
gtttgccgggtgtgcttcca

SEQ ID NO: 13575 - DNA, 20 bp, synthetic construct
  source 1..20: mol_type = other DNA
tatgccggtaatttcggtca

SEQ ID NO: 13576 - DNA, 20 bp, synthetic construct
  source 1..20: mol_type = other DNA
caccctggtgagtatgttct

SEQ ID NO: 13577 - DNA, 20 bp, synthetic construct
  source 1..20: mol_type = other DNA
tctatcaattaaaggtatcc

SEQ ID NO: 13578 - DNA, 20 bp, synthetic construct
  source 1..20: mol_type = other DNA
ataaaggtacccactagact

SEQ ID NO: 13579 - DNA, 20 bp, synthetic construct
  source 1..20: mol_type = other DNA
tggtcgcatggagtagaaga

SEQ ID NO: 13580 - DNA, 20 bp, synthetic construct
  source 1..20: mol_type = other DNA
tcgtaatttccttcggttga

SEQ ID NO: 13581 - DNA, 20 bp, synthetic construct
  source 1..20: mol_type = other DNA
caagaactttacgtgaagga

SEQ ID NO: 13582 - DNA, 20 bp, synthetic construct
  source 1..20: mol_type = other DNA
cacctgaaacgctggaaacg

SEQ ID NO: 13583 - DNA, 20 bp, synthetic construct
  source 1..20: mol_type = other DNA
aataaactgcttcatcgtct

SEQ ID NO: 13584 - DNA, 20 bp, synthetic construct
  source 1..20: mol_type = other DNA
cgagctccgtgaataaactc

SEQ ID NO: 13585 - DNA, 20 bp, synthetic construct
  source 1..20: mol_type = other DNA
ctgcagctgtgagcatggga

SEQ ID NO: 13586 - DNA, 20 bp, synthetic construct
  source 1..20: mol_type = other DNA
tagtgacctcatttacgact

SEQ ID NO: 13587 - DNA, 20 bp, synthetic construct
  source 1..20: mol_type = other DNA
cgtatcagtccgatccgtcc

SEQ ID NO: 13588 - DNA, 20 bp, synthetic construct
  source 1..20: mol_type = other DNA
gatagacaccagtttctgcg

SEQ ID NO: 13589 - DNA, 20 bp, synthetic construct
  source 1..20: mol_type = other DNA
cgtaggtccacatattgttg

SEQ ID NO: 13590 - DNA, 20 bp, synthetic construct
  source 1..20: mol_type = other DNA
gcgcgtcgatccaatggact

SEQ ID NO: 13591 - DNA, 20 bp, synthetic construct
  source 1..20: mol_type = other DNA
gatgctaagataccaatcgc

SEQ ID NO: 13592 - DNA, 20 bp, synthetic construct
  source 1..20: mol_type = other DNA
tgccggaattggcagagatg

SEQ ID NO: 13593 - DNA, 20 bp, synthetic construct
  source 1..20: mol_type = other DNA
agataacggtcgcgtgtccg

SEQ ID NO: 13594 - DNA, 20 bp, synthetic construct
  source 1..20: mol_type = other DNA
tatagagtcgcatacacatg

SEQ ID NO: 13595 - DNA, 20 bp, synthetic construct
  source 1..20: mol_type = other DNA
gtcaacctagtgctaaatca

SEQ ID NO: 13596 - DNA, 20 bp, synthetic construct
  source 1..20: mol_type = other DNA
actcttacgctgtcccaatt

SEQ ID NO: 13597 - DNA, 20 bp, synthetic construct
  source 1..20: mol_type = other DNA
gatagtatagaaacagggta

SEQ ID NO: 13598 - DNA, 20 bp, synthetic construct
  source 1..20: mol_type = other DNA
cactatttagagaaagtagg

SEQ ID NO: 13599 - DNA, 20 bp, synthetic construct
  source 1..20: mol_type = other DNA
ataggagcagtcgagaaact

SEQ ID NO: 13600 - DNA, 20 bp, synthetic construct
  source 1..20: mol_type = other DNA
gtcgcgttactgaccagcct

SEQ ID NO: 13601 - DNA, 20 bp, synthetic construct
  source 1..20: mol_type = other DNA
ggagttcatctgaatctacg

SEQ ID NO: 13602 - DNA, 20 bp, synthetic construct
  source 1..20: mol_type = other DNA
tagaccgaatggcagtgaat

SEQ ID NO: 13603 - DNA, 20 bp, synthetic construct
  source 1..20: mol_type = other DNA
gcacgatacattccactgga

SEQ ID NO: 13604 - DNA, 20 bp, synthetic construct
  source 1..20: mol_type = other DNA
catcggcgaacgcttgattt

SEQ ID NO: 13605 - DNA, 20 bp, synthetic construct
  source 1..20: mol_type = other DNA
ttcgacatcgcccacactcg

SEQ ID NO: 13606 - DNA, 20 bp, synthetic construct
  source 1..20: mol_type = other DNA
gccttatctaatgttgatgt

SEQ ID NO: 13607 - DNA, 20 bp, synthetic construct
  source 1..20: mol_type = other DNA
aaaggcaacagcaccaagtg

SEQ ID NO: 13608 - DNA, 20 bp, synthetic construct
  source 1..20: mol_type = other DNA
tcgtctcatgcgtcattaga

SEQ ID NO: 13609 - DNA, 20 bp, synthetic construct
  source 1..20: mol_type = other DNA
attagcccatctgacctgga

SEQ ID NO: 13610 - DNA, 20 bp, synthetic construct
  source 1..20: mol_type = other DNA
ttgagtggcctcaccggaat

SEQ ID NO: 13611 - DNA, 20 bp, synthetic construct
  source 1..20: mol_type = other DNA
attcagcaggcattcaggta

SEQ ID NO: 13612 - DNA, 20 bp, synthetic construct
  source 1..20: mol_type = other DNA
agcatatctctcgcagcgac

SEQ ID NO: 13613 - DNA, 20 bp, synthetic construct
  source 1..20: mol_type = other DNA
tgttgttaggtaatgctgtg

SEQ ID NO: 13614 - DNA, 20 bp, synthetic construct
  source 1..20: mol_type = other DNA
gggtaacctgtggccaaatc

SEQ ID NO: 13615 - DNA, 20 bp, synthetic construct
  source 1..20: mol_type = other DNA
cagcgggaaagtcgtcgcgt

SEQ ID NO: 13616 - DNA, 20 bp, synthetic construct
  source 1..20: mol_type = other DNA
gcgaagcgacttagggcaaa

SEQ ID NO: 13617 - DNA, 20 bp, synthetic construct
  source 1..20: mol_type = other DNA
attcagtggagtaggtgtaa

SEQ ID NO: 13618 - DNA, 20 bp, synthetic construct
  source 1..20: mol_type = other DNA
catcactgggatttagaagt

SEQ ID NO: 13619 - DNA, 20 bp, synthetic construct
  source 1..20: mol_type = other DNA
ccggacagttaccgtcgtac

SEQ ID NO: 13620 - DNA, 20 bp, synthetic construct
  source 1..20: mol_type = other DNA
tcatttcgtgcagatgcttc

SEQ ID NO: 13621 - DNA, 20 bp, synthetic construct
  source 1..20: mol_type = other DNA
agagtgagctctactagact

SEQ ID NO: 13622 - DNA, 20 bp, synthetic construct
  source 1..20: mol_type = other DNA
atgggcgcttattcagtcta

SEQ ID NO: 13623 - DNA, 20 bp, synthetic construct
  source 1..20: mol_type = other DNA
gcgtaaggacctctcctcag

SEQ ID NO: 13624 - DNA, 20 bp, synthetic construct
  source 1..20: mol_type = other DNA
cctcgaattggctcaaagaa

SEQ ID NO: 13625 - DNA, 20 bp, synthetic construct
  source 1..20: mol_type = other DNA
ggcgtgcgaccaccgtgaat

SEQ ID NO: 13626 - DNA, 20 bp, synthetic construct
  source 1..20: mol_type = other DNA
catctcaagtttgaggcaca

SEQ ID NO: 13627 - DNA, 20 bp, synthetic construct
  source 1..20: mol_type = other DNA
gccgtttatacacgccgagc

SEQ ID NO: 13628 - DNA, 20 bp, synthetic construct
  source 1..20: mol_type = other DNA
tggccatcttgtagccatga

SEQ ID NO: 13629 - DNA, 20 bp, synthetic construct
  source 1..20: mol_type = other DNA
gtaaacgtctagcgatacaa

SEQ ID NO: 13630 - DNA, 20 bp, synthetic construct
  source 1..20: mol_type = other DNA
atgccactgtgtagcatcct

SEQ ID NO: 13631 - DNA, 20 bp, synthetic construct
  source 1..20: mol_type = other DNA
tacgggagagggagatcggg

SEQ ID NO: 13632 - DNA, 20 bp, synthetic construct
  source 1..20: mol_type = other DNA
atttgacgagcccgcggagc

SEQ ID NO: 13633 - DNA, 20 bp, synthetic construct
  source 1..20: mol_type = other DNA
aggatgtccaatattaccgg

SEQ ID NO: 13634 - DNA, 20 bp, synthetic construct
  source 1..20: mol_type = other DNA
ttctatacgtggacgtacgc

SEQ ID NO: 13635 - DNA, 20 bp, synthetic construct
  source 1..20: mol_type = other DNA
tactggccgctcaggacaac

SEQ ID NO: 13636 - DNA, 20 bp, synthetic construct
  source 1..20: mol_type = other DNA
gtacttacctggtgacgtac

SEQ ID NO: 13637 - DNA, 20 bp, synthetic construct
  source 1..20: mol_type = other DNA
cggtaattcagccattgcta

SEQ ID NO: 13638 - DNA, 20 bp, synthetic construct
  source 1..20: mol_type = other DNA
ggctatagacgacccagagt

SEQ ID NO: 13639 - DNA, 20 bp, synthetic construct
  source 1..20: mol_type = other DNA
acccttcaagattgccaacc

SEQ ID NO: 13640 - DNA, 20 bp, synthetic construct
  source 1..20: mol_type = other DNA
gcaaggctatatcatttcat

SEQ ID NO: 13641 - DNA, 20 bp, synthetic construct
  source 1..20: mol_type = other DNA
tccacaacgaacagctatat

SEQ ID NO: 13642 - DNA, 20 bp, synthetic construct
  source 1..20: mol_type = other DNA
aactcgctttgaagtccgtt

SEQ ID NO: 13643 - DNA, 20 bp, synthetic construct
  source 1..20: mol_type = other DNA
tgtttgagcgtcaatctgct

SEQ ID NO: 13644 - DNA, 20 bp, synthetic construct
  source 1..20: mol_type = other DNA
gtccttgccatttattctgc

SEQ ID NO: 13645 - DNA, 20 bp, synthetic construct
  source 1..20: mol_type = other DNA
gccgtgggattaccctcctt

SEQ ID NO: 13646 - DNA, 20 bp, synthetic construct
  source 1..20: mol_type = other DNA
tcatccgtctctaaacggtc

SEQ ID NO: 13647 - DNA, 20 bp, synthetic construct
  source 1..20: mol_type = other DNA
ttggtcaagcggacctaggg

SEQ ID NO: 13648 - DNA, 20 bp, synthetic construct
  source 1..20: mol_type = other DNA
tagtacttcgcctcacatgg

SEQ ID NO: 13649 - DNA, 20 bp, synthetic construct
  source 1..20: mol_type = other DNA
acaccgtcctcgtccgtcat

SEQ ID NO: 13650 - DNA, 20 bp, synthetic construct
  source 1..20: mol_type = other DNA
cgcggcacgctgttgttcgt

SEQ ID NO: 13651 - DNA, 20 bp, synthetic construct
  source 1..20: mol_type = other DNA
tcttagacggtgagtgtaaa

SEQ ID NO: 13652 - DNA, 20 bp, synthetic construct
  source 1..20: mol_type = other DNA
taagaatacctgtggacatc

SEQ ID NO: 13653 - DNA, 20 bp, synthetic construct
  source 1..20: mol_type = other DNA
tgtcatcgttctaaaccata

SEQ ID NO: 13654 - DNA, 20 bp, synthetic construct
  source 1..20: mol_type = other DNA
aacaactataggacgtaagc

SEQ ID NO: 13655 - DNA, 20 bp, synthetic construct
  source 1..20: mol_type = other DNA
tatttgtcgagggccaatat

SEQ ID NO: 13656 - DNA, 20 bp, synthetic construct
  source 1..20: mol_type = other DNA
gacggtttgacttcctcctg

SEQ ID NO: 13657 - DNA, 20 bp, synthetic construct
  source 1..20: mol_type = other DNA
taggttgagtcaaacggtcc

SEQ ID NO: 13658 - DNA, 20 bp, synthetic construct
  source 1..20: mol_type = other DNA
gggtgtggttacgtatgaag

SEQ ID NO: 13659 - DNA, 20 bp, synthetic construct
  source 1..20: mol_type = other DNA
cttgccgcctaagatcagta

SEQ ID NO: 13660 - DNA, 20 bp, synthetic construct
  source 1..20: mol_type = other DNA
cgtggataacccggtgagtg

SEQ ID NO: 13661 - DNA, 20 bp, synthetic construct
  source 1..20: mol_type = other DNA
tcggatgtgcatgcgacccg

SEQ ID NO: 13662 - DNA, 20 bp, synthetic construct
  source 1..20: mol_type = other DNA
agtcgccagatttacactta

SEQ ID NO: 13663 - DNA, 20 bp, synthetic construct
  source 1..20: mol_type = other DNA
cataaacgcaataggtgaca

SEQ ID NO: 13664 - DNA, 20 bp, synthetic construct
  source 1..20: mol_type = other DNA
ccctatttagttatagggag

SEQ ID NO: 13665 - DNA, 20 bp, synthetic construct
  source 1..20: mol_type = other DNA
agcgacgaccaacagtattg

SEQ ID NO: 13666 - DNA, 20 bp, synthetic construct
  source 1..20: mol_type = other DNA
acgttcttcagccaaataga

SEQ ID NO: 13667 - DNA, 20 bp, synthetic construct
  source 1..20: mol_type = other DNA
gagctggtcttacccggcta

SEQ ID NO: 13668 - DNA, 20 bp, synthetic construct
  source 1..20: mol_type = other DNA
acgtctaacgattcatcact

SEQ ID NO: 13669 - DNA, 20 bp, synthetic construct
  source 1..20: mol_type = other DNA
aaagcgacaccgggtttaat

SEQ ID NO: 13670 - DNA, 20 bp, synthetic construct
  source 1..20: mol_type = other DNA
tcagtgataccttacgcggc

SEQ ID NO: 13671 - DNA, 20 bp, synthetic construct
  source 1..20: mol_type = other DNA
ccttggcgtttgctccgtaa

SEQ ID NO: 13672 - DNA, 20 bp, synthetic construct
  source 1..20: mol_type = other DNA
atgaatcgacagttaagttg

SEQ ID NO: 13673 - DNA, 20 bp, synthetic construct
  source 1..20: mol_type = other DNA
tgtgcatacacatcgcggtg

SEQ ID NO: 13674 - DNA, 20 bp, synthetic construct
  source 1..20: mol_type = other DNA
aacccttgagtgtttatgaa

SEQ ID NO: 13675 - DNA, 20 bp, synthetic construct
  source 1..20: mol_type = other DNA
ccgggatgtgcctctaggac

SEQ ID NO: 13676 - DNA, 20 bp, synthetic construct
  source 1..20: mol_type = other DNA
atacaggtaaccctgtagtt

SEQ ID NO: 13677 - DNA, 20 bp, synthetic construct
  source 1..20: mol_type = other DNA
tcaagcagccgtgcacggag

SEQ ID NO: 13678 - DNA, 20 bp, synthetic construct
  source 1..20: mol_type = other DNA
acgaatttcgtcgataccca

SEQ ID NO: 13679 - DNA, 20 bp, synthetic construct
  source 1..20: mol_type = other DNA
ctatgtgcgcacgtgggaag

SEQ ID NO: 13680 - DNA, 20 bp, synthetic construct
  source 1..20: mol_type = other DNA
tgatcgttaacaagctctac

SEQ ID NO: 13681 - DNA, 20 bp, synthetic construct
  source 1..20: mol_type = other DNA
aagaagcagttgagagactg

SEQ ID NO: 13682 - DNA, 20 bp, synthetic construct
  source 1..20: mol_type = other DNA
actgttcaagttggcataac

SEQ ID NO: 13683 - DNA, 20 bp, synthetic construct
  source 1..20: mol_type = other DNA
agaggcatgcatcgaaagtg

SEQ ID NO: 13684 - DNA, 20 bp, synthetic construct
  source 1..20: mol_type = other DNA
ttgactacccggtaaggaca

SEQ ID NO: 13685 - DNA, 20 bp, synthetic construct
  source 1..20: mol_type = other DNA
tgacaactggtcagcctcgg

SEQ ID NO: 13686 - DNA, 20 bp, synthetic construct
  source 1..20: mol_type = other DNA
gtgcacactagcaaaccgcg

SEQ ID NO: 13687 - DNA, 20 bp, synthetic construct
  source 1..20: mol_type = other DNA
cacatactatagtcaccgac

SEQ ID NO: 13688 - DNA, 20 bp, synthetic construct
  source 1..20: mol_type = other DNA
aggttagagtttcatccgct

SEQ ID NO: 13689 - DNA, 20 bp, synthetic construct
  source 1..20: mol_type = other DNA
tcgcgcttataaacagtcat

SEQ ID NO: 13690 - DNA, 20 bp, synthetic construct
  source 1..20: mol_type = other DNA
cctccggattctgcacgagg

SEQ ID NO: 13691 - DNA, 20 bp, synthetic construct
  source 1..20: mol_type = other DNA
accaacgaacaccctgctgt

SEQ ID NO: 13692 - DNA, 20 bp, synthetic construct
  source 1..20: mol_type = other DNA
cgtgactcgaaggcagtgct

SEQ ID NO: 13693 - DNA, 20 bp, synthetic construct
  source 1..20: mol_type = other DNA
tttctagccgggatgatgcc

SEQ ID NO: 13694 - DNA, 20 bp, synthetic construct
  source 1..20: mol_type = other DNA
ctgaaaggctgtgcaagatg

SEQ ID NO: 13695 - DNA, 20 bp, synthetic construct
  source 1..20: mol_type = other DNA
ttgggcatcacgaagaatct

SEQ ID NO: 13696 - DNA, 20 bp, synthetic construct
  source 1..20: mol_type = other DNA
cgggagagtctcagaagctc

SEQ ID NO: 13697 - DNA, 20 bp, synthetic construct
  source 1..20: mol_type = other DNA
cataggcgaggagactccgg

SEQ ID NO: 13698 - DNA, 20 bp, synthetic construct
  source 1..20: mol_type = other DNA
ttcggcctggagcttctctg

SEQ ID NO: 13699 - DNA, 20 bp, synthetic construct
  source 1..20: mol_type = other DNA
tgcctaggtgacctcaatcg

SEQ ID NO: 13700 - DNA, 20 bp, synthetic construct
  source 1..20: mol_type = other DNA
gcgggtggattagctacacc

SEQ ID NO: 13701 - DNA, 20 bp, synthetic construct
  source 1..20: mol_type = other DNA
gaatatgtccacgaacctgg

SEQ ID NO: 13702 - DNA, 20 bp, synthetic construct
  source 1..20: mol_type = other DNA
agcccatcccagttctattg

SEQ ID NO: 13703 - DNA, 20 bp, synthetic construct
  source 1..20: mol_type = other DNA
gtcttggttccaggagatcc

SEQ ID NO: 13704 - DNA, 20 bp, synthetic construct
  source 1..20: mol_type = other DNA
aaggatcatgcgtgcagaga

SEQ ID NO: 13705 - DNA, 20 bp, synthetic construct
  source 1..20: mol_type = other DNA
tgtactgagtttaagaacac

SEQ ID NO: 13706 - DNA, 20 bp, synthetic construct
  source 1..20: mol_type = other DNA
gaggtatattgtgatgacac

SEQ ID NO: 13707 - DNA, 20 bp, synthetic construct
  source 1..20: mol_type = other DNA
gatttacgttagtcatcctg

SEQ ID NO: 13708 - DNA, 20 bp, synthetic construct
  source 1..20: mol_type = other DNA
aactgagcttatccggttta

SEQ ID NO: 13709 - DNA, 20 bp, synthetic construct
  source 1..20: mol_type = other DNA
ggatgtagggtgatggccgt

SEQ ID NO: 13710 - DNA, 20 bp, synthetic construct
  source 1..20: mol_type = other DNA
ggcgattataagatcagacc

SEQ ID NO: 13711 - DNA, 20 bp, synthetic construct
  source 1..20: mol_type = other DNA
tctgttccattatcgatgac

SEQ ID NO: 13712 - DNA, 20 bp, synthetic construct
  source 1..20: mol_type = other DNA
gccgcttgaggagtcacaag

SEQ ID NO: 13713 - DNA, 20 bp, synthetic construct
  source 1..20: mol_type = other DNA
tttctctctaggccattgtg

SEQ ID NO: 13714 - DNA, 20 bp, synthetic construct
  source 1..20: mol_type = other DNA
gttcgccgcagtcaaatcgg

SEQ ID NO: 13715 - DNA, 20 bp, synthetic construct
  source 1..20: mol_type = other DNA
cgggtaattggtggataaga

SEQ ID NO: 13716 - DNA, 20 bp, synthetic construct
  source 1..20: mol_type = other DNA
attagcttaggactcccgtt

SEQ ID NO: 13717 - DNA, 20 bp, synthetic construct
  source 1..20: mol_type = other DNA
ctcggcctgtctcaaggtca

SEQ ID NO: 13718 - DNA, 20 bp, synthetic construct
  source 1..20: mol_type = other DNA
aatggtgcagttatctgtcg

SEQ ID NO: 13719 - DNA, 20 bp, synthetic construct
  source 1..20: mol_type = other DNA
ccgaggtagcatactagctt

SEQ ID NO: 13720 - DNA, 20 bp, synthetic construct
  source 1..20: mol_type = other DNA
gatagcgcggtggcgatact

SEQ ID NO: 13721 - DNA, 20 bp, synthetic construct
  source 1..20: mol_type = other DNA
ggacactataacgcaattgt

SEQ ID NO: 13722 - DNA, 20 bp, synthetic construct
  source 1..20: mol_type = other DNA
ctgcctgcaatgtatacata

SEQ ID NO: 13723 - DNA, 20 bp, synthetic construct
  source 1..20: mol_type = other DNA
agcacaaagtagcccttcct

SEQ ID NO: 13724 - DNA, 20 bp, synthetic construct
  source 1..20: mol_type = other DNA
ttacccacgagttaatactg

SEQ ID NO: 13725 - DNA, 20 bp, synthetic construct
  source 1..20: mol_type = other DNA
ccgacgagcaggccattgtt

SEQ ID NO: 13726 - DNA, 20 bp, synthetic construct
  source 1..20: mol_type = other DNA
cctgtgcgtttacgattaat

SEQ ID NO: 13727 - DNA, 20 bp, synthetic construct
  source 1..20: mol_type = other DNA
cacccatttagaatctccgc

SEQ ID NO: 13728 - DNA, 20 bp, synthetic construct
  source 1..20: mol_type = other DNA
gtacggtttcgtgcagaggt

SEQ ID NO: 13729 - DNA, 20 bp, synthetic construct
  source 1..20: mol_type = other DNA
tctaccgcatggaacgctac

SEQ ID NO: 13730 - DNA, 20 bp, synthetic construct
  source 1..20: mol_type = other DNA
gatgttacgagggtgtccct

SEQ ID NO: 13731 - DNA, 20 bp, synthetic construct
  source 1..20: mol_type = other DNA
aattcgcaacttcataaccc

SEQ ID NO: 13732 - DNA, 20 bp, synthetic construct
  source 1..20: mol_type = other DNA
caaagcgagggactactagc

SEQ ID NO: 13733 - DNA, 20 bp, synthetic construct
  source 1..20: mol_type = other DNA
ccatgagaagtcgtcctcct

SEQ ID NO: 13734 - DNA, 20 bp, synthetic construct
  source 1..20: mol_type = other DNA
tagcgttgatcctactacca

SEQ ID NO: 13735 - DNA, 20 bp, synthetic construct
  source 1..20: mol_type = other DNA
agtcctaggccgtccatcat

SEQ ID NO: 13736 - DNA, 20 bp, synthetic construct
  source 1..20: mol_type = other DNA
ccaagtatccgcggttattt

SEQ ID NO: 13737 - DNA, 20 bp, synthetic construct
  source 1..20: mol_type = other DNA
gcgagtgatgaatatcagct

SEQ ID NO: 13738 - DNA, 20 bp, synthetic construct
  source 1..20: mol_type = other DNA
aagagctccgagtgaaattc

SEQ ID NO: 13739 - DNA, 20 bp, synthetic construct
  source 1..20: mol_type = other DNA
gagagcgacgcagatgcaat

SEQ ID NO: 13740 - DNA, 20 bp, synthetic construct
  source 1..20: mol_type = other DNA
taagtacgacgtcccagacc

SEQ ID NO: 13741 - DNA, 20 bp, synthetic construct
  source 1..20: mol_type = other DNA
ttagtcggagggcctcgcac

SEQ ID NO: 13742 - DNA, 20 bp, synthetic construct
  source 1..20: mol_type = other DNA
gggtgtacgaaacggagcat

SEQ ID NO: 13743 - DNA, 20 bp, synthetic construct
  source 1..20: mol_type = other DNA
tgtcttcaggattcagacat

SEQ ID NO: 13744 - DNA, 20 bp, synthetic construct
  source 1..20: mol_type = other DNA
agcttattgatacgttggat

SEQ ID NO: 13745 - DNA, 20 bp, synthetic construct
  source 1..20: mol_type = other DNA
cggacttccttagtcctcca

SEQ ID NO: 13746 - DNA, 20 bp, synthetic construct
  source 1..20: mol_type = other DNA
tacgtctgtccatgtatcca

SEQ ID NO: 13747 - DNA, 20 bp, synthetic construct
  source 1..20: mol_type = other DNA
cacacagagagtcagctctt

SEQ ID NO: 13748 - DNA, 20 bp, synthetic construct
  source 1..20: mol_type = other DNA
aactccacaacaggcaactt

SEQ ID NO: 13749 - DNA, 20 bp, synthetic construct
  source 1..20: mol_type = other DNA
ggtcacgaaccacctatcgg

SEQ ID NO: 13750 - DNA, 20 bp, synthetic construct
  source 1..20: mol_type = other DNA
cgtgtagaaacttagagcag

SEQ ID NO: 13751 - DNA, 20 bp, synthetic construct
  source 1..20: mol_type = other DNA
cagtatcgcgtagtgaagcc

SEQ ID NO: 13752 - DNA, 20 bp, synthetic construct
  source 1..20: mol_type = other DNA
gacattaagctctggtactg

SEQ ID NO: 13753 - DNA, 20 bp, synthetic construct
  source 1..20: mol_type = other DNA
atacagctagaggaatatcc

SEQ ID NO: 13754 - DNA, 20 bp, synthetic construct
  source 1..20: mol_type = other DNA
ccgcattcagcgcagcaagt

SEQ ID NO: 13755 - DNA, 20 bp, synthetic construct
  source 1..20: mol_type = other DNA
ggatagtccttatgtgtccc

SEQ ID NO: 13756 - DNA, 20 bp, synthetic construct
  source 1..20: mol_type = other DNA
aagacagagcctcgtaatcg

SEQ ID NO: 13757 - DNA, 20 bp, synthetic construct
  source 1..20: mol_type = other DNA
cccgtgaggctaagcgagcc

SEQ ID NO: 13758 - DNA, 20 bp, synthetic construct
  source 1..20: mol_type = other DNA
gggtaatttgctgcagttcg

SEQ ID NO: 13759 - DNA, 20 bp, synthetic construct
  source 1..20: mol_type = other DNA
cccgtagctataatcaggac

SEQ ID NO: 13760 - DNA, 20 bp, synthetic construct
  source 1..20: mol_type = other DNA
gtcaatgtgcagcttgcgtt

SEQ ID NO: 13761 - DNA, 20 bp, synthetic construct
  source 1..20: mol_type = other DNA
ctcacaacctcaacagcctt

SEQ ID NO: 13762 - DNA, 20 bp, synthetic construct
  source 1..20: mol_type = other DNA
atggagtacacgtcaccgct

SEQ ID NO: 13763 - DNA, 20 bp, synthetic construct
  source 1..20: mol_type = other DNA
gggtgggacgattagccggt

SEQ ID NO: 13764 - DNA, 20 bp, synthetic construct
  source 1..20: mol_type = other DNA
gtccggcaactgatttcttg

SEQ ID NO: 13765 - DNA, 20 bp, synthetic construct
  source 1..20: mol_type = other DNA
atggaagagacatgttgggc

SEQ ID NO: 13766 - DNA, 20 bp, synthetic construct
  source 1..20: mol_type = other DNA
actatgatcctaactcctcc

SEQ ID NO: 13767 - DNA, 20 bp, synthetic construct
  source 1..20: mol_type = other DNA
ttgattcgtacgaggagttc

SEQ ID NO: 13768 - DNA, 20 bp, synthetic construct
  source 1..20: mol_type = other DNA
ttcaatgcgaatatgccgct

SEQ ID NO: 13769 - DNA, 20 bp, synthetic construct
  source 1..20: mol_type = other DNA
aaacgtcgctaaggagcata

SEQ ID NO: 13770 - DNA, 20 bp, synthetic construct
  source 1..20: mol_type = other DNA
taccgggcagaggcgtgagt

SEQ ID NO: 13771 - DNA, 20 bp, synthetic construct
  source 1..20: mol_type = other DNA
gtccgtggtgactaagaagg

SEQ ID NO: 13772 - DNA, 20 bp, synthetic construct
  source 1..20: mol_type = other DNA
atcaaaggcgtagtaacctg

SEQ ID NO: 13773 - DNA, 20 bp, synthetic construct
  source 1..20: mol_type = other DNA
agggcttgactccacttgcc

SEQ ID NO: 13774 - DNA, 20 bp, synthetic construct
  source 1..20: mol_type = other DNA
gtgataggtagttgatcaag

SEQ ID NO: 13775 - DNA, 20 bp, synthetic construct
  source 1..20: mol_type = other DNA
gtactcgacatagcgacccg

SEQ ID NO: 13776 - DNA, 20 bp, synthetic construct
  source 1..20: mol_type = other DNA
tttgttcagctgaaatctac

SEQ ID NO: 13777 - DNA, 20 bp, synthetic construct
  source 1..20: mol_type = other DNA
tcacgtcaatagaggaagcc

SEQ ID NO: 13778 - DNA, 20 bp, synthetic construct
  source 1..20: mol_type = other DNA
tgtagcggtgtcgtgttagc

SEQ ID NO: 13779 - DNA, 20 bp, synthetic construct
  source 1..20: mol_type = other DNA
actcctccgggcttccactt

SEQ ID NO: 13780 - DNA, 20 bp, synthetic construct
  source 1..20: mol_type = other DNA
acaagacatgccaagaaatg

SEQ ID NO: 13781 - DNA, 20 bp, synthetic construct
  source 1..20: mol_type = other DNA
gtatcaccaaccctgccagt

SEQ ID NO: 13782 - DNA, 20 bp, synthetic construct
  source 1..20: mol_type = other DNA
tcgttagccagtgtatcgca

SEQ ID NO: 13783 - DNA, 20 bp, synthetic construct
  source 1..20: mol_type = other DNA
cgttcatgaaggtatgagtc

SEQ ID NO: 13784 - DNA, 20 bp, synthetic construct
  source 1..20: mol_type = other DNA
atcggaggaggaggaaatga

SEQ ID NO: 13785 - DNA, 20 bp, synthetic construct
  source 1..20: mol_type = other DNA
gacgcgtttaatcagaggca

SEQ ID NO: 13786 - DNA, 20 bp, synthetic construct
  source 1..20: mol_type = other DNA
cggtttaacatttcccatgt

SEQ ID NO: 13787 - DNA, 20 bp, synthetic construct
  source 1..20: mol_type = other DNA
gtggttgcgcgaccttcctt

SEQ ID NO: 13788 - DNA, 20 bp, synthetic construct
  source 1..20: mol_type = other DNA
gtgaagcacgaactaataaa

SEQ ID NO: 13789 - DNA, 20 bp, synthetic construct
  source 1..20: mol_type = other DNA
ggtaacggtgcgtcggacgt

SEQ ID NO: 13790 - DNA, 20 bp, synthetic construct
  source 1..20: mol_type = other DNA
ccggcagagttgttggtcct

SEQ ID NO: 13791 - DNA, 20 bp, synthetic construct
  source 1..20: mol_type = other DNA
gtggaaggctcccgaggaca

SEQ ID NO: 13792 - DNA, 20 bp, synthetic construct
  source 1..20: mol_type = other DNA
cagtggtgccgagtcacgtt

SEQ ID NO: 13793 - DNA, 20 bp, synthetic construct
  source 1..20: mol_type = other DNA
cagtcggttctgcgttctgt

SEQ ID NO: 13794 - DNA, 20 bp, synthetic construct
  source 1..20: mol_type = other DNA
cgccactttgcgtactggct

SEQ ID NO: 13795 - DNA, 20 bp, synthetic construct
  source 1..20: mol_type = other DNA
aagtctgttgtcattcaagg

SEQ ID NO: 13796 - DNA, 20 bp, synthetic construct
  source 1..20: mol_type = other DNA
ttagggactggctacaagga

SEQ ID NO: 13797 - DNA, 20 bp, synthetic construct
  source 1..20: mol_type = other DNA
tagtgagttgaaatatgtct

SEQ ID NO: 13798 - DNA, 20 bp, synthetic construct
  source 1..20: mol_type = other DNA
tggtgtaatgccaggtggta

SEQ ID NO: 13799 - DNA, 20 bp, synthetic construct
  source 1..20: mol_type = other DNA
gaaatctggtcctcactcgc

SEQ ID NO: 13800 - DNA, 20 bp, synthetic construct
  source 1..20: mol_type = other DNA
tagacctccgttgatattcc

SEQ ID NO: 13801 - DNA, 20 bp, synthetic construct
  source 1..20: mol_type = other DNA
cgtcggttgaacacccgcct

SEQ ID NO: 13802 - DNA, 20 bp, synthetic construct
  source 1..20: mol_type = other DNA
attacgacgtgatgcagttt

SEQ ID NO: 13803 - DNA, 20 bp, synthetic construct
  source 1..20: mol_type = other DNA
tcgaatctcttgatccagag

SEQ ID NO: 13804 - DNA, 20 bp, synthetic construct
  source 1..20: mol_type = other DNA
ctccgccatagtgtcatgga

SEQ ID NO: 13805 - DNA, 20 bp, synthetic construct
  source 1..20: mol_type = other DNA
tctgatagatcgggttgccg

SEQ ID NO: 13806 - DNA, 20 bp, synthetic construct
  source 1..20: mol_type = other DNA
ccgaacaaagcactcgccgg

SEQ ID NO: 13807 - DNA, 20 bp, synthetic construct
  source 1..20: mol_type = other DNA
tagaggacccgacccaagac

SEQ ID NO: 13808 - DNA, 20 bp, synthetic construct
  source 1..20: mol_type = other DNA
cgaacatgtcgtcctccggg

SEQ ID NO: 13809 - DNA, 20 bp, synthetic construct
  source 1..20: mol_type = other DNA
cgggccaaatgcggctgttg

SEQ ID NO: 13810 - DNA, 20 bp, synthetic construct
  source 1..20: mol_type = other DNA
gcttagagcgtccgcgatgt

SEQ ID NO: 13811 - DNA, 20 bp, synthetic construct
  source 1..20: mol_type = other DNA
ctgcgtcccataacccggta

SEQ ID NO: 13812 - DNA, 20 bp, synthetic construct
  source 1..20: mol_type = other DNA
tatgtttcccgtctaatggt

SEQ ID NO: 13813 - DNA, 20 bp, synthetic construct
  source 1..20: mol_type = other DNA
ggttatcaatgagtatgata

SEQ ID NO: 13814 - DNA, 20 bp, synthetic construct
  source 1..20: mol_type = other DNA
gcgtctgatataaagggtca

SEQ ID NO: 13815 - DNA, 20 bp, synthetic construct
  source 1..20: mol_type = other DNA
cggaaagctcgcgctaaagc

SEQ ID NO: 13816 - DNA, 20 bp, synthetic construct
  source 1..20: mol_type = other DNA
gcatacacgttagcgtatag

SEQ ID NO: 13817 - DNA, 20 bp, synthetic construct
  source 1..20: mol_type = other DNA
ggcgcagacagattcattca

SEQ ID NO: 13818 - DNA, 20 bp, synthetic construct
  source 1..20: mol_type = other DNA
tgggacgcgactgttaccac

SEQ ID NO: 13819 - DNA, 20 bp, synthetic construct
  source 1..20: mol_type = other DNA
tctactcaattctgtctggc

SEQ ID NO: 13820 - DNA, 20 bp, synthetic construct
  source 1..20: mol_type = other DNA
actcaagactattagcagtt

SEQ ID NO: 13821 - DNA, 20 bp, synthetic construct
  source 1..20: mol_type = other DNA
ctgcttatgttgtgcccatc

SEQ ID NO: 13822 - DNA, 20 bp, synthetic construct
  source 1..20: mol_type = other DNA
tgagaaacctgaccgagtcc

SEQ ID NO: 13823 - DNA, 20 bp, synthetic construct
  source 1..20: mol_type = other DNA
tgctacttcaccgtatgcga

SEQ ID NO: 13824 - DNA, 20 bp, synthetic construct
  source 1..20: mol_type = other DNA
taggacgggctgtcactcgg

SEQ ID NO: 13825 - DNA, 20 bp, synthetic construct
  source 1..20: mol_type = other DNA
gttgaaccatcccttgcgcg

SEQ ID NO: 13826 - DNA, 20 bp, synthetic construct
  source 1..20: mol_type = other DNA
ctagttctgagaatcgtagc

SEQ ID NO: 13827 - DNA, 20 bp, synthetic construct
  source 1..20: mol_type = other DNA
cgcatgataaggcgttgcac

SEQ ID NO: 13828 - DNA, 20 bp, synthetic construct
  source 1..20: mol_type = other DNA
tagaatggaacgagcatagt

SEQ ID NO: 13829 - DNA, 20 bp, synthetic construct
  source 1..20: mol_type = other DNA
taactagcgactttcgagtt

SEQ ID NO: 13830 - DNA, 20 bp, synthetic construct
  source 1..20: mol_type = other DNA
tcctagtgcgcagaacaagg

SEQ ID NO: 13831 - DNA, 20 bp, synthetic construct
  source 1..20: mol_type = other DNA
tactcaactctggagcaggt

SEQ ID NO: 13832 - DNA, 20 bp, synthetic construct
  source 1..20: mol_type = other DNA
ttccaaagcagcactgacca

SEQ ID NO: 13833 - DNA, 20 bp, synthetic construct
  source 1..20: mol_type = other DNA
cgttagggtgtaactaagcg

SEQ ID NO: 13834 - DNA, 20 bp, synthetic construct
  source 1..20: mol_type = other DNA
cggcagactactcttggcgc

SEQ ID NO: 13835 - DNA, 20 bp, synthetic construct
  source 1..20: mol_type = other DNA
ggtcatccagctatttatcg

SEQ ID NO: 13836 - DNA, 20 bp, synthetic construct
  source 1..20: mol_type = other DNA
acatgtttaggacacgttta

SEQ ID NO: 13837 - DNA, 20 bp, synthetic construct
  source 1..20: mol_type = other DNA
ttcgcgggtgtggatcatac

SEQ ID NO: 13838 - DNA, 20 bp, synthetic construct
  source 1..20: mol_type = other DNA
ccggtgacacgagtagaaac

SEQ ID NO: 13839 - DNA, 20 bp, synthetic construct
  source 1..20: mol_type = other DNA
atcaaataatacggttcggg

SEQ ID NO: 13840 - DNA, 20 bp, synthetic construct
  source 1..20: mol_type = other DNA
tagacgtcaacttaaaccgg

SEQ ID NO: 13841 - DNA, 20 bp, synthetic construct
  source 1..20: mol_type = other DNA
ggataacccagggttactct

SEQ ID NO: 13842 - DNA, 20 bp, synthetic construct
  source 1..20: mol_type = other DNA
ctagttaagaaccaccgccc

SEQ ID NO: 13843 - DNA, 20 bp, synthetic construct
  source 1..20: mol_type = other DNA
accatagtccttatacgatc

SEQ ID NO: 13844 - DNA, 20 bp, synthetic construct
  source 1..20: mol_type = other DNA
aacgatcaccgcctattgtc

SEQ ID NO: 13845 - DNA, 20 bp, synthetic construct
  source 1..20: mol_type = other DNA
caatgccgattgaatccgcc

SEQ ID NO: 13846 - DNA, 20 bp, synthetic construct
  source 1..20: mol_type = other DNA
gcattggctactttatgaat

SEQ ID NO: 13847 - DNA, 20 bp, synthetic construct
  source 1..20: mol_type = other DNA
gtttgcgcggacagatccct

SEQ ID NO: 13848 - DNA, 20 bp, synthetic construct
  source 1..20: mol_type = other DNA
atgcgtaccagaactatcct

SEQ ID NO: 13849 - DNA, 20 bp, synthetic construct
  source 1..20: mol_type = other DNA
cgatcgtaccaaactaattg

SEQ ID NO: 13850 - DNA, 20 bp, synthetic construct
  source 1..20: mol_type = other DNA
catctatcaatgctccagga

SEQ ID NO: 13851 - DNA, 20 bp, synthetic construct
  source 1..20: mol_type = other DNA
atcgagtaggttagttgccc

SEQ ID NO: 13852 - DNA, 20 bp, synthetic construct
  source 1..20: mol_type = other DNA
gaactttcgattcgggatcc

SEQ ID NO: 13853 - DNA, 20 bp, synthetic construct
  source 1..20: mol_type = other DNA
gcagctcaaggtcctagacg

SEQ ID NO: 13854 - DNA, 20 bp, synthetic construct
  source 1..20: mol_type = other DNA
cgatcgattgctctaacctt

SEQ ID NO: 13855 - DNA, 20 bp, synthetic construct
  source 1..20: mol_type = other DNA
atcgcacgttaatcttgcag

SEQ ID NO: 13856 - DNA, 20 bp, synthetic construct
  source 1..20: mol_type = other DNA
gttcgcccgatttactgagc

SEQ ID NO: 13857 - DNA, 20 bp, synthetic construct
  source 1..20: mol_type = other DNA
gttgcaatgttaagggatac

SEQ ID NO: 13858 - DNA, 20 bp, synthetic construct
  source 1..20: mol_type = other DNA
ttgacctggaatcatcaact

SEQ ID NO: 13859 - DNA, 20 bp, synthetic construct
  source 1..20: mol_type = other DNA
ggttcatctcgtgtaggcgt

SEQ ID NO: 13860 - DNA, 20 bp, synthetic construct
  source 1..20: mol_type = other DNA
caaacggctactgccagacc

SEQ ID NO: 13861 - DNA, 20 bp, synthetic construct
  source 1..20: mol_type = other DNA
gcagcctgttggtcaacgct

SEQ ID NO: 13862 - DNA, 20 bp, synthetic construct
  source 1..20: mol_type = other DNA
tcatccagtgcagtagcggg

SEQ ID NO: 13863 - DNA, 20 bp, synthetic construct
  source 1..20: mol_type = other DNA
ggaagatgtctctggttaag

SEQ ID NO: 13864 - DNA, 20 bp, synthetic construct
  source 1..20: mol_type = other DNA
gaaaccgttcagagcgatac

SEQ ID NO: 13865 - DNA, 20 bp, synthetic construct
  source 1..20: mol_type = other DNA
accactagggtctggaaatt

SEQ ID NO: 13866 - DNA, 20 bp, synthetic construct
  source 1..20: mol_type = other DNA
ctcaggcttcatcccgactc

SEQ ID NO: 13867 - DNA, 20 bp, synthetic construct
  source 1..20: mol_type = other DNA
tgagaaacagtatccgcgag

SEQ ID NO: 13868 - DNA, 20 bp, synthetic construct
  source 1..20: mol_type = other DNA
gcatcactaagcgagatcgc

SEQ ID NO: 13869 - DNA, 20 bp, synthetic construct
  source 1..20: mol_type = other DNA
tcctcttgctgtatatacgt

SEQ ID NO: 13870 - DNA, 20 bp, synthetic construct
  source 1..20: mol_type = other DNA
aacctttaattgccggaatg

SEQ ID NO: 13871 - DNA, 20 bp, synthetic construct
  source 1..20: mol_type = other DNA
atacggtatgtgaggttcta

SEQ ID NO: 13872 - DNA, 20 bp, synthetic construct
  source 1..20: mol_type = other DNA
cgatgagagtccttgaactt

SEQ ID NO: 13873 - DNA, 20 bp, synthetic construct
  source 1..20: mol_type = other DNA
tttgcgcaacttgttcataa

SEQ ID NO: 13874 - DNA, 20 bp, synthetic construct
  source 1..20: mol_type = other DNA
gatatacatgccgtaaccct

SEQ ID NO: 13875 - DNA, 20 bp, synthetic construct
  source 1..20: mol_type = other DNA
ccgatgcagaacagccaggt

SEQ ID NO: 13876 - DNA, 20 bp, synthetic construct
  source 1..20: mol_type = other DNA
gtacccaccctctctgggcg

SEQ ID NO: 13877 - DNA, 20 bp, synthetic construct
  source 1..20: mol_type = other DNA
cttatccattctggtcaaag

SEQ ID NO: 13878 - DNA, 20 bp, synthetic construct
  source 1..20: mol_type = other DNA
gaaacggtcgttccaacatg

SEQ ID NO: 13879 - DNA, 20 bp, synthetic construct
  source 1..20: mol_type = other DNA
tatggagatgattcgagtga

SEQ ID NO: 13880 - DNA, 20 bp, synthetic construct
  source 1..20: mol_type = other DNA
gctccaccctcgtcctgtac

SEQ ID NO: 13881 - DNA, 20 bp, synthetic construct
  source 1..20: mol_type = other DNA
gccgtacgaggattagtcaa

SEQ ID NO: 13882 - DNA, 20 bp, synthetic construct
  source 1..20: mol_type = other DNA
ggaacagtagcgtagctgca

SEQ ID NO: 13883 - DNA, 20 bp, synthetic construct
  source 1..20: mol_type = other DNA
tctcgtggtacctctacaca

SEQ ID NO: 13884 - DNA, 20 bp, synthetic construct
  source 1..20: mol_type = other DNA
ggatcgtgtattagggcctt

SEQ ID NO: 13885 - DNA, 20 bp, synthetic construct
  source 1..20: mol_type = other DNA
ttggtacttccatgcctatg

SEQ ID NO: 13886 - DNA, 20 bp, synthetic construct
  source 1..20: mol_type = other DNA
cccttagtaggactggtcag

SEQ ID NO: 13887 - DNA, 20 bp, synthetic construct
  source 1..20: mol_type = other DNA
cctgaaacaccggctagcct

SEQ ID NO: 13888 - DNA, 20 bp, synthetic construct
  source 1..20: mol_type = other DNA
cctatgatcattctcgctga

SEQ ID NO: 13889 - DNA, 20 bp, synthetic construct
  source 1..20: mol_type = other DNA
ggttcaatgcagcgttgcac

SEQ ID NO: 13890 - DNA, 20 bp, synthetic construct
  source 1..20: mol_type = other DNA
gcatgacatacttaatttga

SEQ ID NO: 13891 - DNA, 20 bp, synthetic construct
  source 1..20: mol_type = other DNA
atcatcaccaaagcggttta

SEQ ID NO: 13892 - DNA, 20 bp, synthetic construct
  source 1..20: mol_type = other DNA
gctgcgtatgcggttctagg

SEQ ID NO: 13893 - DNA, 20 bp, synthetic construct
  source 1..20: mol_type = other DNA
ggtttcagctggtgtgtact

SEQ ID NO: 13894 - DNA, 20 bp, synthetic construct
  source 1..20: mol_type = other DNA
tcaatagtggatacaagcga

SEQ ID NO: 13895 - DNA, 20 bp, synthetic construct
  source 1..20: mol_type = other DNA
attgcctgaggaacccggat

SEQ ID NO: 13896 - DNA, 20 bp, synthetic construct
  source 1..20: mol_type = other DNA
ccgataatgacgacggacct

SEQ ID NO: 13897 - DNA, 20 bp, synthetic construct
  source 1..20: mol_type = other DNA
tgagcggcggctccctttct

SEQ ID NO: 13898 - DNA, 20 bp, synthetic construct
  source 1..20: mol_type = other DNA
caaagcagaccgcaacgtcc

SEQ ID NO: 13899 - DNA, 20 bp, synthetic construct
  source 1..20: mol_type = other DNA
tgcagctatgtatccagccg

SEQ ID NO: 13900 - DNA, 20 bp, synthetic construct
  source 1..20: mol_type = other DNA
cggactcgcgactaatcttc

SEQ ID NO: 13901 - DNA, 20 bp, synthetic construct
  source 1..20: mol_type = other DNA
atagcaggctgttacagggt

SEQ ID NO: 13902 - DNA, 20 bp, synthetic construct
  source 1..20: mol_type = other DNA
ctgattacgtggaaggcaga

SEQ ID NO: 13903 - DNA, 20 bp, synthetic construct
  source 1..20: mol_type = other DNA
ataacttcacttatcaccgc

SEQ ID NO: 13904 - DNA, 20 bp, synthetic construct
  source 1..20: mol_type = other DNA
actgtagactctgggaaata

SEQ ID NO: 13905 - DNA, 20 bp, synthetic construct
  source 1..20: mol_type = other DNA
ccagccgatctgcctagtcc

SEQ ID NO: 13906 - DNA, 20 bp, synthetic construct
  source 1..20: mol_type = other DNA
taccgtgcgttcggcgtgtt

SEQ ID NO: 13907 - DNA, 20 bp, synthetic construct
  source 1..20: mol_type = other DNA
acggcattgaaacctatgta

SEQ ID NO: 13908 - DNA, 20 bp, synthetic construct
  source 1..20: mol_type = other DNA
ccgcggaagcggagtgttca

SEQ ID NO: 13909 - DNA, 20 bp, synthetic construct
  source 1..20: mol_type = other DNA
tgtgtaagcgtggcacgact

SEQ ID NO: 13910 - DNA, 20 bp, synthetic construct
  source 1..20: mol_type = other DNA
tgggaacaccctagtggaag

SEQ ID NO: 13911 - DNA, 20 bp, synthetic construct
  source 1..20: mol_type = other DNA
catggtccgtttcagaggca

SEQ ID NO: 13912 - DNA, 20 bp, synthetic construct
  source 1..20: mol_type = other DNA
cagaggtatgagctggccct

SEQ ID NO: 13913 - DNA, 20 bp, synthetic construct
  source 1..20: mol_type = other DNA
ctaccatttaaaccacgcgg

SEQ ID NO: 13914 - DNA, 20 bp, synthetic construct
  source 1..20: mol_type = other DNA
agtgattggcccagtattga

SEQ ID NO: 13915 - DNA, 20 bp, synthetic construct
  source 1..20: mol_type = other DNA
tgctggatatattctcacct

SEQ ID NO: 13916 - DNA, 20 bp, synthetic construct
  source 1..20: mol_type = other DNA
aaggagatggccgcttccta

SEQ ID NO: 13917 - DNA, 20 bp, synthetic construct
  source 1..20: mol_type = other DNA
ggtggagctctatttaagtt

SEQ ID NO: 13918 - DNA, 20 bp, synthetic construct
  source 1..20: mol_type = other DNA
gaatcgtgtttcgtgtgact

SEQ ID NO: 13919 - DNA, 20 bp, synthetic construct
  source 1..20: mol_type = other DNA
gggtttatgtcattcaccta

SEQ ID NO: 13920 - DNA, 20 bp, synthetic construct
  source 1..20: mol_type = other DNA
ggtcgcgtcgaagagttgtc

SEQ ID NO: 13921 - DNA, 20 bp, synthetic construct
  source 1..20: mol_type = other DNA
ggacgagcatcgcaatgggt

SEQ ID NO: 13922 - DNA, 20 bp, synthetic construct
  source 1..20: mol_type = other DNA
cctaaattggtgtgaggcat

SEQ ID NO: 13923 - DNA, 20 bp, synthetic construct
  source 1..20: mol_type = other DNA
cctcgaaagcgcgatcccag

SEQ ID NO: 13924 - DNA, 20 bp, synthetic construct
  source 1..20: mol_type = other DNA
catattgttatgccctagca

SEQ ID NO: 13925 - DNA, 20 bp, synthetic construct
  source 1..20: mol_type = other DNA
gtcctaagccaggagcccac

SEQ ID NO: 13926 - DNA, 20 bp, synthetic construct
  source 1..20: mol_type = other DNA
aactcccgatactcccagcc

SEQ ID NO: 13927 - DNA, 20 bp, synthetic construct
  source 1..20: mol_type = other DNA
aaggactggcaacgatttcc

SEQ ID NO: 13928 - DNA, 20 bp, synthetic construct
  source 1..20: mol_type = other DNA
ctctgcacagcttctataca

SEQ ID NO: 13929 - DNA, 20 bp, synthetic construct
  source 1..20: mol_type = other DNA
ctttcccaaggtgctgcggg

SEQ ID NO: 13930 - DNA, 20 bp, synthetic construct
  source 1..20: mol_type = other DNA
ggtatgtgcatgcgaccctt

SEQ ID NO: 13931 - DNA, 20 bp, synthetic construct
  source 1..20: mol_type = other DNA
ggaggcctgtaggatagttc

SEQ ID NO: 13932 - DNA, 20 bp, synthetic construct
  source 1..20: mol_type = other DNA
gtgggagcacaacctcgaca

SEQ ID NO: 13933 - DNA, 20 bp, synthetic construct
  source 1..20: mol_type = other DNA
cctacattaggccagacagt

SEQ ID NO: 13934 - DNA, 20 bp, synthetic construct
  source 1..20: mol_type = other DNA
atcataatcagggccaccag

SEQ ID NO: 13935 - DNA, 20 bp, synthetic construct
  source 1..20: mol_type = other DNA
ccgaaatggatagccctgca

SEQ ID NO: 13936 - DNA, 20 bp, synthetic construct
  source 1..20: mol_type = other DNA
tcgagtaaaggccgcctgac

SEQ ID NO: 13937 - DNA, 20 bp, synthetic construct
  source 1..20: mol_type = other DNA
gttaccctgtacaactcttg

SEQ ID NO: 13938 - DNA, 20 bp, synthetic construct
  source 1..20: mol_type = other DNA
gagtcgtaaaccgccgacat

SEQ ID NO: 13939 - DNA, 20 bp, synthetic construct
  source 1..20: mol_type = other DNA
ggaaagtcaccggctttggg

SEQ ID NO: 13940 - DNA, 20 bp, synthetic construct
  source 1..20: mol_type = other DNA
gtagcaaacgcgtgtgtgaa

SEQ ID NO: 13941 - DNA, 20 bp, synthetic construct
  source 1..20: mol_type = other DNA
ggttcaatacacaaaccggt

SEQ ID NO: 13942 - DNA, 20 bp, synthetic construct
  source 1..20: mol_type = other DNA
cctttcctgtggacacggga

SEQ ID NO: 13943 - DNA, 20 bp, synthetic construct
  source 1..20: mol_type = other DNA
tacggaacgcgcctcctggt

SEQ ID NO: 13944 - DNA, 20 bp, synthetic construct
  source 1..20: mol_type = other DNA
catagtattctgcgatagct

SEQ ID NO: 13945 - DNA, 20 bp, synthetic construct
  source 1..20: mol_type = other DNA
gcctgaaagccctaggccaa

SEQ ID NO: 13946 - DNA, 20 bp, synthetic construct
  source 1..20: mol_type = other DNA
aggcacttctgctctcgcag

SEQ ID NO: 13947 - DNA, 20 bp, synthetic construct
  source 1..20: mol_type = other DNA
cttaccattaacgcgtttaa

SEQ ID NO: 13948 - DNA, 20 bp, synthetic construct
  source 1..20: mol_type = other DNA
accgggcatgacgggcaaga

SEQ ID NO: 13949 - DNA, 20 bp, synthetic construct
  source 1..20: mol_type = other DNA
taaccctagtgagtagacat

SEQ ID NO: 13950 - DNA, 20 bp, synthetic construct
  source 1..20: mol_type = other DNA
aagctcatcggaattgcatt

SEQ ID NO: 13951 - DNA, 20 bp, synthetic construct
  source 1..20: mol_type = other DNA
gaatatctttgagctttgct

SEQ ID NO: 13952 - DNA, 20 bp, synthetic construct
  source 1..20: mol_type = other DNA
tagatacttgcataagcgtc

SEQ ID NO: 13953 - DNA, 20 bp, synthetic construct
  source 1..20: mol_type = other DNA
cccgcgtgagtatccatctc

SEQ ID NO: 13954 - DNA, 20 bp, synthetic construct
  source 1..20: mol_type = other DNA
cgaccgcccactccctacaa

SEQ ID NO: 13955 - DNA, 20 bp, synthetic construct
  source 1..20: mol_type = other DNA
tccaagtgatttaagcagcc

SEQ ID NO: 13956 - DNA, 20 bp, synthetic construct
  source 1..20: mol_type = other DNA
ctcgtggagccgtagtcttg

SEQ ID NO: 13957 - DNA, 20 bp, synthetic construct
  source 1..20: mol_type = other DNA
aggagtgggattagaaaggc

SEQ ID NO: 13958 - DNA, 20 bp, synthetic construct
  source 1..20: mol_type = other DNA
aaacgctcctgatctatcgc

SEQ ID NO: 13959 - DNA, 20 bp, synthetic construct
  source 1..20: mol_type = other DNA
ggacagatgtgtctgcatcg

SEQ ID NO: 13960 - DNA, 20 bp, synthetic construct
  source 1..20: mol_type = other DNA
gcggaagaagaacgtttaat

SEQ ID NO: 13961 - DNA, 20 bp, synthetic construct
  source 1..20: mol_type = other DNA
ctgaatattgggcctaaccg

SEQ ID NO: 13962 - DNA, 20 bp, synthetic construct
  source 1..20: mol_type = other DNA
gtcctgcttcattgccgaat

SEQ ID NO: 13963 - DNA, 20 bp, synthetic construct
  source 1..20: mol_type = other DNA
tgtaaccggatacagggagg

SEQ ID NO: 13964 - DNA, 20 bp, synthetic construct
  source 1..20: mol_type = other DNA
ctccactacctggccgcctg

SEQ ID NO: 13965 - DNA, 20 bp, synthetic construct
  source 1..20: mol_type = other DNA
aacaatggtgcttcacccat

SEQ ID NO: 13966 - DNA, 20 bp, synthetic construct
  source 1..20: mol_type = other DNA
cggaccaaagtcatcgggag

SEQ ID NO: 13967 - DNA, 20 bp, synthetic construct
  source 1..20: mol_type = other DNA
aaccgcatcgccatgatgga

SEQ ID NO: 13968 - DNA, 20 bp, synthetic construct
  source 1..20: mol_type = other DNA
atgacttacgtgattcactc

SEQ ID NO: 13969 - DNA, 20 bp, synthetic construct
  source 1..20: mol_type = other DNA
aatcgtcaccgcaatggtga

SEQ ID NO: 13970 - DNA, 20 bp, synthetic construct
  source 1..20: mol_type = other DNA
tgtatgcgggtgctatagac

SEQ ID NO: 13971 - DNA, 20 bp, synthetic construct
  source 1..20: mol_type = other DNA
ataatgccaccgtagactca

SEQ ID NO: 13972 - DNA, 20 bp, synthetic construct
  source 1..20: mol_type = other DNA
gagctctttctgcgagaagc

SEQ ID NO: 13973 - DNA, 20 bp, synthetic construct
  source 1..20: mol_type = other DNA
ttacacagaaggccctcagc

SEQ ID NO: 13974 - DNA, 20 bp, synthetic construct
  source 1..20: mol_type = other DNA
cctgattgcgggtttgaaga

SEQ ID NO: 13975 - DNA, 20 bp, synthetic construct
  source 1..20: mol_type = other DNA
atgtggatcgaatgcgtcat

SEQ ID NO: 13976 - DNA, 20 bp, synthetic construct
  source 1..20: mol_type = other DNA
cgggtatgcatctatagcaa

SEQ ID NO: 13977 - DNA, 20 bp, synthetic construct
  source 1..20: mol_type = other DNA
tatcatcccattgtagtgat

SEQ ID NO: 13978 - DNA, 20 bp, synthetic construct
  source 1..20: mol_type = other DNA
agatgtgattcctcttgatc

SEQ ID NO: 13979 - DNA, 20 bp, synthetic construct
  source 1..20: mol_type = other DNA
gtcctcagcataagcaacgc

SEQ ID NO: 13980 - DNA, 20 bp, synthetic construct
  source 1..20: mol_type = other DNA
ccttatgcgctcaaattgaa

SEQ ID NO: 13981 - DNA, 20 bp, synthetic construct
  source 1..20: mol_type = other DNA
cattgtatttgtatctgagc

SEQ ID NO: 13982 - DNA, 20 bp, synthetic construct
  source 1..20: mol_type = other DNA
tgtcgatgggatagtgcaca

SEQ ID NO: 13983 - DNA, 20 bp, synthetic construct
  source 1..20: mol_type = other DNA
tgctaccgcttacaattcac

SEQ ID NO: 13984 - DNA, 20 bp, synthetic construct
  source 1..20: mol_type = other DNA
tgctaccagtcatgtactat

SEQ ID NO: 13985 - DNA, 20 bp, synthetic construct
  source 1..20: mol_type = other DNA
cgaagcagccgtaggaccac

SEQ ID NO: 13986 - DNA, 20 bp, synthetic construct
  source 1..20: mol_type = other DNA
gttacaaacgtgcggtcttg

SEQ ID NO: 13987 - DNA, 20 bp, synthetic construct
  source 1..20: mol_type = other DNA
cgctcacttatgtcaaacac

SEQ ID NO: 13988 - DNA, 20 bp, synthetic construct
  source 1..20: mol_type = other DNA
cttggctgttatcagttctt

SEQ ID NO: 13989 - DNA, 20 bp, synthetic construct
  source 1..20: mol_type = other DNA
catccagggaatggtgtagt

SEQ ID NO: 13990 - DNA, 20 bp, synthetic construct
  source 1..20: mol_type = other DNA
agattcattatgacggacat

SEQ ID NO: 13991 - DNA, 20 bp, synthetic construct
  source 1..20: mol_type = other DNA
ttagtatgcgcctagtttgg

SEQ ID NO: 13992 - DNA, 20 bp, synthetic construct
  source 1..20: mol_type = other DNA
gttgatgaacctgataccca

SEQ ID NO: 13993 - DNA, 20 bp, synthetic construct
  source 1..20: mol_type = other DNA
cgggcggactgataggcaaa

SEQ ID NO: 13994 - DNA, 20 bp, synthetic construct
  source 1..20: mol_type = other DNA
aattgtcccggttctgcctc

SEQ ID NO: 13995 - DNA, 20 bp, synthetic construct
  source 1..20: mol_type = other DNA
gatccgcttattccagatag

SEQ ID NO: 13996 - DNA, 20 bp, synthetic construct
  source 1..20: mol_type = other DNA
ctcgtgttcgacatgaatgt

SEQ ID NO: 13997 - DNA, 20 bp, synthetic construct
  source 1..20: mol_type = other DNA
gcagcagttcgagataggtg

SEQ ID NO: 13998 - DNA, 20 bp, synthetic construct
  source 1..20: mol_type = other DNA
tgacagcatagggcgggtcg

SEQ ID NO: 13999 - DNA, 20 bp, synthetic construct
  source 1..20: mol_type = other DNA
aatcgtggtatgcaccgatg

SEQ ID NO: 14000 - DNA, 20 bp, synthetic construct
  source 1..20: mol_type = other DNA
taggaaatcagtaccagcgg

SEQ ID NO: 14001 - DNA, 20 bp, synthetic construct
  source 1..20: mol_type = other DNA
aacatgttgcatgccttcag

SEQ ID NO: 14002 - DNA, 20 bp, synthetic construct
  source 1..20: mol_type = other DNA
attactcagtgagttgctgc

SEQ ID NO: 14003 - DNA, 20 bp, synthetic construct
  source 1..20: mol_type = other DNA
aaagtggaaatgcacgtatg

SEQ ID NO: 14004 - DNA, 20 bp, synthetic construct
  source 1..20: mol_type = other DNA
tcacttactatcaaactcca

SEQ ID NO: 14005 - DNA, 20 bp, synthetic construct
  source 1..20: mol_type = other DNA
tagtcgcatcaggcacgttt

SEQ ID NO: 14006 - DNA, 20 bp, synthetic construct
  source 1..20: mol_type = other DNA
aactcgaacaactgtaccaa

SEQ ID NO: 14007 - DNA, 20 bp, synthetic construct
  source 1..20: mol_type = other DNA
agttgaagccaggtttcgcc

SEQ ID NO: 14008 - DNA, 20 bp, synthetic construct
  source 1..20: mol_type = other DNA
aaaccggctttaagatccat

SEQ ID NO: 14009 - DNA, 20 bp, synthetic construct
  source 1..20: mol_type = other DNA
agtcatgagacgtccgctag

SEQ ID NO: 14010 - DNA, 20 bp, synthetic construct
  source 1..20: mol_type = other DNA
aagatagtaagctctcgggt

SEQ ID NO: 14011 - DNA, 20 bp, synthetic construct
  source 1..20: mol_type = other DNA
gagcgcgattgaaccaactg

SEQ ID NO: 14012 - DNA, 20 bp, synthetic construct
  source 1..20: mol_type = other DNA
tgctggtggatggttgcggt

SEQ ID NO: 14013 - DNA, 20 bp, synthetic construct
  source 1..20: mol_type = other DNA
cggcggtcggaagcaatcac

SEQ ID NO: 14014 - DNA, 20 bp, synthetic construct
  source 1..20: mol_type = other DNA
tcgtgtcctcttcccatggc

SEQ ID NO: 14015 - DNA, 20 bp, synthetic construct
  source 1..20: mol_type = other DNA
ctgactagttgcgaacaagt

SEQ ID NO: 14016 - DNA, 20 bp, synthetic construct
  source 1..20: mol_type = other DNA
cggagtgacgcgagcttcag

SEQ ID NO: 14017 - DNA, 20 bp, synthetic construct
  source 1..20: mol_type = other DNA
tggctaatcagtttgttctt

SEQ ID NO: 14018 - DNA, 20 bp, synthetic construct
  source 1..20: mol_type = other DNA
tagaagctgaaggtacacca

SEQ ID NO: 14019 - DNA, 20 bp, synthetic construct
  source 1..20: mol_type = other DNA
ggcgatgtcttggacgtacg

SEQ ID NO: 14020 - DNA, 20 bp, synthetic construct
  source 1..20: mol_type = other DNA
ccgtaactcgacaactctga

SEQ ID NO: 14021 - DNA, 20 bp, synthetic construct
  source 1..20: mol_type = other DNA
tatactttcagatgagctgc

SEQ ID NO: 14022 - DNA, 20 bp, synthetic construct
  source 1..20: mol_type = other DNA
gaggcttgccatgacatgag

SEQ ID NO: 14023 - DNA, 20 bp, synthetic construct
  source 1..20: mol_type = other DNA
ggtggaggatattcttgata

SEQ ID NO: 14024 - DNA, 20 bp, synthetic construct
  source 1..20: mol_type = other DNA
gaggatccggacgctgagaa

SEQ ID NO: 14025 - DNA, 20 bp, synthetic construct
  source 1..20: mol_type = other DNA
ttgcgacaatccctatacgg

SEQ ID NO: 14026 - DNA, 20 bp, synthetic construct
  source 1..20: mol_type = other DNA
atgcgctggtggcagaatag

SEQ ID NO: 14027 - DNA, 20 bp, synthetic construct
  source 1..20: mol_type = other DNA
atgagccatgcagctaagtc

SEQ ID NO: 14028 - DNA, 20 bp, synthetic construct
  source 1..20: mol_type = other DNA
tttggacgccaaataagggt

SEQ ID NO: 14029 - DNA, 20 bp, synthetic construct
  source 1..20: mol_type = other DNA
gattgcggacagggattata

SEQ ID NO: 14030 - DNA, 20 bp, synthetic construct
  source 1..20: mol_type = other DNA
tgaaggcagcgatgttcgag

SEQ ID NO: 14031 - DNA, 20 bp, synthetic construct
  source 1..20: mol_type = other DNA
tgtaactccttattcttgct

SEQ ID NO: 14032 - DNA, 20 bp, synthetic construct
  source 1..20: mol_type = other DNA
gttgaacaagcgtccaattt

SEQ ID NO: 14033 - DNA, 20 bp, synthetic construct
  source 1..20: mol_type = other DNA
atgaagtcgctgcggaacga

SEQ ID NO: 14034 - DNA, 20 bp, synthetic construct
  source 1..20: mol_type = other DNA
cactcacaaaggcttaagac

SEQ ID NO: 14035 - DNA, 20 bp, synthetic construct
  source 1..20: mol_type = other DNA
gatgatcggttgcagataat

SEQ ID NO: 14036 - DNA, 20 bp, synthetic construct
  source 1..20: mol_type = other DNA
aggaaacgccatgttgggaa

SEQ ID NO: 14037 - DNA, 20 bp, synthetic construct
  source 1..20: mol_type = other DNA
cggttggcaagagatacggt

SEQ ID NO: 14038 - DNA, 20 bp, synthetic construct
  source 1..20: mol_type = other DNA
tcactcgctcagcggaacga

SEQ ID NO: 14039 - DNA, 20 bp, synthetic construct
  source 1..20: mol_type = other DNA
gttcgtatcgaacttcttgg

SEQ ID NO: 14040 - DNA, 20 bp, synthetic construct
  source 1..20: mol_type = other DNA
ttgtcgtcagttccacgcag

SEQ ID NO: 14041 - DNA, 20 bp, synthetic construct
  source 1..20: mol_type = other DNA
gaacagaaggtacgcgatta

SEQ ID NO: 14042 - DNA, 20 bp, synthetic construct
  source 1..20: mol_type = other DNA
cttgcatgtacacatcctga

SEQ ID NO: 14043 - DNA, 20 bp, synthetic construct
  source 1..20: mol_type = other DNA
atttgtccttaagcaggact

SEQ ID NO: 14044 - DNA, 20 bp, synthetic construct
  source 1..20: mol_type = other DNA
tcgtaatgtagttaagtacc

SEQ ID NO: 14045 - DNA, 20 bp, synthetic construct
  source 1..20: mol_type = other DNA
aacggatcgatggcagaggg

SEQ ID NO: 14046 - DNA, 20 bp, synthetic construct
  source 1..20: mol_type = other DNA
gcagattgtatcctttgacg

SEQ ID NO: 14047 - DNA, 20 bp, synthetic construct
  source 1..20: mol_type = other DNA
tatgtccagcctcagcactt

SEQ ID NO: 14048 - DNA, 20 bp, synthetic construct
  source 1..20: mol_type = other DNA
gcgtatggccactctacagg

SEQ ID NO: 14049 - DNA, 20 bp, synthetic construct
  source 1..20: mol_type = other DNA
catagacagagatggtactc

SEQ ID NO: 14050 - DNA, 20 bp, synthetic construct
  source 1..20: mol_type = other DNA
acgttagtatacaatcctcc

SEQ ID NO: 14051 - DNA, 20 bp, synthetic construct
  source 1..20: mol_type = other DNA
cttcgcattcgatcaacact

SEQ ID NO: 14052 - DNA, 20 bp, synthetic construct
  source 1..20: mol_type = other DNA
cagtccgcacaattgttgat

SEQ ID NO: 14053 - DNA, 20 bp, synthetic construct
  source 1..20: mol_type = other DNA
atccgcgtccaataaatgcg

SEQ ID NO: 14054 - DNA, 20 bp, synthetic construct
  source 1..20: mol_type = other DNA
ctatcacgcgcccggttggt

SEQ ID NO: 14055 - DNA, 20 bp, synthetic construct
  source 1..20: mol_type = other DNA
tgcattcccgagtatgatcc

SEQ ID NO: 14056 - DNA, 20 bp, synthetic construct
  source 1..20: mol_type = other DNA
gaaccaccctgtctggcaag

SEQ ID NO: 14057 - DNA, 20 bp, synthetic construct
  source 1..20: mol_type = other DNA
tgtcgagttacaattgtcaa

SEQ ID NO: 14058 - DNA, 20 bp, synthetic construct
  source 1..20: mol_type = other DNA
gtatactaccgtagtggaag

SEQ ID NO: 14059 - DNA, 20 bp, synthetic construct
  source 1..20: mol_type = other DNA
tcgaacgattcctgccacgt

SEQ ID NO: 14060 - DNA, 20 bp, synthetic construct
  source 1..20: mol_type = other DNA
caaactcccaacctcaacgg

SEQ ID NO: 14061 - DNA, 20 bp, synthetic construct
  source 1..20: mol_type = other DNA
taaaggcctttcatagcgga

SEQ ID NO: 14062 - DNA, 20 bp, synthetic construct
  source 1..20: mol_type = other DNA
gaggctgatggaataaattc

SEQ ID NO: 14063 - DNA, 20 bp, synthetic construct
  source 1..20: mol_type = other DNA
catcccactgtttccgcaat

SEQ ID NO: 14064 - DNA, 20 bp, synthetic construct
  source 1..20: mol_type = other DNA
cagtcatcacgatgtgcaaa

SEQ ID NO: 14065 - DNA, 20 bp, synthetic construct
  source 1..20: mol_type = other DNA
ttatgcgagcaacgtgggtc

SEQ ID NO: 14066 - DNA, 20 bp, synthetic construct
  source 1..20: mol_type = other DNA
ttcctcaccacgtatttatt

SEQ ID NO: 14067 - DNA, 20 bp, synthetic construct
  source 1..20: mol_type = other DNA
ggaataattaccaagggcgg

SEQ ID NO: 14068 - DNA, 20 bp, synthetic construct
  source 1..20: mol_type = other DNA
tccctaggtgggcaatgggc

SEQ ID NO: 14069 - DNA, 20 bp, synthetic construct
  source 1..20: mol_type = other DNA
caagcctgtaaatggcatgc

SEQ ID NO: 14070 - DNA, 20 bp, synthetic construct
  source 1..20: mol_type = other DNA
caagtgactacatcaaacat

SEQ ID NO: 14071 - DNA, 20 bp, synthetic construct
  source 1..20: mol_type = other DNA
ggaagtgtagcgtccaaacc

SEQ ID NO: 14072 - DNA, 20 bp, synthetic construct
  source 1..20: mol_type = other DNA
tggcttgatttcgctagccc

SEQ ID NO: 14073 - DNA, 20 bp, synthetic construct
  source 1..20: mol_type = other DNA
ccagatatttcttaattggg

SEQ ID NO: 14074 - DNA, 20 bp, synthetic construct
  source 1..20: mol_type = other DNA
aacttgccaccataccaggg

SEQ ID NO: 14075 - DNA, 20 bp, synthetic construct
  source 1..20: mol_type = other DNA
gcctaatgtaacatcccgag

SEQ ID NO: 14076 - DNA, 20 bp, synthetic construct
  source 1..20: mol_type = other DNA
ggatctgggttgcgctgtcc

SEQ ID NO: 14077 - DNA, 20 bp, synthetic construct
  source 1..20: mol_type = other DNA
gcactgtaatactcagcggc

SEQ ID NO: 14078 - DNA, 20 bp, synthetic construct
  source 1..20: mol_type = other DNA
cactttcggagggaccgaga

SEQ ID NO: 14079 - DNA, 20 bp, synthetic construct
  source 1..20: mol_type = other DNA
gcgcttggatttaaggtcca

SEQ ID NO: 14080 - DNA, 20 bp, synthetic construct
  source 1..20: mol_type = other DNA
gtgctccgcagagatacatt

SEQ ID NO: 14081 - DNA, 20 bp, synthetic construct
  source 1..20: mol_type = other DNA
agatatgcgaacatgacgct

SEQ ID NO: 14082 - DNA, 20 bp, synthetic construct
  source 1..20: mol_type = other DNA
cagttacttaggtctgattg

SEQ ID NO: 14083 - DNA, 20 bp, synthetic construct
  source 1..20: mol_type = other DNA
cgccatagtctctatcaatc

SEQ ID NO: 14084 - DNA, 20 bp, synthetic construct
  source 1..20: mol_type = other DNA
cttccactttatcaagaaac

SEQ ID NO: 14085 - DNA, 20 bp, synthetic construct
  source 1..20: mol_type = other DNA
tgacggttgctaatctgcct

SEQ ID NO: 14086 - DNA, 20 bp, synthetic construct
  source 1..20: mol_type = other DNA
gcctcgcccacgtaggtctc

SEQ ID NO: 14087 - DNA, 20 bp, synthetic construct
  source 1..20: mol_type = other DNA
atagtctgtctgtaataaac

SEQ ID NO: 14088 - DNA, 20 bp, synthetic construct
  source 1..20: mol_type = other DNA
aagcacccggtcgtcaccct

SEQ ID NO: 14089 - DNA, 20 bp, synthetic construct
  source 1..20: mol_type = other DNA
tggccgatcagctttccgcc

SEQ ID NO: 14090 - DNA, 20 bp, synthetic construct
  source 1..20: mol_type = other DNA
gatctgtccacccatcacgt

SEQ ID NO: 14091 - DNA, 20 bp, synthetic construct
  source 1..20: mol_type = other DNA
gcgcttaggtctgtctactc

SEQ ID NO: 14092 - DNA, 20 bp, synthetic construct
  source 1..20: mol_type = other DNA
tgtgaaccaggaatgagtgt

SEQ ID NO: 14093 - DNA, 20 bp, synthetic construct
  source 1..20: mol_type = other DNA
gatcgtgtgcgaatttacta

SEQ ID NO: 14094 - DNA, 20 bp, synthetic construct
  source 1..20: mol_type = other DNA
ccatgaaatatctgcatccg

SEQ ID NO: 14095 - DNA, 20 bp, synthetic construct
  source 1..20: mol_type = other DNA
aggtgcgctgtgataacgcg

SEQ ID NO: 14096 - DNA, 20 bp, synthetic construct
  source 1..20: mol_type = other DNA
tttaatatgcgccacaggta

SEQ ID NO: 14097 - DNA, 20 bp, synthetic construct
  source 1..20: mol_type = other DNA
aatgggttcgctggcgcaag

SEQ ID NO: 14098 - DNA, 20 bp, synthetic construct
  source 1..20: mol_type = other DNA
ctccgccgaagcaattcgtc

SEQ ID NO: 14099 - DNA, 20 bp, synthetic construct
  source 1..20: mol_type = other DNA
gtcaggcagtcgataccagg

SEQ ID NO: 14100 - DNA, 20 bp, synthetic construct
  source 1..20: mol_type = other DNA
attcgggcgtaggagaaggg

SEQ ID NO: 14101 - DNA, 20 bp, synthetic construct
  source 1..20: mol_type = other DNA
ctgctacggaccggtaatcg

SEQ ID NO: 14102 - DNA, 20 bp, synthetic construct
  source 1..20: mol_type = other DNA
gtaagccacaatcttcggga

SEQ ID NO: 14103 - DNA, 20 bp, synthetic construct
  source 1..20: mol_type = other DNA
tatatagctacagtctgtac

SEQ ID NO: 14104 - DNA, 20 bp, synthetic construct
  source 1..20: mol_type = other DNA
gcaagatggaatcctcaatt

SEQ ID NO: 14105 - DNA, 20 bp, synthetic construct
  source 1..20: mol_type = other DNA
accgcgcgactccactgcat

SEQ ID NO: 14106 - DNA, 20 bp, synthetic construct
  source 1..20: mol_type = other DNA
gttaccaggccgttcgatta

SEQ ID NO: 14107 - DNA, 20 bp, synthetic construct
  source 1..20: mol_type = other DNA
ccttgtcactaaaggaaagc

SEQ ID NO: 14108 - DNA, 20 bp, synthetic construct
  source 1..20: mol_type = other DNA
catgtgaactgcgacccagg

SEQ ID NO: 14109 - DNA, 20 bp, synthetic construct
  source 1..20: mol_type = other DNA
atacaccaagcgtatgtccg

SEQ ID NO: 14110 - DNA, 20 bp, synthetic construct
  source 1..20: mol_type = other DNA
tttgccaatgagcaacaata

SEQ ID NO: 14111 - DNA, 20 bp, synthetic construct
  source 1..20: mol_type = other DNA
gtatcaccttatatctgctc

SEQ ID NO: 14112 - DNA, 20 bp, synthetic construct
  source 1..20: mol_type = other DNA
tccgtgcaccgcgaactgtt

SEQ ID NO: 14113 - DNA, 20 bp, synthetic construct
  source 1..20: mol_type = other DNA
gttccagaaaggctggccac

SEQ ID NO: 14114 - DNA, 20 bp, synthetic construct
  source 1..20: mol_type = other DNA
ttgcctacgtacacgatgtg

SEQ ID NO: 14115 - DNA, 20 bp, synthetic construct
  source 1..20: mol_type = other DNA
cccagacggcgttggcatgt

SEQ ID NO: 14116 - DNA, 20 bp, synthetic construct
  source 1..20: mol_type = other DNA
ccagcggttaccggttgaga

SEQ ID NO: 14117 - DNA, 20 bp, synthetic construct
  source 1..20: mol_type = other DNA
tacaccgctgtaagccacct

SEQ ID NO: 14118 - DNA, 20 bp, synthetic construct
  source 1..20: mol_type = other DNA
caccatcgctgcagtgtcgt

SEQ ID NO: 14119 - DNA, 20 bp, synthetic construct
  source 1..20: mol_type = other DNA
atagtacgtaccgaccattc

SEQ ID NO: 14120 - DNA, 20 bp, synthetic construct
  source 1..20: mol_type = other DNA
agacttcgcttgatggtttc

SEQ ID NO: 14121 - DNA, 20 bp, synthetic construct
  source 1..20: mol_type = other DNA
tggatcgaggctgtcacaac

SEQ ID NO: 14122 - DNA, 20 bp, synthetic construct
  source 1..20: mol_type = other DNA
aacaacagcccaacttggtc

SEQ ID NO: 14123 - DNA, 20 bp, synthetic construct
  source 1..20: mol_type = other DNA
ctaggcttctcatggttggc

SEQ ID NO: 14124 - DNA, 20 bp, synthetic construct
  source 1..20: mol_type = other DNA
tctgagacaatctgggtcgc

SEQ ID NO: 14125 - DNA, 20 bp, synthetic construct
  source 1..20: mol_type = other DNA
ggtctttgcgacatcccatg

SEQ ID NO: 14126 - DNA, 20 bp, synthetic construct
  source 1..20: mol_type = other DNA
gtccctacttaaactcgaat

SEQ ID NO: 14127 - DNA, 20 bp, synthetic construct
  source 1..20: mol_type = other DNA
acagacttgagaagatgtgt

SEQ ID NO: 14128 - DNA, 20 bp, synthetic construct
  source 1..20: mol_type = other DNA
gtgacgatataacgtcccgt

SEQ ID NO: 14129 - DNA, 20 bp, synthetic construct
  source 1..20: mol_type = other DNA
ccgcgcctccacgtatttgg

SEQ ID NO: 14130 - DNA, 20 bp, synthetic construct
  source 1..20: mol_type = other DNA
aagttacgtcacagtagctg

SEQ ID NO: 14131 - DNA, 20 bp, synthetic construct
  source 1..20: mol_type = other DNA
caggaatcgatgtctgtatg

SEQ ID NO: 14132 - DNA, 20 bp, synthetic construct
  source 1..20: mol_type = other DNA
gcatgtcaccagattcttcc

SEQ ID NO: 14133 - DNA, 20 bp, synthetic construct
  source 1..20: mol_type = other DNA
ggtcgctccgtacgtttgca

SEQ ID NO: 14134 - DNA, 20 bp, synthetic construct
  source 1..20: mol_type = other DNA
agaatgctaccaattgcaag

SEQ ID NO: 14135 - DNA, 20 bp, synthetic construct
  source 1..20: mol_type = other DNA
agtcccttcccgtgttgtga

SEQ ID NO: 14136 - DNA, 20 bp, synthetic construct
  source 1..20: mol_type = other DNA
ctacgttagctattcactga

SEQ ID NO: 14137 - DNA, 20 bp, synthetic construct
  source 1..20: mol_type = other DNA
aaattcacctcgctctgtgg

SEQ ID NO: 14138 - DNA, 20 bp, synthetic construct
  source 1..20: mol_type = other DNA
tggacaattgctggatgttg

SEQ ID NO: 14139 - DNA, 20 bp, synthetic construct
  source 1..20: mol_type = other DNA
agcctgggttctggtaaaga

SEQ ID NO: 14140 - DNA, 20 bp, synthetic construct
  source 1..20: mol_type = other DNA
gcgcagaaagacccgttaat

SEQ ID NO: 14141 - DNA, 20 bp, synthetic construct
  source 1..20: mol_type = other DNA
gatgagtgaatggcgtagta

SEQ ID NO: 14142 - DNA, 20 bp, synthetic construct
  source 1..20: mol_type = other DNA
acctcgacccttgcatcggt

SEQ ID NO: 14143 - DNA, 20 bp, synthetic construct
  source 1..20: mol_type = other DNA
accggccttcgagacattcg

SEQ ID NO: 14144 - DNA, 20 bp, synthetic construct
  source 1..20: mol_type = other DNA
attataccgtcctccgtgct

SEQ ID NO: 14145 - DNA, 20 bp, synthetic construct
  source 1..20: mol_type = other DNA
tatgtcgtacgtcatggtgt

SEQ ID NO: 14146 - DNA, 20 bp, synthetic construct
  source 1..20: mol_type = other DNA
ctcctcataagggatctgca

SEQ ID NO: 14147 - DNA, 20 bp, synthetic construct
  source 1..20: mol_type = other DNA
aagctgctctgtctaacggc

SEQ ID NO: 14148 - DNA, 20 bp, synthetic construct
  source 1..20: mol_type = other DNA
tacgttgaactatcggactt

SEQ ID NO: 14149 - DNA, 20 bp, synthetic construct
  source 1..20: mol_type = other DNA
cctgatccgaacttgcaacg

SEQ ID NO: 14150 - DNA, 20 bp, synthetic construct
  source 1..20: mol_type = other DNA
ggcagactcgacgaatcaca

SEQ ID NO: 14151 - DNA, 20 bp, synthetic construct
  source 1..20: mol_type = other DNA
catgaggatttccgggcttg

SEQ ID NO: 14152 - DNA, 20 bp, synthetic construct
  source 1..20: mol_type = other DNA
gcctcgctacagatacctag

SEQ ID NO: 14153 - DNA, 20 bp, synthetic construct
  source 1..20: mol_type = other DNA
ctgggacgtccctctctggt

SEQ ID NO: 14154 - DNA, 20 bp, synthetic construct
  source 1..20: mol_type = other DNA
ctaaacggatcgctccgatc

SEQ ID NO: 14155 - DNA, 20 bp, synthetic construct
  source 1..20: mol_type = other DNA
tgatgcgaactgttgtataa

SEQ ID NO: 14156 - DNA, 20 bp, synthetic construct
  source 1..20: mol_type = other DNA
ctcctgctatcagccaccaa

SEQ ID NO: 14157 - DNA, 20 bp, synthetic construct
  source 1..20: mol_type = other DNA
cttgagtgtcacctttagtg

SEQ ID NO: 14158 - DNA, 20 bp, synthetic construct
  source 1..20: mol_type = other DNA
aaggccgggcaaagcggcat

SEQ ID NO: 14159 - DNA, 20 bp, synthetic construct
  source 1..20: mol_type = other DNA
aacacacatgctggacatga

SEQ ID NO: 14160 - DNA, 20 bp, synthetic construct
  source 1..20: mol_type = other DNA
acaatcaccttagcaatcga

SEQ ID NO: 14161 - DNA, 20 bp, synthetic construct
  source 1..20: mol_type = other DNA
tcgatgatcgtcacacgcac

SEQ ID NO: 14162 - DNA, 20 bp, synthetic construct
  source 1..20: mol_type = other DNA
ccctctaatactatccgtca

SEQ ID NO: 14163 - DNA, 20 bp, synthetic construct
  source 1..20: mol_type = other DNA
taaccggagtgcatgcggag

SEQ ID NO: 14164 - DNA, 20 bp, synthetic construct
  source 1..20: mol_type = other DNA
acaggcccacctcaaccata

SEQ ID NO: 14165 - DNA, 20 bp, synthetic construct
  source 1..20: mol_type = other DNA
aatagccggttggaatccag

SEQ ID NO: 14166 - DNA, 20 bp, synthetic construct
  source 1..20: mol_type = other DNA
acgttagcgccatcatccgt

SEQ ID NO: 14167 - DNA, 20 bp, synthetic construct
  source 1..20: mol_type = other DNA
acgcatatttagtgtcgcct

SEQ ID NO: 14168 - DNA, 20 bp, synthetic construct
  source 1..20: mol_type = other DNA
agagggtgcggaacttccag

SEQ ID NO: 14169 - DNA, 20 bp, synthetic construct
  source 1..20: mol_type = other DNA
tggcggtaccgttatatact

SEQ ID NO: 14170 - DNA, 20 bp, synthetic construct
  source 1..20: mol_type = other DNA
aaacacgccgcctggcaagg

SEQ ID NO: 14171 - DNA, 20 bp, synthetic construct
  source 1..20: mol_type = other DNA
aaccgggcaacatgttgcga

SEQ ID NO: 14172 - DNA, 20 bp, synthetic construct
  source 1..20: mol_type = other DNA
atgcggagctcgccttgttc

SEQ ID NO: 14173 - DNA, 20 bp, synthetic construct
  source 1..20: mol_type = other DNA
agcaccctcttaatagttgg

SEQ ID NO: 14174 - DNA, 20 bp, synthetic construct
  source 1..20: mol_type = other DNA
gcaaacaagattgaagggat

SEQ ID NO: 14175 - DNA, 20 bp, synthetic construct
  source 1..20: mol_type = other DNA
ctgcctggaccgtactcgac

SEQ ID NO: 14176 - DNA, 20 bp, synthetic construct
  source 1..20: mol_type = other DNA
agtttacccgtcaatcctaa

SEQ ID NO: 14177 - DNA, 20 bp, synthetic construct
  source 1..20: mol_type = other DNA
aatcggacagtgtggactgc

SEQ ID NO: 14178 - DNA, 20 bp, synthetic construct
  source 1..20: mol_type = other DNA
ccggccaggtgtaaaggcat

SEQ ID NO: 14179 - DNA, 20 bp, synthetic construct
  source 1..20: mol_type = other DNA
cgcagtccgtgtgttattat

SEQ ID NO: 14180 - DNA, 20 bp, synthetic construct
  source 1..20: mol_type = other DNA
agttgacggatggatcgtaa

SEQ ID NO: 14181 - DNA, 20 bp, synthetic construct
  source 1..20: mol_type = other DNA
ccatggatcacaaagtgatt

SEQ ID NO: 14182 - DNA, 20 bp, synthetic construct
  source 1..20: mol_type = other DNA
aaatcaggaactcgatggca

SEQ ID NO: 14183 - DNA, 20 bp, synthetic construct
  source 1..20: mol_type = other DNA
gaatggtcacacgtctcaca

SEQ ID NO: 14184 - DNA, 20 bp, synthetic construct
  source 1..20: mol_type = other DNA
ggttcatacctccgaaactt

SEQ ID NO: 14185 - DNA, 20 bp, synthetic construct
  source 1..20: mol_type = other DNA
gtcccaccatttaacgcgtt

SEQ ID NO: 14186 - DNA, 20 bp, synthetic construct
  source 1..20: mol_type = other DNA
gttgtcctagtgctatcacc

SEQ ID NO: 14187 - DNA, 20 bp, synthetic construct
  source 1..20: mol_type = other DNA
gccgactgattctcctgtgc

SEQ ID NO: 14188 - DNA, 20 bp, synthetic construct
  source 1..20: mol_type = other DNA
taacaccgtgtggcgtgcgg

SEQ ID NO: 14189 - DNA, 20 bp, synthetic construct
  source 1..20: mol_type = other DNA
ctctagtctctctatatgcg

SEQ ID NO: 14190 - DNA, 20 bp, synthetic construct
  source 1..20: mol_type = other DNA
gacggaatgcctaaagcata

SEQ ID NO: 14191 - DNA, 20 bp, synthetic construct
  source 1..20: mol_type = other DNA
attgccgcgagtgcaattgg

SEQ ID NO: 14192 - DNA, 20 bp, synthetic construct
  source 1..20: mol_type = other DNA
ttgcgcctcgattatttacc

SEQ ID NO: 14193 - DNA, 20 bp, synthetic construct
  source 1..20: mol_type = other DNA
agtattaagtctcgtttctc

SEQ ID NO: 14194 - DNA, 20 bp, synthetic construct
  source 1..20: mol_type = other DNA
aagggtcgggacctagttag

SEQ ID NO: 14195 - DNA, 20 bp, synthetic construct
  source 1..20: mol_type = other DNA
aatccctcactaggcgcttc

SEQ ID NO: 14196 - DNA, 20 bp, synthetic construct
  source 1..20: mol_type = other DNA
cggtgttacattataaacgt

SEQ ID NO: 14197 - DNA, 20 bp, synthetic construct
  source 1..20: mol_type = other DNA
cctgtgcgacttacattcaa

SEQ ID NO: 14198 - DNA, 20 bp, synthetic construct
  source 1..20: mol_type = other DNA
tttaccggaggactaccacg

SEQ ID NO: 14199 - DNA, 20 bp, synthetic construct
  source 1..20: mol_type = other DNA
gctatgtcctcctaagagtc

SEQ ID NO: 14200 - DNA, 20 bp, synthetic construct
  source 1..20: mol_type = other DNA
aaccaactctgaatttccat

SEQ ID NO: 14201 - DNA, 20 bp, synthetic construct
  source 1..20: mol_type = other DNA
aacatgcgccagtggcatcc

SEQ ID NO: 14202 - DNA, 20 bp, synthetic construct
  source 1..20: mol_type = other DNA
taggcgcatgggtcgagaag

SEQ ID NO: 14203 - DNA, 20 bp, synthetic construct
  source 1..20: mol_type = other DNA
gatcgctgacacgatataga

SEQ ID NO: 14204 - DNA, 20 bp, synthetic construct
  source 1..20: mol_type = other DNA
ggaatacaattgcccgaatc

SEQ ID NO: 14205 - DNA, 20 bp, synthetic construct
  source 1..20: mol_type = other DNA
tgatagtattgacctgcgta

SEQ ID NO: 14206 - DNA, 20 bp, synthetic construct
  source 1..20: mol_type = other DNA
aactctctcaacgacctcct

SEQ ID NO: 14207 - DNA, 20 bp, synthetic construct
  source 1..20: mol_type = other DNA
tgttagcgtgaagcgcacta

SEQ ID NO: 14208 - DNA, 20 bp, synthetic construct
  source 1..20: mol_type = other DNA
cgattggtgaggctaacttt

SEQ ID NO: 14209 - DNA, 20 bp, synthetic construct
  source 1..20: mol_type = other DNA
gcctctccgtctaatccgtg

SEQ ID NO: 14210 - DNA, 20 bp, synthetic construct
  source 1..20: mol_type = other DNA
tccttgaatcgttgagcgat

SEQ ID NO: 14211 - DNA, 20 bp, synthetic construct
  source 1..20: mol_type = other DNA
cggtttggccagagttattc

SEQ ID NO: 14212 - DNA, 20 bp, synthetic construct
  source 1..20: mol_type = other DNA
tactgactcgctattgaact

SEQ ID NO: 14213 - DNA, 20 bp, synthetic construct
  source 1..20: mol_type = other DNA
ctcaaagacgctatatccga

SEQ ID NO: 14214 - DNA, 20 bp, synthetic construct
  source 1..20: mol_type = other DNA
ggagctgcgactacgcaagt

SEQ ID NO: 14215 - DNA, 20 bp, synthetic construct
  source 1..20: mol_type = other DNA
ccgtttgcggctgcgttcat

SEQ ID NO: 14216 - DNA, 20 bp, synthetic construct
  source 1..20: mol_type = other DNA
acagcccaatcaccgtcgca

SEQ ID NO: 14217 - DNA, 20 bp, synthetic construct
  source 1..20: mol_type = other DNA
gtccaccaaattattccagg

SEQ ID NO: 14218 - DNA, 20 bp, synthetic construct
  source 1..20: mol_type = other DNA
gagtagtctatggtagacga

SEQ ID NO: 14219 - DNA, 20 bp, synthetic construct
  source 1..20: mol_type = other DNA
gctaatggtacatgcttcct

SEQ ID NO: 14220 - DNA, 20 bp, synthetic construct
  source 1..20: mol_type = other DNA
ggccataataggactcccat

SEQ ID NO: 14221 - DNA, 20 bp, synthetic construct
  source 1..20: mol_type = other DNA
acccactggatccggtatat

SEQ ID NO: 14222 - DNA, 20 bp, synthetic construct
  source 1..20: mol_type = other DNA
tgctcttgggtcttaaacga

SEQ ID NO: 14223 - DNA, 20 bp, synthetic construct
  source 1..20: mol_type = other DNA
gtgcttgaactggtgtgtta

SEQ ID NO: 14224 - DNA, 20 bp, synthetic construct
  source 1..20: mol_type = other DNA
accaaccctcggaggaggga

SEQ ID NO: 14225 - DNA, 20 bp, synthetic construct
  source 1..20: mol_type = other DNA
ccttatcaggagaagtgtca

SEQ ID NO: 14226 - DNA, 20 bp, synthetic construct
  source 1..20: mol_type = other DNA
tggtcgggtggagggtacag

SEQ ID NO: 14227 - DNA, 20 bp, synthetic construct
  source 1..20: mol_type = other DNA
ggactatcgttatctgccct

SEQ ID NO: 14228 - DNA, 20 bp, synthetic construct
  source 1..20: mol_type = other DNA
tcatgagccaccaatcggat

SEQ ID NO: 14229 - DNA, 20 bp, synthetic construct
  source 1..20: mol_type = other DNA
ttacgaagcaaagaactacg

SEQ ID NO: 14230 - DNA, 20 bp, synthetic construct
  source 1..20: mol_type = other DNA
ctcaccgggtcaagcctact

SEQ ID NO: 14231 - DNA, 20 bp, synthetic construct
  source 1..20: mol_type = other DNA
ctcagcccaatggaagccta

SEQ ID NO: 14232 - DNA, 20 bp, synthetic construct
  source 1..20: mol_type = other DNA
gaattggtgtcgccacgaat

SEQ ID NO: 14233 - DNA, 20 bp, synthetic construct
  source 1..20: mol_type = other DNA
taggtttgcatgattaccac

SEQ ID NO: 14234 - DNA, 20 bp, synthetic construct
  source 1..20: mol_type = other DNA
tcagcaactgcgctggttac

SEQ ID NO: 14235 - DNA, 20 bp, synthetic construct
  source 1..20: mol_type = other DNA
ccaagctctacctgcttggt

SEQ ID NO: 14236 - DNA, 20 bp, synthetic construct
  source 1..20: mol_type = other DNA
atggcaactaaccgttcccg

SEQ ID NO: 14237 - DNA, 20 bp, synthetic construct
  source 1..20: mol_type = other DNA
gtgatatatagggtaaccaa

SEQ ID NO: 14238 - DNA, 20 bp, synthetic construct
  source 1..20: mol_type = other DNA
tctctctgcaccgggtagat

SEQ ID NO: 14239 - DNA, 20 bp, synthetic construct
  source 1..20: mol_type = other DNA
cagaactgtttccgggtagt

SEQ ID NO: 14240 - DNA, 20 bp, synthetic construct
  source 1..20: mol_type = other DNA
agttgcatggtcctcttggc

SEQ ID NO: 14241 - DNA, 20 bp, synthetic construct
  source 1..20: mol_type = other DNA
tttgtccctagaggcagtag

SEQ ID NO: 14242 - DNA, 20 bp, synthetic construct
  source 1..20: mol_type = other DNA
gatcactgtcatatcaagcc

SEQ ID NO: 14243 - DNA, 20 bp, synthetic construct
  source 1..20: mol_type = other DNA
gagagttgagatatttcctc

SEQ ID NO: 14244 - DNA, 20 bp, synthetic construct
  source 1..20: mol_type = other DNA
gaggaccatgaagctgagga

SEQ ID NO: 14245 - DNA, 20 bp, synthetic construct
  source 1..20: mol_type = other DNA
tacctggtgtggagcctgcc

SEQ ID NO: 14246 - DNA, 20 bp, synthetic construct
  source 1..20: mol_type = other DNA
cttgtctacgataggtgttc

SEQ ID NO: 14247 - DNA, 20 bp, synthetic construct
  source 1..20: mol_type = other DNA
ctttcaagtgggagcttgta

SEQ ID NO: 14248 - DNA, 20 bp, synthetic construct
  source 1..20: mol_type = other DNA
actatgagaacatgctctct

SEQ ID NO: 14249 - DNA, 20 bp, synthetic construct
  source 1..20: mol_type = other DNA
tttaacgtttagcatcgctg

SEQ ID NO: 14250 - DNA, 20 bp, synthetic construct
  source 1..20: mol_type = other DNA
ttcagagcacatacttcggt

SEQ ID NO: 14251 - DNA, 20 bp, synthetic construct
  source 1..20: mol_type = other DNA
gtcacataatgcaagtgcgc

SEQ ID NO: 14252 - DNA, 20 bp, synthetic construct
  source 1..20: mol_type = other DNA
ggcgacataaaccgtccacc

SEQ ID NO: 14253 - DNA, 20 bp, synthetic construct
  source 1..20: mol_type = other DNA
cttgtgagaggagctggcga

SEQ ID NO: 14254 - DNA, 20 bp, synthetic construct
  source 1..20: mol_type = other DNA
ctccgtgtctttctttgcta

SEQ ID NO: 14255 - DNA, 20 bp, synthetic construct
  source 1..20: mol_type = other DNA
cgatctcaacagatagttga

SEQ ID NO: 14256 - DNA, 20 bp, synthetic construct
  source 1..20: mol_type = other DNA
cctttgaataggcgattccc

SEQ ID NO: 14257 - DNA, 20 bp, synthetic construct
  source 1..20: mol_type = other DNA
caatttgcgcgcagtcagtc

SEQ ID NO: 14258 - DNA, 20 bp, synthetic construct
  source 1..20: mol_type = other DNA
gtaacagcgaggttcttaat

SEQ ID NO: 14259 - DNA, 20 bp, synthetic construct
  source 1..20: mol_type = other DNA
tgctacgttagtagcagcgc

SEQ ID NO: 14260 - DNA, 20 bp, synthetic construct
  source 1..20: mol_type = other DNA
gcgatccgttggagatttcc

SEQ ID NO: 14261 - DNA, 20 bp, synthetic construct
  source 1..20: mol_type = other DNA
tcaacaataagagtcttgct

SEQ ID NO: 14262 - DNA, 20 bp, synthetic construct
  source 1..20: mol_type = other DNA
ccctatcaactgaaagccaa

SEQ ID NO: 14263 - DNA, 20 bp, synthetic construct
  source 1..20: mol_type = other DNA
aacttggtatcggagatatt

SEQ ID NO: 14264 - DNA, 20 bp, synthetic construct
  source 1..20: mol_type = other DNA
gactagccctttataggtta

SEQ ID NO: 14265 - DNA, 20 bp, synthetic construct
  source 1..20: mol_type = other DNA
atattctaccggacccgctc

SEQ ID NO: 14266 - DNA, 20 bp, synthetic construct
  source 1..20: mol_type = other DNA
cggccttgaagcgttattca

SEQ ID NO: 14267 - DNA, 20 bp, synthetic construct
  source 1..20: mol_type = other DNA
tgggttcagctccttcctgt

SEQ ID NO: 14268 - DNA, 20 bp, synthetic construct
  source 1..20: mol_type = other DNA
agatcccagggatgcaccaa

SEQ ID NO: 14269 - DNA, 20 bp, synthetic construct
  source 1..20: mol_type = other DNA
acgagctcaagcgcagacga

SEQ ID NO: 14270 - DNA, 20 bp, synthetic construct
  source 1..20: mol_type = other DNA
tcattgtcctcacttgggct

SEQ ID NO: 14271 - DNA, 20 bp, synthetic construct
  source 1..20: mol_type = other DNA
tttattggcgcggtctccac

SEQ ID NO: 14272 - DNA, 20 bp, synthetic construct
  source 1..20: mol_type = other DNA
ggctgactgtacacaccaca

SEQ ID NO: 14273 - DNA, 20 bp, synthetic construct
  source 1..20: mol_type = other DNA
gaggcagtccgccgtagagt

SEQ ID NO: 14274 - DNA, 20 bp, synthetic construct
  source 1..20: mol_type = other DNA
tatcactggaacggaacggt

SEQ ID NO: 14275 - DNA, 20 bp, synthetic construct
  source 1..20: mol_type = other DNA
tgttccgaagttgcggaacg

SEQ ID NO: 14276 - DNA, 20 bp, synthetic construct
  source 1..20: mol_type = other DNA
ctatctgtacgcaccggcga

SEQ ID NO: 14277 - DNA, 20 bp, synthetic construct
  source 1..20: mol_type = other DNA
gctccatacactatggccag

SEQ ID NO: 14278 - DNA, 20 bp, synthetic construct
  source 1..20: mol_type = other DNA
cctaatgtccctttatagcc

SEQ ID NO: 14279 - DNA, 20 bp, synthetic construct
  source 1..20: mol_type = other DNA
gatccgcgagtccgtgccaa

SEQ ID NO: 14280 - DNA, 20 bp, synthetic construct
  source 1..20: mol_type = other DNA
ttgatttactggcttcccat

SEQ ID NO: 14281 - DNA, 20 bp, synthetic construct
  source 1..20: mol_type = other DNA
aaagcatctcacatccagtc

SEQ ID NO: 14282 - DNA, 20 bp, synthetic construct
  source 1..20: mol_type = other DNA
acatatgaccaaaggaaggc

SEQ ID NO: 14283 - DNA, 20 bp, synthetic construct
  source 1..20: mol_type = other DNA
tagggtactcgggttacaac

SEQ ID NO: 14284 - DNA, 20 bp, synthetic construct
  source 1..20: mol_type = other DNA
agctgatgatcgcgcgctag

SEQ ID NO: 14285 - DNA, 20 bp, synthetic construct
  source 1..20: mol_type = other DNA
ctgcacgatcaatgggtcaa

SEQ ID NO: 14286 - DNA, 20 bp, synthetic construct
  source 1..20: mol_type = other DNA
cgtattgttcaaaccagctg

SEQ ID NO: 14287 - DNA, 20 bp, synthetic construct
  source 1..20: mol_type = other DNA
cagtactttaacgcgggcgt

SEQ ID NO: 14288 - DNA, 20 bp, synthetic construct
  source 1..20: mol_type = other DNA
actttatatgtgggaatggg

SEQ ID NO: 14289 - DNA, 20 bp, synthetic construct
  source 1..20: mol_type = other DNA
tttcgggcgtatacataaga

SEQ ID NO: 14290 - DNA, 20 bp, synthetic construct
  source 1..20: mol_type = other DNA
ctcacacagtcggtgtattg

SEQ ID NO: 14291 - DNA, 20 bp, synthetic construct
  source 1..20: mol_type = other DNA
taccgggctgctaatgaacc

SEQ ID NO: 14292 - DNA, 20 bp, synthetic construct
  source 1..20: mol_type = other DNA
cacccttgtgcgctcattca

SEQ ID NO: 14293 - DNA, 20 bp, synthetic construct
  source 1..20: mol_type = other DNA
aatgtagccaaatataggtc

SEQ ID NO: 14294 - DNA, 20 bp, synthetic construct
  source 1..20: mol_type = other DNA
accttcaacggattatttct

SEQ ID NO: 14295 - DNA, 20 bp, synthetic construct
  source 1..20: mol_type = other DNA
cctgtgtctttgaatgagcc

SEQ ID NO: 14296 - DNA, 20 bp, synthetic construct
  source 1..20: mol_type = other DNA
tctttgtcttactgtgaagc

SEQ ID NO: 14297 - DNA, 20 bp, synthetic construct
  source 1..20: mol_type = other DNA
taactggtcgagtttactcg

SEQ ID NO: 14298 - DNA, 20 bp, synthetic construct
  source 1..20: mol_type = other DNA
gaaactgagctaggccacac

SEQ ID NO: 14299 - DNA, 20 bp, synthetic construct
  source 1..20: mol_type = other DNA
gagcgggtctggtttattat

SEQ ID NO: 14300 - DNA, 20 bp, synthetic construct
  source 1..20: mol_type = other DNA
ccctacagtattcttgggat

SEQ ID NO: 14301 - DNA, 20 bp, synthetic construct
  source 1..20: mol_type = other DNA
ttgctaccagtaaatggctc

SEQ ID NO: 14302 - DNA, 20 bp, synthetic construct
  source 1..20: mol_type = other DNA
cacttcctatctctacgagt

SEQ ID NO: 14303 - DNA, 20 bp, synthetic construct
  source 1..20: mol_type = other DNA
accacatgacgttataactg

SEQ ID NO: 14304 - DNA, 20 bp, synthetic construct
  source 1..20: mol_type = other DNA
ccacagacgtccagcgaagc

SEQ ID NO: 14305 - DNA, 20 bp, synthetic construct
  source 1..20: mol_type = other DNA
tttgttcgagcaactgctta

SEQ ID NO: 14306 - DNA, 20 bp, synthetic construct
  source 1..20: mol_type = other DNA
agcttacgagggtcttaatc

SEQ ID NO: 14307 - DNA, 20 bp, synthetic construct
  source 1..20: mol_type = other DNA
gtcgcaccagactgctcgtc

SEQ ID NO: 14308 - DNA, 20 bp, synthetic construct
  source 1..20: mol_type = other DNA
gggccggtcattgtggttgc

SEQ ID NO: 14309 - DNA, 20 bp, synthetic construct
  source 1..20: mol_type = other DNA
tctgctctcctgtgtccttc

SEQ ID NO: 14310 - DNA, 20 bp, synthetic construct
  source 1..20: mol_type = other DNA
cttacaacgtaggcttggta

SEQ ID NO: 14311 - DNA, 20 bp, synthetic construct
  source 1..20: mol_type = other DNA
cggagtttatacaaacggta

SEQ ID NO: 14312 - DNA, 20 bp, synthetic construct
  source 1..20: mol_type = other DNA
tggcacctattgtagtcgat

SEQ ID NO: 14313 - DNA, 20 bp, synthetic construct
  source 1..20: mol_type = other DNA
tctgtagtggtaattcctag

SEQ ID NO: 14314 - DNA, 20 bp, synthetic construct
  source 1..20: mol_type = other DNA
ttcgactatcaagctgacat

SEQ ID NO: 14315 - DNA, 20 bp, synthetic construct
  source 1..20: mol_type = other DNA
gttcgatcctaattattgct

SEQ ID NO: 14316 - DNA, 20 bp, synthetic construct
  source 1..20: mol_type = other DNA
cggaatccaaatcttgtgcg

SEQ ID NO: 14317 - DNA, 20 bp, synthetic construct
  source 1..20: mol_type = other DNA
cctgaaggtatctaagcgca

SEQ ID NO: 14318 - DNA, 20 bp, synthetic construct
  source 1..20: mol_type = other DNA
gtctggactatacttgctga

SEQ ID NO: 14319 - DNA, 20 bp, synthetic construct
  source 1..20: mol_type = other DNA
atataactctgggcccgcat

SEQ ID NO: 14320 - DNA, 20 bp, synthetic construct
  source 1..20: mol_type = other DNA
aggtgtatgtttggacttgc

SEQ ID NO: 14321 - DNA, 20 bp, synthetic construct
  source 1..20: mol_type = other DNA
caatccgtgtttgttgagcg

SEQ ID NO: 14322 - DNA, 20 bp, synthetic construct
  source 1..20: mol_type = other DNA
ctaatcgatatgtgcatatc

SEQ ID NO: 14323 - DNA, 20 bp, synthetic construct
  source 1..20: mol_type = other DNA
ggctgttcaagggactttgt

SEQ ID NO: 14324 - DNA, 20 bp, synthetic construct
  source 1..20: mol_type = other DNA
ttcggcgaccaaggaaataa

SEQ ID NO: 14325 - DNA, 20 bp, synthetic construct
  source 1..20: mol_type = other DNA
ccagcctcatccaaacgttc

SEQ ID NO: 14326 - DNA, 20 bp, synthetic construct
  source 1..20: mol_type = other DNA
tgaaattacattctccgtgg

SEQ ID NO: 14327 - DNA, 20 bp, synthetic construct
  source 1..20: mol_type = other DNA
tgagggcaacacactggtca

SEQ ID NO: 14328 - DNA, 20 bp, synthetic construct
  source 1..20: mol_type = other DNA
actgtgcgacctgggataaa

SEQ ID NO: 14329 - DNA, 20 bp, synthetic construct
  source 1..20: mol_type = other DNA
gcacgtcctccactcaattc

SEQ ID NO: 14330 - DNA, 20 bp, synthetic construct
  source 1..20: mol_type = other DNA
tcacggaggtcgaaccagtt

SEQ ID NO: 14331 - DNA, 20 bp, synthetic construct
  source 1..20: mol_type = other DNA
cccgatttaatgttctccat

SEQ ID NO: 14332 - DNA, 20 bp, synthetic construct
  source 1..20: mol_type = other DNA
acgtgcaggccaaattacgt

SEQ ID NO: 14333 - DNA, 20 bp, synthetic construct
  source 1..20: mol_type = other DNA
aatgcgcctgggagccggta

SEQ ID NO: 14334 - DNA, 20 bp, synthetic construct
  source 1..20: mol_type = other DNA
atccaactaatcctagactt

SEQ ID NO: 14335 - DNA, 20 bp, synthetic construct
  source 1..20: mol_type = other DNA
ctggcgggtcctcggatcat

SEQ ID NO: 14336 - DNA, 20 bp, synthetic construct
  source 1..20: mol_type = other DNA
atctgaccacccacaacttg

SEQ ID NO: 14337 - DNA, 20 bp, synthetic construct
  source 1..20: mol_type = other DNA
gagccgaccaatccgcgtca

SEQ ID NO: 14338 - DNA, 20 bp, synthetic construct
  source 1..20: mol_type = other DNA
tcagtttggcagaggagtat

SEQ ID NO: 14339 - DNA, 20 bp, synthetic construct
  source 1..20: mol_type = other DNA
ccgcatttgctatcccttct

SEQ ID NO: 14340 - DNA, 20 bp, synthetic construct
  source 1..20: mol_type = other DNA
gtagaaatatcattgagcca

SEQ ID NO: 14341 - DNA, 20 bp, synthetic construct
  source 1..20: mol_type = other DNA
gtggtctcgctcaaggagcc

SEQ ID NO: 14342 - DNA, 20 bp, synthetic construct
  source 1..20: mol_type = other DNA
cgcatctttgcttatggtgg

SEQ ID NO: 14343 - DNA, 20 bp, synthetic construct
  source 1..20: mol_type = other DNA
ggaacaagtcttggttatga

SEQ ID NO: 14344 - DNA, 20 bp, synthetic construct
  source 1..20: mol_type = other DNA
acaaggatgtctcaccttgg

SEQ ID NO: 14345 - DNA, 20 bp, synthetic construct
  source 1..20: mol_type = other DNA
tagcttctcctttcaattcg

SEQ ID NO: 14346 - DNA, 20 bp, synthetic construct
  source 1..20: mol_type = other DNA
ggttagataggtatttgtcc

SEQ ID NO: 14347 - DNA, 20 bp, synthetic construct
  source 1..20: mol_type = other DNA
gatcgcctactgaagcgctt

SEQ ID NO: 14348 - DNA, 20 bp, synthetic construct
  source 1..20: mol_type = other DNA
aagatacagggcgacaatag

SEQ ID NO: 14349 - DNA, 20 bp, synthetic construct
  source 1..20: mol_type = other DNA
caccgtatgggttccgggaa

SEQ ID NO: 14350 - DNA, 20 bp, synthetic construct
  source 1..20: mol_type = other DNA
gcctgtgttattggcatagc

SEQ ID NO: 14351 - DNA, 20 bp, synthetic construct
  source 1..20: mol_type = other DNA
tccgtgtcaaggctgctcag

SEQ ID NO: 14352 - DNA, 20 bp, synthetic construct
  source 1..20: mol_type = other DNA
cgatgggtctgggaatgatg

SEQ ID NO: 14353 - DNA, 20 bp, synthetic construct
  source 1..20: mol_type = other DNA
aattgagcttaacttcgaga

SEQ ID NO: 14354 - DNA, 20 bp, synthetic construct
  source 1..20: mol_type = other DNA
gacttacaccgtggcctttg

SEQ ID NO: 14355 - DNA, 20 bp, synthetic construct
  source 1..20: mol_type = other DNA
cgcagactatgatcctcggt

SEQ ID NO: 14356 - DNA, 20 bp, synthetic construct
  source 1..20: mol_type = other DNA
gtacctagatgcctaattga

SEQ ID NO: 14357 - DNA, 20 bp, synthetic construct
  source 1..20: mol_type = other DNA
gccgtgctgacctcggagtg

SEQ ID NO: 14358 - DNA, 20 bp, synthetic construct
  source 1..20: mol_type = other DNA
ttggtatatggaccgaacat

SEQ ID NO: 14359 - DNA, 20 bp, synthetic construct
  source 1..20: mol_type = other DNA
agatcgatccgtaggtttat

SEQ ID NO: 14360 - DNA, 20 bp, synthetic construct
  source 1..20: mol_type = other DNA
gtgctgcctcgcaccgtgaa

SEQ ID NO: 14361 - DNA, 20 bp, synthetic construct
  source 1..20: mol_type = other DNA
accactccatatttatggac

SEQ ID NO: 14362 - DNA, 20 bp, synthetic construct
  source 1..20: mol_type = other DNA
gacgaatgggtcaaagccct

SEQ ID NO: 14363 - DNA, 20 bp, synthetic construct
  source 1..20: mol_type = other DNA
cgtcttgatacacctggcgg

SEQ ID NO: 14364 - DNA, 20 bp, synthetic construct
  source 1..20: mol_type = other DNA
ggcctctattcccggaagtg

SEQ ID NO: 14365 - DNA, 20 bp, synthetic construct
  source 1..20: mol_type = other DNA
gcaccctgagagtcgaacta

SEQ ID NO: 14366 - DNA, 20 bp, synthetic construct
  source 1..20: mol_type = other DNA
cctttgcgttctgggtaagc

SEQ ID NO: 14367 - DNA, 20 bp, synthetic construct
  source 1..20: mol_type = other DNA
gctaacctctccaccagcca

SEQ ID NO: 14368 - DNA, 20 bp, synthetic construct
  source 1..20: mol_type = other DNA
cttaaaggattcgccgaacc

SEQ ID NO: 14369 - DNA, 20 bp, synthetic construct
  source 1..20: mol_type = other DNA
acggcaaagtgcgcaggaga

SEQ ID NO: 14370 - DNA, 20 bp, synthetic construct
  source 1..20: mol_type = other DNA
tagagtagcggcacccacgg

SEQ ID NO: 14371 - DNA, 20 bp, synthetic construct
  source 1..20: mol_type = other DNA
acgctcaaggatagcggatg

SEQ ID NO: 14372 - DNA, 20 bp, synthetic construct
  source 1..20: mol_type = other DNA
tcacaccgacgtggcttagg

SEQ ID NO: 14373 - DNA, 20 bp, synthetic construct
  source 1..20: mol_type = other DNA
cttatgagtcaaggcggaca

SEQ ID NO: 14374 - DNA, 20 bp, synthetic construct
  source 1..20: mol_type = other DNA
tccagatacctgtttgtgta

SEQ ID NO: 14375 - DNA, 20 bp, synthetic construct
  source 1..20: mol_type = other DNA
tatcgtgggatccataacgt

SEQ ID NO: 14376 - DNA, 20 bp, synthetic construct
  source 1..20: mol_type = other DNA
tctgccgaaatacagacttt

SEQ ID NO: 14377 - DNA, 20 bp, synthetic construct
  source 1..20: mol_type = other DNA
tttgacctatcttagctacg

SEQ ID NO: 14378 - DNA, 20 bp, synthetic construct
  source 1..20: mol_type = other DNA
aatgtcactcgtttgcggta

SEQ ID NO: 14379 - DNA, 20 bp, synthetic construct
  source 1..20: mol_type = other DNA
gggtcggtttcctcttcagt

SEQ ID NO: 14380 - DNA, 20 bp, synthetic construct
  source 1..20: mol_type = other DNA
ctacaagtagacaagcgtgt

SEQ ID NO: 14381 - DNA, 20 bp, synthetic construct
  source 1..20: mol_type = other DNA
tcataagcagggctgacgtt

SEQ ID NO: 14382 - DNA, 20 bp, synthetic construct
  source 1..20: mol_type = other DNA
gtagcagcgggcgcgaaatg

SEQ ID NO: 14383 - DNA, 20 bp, synthetic construct
  source 1..20: mol_type = other DNA
aaacctaccttctatggcga

SEQ ID NO: 14384 - DNA, 20 bp, synthetic construct
  source 1..20: mol_type = other DNA
atctaagctccgccgctcgt

SEQ ID NO: 14385 - DNA, 20 bp, synthetic construct
  source 1..20: mol_type = other DNA
gctcggttaaggtacaatgc

SEQ ID NO: 14386 - DNA, 20 bp, synthetic construct
  source 1..20: mol_type = other DNA
tctagcgtctccaaagggcg

SEQ ID NO: 14387 - DNA, 20 bp, synthetic construct
  source 1..20: mol_type = other DNA
caccgtggctccttcgtaaa

SEQ ID NO: 14388 - DNA, 20 bp, synthetic construct
  source 1..20: mol_type = other DNA
tccgaggccgttatagtaca

SEQ ID NO: 14389 - DNA, 20 bp, synthetic construct
  source 1..20: mol_type = other DNA
gctacgcagctgcacttagt

SEQ ID NO: 14390 - DNA, 20 bp, synthetic construct
  source 1..20: mol_type = other DNA
tagtctgctgtaaatgaatc

SEQ ID NO: 14391 - DNA, 20 bp, synthetic construct
  source 1..20: mol_type = other DNA
cctcgcaccatgttcggcat

SEQ ID NO: 14392 - DNA, 20 bp, synthetic construct
  source 1..20: mol_type = other DNA
cttctacggtgtgcatcact

SEQ ID NO: 14393 - DNA, 20 bp, synthetic construct
  source 1..20: mol_type = other DNA
gggcgcatatcgtaacgcgc

SEQ ID NO: 14394 - DNA, 20 bp, synthetic construct
  source 1..20: mol_type = other DNA
ttgcgtcaagtgcgctgact

SEQ ID NO: 14395 - DNA, 20 bp, synthetic construct
  source 1..20: mol_type = other DNA
atgtagtgggtaaaccgcgg

SEQ ID NO: 14396 - DNA, 20 bp, synthetic construct
  source 1..20: mol_type = other DNA
agtgctccacttacattcca

SEQ ID NO: 14397 - DNA, 20 bp, synthetic construct
  source 1..20: mol_type = other DNA
tgccgttgggtgcgtttaaa

SEQ ID NO: 14398 - DNA, 20 bp, synthetic construct
  source 1..20: mol_type = other DNA
aacgcccgtagagggctgat

SEQ ID NO: 14399 - DNA, 20 bp, synthetic construct
  source 1..20: mol_type = other DNA
gttcaggctttactaggacc

SEQ ID NO: 14400 - DNA, 20 bp, synthetic construct
  source 1..20: mol_type = other DNA
gtcctctatcgatagaaagc

SEQ ID NO: 14401 - DNA, 20 bp, synthetic construct
  source 1..20: mol_type = other DNA
atcggttctactagtatacg

SEQ ID NO: 14402 - DNA, 20 bp, synthetic construct
  source 1..20: mol_type = other DNA
ggttgactcgctatgtggga

SEQ ID NO: 14403 - DNA, 20 bp, synthetic construct
  source 1..20: mol_type = other DNA
atcagatcgctgcccggagg

SEQ ID NO: 14404 - DNA, 20 bp, synthetic construct
  source 1..20: mol_type = other DNA
agcggtcggttcgtgacttt

SEQ ID NO: 14405 - DNA, 20 bp, synthetic construct
  source 1..20: mol_type = other DNA
gcgtgtgagtcatctacggc

SEQ ID NO: 14406 - DNA, 20 bp, synthetic construct
  source 1..20: mol_type = other DNA
gtctgcagctgactaaagtg

SEQ ID NO: 14407 - DNA, 20 bp, synthetic construct
  source 1..20: mol_type = other DNA
tgtcgaagcagacgatgtat

SEQ ID NO: 14408 - DNA, 20 bp, synthetic construct
  source 1..20: mol_type = other DNA
gctacaaacacgaatctcac

SEQ ID NO: 14409 - DNA, 20 bp, synthetic construct
  source 1..20: mol_type = other DNA
ttaatgcttgggacgtgctg

SEQ ID NO: 14410 - DNA, 20 bp, synthetic construct
  source 1..20: mol_type = other DNA
gaccgttgtgcttcccactt

SEQ ID NO: 14411 - DNA, 20 bp, synthetic construct
  source 1..20: mol_type = other DNA
cacagtcgcggagtacacag

SEQ ID NO: 14412 - DNA, 20 bp, synthetic construct
  source 1..20: mol_type = other DNA
gactcctggccagtcaaagg

SEQ ID NO: 14413 - DNA, 20 bp, synthetic construct
  source 1..20: mol_type = other DNA
cgtgcttaacggtcctcaat

SEQ ID NO: 14414 - DNA, 20 bp, synthetic construct
  source 1..20: mol_type = other DNA
gttaggtgagggtagaaata

SEQ ID NO: 14415 - DNA, 20 bp, synthetic construct
  source 1..20: mol_type = other DNA
gctccatacatatcacaact

SEQ ID NO: 14416 - DNA, 20 bp, synthetic construct
  source 1..20: mol_type = other DNA
tgattgtcactcaatgcagt

SEQ ID NO: 14417 - DNA, 20 bp, synthetic construct
  source 1..20: mol_type = other DNA
ggacattcgatgtccgacgc

SEQ ID NO: 14418 - DNA, 20 bp, synthetic construct
  source 1..20: mol_type = other DNA
catactgacagagagcggga

SEQ ID NO: 14419 - DNA, 20 bp, synthetic construct
  source 1..20: mol_type = other DNA
acactatttgcccaggtaac

SEQ ID NO: 14420 - DNA, 20 bp, synthetic construct
  source 1..20: mol_type = other DNA
tacagctgttgacgaatcac

SEQ ID NO: 14421 - DNA, 20 bp, synthetic construct
  source 1..20: mol_type = other DNA
gctacccaaactaagacgat

SEQ ID NO: 14422 - DNA, 20 bp, synthetic construct
  source 1..20: mol_type = other DNA
gcactcagaggcctgctatg

SEQ ID NO: 14423 - DNA, 20 bp, synthetic construct
  source 1..20: mol_type = other DNA
agtatcagccagcgggcaac

SEQ ID NO: 14424 - DNA, 20 bp, synthetic construct
  source 1..20: mol_type = other DNA
ggcaactttatgatccgtag

SEQ ID NO: 14425 - DNA, 20 bp, synthetic construct
  source 1..20: mol_type = other DNA
agcgctccgtgcaactgtat

SEQ ID NO: 14426 - DNA, 20 bp, synthetic construct
  source 1..20: mol_type = other DNA
cgcatctagtccgattccgc

SEQ ID NO: 14427 - DNA, 20 bp, synthetic construct
  source 1..20: mol_type = other DNA
tttgatattatgaatggcgt

SEQ ID NO: 14428 - DNA, 20 bp, synthetic construct
  source 1..20: mol_type = other DNA
gcagtaatcagaggaaagcg

SEQ ID NO: 14429 - DNA, 20 bp, synthetic construct
  source 1..20: mol_type = other DNA
attgagctcacgaggctaca

SEQ ID NO: 14430 - DNA, 20 bp, synthetic construct
  source 1..20: mol_type = other DNA
cacacttgtgtcagctttgt

SEQ ID NO: 14431 - DNA, 20 bp, synthetic construct
  source 1..20: mol_type = other DNA
caacgaactacccactactc

SEQ ID NO: 14432 - DNA, 20 bp, synthetic construct
  source 1..20: mol_type = other DNA
gtgacggcccttctgcgatg

SEQ ID NO: 14433 - DNA, 20 bp, synthetic construct
  source 1..20: mol_type = other DNA
cgacgtaaacatcgatcaag

SEQ ID NO: 14434 - DNA, 20 bp, synthetic construct
  source 1..20: mol_type = other DNA
agaaaggaggatatgactag

SEQ ID NO: 14435 - DNA, 20 bp, synthetic construct
  source 1..20: mol_type = other DNA
cacggtcatttccactcctc

SEQ ID NO: 14436 - DNA, 20 bp, synthetic construct
  source 1..20: mol_type = other DNA
gctcgtttatctgcgtccgg

SEQ ID NO: 14437 - DNA, 20 bp, synthetic construct
  source 1..20: mol_type = other DNA
tccagcgtaaacatacgagc

SEQ ID NO: 14438 - DNA, 20 bp, synthetic construct
  source 1..20: mol_type = other DNA
agtttcctcggaagcgcggc

SEQ ID NO: 14439 - DNA, 20 bp, synthetic construct
  source 1..20: mol_type = other DNA
atagctcaatgcggctcttc

SEQ ID NO: 14440 - DNA, 20 bp, synthetic construct
  source 1..20: mol_type = other DNA
tcctactcgtttggaaactg

SEQ ID NO: 14441 - DNA, 20 bp, synthetic construct
  source 1..20: mol_type = other DNA
gctagtgttgcgactcaatc

SEQ ID NO: 14442 - DNA, 20 bp, synthetic construct
  source 1..20: mol_type = other DNA
gtttgccgttctttcacttc

SEQ ID NO: 14443 - DNA, 20 bp, synthetic construct
  source 1..20: mol_type = other DNA
cctatccagattactatagc

SEQ ID NO: 14444 - DNA, 20 bp, synthetic construct
  source 1..20: mol_type = other DNA
ctcagtggcagaaagctaat

SEQ ID NO: 14445 - DNA, 20 bp, synthetic construct
  source 1..20: mol_type = other DNA
tgaggaagatactccaccca

SEQ ID NO: 14446 - DNA, 20 bp, synthetic construct
  source 1..20: mol_type = other DNA
ccctaactatgtagtgactg

SEQ ID NO: 14447 - DNA, 20 bp, synthetic construct
  source 1..20: mol_type = other DNA
ttgggcgtagtcattgctcc

SEQ ID NO: 14448 - DNA, 20 bp, synthetic construct
  source 1..20: mol_type = other DNA
tcaggcaattgcacactgta

SEQ ID NO: 14449 - DNA, 20 bp, synthetic construct
  source 1..20: mol_type = other DNA
gtcaaatgcgacaattacgt

SEQ ID NO: 14450 - DNA, 20 bp, synthetic construct
  source 1..20: mol_type = other DNA
gaggttaccacgtgtcctat

SEQ ID NO: 14451 - DNA, 20 bp, synthetic construct
  source 1..20: mol_type = other DNA
cgcctgtctaagcaagcagt

SEQ ID NO: 14452 - DNA, 20 bp, synthetic construct
  source 1..20: mol_type = other DNA
gtcgaatcgcagccagggaa

SEQ ID NO: 14453 - DNA, 20 bp, synthetic construct
  source 1..20: mol_type = other DNA
aaacaatcatgggcaagtag

SEQ ID NO: 14454 - DNA, 20 bp, synthetic construct
  source 1..20: mol_type = other DNA
aaactttggataagattggc

SEQ ID NO: 14455 - DNA, 20 bp, synthetic construct
  source 1..20: mol_type = other DNA
tatacgggtctggacttacc

SEQ ID NO: 14456 - DNA, 20 bp, synthetic construct
  source 1..20: mol_type = other DNA
tcataaattcgaagcagaga

SEQ ID NO: 14457 - DNA, 20 bp, synthetic construct
  source 1..20: mol_type = other DNA
tccgtgttaggaggacgatg

SEQ ID NO: 14458 - DNA, 20 bp, synthetic construct
  source 1..20: mol_type = other DNA
gagccattgtggttgggtgt

SEQ ID NO: 14459 - DNA, 20 bp, synthetic construct
  source 1..20: mol_type = other DNA
gcagaaattgtcagaaggtg

SEQ ID NO: 14460 - DNA, 20 bp, synthetic construct
  source 1..20: mol_type = other DNA
taagggtatttcaccggaat

SEQ ID NO: 14461 - DNA, 20 bp, synthetic construct
  source 1..20: mol_type = other DNA
ctgggtgctactgtgagatc

SEQ ID NO: 14462 - DNA, 20 bp, synthetic construct
  source 1..20: mol_type = other DNA
gtggtatagggtgttccaaa

SEQ ID NO: 14463 - DNA, 20 bp, synthetic construct
  source 1..20: mol_type = other DNA
tgctgtgcacacgaggtaat

SEQ ID NO: 14464 - DNA, 20 bp, synthetic construct
  source 1..20: mol_type = other DNA
gcgaagtaggcgcacaaaga

SEQ ID NO: 14465 - DNA, 20 bp, synthetic construct
  source 1..20: mol_type = other DNA
tcaacagcaaactaagccgg

SEQ ID NO: 14466 - DNA, 20 bp, synthetic construct
  source 1..20: mol_type = other DNA
atttatccggttggtcattt

SEQ ID NO: 14467 - DNA, 20 bp, synthetic construct
  source 1..20: mol_type = other DNA
ggtcgtctgtgaagcagaaa

SEQ ID NO: 14468 - DNA, 20 bp, synthetic construct
  source 1..20: mol_type = other DNA
gagacactccgctccagctg

SEQ ID NO: 14469 - DNA, 20 bp, synthetic construct
  source 1..20: mol_type = other DNA
acgttcgctgcggtgccaat

SEQ ID NO: 14470 - DNA, 20 bp, synthetic construct
  source 1..20: mol_type = other DNA
gaaactactggccatactac

SEQ ID NO: 14471 - DNA, 20 bp, synthetic construct
  source 1..20: mol_type = other DNA
cttcccaccgcccataaggg

SEQ ID NO: 14472 - DNA, 20 bp, synthetic construct
  source 1..20: mol_type = other DNA
acaatgggagccgaactccc

SEQ ID NO: 14473 - DNA, 20 bp, synthetic construct
  source 1..20: mol_type = other DNA
cgctcatagttgtgtaaggt

SEQ ID NO: 14474 - DNA, 20 bp, synthetic construct
  source 1..20: mol_type = other DNA
accgccttgcgtggcatcct

SEQ ID NO: 14475 - DNA, 20 bp, synthetic construct
  source 1..20: mol_type = other DNA
caaatgcatgatagctacaa

SEQ ID NO: 14476 - DNA, 20 bp, synthetic construct
  source 1..20: mol_type = other DNA
aaatcgtgcgacatttagaa

SEQ ID NO: 14477 - DNA, 20 bp, synthetic construct
  source 1..20: mol_type = other DNA
tgcggagcaatttatagcta

SEQ ID NO: 14478 - DNA, 20 bp, synthetic construct
  source 1..20: mol_type = other DNA
ggatggcagaaggtatccta

SEQ ID NO: 14479 - DNA, 20 bp, synthetic construct
  source 1..20: mol_type = other DNA
tgttaactaccgtcgtaatt

SEQ ID NO: 14480 - DNA, 20 bp, synthetic construct
  source 1..20: mol_type = other DNA
tgcatcatacgtagtactgc

SEQ ID NO: 14481 - DNA, 20 bp, synthetic construct
  source 1..20: mol_type = other DNA
gaagataacctcaacctccc

SEQ ID NO: 14482 - DNA, 20 bp, synthetic construct
  source 1..20: mol_type = other DNA
agttaccctctcgattaatt

SEQ ID NO: 14483 - DNA, 20 bp, synthetic construct
  source 1..20: mol_type = other DNA
agtcagatccacgatgttgc

SEQ ID NO: 14484 - DNA, 20 bp, synthetic construct
  source 1..20: mol_type = other DNA
tttcccgaaagccggagctg

SEQ ID NO: 14485 - DNA, 20 bp, synthetic construct
  source 1..20: mol_type = other DNA
gttgatttgactgaccctcc

SEQ ID NO: 14486 - DNA, 20 bp, synthetic construct
  source 1..20: mol_type = other DNA
gacacatctccgattggaga

SEQ ID NO: 14487 - DNA, 20 bp, synthetic construct
  source 1..20: mol_type = other DNA
gacgccatagagtagacata

SEQ ID NO: 14488 - DNA, 20 bp, synthetic construct
  source 1..20: mol_type = other DNA
aggatcgtccggcagctcag

SEQ ID NO: 14489 - DNA, 20 bp, synthetic construct
  source 1..20: mol_type = other DNA
aactgatgagtaccgccagc

SEQ ID NO: 14490 - DNA, 20 bp, synthetic construct
  source 1..20: mol_type = other DNA
tgatagcccagaaactttac

SEQ ID NO: 14491 - DNA, 20 bp, synthetic construct
  source 1..20: mol_type = other DNA
ggagccagaaatttcgccgc

SEQ ID NO: 14492 - DNA, 20 bp, synthetic construct
  source 1..20: mol_type = other DNA
aacgccctgacgttcaccca

SEQ ID NO: 14493 - DNA, 20 bp, synthetic construct
  source 1..20: mol_type = other DNA
ctttggaaatgcaatatagc

SEQ ID NO: 14494 - DNA, 20 bp, synthetic construct
  source 1..20: mol_type = other DNA
tatcacagcgcaccaggtta

SEQ ID NO: 14495 - DNA, 20 bp, synthetic construct
  source 1..20: mol_type = other DNA
gacagatagggcaaatgagt

SEQ ID NO: 14496 - DNA, 20 bp, synthetic construct
  source 1..20: mol_type = other DNA
acattagacgggctggacac

SEQ ID NO: 14497 - DNA, 20 bp, synthetic construct
  source 1..20: mol_type = other DNA
gacctcgccattataaccaa

SEQ ID NO: 14498 - DNA, 20 bp, synthetic construct
  source 1..20: mol_type = other DNA
tcttaaaggccaagggtcgt

SEQ ID NO: 14499 - DNA, 20 bp, synthetic construct
  source 1..20: mol_type = other DNA
ctcacacagcgattaaccac

SEQ ID NO: 14500 - DNA, 20 bp, synthetic construct
  source 1..20: mol_type = other DNA
agtgtctggtgatcacgccg

SEQ ID NO: 14501 - DNA, 20 bp, synthetic construct
  source 1..20: mol_type = other DNA
taagtacctcacttgaaatg

SEQ ID NO: 14502 - DNA, 20 bp, synthetic construct
  source 1..20: mol_type = other DNA
agttacatttgtctagcagc

SEQ ID NO: 14503 - DNA, 20 bp, synthetic construct
  source 1..20: mol_type = other DNA
ccgtttagccctccgtgagt

SEQ ID NO: 14504 - DNA, 20 bp, synthetic construct
  source 1..20: mol_type = other DNA
gaaccggtagcgcgtcgtta

SEQ ID NO: 14505 - DNA, 20 bp, synthetic construct
  source 1..20: mol_type = other DNA
ttgtggaggtcctgcgttgc

SEQ ID NO: 14506 - DNA, 20 bp, synthetic construct
  source 1..20: mol_type = other DNA
cgctacttagacactcccgc

SEQ ID NO: 14507 - DNA, 20 bp, synthetic construct
  source 1..20: mol_type = other DNA
aagcggttatcatcgaatct

SEQ ID NO: 14508 - DNA, 20 bp, synthetic construct
  source 1..20: mol_type = other DNA
gagcagaggctcacgtctac

SEQ ID NO: 14509 - DNA, 20 bp, synthetic construct
  source 1..20: mol_type = other DNA
aagtgcgcatatagagccag

SEQ ID NO: 14510 - DNA, 20 bp, synthetic construct
  source 1..20: mol_type = other DNA
caccagaggccatttggagt

SEQ ID NO: 14511 - DNA, 20 bp, synthetic construct
  source 1..20: mol_type = other DNA
acgtaagggcctctatgaac

SEQ ID NO: 14512 - DNA, 20 bp, synthetic construct
  source 1..20: mol_type = other DNA
ctccctctgctatctgctag

SEQ ID NO: 14513 - DNA, 20 bp, synthetic construct
  source 1..20: mol_type = other DNA
aaatatgagctatgatgcgg

SEQ ID NO: 14514 - DNA, 20 bp, synthetic construct
  source 1..20: mol_type = other DNA
aagttgaaggctcccgcatc

SEQ ID NO: 14515 - DNA, 20 bp, synthetic construct
  source 1..20: mol_type = other DNA
cccagcccaaagtgattcca

SEQ ID NO: 14516 - DNA, 20 bp, synthetic construct
  source 1..20: mol_type = other DNA
cgattgattcgcttaataac

SEQ ID NO: 14517 - DNA, 20 bp, synthetic construct
  source 1..20: mol_type = other DNA
aagtgattccgatggctctc

SEQ ID NO: 14518 - DNA, 20 bp, synthetic construct
  source 1..20: mol_type = other DNA
gttgactacgaacagtcatt

SEQ ID NO: 14519 - DNA, 20 bp, synthetic construct
  source 1..20: mol_type = other DNA
tggtattccaccattgtgga

SEQ ID NO: 14520 - DNA, 20 bp, synthetic construct
  source 1..20: mol_type = other DNA
taagtaatggtctttaaggc

SEQ ID NO: 14521 - DNA, 20 bp, synthetic construct
  source 1..20: mol_type = other DNA
ccggccgctgcgacgtataa

SEQ ID NO: 14522 - DNA, 20 bp, synthetic construct
  source 1..20: mol_type = other DNA
tcctctcgggatggacaacc

SEQ ID NO: 14523 - DNA, 20 bp, synthetic construct
  source 1..20: mol_type = other DNA
ctgagcaactgatacttgcg

SEQ ID NO: 14524 - DNA, 20 bp, synthetic construct
  source 1..20: mol_type = other DNA
tgagaagtcaccaacgttaa

SEQ ID NO: 14525 - DNA, 20 bp, synthetic construct
  source 1..20: mol_type = other DNA
cccgaccatttatactccgt

SEQ ID NO: 14526 - DNA, 20 bp, synthetic construct
  source 1..20: mol_type = other DNA
ctttgatccttgaagtggac

SEQ ID NO: 14527 - DNA, 20 bp, synthetic construct
  source 1..20: mol_type = other DNA
tggagcttgtgacgacatgg

SEQ ID NO: 14528 - DNA, 20 bp, synthetic construct
  source 1..20: mol_type = other DNA
cctaccttagtgccgggttt

SEQ ID NO: 14529 - DNA, 20 bp, synthetic construct
  source 1..20: mol_type = other DNA
taggataactctaagctggg

SEQ ID NO: 14530 - DNA, 20 bp, synthetic construct
  source 1..20: mol_type = other DNA
atactagggctgttacacgc

SEQ ID NO: 14531 - DNA, 20 bp, synthetic construct
  source 1..20: mol_type = other DNA
cgcgcgtgttaggcgattcg

SEQ ID NO: 14532 - DNA, 20 bp, synthetic construct
  source 1..20: mol_type = other DNA
tacgccagtgagggagtggt

SEQ ID NO: 14533 - DNA, 20 bp, synthetic construct
  source 1..20: mol_type = other DNA
ctcgtaaagcgcgtcctaac

SEQ ID NO: 14534 - DNA, 20 bp, synthetic construct
  source 1..20: mol_type = other DNA
acactttcatctgatcatgg

SEQ ID NO: 14535 - DNA, 20 bp, synthetic construct
  source 1..20: mol_type = other DNA
gttgacaagagctgcccgtc

SEQ ID NO: 14536 - DNA, 20 bp, synthetic construct
  source 1..20: mol_type = other DNA
atcgaaaggcttatacgatc

SEQ ID NO: 14537 - DNA, 20 bp, synthetic construct
  source 1..20: mol_type = other DNA
catcgttctgggtcatgatc

SEQ ID NO: 14538 - DNA, 20 bp, synthetic construct
  source 1..20: mol_type = other DNA
catcacaaatgcacctttcc

SEQ ID NO: 14539 - DNA, 20 bp, synthetic construct
  source 1..20: mol_type = other DNA
tcaccaaatttgtactacga

SEQ ID NO: 14540 - DNA, 20 bp, synthetic construct
  source 1..20: mol_type = other DNA
gccgaggtgtgcacaaagga

SEQ ID NO: 14541 - DNA, 20 bp, synthetic construct
  source 1..20: mol_type = other DNA
gtttgatcgacaagaactgc

SEQ ID NO: 14542 - DNA, 20 bp, synthetic construct
  source 1..20: mol_type = other DNA
catatggaactaggcacatt

SEQ ID NO: 14543 - DNA, 20 bp, synthetic construct
  source 1..20: mol_type = other DNA
ggatggcatcgcgtcactta

SEQ ID NO: 14544 - DNA, 20 bp, synthetic construct
  source 1..20: mol_type = other DNA
ccaaagtgaggctccagaac

SEQ ID NO: 14545 - DNA, 20 bp, synthetic construct
  source 1..20: mol_type = other DNA
gaaccaccgttgacattatc

SEQ ID NO: 14546 - DNA, 20 bp, synthetic construct
  source 1..20: mol_type = other DNA
ttgggcgctgcagtgtggag

SEQ ID NO: 14547 - DNA, 20 bp, synthetic construct
  source 1..20: mol_type = other DNA
cgaaatgaggacgatgtagc

SEQ ID NO: 14548 - DNA, 20 bp, synthetic construct
  source 1..20: mol_type = other DNA
tgctcacaggcggcaattac

SEQ ID NO: 14549 - DNA, 20 bp, synthetic construct
  source 1..20: mol_type = other DNA
aacgcctgaaaccatccatt

SEQ ID NO: 14550 - DNA, 20 bp, synthetic construct
  source 1..20: mol_type = other DNA
acccatcaccagcaagcaca

SEQ ID NO: 14551 - DNA, 20 bp, synthetic construct
  source 1..20: mol_type = other DNA
acgctgacagatgatgggcg

SEQ ID NO: 14552 - DNA, 20 bp, synthetic construct
  source 1..20: mol_type = other DNA
agatgacgcatggagtatta

SEQ ID NO: 14553 - DNA, 20 bp, synthetic construct
  source 1..20: mol_type = other DNA
gcgtccaccttatattaggc

SEQ ID NO: 14554 - DNA, 20 bp, synthetic construct
  source 1..20: mol_type = other DNA
ctctaccgcctagagtaagg

SEQ ID NO: 14555 - DNA, 20 bp, synthetic construct
  source 1..20: mol_type = other DNA
tggtgtataaggcttatcag

SEQ ID NO: 14556 - DNA, 20 bp, synthetic construct
  source 1..20: mol_type = other DNA
ctgctacatgtgcaatgtcg

SEQ ID NO: 14557 - DNA, 20 bp, synthetic construct
  source 1..20: mol_type = other DNA
cagtgtctggtcataaacag

SEQ ID NO: 14558 - DNA, 20 bp, synthetic construct
  source 1..20: mol_type = other DNA
gagggtagtgttctgttaga

SEQ ID NO: 14559 - DNA, 20 bp, synthetic construct
  source 1..20: mol_type = other DNA
aggccatttccatcgctagg

SEQ ID NO: 14560 - DNA, 20 bp, synthetic construct
  source 1..20: mol_type = other DNA
tgacctgcttgacacccggt

SEQ ID NO: 14561 - DNA, 20 bp, synthetic construct
  source 1..20: mol_type = other DNA
agatactatagatggatcca

SEQ ID NO: 14562 - DNA, 20 bp, synthetic construct
  source 1..20: mol_type = other DNA
tattggattcccaacacggt

SEQ ID NO: 14563 - DNA, 20 bp, synthetic construct
  source 1..20: mol_type = other DNA
tattcatcaacaaatcgagc

SEQ ID NO: 14564 - DNA, 20 bp, synthetic construct
  source 1..20: mol_type = other DNA
cgactaaacctactctcaca

SEQ ID NO: 14565 - DNA, 20 bp, synthetic construct
  source 1..20: mol_type = other DNA
ctcggcacaagcgtggttcg

SEQ ID NO: 14566 - DNA, 20 bp, synthetic construct
  source 1..20: mol_type = other DNA
cctagccactacttatagac

SEQ ID NO: 14567 - DNA, 20 bp, synthetic construct
  source 1..20: mol_type = other DNA
ccatggtcatatattgagag

SEQ ID NO: 14568 - DNA, 20 bp, synthetic construct
  source 1..20: mol_type = other DNA
gcgaacatttcttcagttcc

SEQ ID NO: 14569 - DNA, 20 bp, synthetic construct
  source 1..20: mol_type = other DNA
cgagtagtaactggatcgaa

SEQ ID NO: 14570 - DNA, 20 bp, synthetic construct
  source 1..20: mol_type = other DNA
tcttgtagcgattccggact

SEQ ID NO: 14571 - DNA, 20 bp, synthetic construct
  source 1..20: mol_type = other DNA
tcttagcaattccagccctg

SEQ ID NO: 14572 - DNA, 20 bp, synthetic construct
  source 1..20: mol_type = other DNA
tgtcggctgggaccgcaata

SEQ ID NO: 14573 - DNA, 20 bp, synthetic construct
  source 1..20: mol_type = other DNA
tgcaatgcaaatgcaccttt

SEQ ID NO: 14574 - DNA, 20 bp, synthetic construct
  source 1..20: mol_type = other DNA
cttaggaaacgagagcccgt

SEQ ID NO: 14575 - DNA, 20 bp, synthetic construct
  source 1..20: mol_type = other DNA
acggctccttacgggtagtg

SEQ ID NO: 14576 - DNA, 20 bp, synthetic construct
  source 1..20: mol_type = other DNA
cttcacccaaacagaatggc

SEQ ID NO: 14577 - DNA, 20 bp, synthetic construct
  source 1..20: mol_type = other DNA
acggttccgtctctgaccgc

SEQ ID NO: 14578 - DNA, 20 bp, synthetic construct
  source 1..20: mol_type = other DNA
ttaacagggccgataccgcc

SEQ ID NO: 14579 - DNA, 20 bp, synthetic construct
  source 1..20: mol_type = other DNA
tgttgcctggtagaatcgat

SEQ ID NO: 14580 - DNA, 20 bp, synthetic construct
  source 1..20: mol_type = other DNA
agcgtggtctgcttctccaa

SEQ ID NO: 14581 - DNA, 20 bp, synthetic construct
  source 1..20: mol_type = other DNA
aatgcaaggtcttgttgcat

SEQ ID NO: 14582 - DNA, 20 bp, synthetic construct
  source 1..20: mol_type = other DNA
ttgaaagggcacgttagcta

SEQ ID NO: 14583 - DNA, 20 bp, synthetic construct
  source 1..20: mol_type = other DNA
tagaccgacctgaggcaata

SEQ ID NO: 14584 - DNA, 20 bp, synthetic construct
  source 1..20: mol_type = other DNA
gctgtactaccgagagtcat

SEQ ID NO: 14585 - DNA, 20 bp, synthetic construct
  source 1..20: mol_type = other DNA
tcccaggctgtatccgtgta

SEQ ID NO: 14586 - DNA, 20 bp, synthetic construct
  source 1..20: mol_type = other DNA
cacagtgtttgatgtatgcc

SEQ ID NO: 14587 - DNA, 20 bp, synthetic construct
  source 1..20: mol_type = other DNA
cttcaataactgatccagag

SEQ ID NO: 14588 - DNA, 20 bp, synthetic construct
  source 1..20: mol_type = other DNA
cgaccatatctgaacgaggg

SEQ ID NO: 14589 - DNA, 20 bp, synthetic construct
  source 1..20: mol_type = other DNA
cgtagatgctctaggtgtgg

SEQ ID NO: 14590 - DNA, 20 bp, synthetic construct
  source 1..20: mol_type = other DNA
aaccctgtctcctcactgac

SEQ ID NO: 14591 - DNA, 20 bp, synthetic construct
  source 1..20: mol_type = other DNA
gtaggttaccgatggaaacc

SEQ ID NO: 14592 - DNA, 20 bp, synthetic construct
  source 1..20: mol_type = other DNA
gaagatagccggcagaatag

SEQ ID NO: 14593 - DNA, 20 bp, synthetic construct
  source 1..20: mol_type = other DNA
agtcacctatagtgcaaagt

SEQ ID NO: 14594 - DNA, 20 bp, synthetic construct
  source 1..20: mol_type = other DNA
tattcatagttgccctcgct

SEQ ID NO: 14595 - DNA, 20 bp, synthetic construct
  source 1..20: mol_type = other DNA
taccagcgaaacactatgag

SEQ ID NO: 14596 - DNA, 20 bp, synthetic construct
  source 1..20: mol_type = other DNA
cggagttgcttcaattgtta

SEQ ID NO: 14597 - DNA, 20 bp, synthetic construct
  source 1..20: mol_type = other DNA
acgtcgcggacagctacaga

SEQ ID NO: 14598 - DNA, 20 bp, synthetic construct
  source 1..20: mol_type = other DNA
atgtgtgtcgcgtccgttcg

SEQ ID NO: 14599 - DNA, 20 bp, synthetic construct
  source 1..20: mol_type = other DNA
acactttgctctggtgccca

SEQ ID NO: 14600 - DNA, 20 bp, synthetic construct
  source 1..20: mol_type = other DNA
acgcgatcgagccactacct

SEQ ID NO: 14601 - DNA, 20 bp, synthetic construct
  source 1..20: mol_type = other DNA
atcctggaaggcccagctgt

SEQ ID NO: 14602 - DNA, 20 bp, synthetic construct
  source 1..20: mol_type = other DNA
agatcgtcattaaactcctc

SEQ ID NO: 14603 - DNA, 20 bp, synthetic construct
  source 1..20: mol_type = other DNA
gcagagttatccgcgttctg

SEQ ID NO: 14604 - DNA, 20 bp, synthetic construct
  source 1..20: mol_type = other DNA
atgcccgtttgaggatactg

SEQ ID NO: 14605 - DNA, 20 bp, synthetic construct
  source 1..20: mol_type = other DNA
gtcactaaagacgccctggc

SEQ ID NO: 14606 - DNA, 20 bp, synthetic construct
  source 1..20: mol_type = other DNA
cagccgcatagattctctct

SEQ ID NO: 14607 - DNA, 20 bp, synthetic construct
  source 1..20: mol_type = other DNA
atcaggacctcgcatgtcct

SEQ ID NO: 14608 - DNA, 20 bp, synthetic construct
  source 1..20: mol_type = other DNA
atacctgccagctaatcttt

SEQ ID NO: 14609 - DNA, 20 bp, synthetic construct
  source 1..20: mol_type = other DNA
tcacgcgttaatttgacggc

SEQ ID NO: 14610 - DNA, 20 bp, synthetic construct
  source 1..20: mol_type = other DNA
tagatctggaggtccttaca

SEQ ID NO: 14611 - DNA, 20 bp, synthetic construct
  source 1..20: mol_type = other DNA
ttccgtacgggacagatcgc

SEQ ID NO: 14612 - DNA, 20 bp, synthetic construct
  source 1..20: mol_type = other DNA
atttaagtacctgtatacct

SEQ ID NO: 14613 - DNA, 20 bp, synthetic construct
  source 1..20: mol_type = other DNA
cccaacccactgaccactat

SEQ ID NO: 14614 - DNA, 20 bp, synthetic construct
  source 1..20: mol_type = other DNA
catctgttatgtggttgcaa

SEQ ID NO: 14615 - DNA, 20 bp, synthetic construct
  source 1..20: mol_type = other DNA
gcgacgacttatgcactcga

SEQ ID NO: 14616 - DNA, 20 bp, synthetic construct
  source 1..20: mol_type = other DNA
tccgtccactcgaactaatt

SEQ ID NO: 14617 - DNA, 20 bp, synthetic construct
  source 1..20: mol_type = other DNA
tgccgcagctcaacacatgt

SEQ ID NO: 14618 - DNA, 20 bp, synthetic construct
  source 1..20: mol_type = other DNA
cttcactagtgcacttcgag

SEQ ID NO: 14619 - DNA, 20 bp, synthetic construct
  source 1..20: mol_type = other DNA
atggcagcacagatgggtgt

SEQ ID NO: 14620 - DNA, 20 bp, synthetic construct
  source 1..20: mol_type = other DNA
gccctcgcatttaatcttcc

SEQ ID NO: 14621 - DNA, 20 bp, synthetic construct
  source 1..20: mol_type = other DNA
ctagcaccttatcagttcgc

SEQ ID NO: 14622 - DNA, 20 bp, synthetic construct
  source 1..20: mol_type = other DNA
ccctcgcatgtgttatggac

SEQ ID NO: 14623 - DNA, 20 bp, synthetic construct
  source 1..20: mol_type = other DNA
cagacagtggagtcaagctc

SEQ ID NO: 14624 - DNA, 20 bp, synthetic construct
  source 1..20: mol_type = other DNA
ctgttggaacttcgccctga

SEQ ID NO: 14625 - DNA, 20 bp, synthetic construct
  source 1..20: mol_type = other DNA
ttagtccgtaccgcgcgtcg

SEQ ID NO: 14626 - DNA, 20 bp, synthetic construct
  source 1..20: mol_type = other DNA
gagcatctttatggccagaa

SEQ ID NO: 14627 - DNA, 20 bp, synthetic construct
  source 1..20: mol_type = other DNA
tgcaccctgtttgtctaaat

SEQ ID NO: 14628 - DNA, 20 bp, synthetic construct
  source 1..20: mol_type = other DNA
tacggatttcgagtgcgacc

SEQ ID NO: 14629 - DNA, 20 bp, synthetic construct
  source 1..20: mol_type = other DNA
accaatatatcagtgcttca

SEQ ID NO: 14630 - DNA, 20 bp, synthetic construct
  source 1..20: mol_type = other DNA
ttgctttcgcaagttgcgta

SEQ ID NO: 14631 - DNA, 20 bp, synthetic construct
  source 1..20: mol_type = other DNA
tcagcggtgacgtcaacagg

SEQ ID NO: 14632 - DNA, 20 bp, synthetic construct
  source 1..20: mol_type = other DNA
gttgttcttgagaagatgat

SEQ ID NO: 14633 - DNA, 20 bp, synthetic construct
  source 1..20: mol_type = other DNA
gttcgtgaacatagtgcctc

SEQ ID NO: 14634 - DNA, 20 bp, synthetic construct
  source 1..20: mol_type = other DNA
agccaactcatttaatcttc

SEQ ID NO: 14635 - DNA, 20 bp, synthetic construct
  source 1..20: mol_type = other DNA
gacggaggtgtgcgctgtgt

SEQ ID NO: 14636 - DNA, 20 bp, synthetic construct
  source 1..20: mol_type = other DNA
gacttacgttgtcatctccc

SEQ ID NO: 14637 - DNA, 20 bp, synthetic construct
  source 1..20: mol_type = other DNA
aacgattcaacctctggcga

SEQ ID NO: 14638 - DNA, 20 bp, synthetic construct
  source 1..20: mol_type = other DNA
gcatccagcccataacgctt

SEQ ID NO: 14639 - DNA, 20 bp, synthetic construct
  source 1..20: mol_type = other DNA
cggagctaacaacgtgccgt

SEQ ID NO: 14640 - DNA, 20 bp, synthetic construct
  source 1..20: mol_type = other DNA
gaggagtcataagcgtgagt

SEQ ID NO: 14641 - DNA, 20 bp, synthetic construct
  source 1..20: mol_type = other DNA
tctcgtacacctgttggcaa

SEQ ID NO: 14642 - DNA, 20 bp, synthetic construct
  source 1..20: mol_type = other DNA
agaccactagtgtattaccc

SEQ ID NO: 14643 - DNA, 20 bp, synthetic construct
  source 1..20: mol_type = other DNA
aacgggattggcagagcact

SEQ ID NO: 14644 - DNA, 20 bp, synthetic construct
  source 1..20: mol_type = other DNA
tctacgggcgttacaaactt

SEQ ID NO: 14645 - DNA, 20 bp, synthetic construct
  source 1..20: mol_type = other DNA
agcctgacagtagtttcgtt

SEQ ID NO: 14646 - DNA, 20 bp, synthetic construct
  source 1..20: mol_type = other DNA
cacgcacaatctaagccgat

SEQ ID NO: 14647 - DNA, 20 bp, synthetic construct
  source 1..20: mol_type = other DNA
taaggatgagagtaacgcat

SEQ ID NO: 14648 - DNA, 20 bp, synthetic construct
  source 1..20: mol_type = other DNA
gctggtgctacaacgattgt

SEQ ID NO: 14649 - DNA, 20 bp, synthetic construct
  source 1..20: mol_type = other DNA
aaattcctcctttgaggcga

SEQ ID NO: 14650 - DNA, 20 bp, synthetic construct
  source 1..20: mol_type = other DNA
cctactgctcctggccaagg

SEQ ID NO: 14651 - DNA, 20 bp, synthetic construct
  source 1..20: mol_type = other DNA
tgttgagtggtattactctc

SEQ ID NO: 14652 - DNA, 20 bp, synthetic construct
  source 1..20: mol_type = other DNA
tatcaatcctaacgccacac

SEQ ID NO: 14653 - DNA, 20 bp, synthetic construct
  source 1..20: mol_type = other DNA
ctaagaagctggagcgatag

SEQ ID NO: 14654 - DNA, 20 bp, synthetic construct
  source 1..20: mol_type = other DNA
ctagtaaccaccctccacga

SEQ ID NO: 14655 - DNA, 20 bp, synthetic construct
  source 1..20: mol_type = other DNA
gctggtctccttcactcctc

SEQ ID NO: 14656 - DNA, 20 bp, synthetic construct
  source 1..20: mol_type = other DNA
cccgattctataggcgctct

SEQ ID NO: 14657 - DNA, 20 bp, synthetic construct
  source 1..20: mol_type = other DNA
ccagagctacagagttagtt

SEQ ID NO: 14658 - DNA, 20 bp, synthetic construct
  source 1..20: mol_type = other DNA
ggatagatcacaagactcta

SEQ ID NO: 14659 - DNA, 20 bp, synthetic construct
  source 1..20: mol_type = other DNA
aatacagtgttgctttcgat

SEQ ID NO: 14660 - DNA, 20 bp, synthetic construct
  source 1..20: mol_type = other DNA
gttcctaacgacccagggct

SEQ ID NO: 14661 - DNA, 20 bp, synthetic construct
  source 1..20: mol_type = other DNA
aggcaatcgatacgaacagg

SEQ ID NO: 14662 - DNA, 20 bp, synthetic construct
  source 1..20: mol_type = other DNA
tcctttagcacaggagctca

SEQ ID NO: 14663 - DNA, 20 bp, synthetic construct
  source 1..20: mol_type = other DNA
tcgtcaacttcccagaagat

SEQ ID NO: 14664 - DNA, 20 bp, synthetic construct
  source 1..20: mol_type = other DNA
ttggtagccaggctagcact

SEQ ID NO: 14665 - DNA, 20 bp, synthetic construct
  source 1..20: mol_type = other DNA
gtcatgtgctctcattcatt

SEQ ID NO: 14666 - DNA, 20 bp, synthetic construct
  source 1..20: mol_type = other DNA
acggcatcctggatagtatc

SEQ ID NO: 14667 - DNA, 20 bp, synthetic construct
  source 1..20: mol_type = other DNA
gcgtcagtcacattcctacc

SEQ ID NO: 14668 - DNA, 20 bp, synthetic construct
  source 1..20: mol_type = other DNA
atagtccgacttgagttgat

SEQ ID NO: 14669 - DNA, 20 bp, synthetic construct
  source 1..20: mol_type = other DNA
tccactgcgcgccaacaacg

SEQ ID NO: 14670 - DNA, 20 bp, synthetic construct
  source 1..20: mol_type = other DNA
tgatacggatagtctggtga

SEQ ID NO: 14671 - DNA, 20 bp, synthetic construct
  source 1..20: mol_type = other DNA
cctatcttcgttgccctgcc

SEQ ID NO: 14672 - DNA, 20 bp, synthetic construct
  source 1..20: mol_type = other DNA
tctattacctcgtaccgtgc

SEQ ID NO: 14673 - DNA, 20 bp, synthetic construct
  source 1..20: mol_type = other DNA
caaaccaactactccgagat

SEQ ID NO: 14674 - DNA, 20 bp, synthetic construct
  source 1..20: mol_type = other DNA
ttataggaaagatcagtatc

SEQ ID NO: 14675 - DNA, 20 bp, synthetic construct
  source 1..20: mol_type = other DNA
tgtgcctcacttgctcagac

SEQ ID NO: 14676 - DNA, 20 bp, synthetic construct
  source 1..20: mol_type = other DNA
aggactagtcgctgtccgat

SEQ ID NO: 14677 - DNA, 20 bp, synthetic construct
  source 1..20: mol_type = other DNA
ccgttctttatctgcagatg

SEQ ID NO: 14678 - DNA, 20 bp, synthetic construct
  source 1..20: mol_type = other DNA
tctggtgggtcctaggctcg

SEQ ID NO: 14679 - DNA, 20 bp, synthetic construct
  source 1..20: mol_type = other DNA
aagggtgggcggtgttgata

SEQ ID NO: 14680 - DNA, 20 bp, synthetic construct
  source 1..20: mol_type = other DNA
gataatgggaacgagtaatc

SEQ ID NO: 14681 - DNA, 20 bp, synthetic construct
  source 1..20: mol_type = other DNA
acggacttggcggcttaata

SEQ ID NO: 14682 - DNA, 20 bp, synthetic construct
  source 1..20: mol_type = other DNA
cgtgaacttcagatttaaag

SEQ ID NO: 14683 - DNA, 20 bp, synthetic construct
  source 1..20: mol_type = other DNA
gtagatgattacaggctagt

SEQ ID NO: 14684 - DNA, 20 bp, synthetic construct
  source 1..20: mol_type = other DNA
cctgaagccaagcagagaag

SEQ ID NO: 14685 - DNA, 20 bp, synthetic construct
  source 1..20: mol_type = other DNA
atgtagaagtttgctacttc

SEQ ID NO: 14686 - DNA, 20 bp, synthetic construct
  source 1..20: mol_type = other DNA
agtttaggccggaatgtcaa

SEQ ID NO: 14687 - DNA, 20 bp, synthetic construct
  source 1..20: mol_type = other DNA
gactgattccgccagaggta

SEQ ID NO: 14688 - DNA, 20 bp, synthetic construct
  source 1..20: mol_type = other DNA
ttgttatagaaagttcggcc

SEQ ID NO: 14689 - DNA, 20 bp, synthetic construct
  source 1..20: mol_type = other DNA
gaacgaggcgtctgtatgaa

SEQ ID NO: 14690 - DNA, 20 bp, synthetic construct
  source 1..20: mol_type = other DNA
tactaggaactacaagtccc

SEQ ID NO: 14691 - DNA, 20 bp, synthetic construct
  source 1..20: mol_type = other DNA
gtacgtataggttcctgctg

SEQ ID NO: 14692 - DNA, 20 bp, synthetic construct
  source 1..20: mol_type = other DNA
ctcttacgtctagggcaaat

SEQ ID NO: 14693 - DNA, 20 bp, synthetic construct
  source 1..20: mol_type = other DNA
aaccaatcagtgagacccag

SEQ ID NO: 14694 - DNA, 20 bp, synthetic construct
  source 1..20: mol_type = other DNA
ttgatagatcacactgggac

SEQ ID NO: 14695 - DNA, 20 bp, synthetic construct
  source 1..20: mol_type = other DNA
tcggcgctgcgagaatcttc

SEQ ID NO: 14696 - DNA, 20 bp, synthetic construct
  source 1..20: mol_type = other DNA
gcagaagcctcacggtttct

SEQ ID NO: 14697 - DNA, 20 bp, synthetic construct
  source 1..20: mol_type = other DNA
acggccttctcctagtgaca

SEQ ID NO: 14698 - DNA, 20 bp, synthetic construct
  source 1..20: mol_type = other DNA
ccaagttggcacagacgaag

SEQ ID NO: 14699 - DNA, 20 bp, synthetic construct
  source 1..20: mol_type = other DNA
ttctcatcgcataacctagc

SEQ ID NO: 14700 - DNA, 20 bp, synthetic construct
  source 1..20: mol_type = other DNA
atcacatccgtcgtaagcat

SEQ ID NO: 14701 - DNA, 20 bp, synthetic construct
  source 1..20: mol_type = other DNA
gagagctgattgatccagcc

SEQ ID NO: 14702 - DNA, 20 bp, synthetic construct
  source 1..20: mol_type = other DNA
gggcgacctctttgaaggcc

SEQ ID NO: 14703 - DNA, 20 bp, synthetic construct
  source 1..20: mol_type = other DNA
cacactgcctcagagtcctc

SEQ ID NO: 14704 - DNA, 20 bp, synthetic construct
  source 1..20: mol_type = other DNA
cataagattcgcatctcatc

SEQ ID NO: 14705 - DNA, 20 bp, synthetic construct
  source 1..20: mol_type = other DNA
ggtgtacaggtaatcgtctt

SEQ ID NO: 14706 - DNA, 20 bp, synthetic construct
  source 1..20: mol_type = other DNA
cattgcgaaggcatgaagcc

SEQ ID NO: 14707 - DNA, 20 bp, synthetic construct
  source 1..20: mol_type = other DNA
gcccaaagtgcggtagaccg

SEQ ID NO: 14708 - DNA, 20 bp, synthetic construct
  source 1..20: mol_type = other DNA
agtacgcgatcgtgggagtt

SEQ ID NO: 14709 - DNA, 20 bp, synthetic construct
  source 1..20: mol_type = other DNA
ccatggtctctcgtacctta

SEQ ID NO: 14710 - DNA, 20 bp, synthetic construct
  source 1..20: mol_type = other DNA
gcaggtcagtcaagtaacag

SEQ ID NO: 14711 - DNA, 20 bp, synthetic construct
  source 1..20: mol_type = other DNA
gctggtatgtacggtcggtc

SEQ ID NO: 14712 - DNA, 20 bp, synthetic construct
  source 1..20: mol_type = other DNA
gaccttgctagcctgtattg

SEQ ID NO: 14713 - DNA, 20 bp, synthetic construct
  source 1..20: mol_type = other DNA
acgtcaaaggcgctggaagg

SEQ ID NO: 14714 - DNA, 20 bp, synthetic construct
  source 1..20: mol_type = other DNA
gcgtgagcttgcattgaaac

SEQ ID NO: 14715 - DNA, 20 bp, synthetic construct
  source 1..20: mol_type = other DNA
tcgaaccaatgcattctctc

SEQ ID NO: 14716 - DNA, 20 bp, synthetic construct
  source 1..20: mol_type = other DNA
tagattgtggttcccattac

SEQ ID NO: 14717 - DNA, 20 bp, synthetic construct
  source 1..20: mol_type = other DNA
agtacgtaagcgatcctgtt

SEQ ID NO: 14718 - DNA, 20 bp, synthetic construct
  source 1..20: mol_type = other DNA
ctatcacacgcataacggcc

SEQ ID NO: 14719 - DNA, 20 bp, synthetic construct
  source 1..20: mol_type = other DNA
gaataatgcgcggacccaga

SEQ ID NO: 14720 - DNA, 20 bp, synthetic construct
  source 1..20: mol_type = other DNA
gcgattcccgatgagctgta

SEQ ID NO: 14721 - DNA, 20 bp, synthetic construct
  source 1..20: mol_type = other DNA
tcgaagtctgacgtgatatt

SEQ ID NO: 14722 - DNA, 20 bp, synthetic construct
  source 1..20: mol_type = other DNA
agagtggtccacccgctaag

SEQ ID NO: 14723 - DNA, 20 bp, synthetic construct
  source 1..20: mol_type = other DNA
ataatcagcttgtaccgaac

SEQ ID NO: 14724 - DNA, 20 bp, synthetic construct
  source 1..20: mol_type = other DNA
tagtgatgcgttgtggagaa

SEQ ID NO: 14725 - DNA, 20 bp, synthetic construct
  source 1..20: mol_type = other DNA
attgctaagatccgagtata

SEQ ID NO: 14726 - DNA, 20 bp, synthetic construct
  source 1..20: mol_type = other DNA
tggaaatttaccggctctcc

SEQ ID NO: 14727 - DNA, 20 bp, synthetic construct
  source 1..20: mol_type = other DNA
tcagataaatactagtgagg

SEQ ID NO: 14728 - DNA, 20 bp, synthetic construct
  source 1..20: mol_type = other DNA
catcgataaggcagggagtg

SEQ ID NO: 14729 - DNA, 20 bp, synthetic construct
  source 1..20: mol_type = other DNA
tagagcggaacacaagtgat

SEQ ID NO: 14730 - DNA, 20 bp, synthetic construct
  source 1..20: mol_type = other DNA
tagtcctcgacgcgggttcg

SEQ ID NO: 14731 - DNA, 20 bp, synthetic construct
  source 1..20: mol_type = other DNA
gctgtgactgagtaggtcgg

SEQ ID NO: 14732 - DNA, 20 bp, synthetic construct
  source 1..20: mol_type = other DNA
gtgcacgactcagcaaacgg

SEQ ID NO: 14733 - DNA, 20 bp, synthetic construct
  source 1..20: mol_type = other DNA
atgaaccatggaaggcgctg

SEQ ID NO: 14734 - DNA, 20 bp, synthetic construct
  source 1..20: mol_type = other DNA
tatgatccacctcaccacca

SEQ ID NO: 14735 - DNA, 20 bp, synthetic construct
  source 1..20: mol_type = other DNA
caacaggacatacgatgccg

SEQ ID NO: 14736 - DNA, 20 bp, synthetic construct
  source 1..20: mol_type = other DNA
cagtaaatatgtctacactg

SEQ ID NO: 14737 - DNA, 20 bp, synthetic construct
  source 1..20: mol_type = other DNA
aatttggacgatggaagcaa

SEQ ID NO: 14738 - DNA, 20 bp, synthetic construct
  source 1..20: mol_type = other DNA
agccgactggtgttgcaaat

SEQ ID NO: 14739 - DNA, 20 bp, synthetic construct
  source 1..20: mol_type = other DNA
cgtactaggctagtcttata

SEQ ID NO: 14740 - DNA, 20 bp, synthetic construct
  source 1..20: mol_type = other DNA
gctgttcttccgagtaccgg

SEQ ID NO: 14741 - DNA, 20 bp, synthetic construct
  source 1..20: mol_type = other DNA
agaggctctgaatgtaggtc

SEQ ID NO: 14742 - DNA, 20 bp, synthetic construct
  source 1..20: mol_type = other DNA
gactgaccgagatcgaaccg

SEQ ID NO: 14743 - DNA, 20 bp, synthetic construct
  source 1..20: mol_type = other DNA
caccagcgttactaacgttt

SEQ ID NO: 14744 - DNA, 20 bp, synthetic construct
  source 1..20: mol_type = other DNA
acacccagtgtatgtccagg

SEQ ID NO: 14745 - DNA, 20 bp, synthetic construct
  source 1..20: mol_type = other DNA
tttcacgacaatgcgccttg

SEQ ID NO: 14746 - DNA, 20 bp, synthetic construct
  source 1..20: mol_type = other DNA
gcggcgacgcgttctgcaaa

SEQ ID NO: 14747 - DNA, 20 bp, synthetic construct
  source 1..20: mol_type = other DNA
gaagaaacggcgacgtgaag

SEQ ID NO: 14748 - DNA, 20 bp, synthetic construct
  source 1..20: mol_type = other DNA
tgcagtacgctaggaggacg

SEQ ID NO: 14749 - DNA, 20 bp, synthetic construct
  source 1..20: mol_type = other DNA
ctgagctccgctgttcttca

SEQ ID NO: 14750 - DNA, 20 bp, synthetic construct
  source 1..20: mol_type = other DNA
atgatcgaatggtactagcg

SEQ ID NO: 14751 - DNA, 20 bp, synthetic construct
  source 1..20: mol_type = other DNA
tcgaatattccgtggtttgg

SEQ ID NO: 14752 - DNA, 20 bp, synthetic construct
  source 1..20: mol_type = other DNA
tgggctcgtcgtctacctca

SEQ ID NO: 14753 - DNA, 20 bp, synthetic construct
  source 1..20: mol_type = other DNA
cgtgaactggctagcgcggt

SEQ ID NO: 14754 - DNA, 20 bp, synthetic construct
  source 1..20: mol_type = other DNA
ttctgctctacatgacgatc

SEQ ID NO: 14755 - DNA, 20 bp, synthetic construct
  source 1..20: mol_type = other DNA
ctttaggcttggtgcccata

SEQ ID NO: 14756 - DNA, 20 bp, synthetic construct
  source 1..20: mol_type = other DNA
tggatataaggcatccttcg

SEQ ID NO: 14757 - DNA, 20 bp, synthetic construct
  source 1..20: mol_type = other DNA
gttaatcggtatcctgggag

SEQ ID NO: 14758 - DNA, 20 bp, synthetic construct
  source 1..20: mol_type = other DNA
gagttcgagaggcgcagcca

SEQ ID NO: 14759 - DNA, 20 bp, synthetic construct
  source 1..20: mol_type = other DNA
gtgtactcacgcgcgctata

SEQ ID NO: 14760 - DNA, 20 bp, synthetic construct
  source 1..20: mol_type = other DNA
taactattacgtacacgcgc

SEQ ID NO: 14761 - DNA, 20 bp, synthetic construct
  source 1..20: mol_type = other DNA
gctcaaacaggtgcttcggg

SEQ ID NO: 14762 - DNA, 20 bp, synthetic construct
  source 1..20: mol_type = other DNA
acatgctagttcgacgccag

SEQ ID NO: 14763 - DNA, 20 bp, synthetic construct
  source 1..20: mol_type = other DNA
tcttacgccgatctttcgtc

SEQ ID NO: 14764 - DNA, 20 bp, synthetic construct
  source 1..20: mol_type = other DNA
cttagtagcctacattacga

SEQ ID NO: 14765 - DNA, 20 bp, synthetic construct
  source 1..20: mol_type = other DNA
ctatggtagtgtgcttagag

SEQ ID NO: 14766 - DNA, 20 bp, synthetic construct
  source 1..20: mol_type = other DNA
cactctctggatgtactccc

SEQ ID NO: 14767 - DNA, 20 bp, synthetic construct
  source 1..20: mol_type = other DNA
ataagcaaggccactcgctc

SEQ ID NO: 14768 - DNA, 20 bp, synthetic construct
  source 1..20: mol_type = other DNA
ttccggccagactaggaaat

SEQ ID NO: 14769 - DNA, 20 bp, synthetic construct
  source 1..20: mol_type = other DNA
ccattaaggatctcggacct

SEQ ID NO: 14770 - DNA, 20 bp, synthetic construct
  source 1..20: mol_type = other DNA
atgatcataaacgcagctaa

SEQ ID NO: 14771 - DNA, 20 bp, synthetic construct
  source 1..20: mol_type = other DNA
ttcttcatgctcctccgggc

SEQ ID NO: 14772 - DNA, 20 bp, synthetic construct
  source 1..20: mol_type = other DNA
tgatctaacttcctgagcgt

SEQ ID NO: 14773 - DNA, 20 bp, synthetic construct
  source 1..20: mol_type = other DNA
acatttgtccagtgattctt

SEQ ID NO: 14774 - DNA, 20 bp, synthetic construct
  source 1..20: mol_type = other DNA
catccgcaaccctggcggag

SEQ ID NO: 14775 - DNA, 20 bp, synthetic construct
  source 1..20: mol_type = other DNA
caacatccggtcagcagcac

SEQ ID NO: 14776 - DNA, 20 bp, synthetic construct
  source 1..20: mol_type = other DNA
cctcacgtgtgtgctaaaca

SEQ ID NO: 14777 - DNA, 20 bp, synthetic construct
  source 1..20: mol_type = other DNA
cgatacgggcatgctgctga

SEQ ID NO: 14778 - DNA, 20 bp, synthetic construct
  source 1..20: mol_type = other DNA
ttcgccacccgtggcgtgct

SEQ ID NO: 14779 - DNA, 20 bp, synthetic construct
  source 1..20: mol_type = other DNA
agtccagtttaccggcgtat

SEQ ID NO: 14780 - DNA, 20 bp, synthetic construct
  source 1..20: mol_type = other DNA
tatcaactaagcacttcaga

SEQ ID NO: 14781 - DNA, 20 bp, synthetic construct
  source 1..20: mol_type = other DNA
ttggtataattgtacgcgac

SEQ ID NO: 14782 - DNA, 20 bp, synthetic construct
  source 1..20: mol_type = other DNA
acatgttgggtccattctgg

SEQ ID NO: 14783 - DNA, 20 bp, synthetic construct
  source 1..20: mol_type = other DNA
tagggcttaaaggtcagccg

SEQ ID NO: 14784 - DNA, 20 bp, synthetic construct
  source 1..20: mol_type = other DNA
tgtaccgcttcgagttcggt

SEQ ID NO: 14785 - DNA, 20 bp, synthetic construct
  source 1..20: mol_type = other DNA
ttacgtattctctaggcttt

SEQ ID NO: 14786 - DNA, 20 bp, synthetic construct
  source 1..20: mol_type = other DNA
tttccgtcactgctgttcac

SEQ ID NO: 14787 - DNA, 20 bp, synthetic construct
  source 1..20: mol_type = other DNA
atgtttaccatactgctact

SEQ ID NO: 14788 - DNA, 20 bp, synthetic construct
  source 1..20: mol_type = other DNA
cctgtttgatctgggcggct

SEQ ID NO: 14789 - DNA, 20 bp, synthetic construct
  source 1..20: mol_type = other DNA
ggtctcggaagtcactagac

SEQ ID NO: 14790 - DNA, 20 bp, synthetic construct
  source 1..20: mol_type = other DNA
acttctctcccactgaatat

SEQ ID NO: 14791 - DNA, 20 bp, synthetic construct
  source 1..20: mol_type = other DNA
cgtcgtcagtttgttaatcc

SEQ ID NO: 14792 - DNA, 20 bp, synthetic construct
  source 1..20: mol_type = other DNA
tggtttagtttccatcttct

SEQ ID NO: 14793 - DNA, 20 bp, synthetic construct
  source 1..20: mol_type = other DNA
gcagtagcgacaaaggtttg

SEQ ID NO: 14794 - DNA, 20 bp, synthetic construct
  source 1..20: mol_type = other DNA
ctttgggtaggaatcggtcg

SEQ ID NO: 14795 - DNA, 20 bp, synthetic construct
  source 1..20: mol_type = other DNA
gcctgctccgtggaattaga

SEQ ID NO: 14796 - DNA, 20 bp, synthetic construct
  source 1..20: mol_type = other DNA
acactccgcgaatttctgct

SEQ ID NO: 14797 - DNA, 20 bp, synthetic construct
  source 1..20: mol_type = other DNA
tggcgcatcacgttgtgata

SEQ ID NO: 14798 - DNA, 20 bp, synthetic construct
  source 1..20: mol_type = other DNA
tctatcacaaatcaacatgc

SEQ ID NO: 14799 - DNA, 20 bp, synthetic construct
  source 1..20: mol_type = other DNA
tgtataaacgacctcgaatc

SEQ ID NO: 14800 - DNA, 20 bp, synthetic construct
  source 1..20: mol_type = other DNA
ctaccatgaaagcactccga

SEQ ID NO: 14801 - DNA, 20 bp, synthetic construct
  source 1..20: mol_type = other DNA
gcttctgtccctagtgattc

SEQ ID NO: 14802 - DNA, 20 bp, synthetic construct
  source 1..20: mol_type = other DNA
ggtcccgaactcgattgagg

SEQ ID NO: 14803 - DNA, 20 bp, synthetic construct
  source 1..20: mol_type = other DNA
cgggatagttacagtggaat

SEQ ID NO: 14804 - DNA, 20 bp, synthetic construct
  source 1..20: mol_type = other DNA
tcactcgtccgaagcggctc

SEQ ID NO: 14805 - DNA, 20 bp, synthetic construct
  source 1..20: mol_type = other DNA
aactgtgataggcgaacgga

SEQ ID NO: 14806 - DNA, 20 bp, synthetic construct
  source 1..20: mol_type = other DNA
gatggtcgcttgttgatgca

SEQ ID NO: 14807 - DNA, 20 bp, synthetic construct
  source 1..20: mol_type = other DNA
gcattcactaggctagagtg

SEQ ID NO: 14808 - DNA, 1000 bp, synthetic construct; identical to SEQ ID NO: 2573
  source 1..1000: mol_type = other DNA

SEQ ID NO: 14809 - DNA, 1000 bp, synthetic construct; identical to SEQ ID NO: 2574
  source 1..1000: mol_type = other DNA

SEQ ID NO: 14810 - DNA, 1000 bp, synthetic construct; identical to SEQ ID NO: 2575
  source 1..1000: mol_type = other DNA

SEQ ID NO: 14811 - DNA, 501 bp, synthetic construct
  source 1..501: mol_type = other DNA
ctgcgctggtctgcttctagtttctccctgagagagttaatctgtggaacccgggatttcctgaggcgtgcacacgacagtgttgtgcagcttacatcttgcataagatgctgtcgtgcttattttgagcgaatgaaactcctcaattctgcagaagaagaagggggatcctaggtttcaacttgttactctctcagaggaatagtttgttttatttttttagtttcattgtttttatatacatgtttatatgtgtgtttgtttgttacatatattttattttatatatatgcacatgtttttttgatgttggtcaggtttgtttggcaattcggagctctatacactcatcttccatgattctaaattctctgtagaaattcacaatacgtgtgtatatatgtatatatttgatactgaactgctctacaaggagtttatcacaaattgagaagtggtatccttttttagaaaaacccgctagttactattcaaatcaaa

SEQ ID NO: 14812 - DNA, 447 bp, synthetic construct
  source 1..447: mol_type = other DNA
acaagaactttcgactgtatatatatttttagaaaaacccgttagttacccatcaaagtcattgctatcttcttaacccggttgctgtgttagctttgtacaaattgtaacgagctctcgaatactgtacagaacacaggtacataaatatatatatacacccatacataaatatttttccagcacacttcgaacctaattacttctttcactttcaacttttaattttgattttaatttttgatttttaattttaagcttaattttaactttaactttaattttagctttaattccaattttaatttcaatcttccaccttaactctagctctgatcactatatctctgtcgtgcttttgttgtctgcttccagcctcactgtccttctaggaaagatttctcccgggctataaacaaatcaatcaccccatttccaatctcctag

SEQ ID NO: 14813 - DNA, 304 bp, synthetic construct
  source 1..304: mol_type = other DNA
ttgtaagggtaaaaaaggtaaccggcactcctgttataaaaacccgatagtaacgctcaactcaaatcgctgaaccaatctcagagaggacaaagagtgagattttcctcaaggagagagaagaggagaaaaggtcaaaagaaagaaaaaatagaaagggtaaacagggaacaagagggtgaagagagagagaactagtagtaccaaaaatgacagattacgtcacatgcaccctctgtgggaccaaaatccctgtgattgttgtccccctcggcacactcgaaagagcggttcagtgtaacgt

SEQ ID NO: 14814 - DNA, 493 bp, synthetic construct
  source 1..493: mol_type = other DNA
ctgcgctggtctgcttctagtttctccctgagagagttaatctgtggaacccgggatttcctgaggcgtgcacacgacagtgttgtgcagcttacatcttgcataagatgctgtcgtgcttattttgagcgaatgaaactcctcaattctgccgaagaagggggatcctaggtttcaactagttactctctcagaggaatagtttggtttatttgttagtttcattgtttttatatacatgtttatatgtgtgtttgtttgttacatatattttattttatatatatgcacatgtttttttgatgttggtcaggtttggcaattcggagctctatacactcatcttccatgattctaaattctctgtagaaattcacatatacgtgtgtatatatgcatattttgatactgaactgctctacaaggagtttatcacaaattgagaagtggtatctttttttagaaaaacccgctagttactattcaaatcaaa

SEQ ID NO: 14815 - DNA, 445 bp, synthetic construct
  source 1..445: mol_type = other DNA
acaagaactttcgactgtatatatatttagaaaaacccgttagttacccatcaaagtcattgctatcttcttaacccggttgctgtgttagctttgtacaaattgtaacgagctctcgaatactgtacagaacacaggtacataaatatatatatacacccatacataaatatttttccagcacacttcgaacctaattacttctttcactttcaacttttaattttgattttaatttttgatttttaattttaagcttaattttaactttaactttaattttagctttaattccaattttaatttcaatcttccaccttaactctagctctgatcactatatctctgtcgtgcttttgttgtctgcttccagcctcactgtccttctaggaaagatttctcccgggctataaacaaatcaatcaccccatttccaatctcctag

SEQ ID NO: 14816 - DNA, 400 bp, synthetic construct
  source 1..400: mol_type = other DNA
ttgtaaggggaaaaaaataaccggcactcctgttataaaaacccgatagtaacgctcaactcaaatcgctgaaccaatctcagagaggacaaagagtgagattttcctcaaggagagagaagaggagaaaaggtcaaaagaaagaaaaaatagaaagggtaaacagggaacaagagggtgaagagagagagaactagtagtaccaaaaatgacagattacgtcacatgcaccctctgtgggaccaaaatccctgtgattgttgtccccctcggcacactcgaaagagcggttcagtgtaacgtatgtgggcaaaactattcggtctctccaaagtgaactggtgcattgtagaagccactttagacatgcacatatgtatacatatgtgtatgtgtttat

SEQ ID NO: 14817 - DNA, 675 bp, synthetic construct; identical to SEQ ID NO: 2280
  source 1..675: mol_type = other DNA

SEQ ID NO: 14818 - DNA, 482 bp, synthetic construct
  source 1..482: mol_type = other DNA
ctgcgctggtctgcttctagtttctccctgagagagttaatcagtggaacccgggatctcctgaggcggacacacgacagcattgtgcagcttacatcttgcataagatgctgtcgtgcttattttgagcgaattaaactcctcaattctgccgaagcagggggatcctagatttcaactagttattctctcagaggaatagtttggtttattttgttagtttcattgtttttttatgcatagttctatgtgtgtttgtttgttatatatatacacatgtatttttgatgttggtcatggttgtctagcaattcggagccctatacactcatcttccctgattctaaattctctgtagaaattcacatatatgtgtatatgtatatatattttgatactgacctgctctacaaggagcttataacaaattgagaagtggcatatcttcttagaaaaacccgctagttactattcaaatcaaa

SEQ ID NO: 14819 - DNA, 438 bp, synthetic construct
  source 1..438: mol_type = other DNA
acaagaactttcgactgtatatatatttttagaaaaacccgttagttacccatcaaagttattattatcttctgaacccgattgctgtgttagctttgttatcgtaaagagccctcgcatactgtccagaacacaggtacataaatgtacacgcccatacatagatatttttccagcacactttgatcctaattacttcttttactttcaatttttgatttttatttttattttaatttttaattttaatcttaattttaacttgtaactttaattttagctttaattctaattttaatttgtcttccaccctaactctagctctgattactatatctctgtcgttctttcgttgtctgcttccatcctcactgcccttccaggaaagatttctcccgggtcatcaacaaatcaatcaccccatttacaatctcccag

SEQ ID NO: 14820 - DNA, 392 bp, synthetic construct
  source 1..392: mol_type = other DNA
ttgtaaaagaaaaaggataaccggcactcctgttataaaaacccgatagtaacgctcaactcaaatcgctgaaccaatctcagagaggacaaggagtgagattttcctcaaggagagagcagaggagaaaaggtcaaggggaagaagaaagaaacaaggaacaaagagggtgaaaagagagagaaccagtggtaccaaaaatgacagattacgtcacatgcaccctctgtgggaccaaaatccctgtgattgttgtccccctcggcacactcgaaagagcggttcagtgtaacgtatgcgggcaaaactattcggtctctccaaagtgaactggtgtattgtagaagccaccttagacatgtacatatgtatacacatgtgtatgtgtctat

SEQ ID NO: 14821 - DNA, 781 bp, synthetic construct; identical to SEQ ID NO: 2410
  source 1..781: mol_type = other DNA

SEQ ID NO: 14822 - DNA, 1000 bp, synthetic construct; identical to SEQ ID NO: 2576
  source 1..1000: mol_type = other DNA

SEQ ID NO: 14823 - DNA, 379 bp, synthetic construct
  source 1..379: mol_type = other DNA
tttgttcttggttagggaacagtctctccggcatacccgggggtgatagcatgcttgtgggtcttaattggctcgctgcttgtaggttaagtaaccttcttttcctccttttccactacactagtagtgacgataaaggttgctccttcctttcacttcagttattcttccgccgtcagcgaggaaacagttggttgcaataatcttggacttaagtgtttaagatctattgactgctgcgtacaacgttgaggtatcgtttgattgatttggattcttcccgcgctaaacggttaattttagtatcttgaagtggtagccccacaaatttcaaactagcgtgatttgagacgccctgagtggttaatcgcgtttaaaa

SEQ ID NO: 14824 - DNA, 505 bp, synthetic construct; identical to SEQ ID NO: 2033
  source 1..505: mol_type = other DNA

SEQ ID NO: 14825 - DNA, 603 bp, synthetic construct; identical to SEQ ID NO: 2171
  source 1..603: mol_type = other DNA

SEQ ID NO: 14826 - DNA, 917 bp, synthetic construct
  source 1..917: mol_type = other DNA
gtgtaaacactgatcggttataaaaggaggaaggctctatacctccttttaaaaccgatcagtgtttacaccttttctccggaattgtcgagaggcgagatggtatttatatcattagcaaaaattaggttctacaaaatttaatttaagaaagtggaagtagaatttttctagtcaattattatttgaaatgatttaattcaagaaattattttgggaataattttgttcaattaataatctaattttaagtaaaagaaggtttaacatccacctgatccctagttcgagccgtgaaacgccatagtaagcgcagtagaacgaaggagttaacgttcaccttgagcgacctagagggtgcgtaagtgaagattaaaatagatttaaattacaatttaacatttagtcttgtgggaaaattcttaaaggaagatataatatttatttaaaaacataaaaccgaaaatgctggattaatctaaagtctgattatacccaacagaggggacgacaagctagtattgattaagttcaatgcgccaaattagtgcccattttatgaataacaatgaatagagtgaatttctcaaagaaaatgtacctaagtaaatctaaatttgaattatattgtagtttttatcagcaaagtgtgcttatcagcgggtagtaactgatcttcggaagattgaaagccacaatcccactttgtattttaattaggattattccgtggtgcaagaagcgtactagacttgtttgatcgaaagatccaccatagcttatgacatttaatggagagcaacataggtaaaaacttttagaaatcccaatcaaaatttaaatatggcagaacctcaaaattgaacgttctgctttcaaataatagtacacaacaaattaaaagaaaatataacaag

SEQ ID NO: 14827 - DNA, 367 bp, synthetic construct; identical to SEQ ID NO: 1692
  source 1..367: mol_type = other DNA

SEQ ID NO: 14828 - DNA, 301 bp, synthetic construct; identical to SEQ ID NO: 147
  source 1..301: mol_type = other DNA

SEQ ID NO: 14829 - DNA, 431 bp, synthetic construct; identical to SEQ ID NO: 1869
  source 1..431: mol_type = other DNA

SEQ ID NO: 14830 - DNA, 275 bp, synthetic construct
  source 1..275: mol_type = other DNA
gtttcccactggaggataacgataccataaacaaaattcacatcacatcacatcccctcaacaaaaccgcattcaacccaacacaactcacatcacatcacatgtattaaacacaacacaacacaactgtcatgtcatgtcataaatacaacacaacacacctcggatcccatccactaaacaccacatcacaaccctaaacatcccaaaacccaaaaacgggtagtgccacctgatcttatactaagtcgtcaggttccaagcacgtagtcaac

SEQ ID NO: 14831 - DNA, 308 bp, synthetic construct; identical to SEQ ID NO: 1506
  source 1..308: mol_type = other DNA

SEQ ID NO: 14832 - DNA, 307 bp, synthetic construct
  source 1..307: mol_type = other DNA
ataaattcattataaaaaccaagtcgtgcaatcaatttgtacgatcataccaggtacagtttcaatagctgtactcagcaatctgctataaatcaattttataacaacatcacgtgcttacggtcaattcgtaagcataataatcagttctaaataattgtttagaaccatcacgccgatacaagaactttgtatccccataacttgaacgctgtcaatcaacgctcaaaatatccacctacagacacttctgtaagtctcgcgcaatttttcaatattttgaaaaactattccccgtttacccgca

SEQ ID NO: 14833 - DNA, 295 bp, synthetic construct
  source 1..295: mol_type = other DNA
taaaaaccaagtcgtgcaatcaatttgtacgatcataccaggtacagtttcaatagctgtactcagcaatctgctataaatcaattttataacaacatcacgtgcttacggtcaattcgtaagcataataatcagttctaaataattgtttagaaccatcacgccgatacaagaactttgtatccccataacttgaacgctgtcaatcaacgctcaaaatatccacctacagacacttctgtaagtctcgcgcaatttttcaatattttgaaaaactattccccgtttacccgca

SEQ ID NO: 14834 - DNA, 367 bp, synthetic construct; identical to SEQ ID NO: 1693
  source 1..367: mol_type = other DNA

SEQ ID NO: 14835 - DNA, 500 bp, synthetic construct
  source 1..500: mol_type = other DNA
ctacaacatacacactcagtttaacggatctatccgttaaatagtttgcccacttctagtggtcgcttttcaccaggacttgatcctgtcgctttttaaacaacaaaccaatactgttttataatgacgatttgatattgtgttttagttagacctgcgtggttcattagtactgccttgcgaggaactggaaaatgaattactagtcggaccttttattaaccgctgcatgcaagttatagatcctaacacacaatatgcgagaaggaccaatctttggattatgacactgattagactgctggaacgcgtttcaggctctccgaaagatatagtacggagctagtgaaacaagtctttgtggagcgaaattatctctcactgggattggcactctcagaagcgtgagttcctttcacataagacgtatatctgggaagaaaagagcatcgataattggctctgagtttattaccagacgaaacactttttctgctatc

SEQ ID NO: 14836 - DNA, 331 bp, synthetic construct; identical to SEQ ID NO: 1582
  source 1..331: mol_type = other DNA

SEQ ID NO: 14837 - DNA, 1000 bp, synthetic construct; identical to SEQ ID NO: 247
  source 1..1000: mol_type = other DNA

SEQ ID NO: 14838 - DNA, 295 bp, synthetic construct
  source 1..295: mol_type = other DNA
gagctacgctcgtttttctgtattttgcttatgatgtgtacctcttgtgaggcgcgactatttatagtttcacattttatgaattggtgacaattcacataagcatattttacggattttcgtgtagtgtgcggggagccgtagacctatggtgtatgttgatttgaagagcttgctctagtcagtgcatcgaaagcccttgtggtgtagtagaacataggtcgtcttgtgaactagaaaccccccccttggggctttctgttcgcatggctctggtacttttaagaaaccagag

SEQ ID NO: 14839 - DNA, 285 bp, synthetic construct
  source 1..285: mol_type = other DNA
atggttaaattcttcaccccgaagtccatcggggttcctgtgtatagttaaaacggactgtgtatatatgaattaccaattttgtttatgttttgtgtcatgtgcatttatagaattaggctttgtacatattggcatggtgctcggccatacccttagttaggggagtagttagccactacatcatcatcgcaccaccctgcagtttgagtcaactgtagggattgtaaatactgacttactaacaattttgattatttatttgtaaatttatattgtgagaag

SEQ ID NO: 14840 - DNA, 417 bp, synthetic construct; identical to SEQ ID NO: 1825
  source 1..417: mol_type = other DNA

SEQ ID NO: 14841 - DNA, 474 bp, synthetic construct; identical to SEQ ID NO: 1972
  source 1..474: mol_type = other DNA

SEQ ID NO: 14842 - DNA, 352 bp, synthetic construct
  source 1..352: mol_type = other DNA
caggggatatccgcacttctgcaaacttctggcaacttctggcctgtgatttaatcgtatttatacgaacttctggcctgtgatttaatgcctgtgatttttgctgtgatttgcggtagtccccacaattatctcatgagaactttatccctttccatctagcgtgtaggttaacacgctaaacccccaagtctacctcatagacttagcattccccctttcgggggattatataatgctgcattgctagttagcgagacaactagaacgtccgtggatcgaatgccatcgtttattatgccgaaaggtactgctggagagctagacgtaaatacttaattaataacctaat

SEQ ID NO: 14843 - DNA, 565 bp, synthetic construct; identical to SEQ ID NO: 2132
  source 1..565: mol_type = other DNA

SEQ ID NO: 14844 - DNA, 402 bp, synthetic construct; identical to SEQ ID NO: 1785
  source 1..402: mol_type = other DNA

SEQ ID NO: 14845 - DNA, 263 bp, synthetic construct
  source 1..263: mol_type = other DNA
tcacaaactttccggaatggggcttcattcttatggaggataatggaatggagcagcaaatcctgaatccggaattttacaagacgagggctatttagctcgattgccaccggcgcgtctttaaataaaagctctggcaacctcccgtggagttccacttgaacgggctatcaggaacaacacgttaaatcaaccagcctgccaccaacgaaaaagtatttcaaaccgacaaccaccttacggacaagccctcgctcgacact

SEQ ID NO: 14846 - DNA, 474 bp, synthetic construct
  source 1..474: mol_type = other DNA
gaatttcattttataggaacattttcacctcatagcaacactcccattgttatgttgtacccctcccctttcataattgccttcctagtttatcttgtgcagtttttatcccagaagattgcattgacctgctgtgtaacgggtgttgcatggtaatgactactaggtgtccatattcacggctcgagggccacagggtgaaaatccctacattctagtgtgaagcgaaagataagctggaaattgagagaaagctattcaaggatagtgtcgtgcagctcttaggagtaaaggtgagtaacgtaatatgccttatgagctctcgacttctcaacacatttctttgcccaggtagtggatcacaacgtgaatggtcccataattaggggtattgtaggtaaaggtgcttcgacatatgtataaatgatcgaatagcgataaccggccgtgactacagggaccccctttacaaaa

SEQ ID NO: 14847 - DNA, 253 bp, synthetic construct
  source 1..253: mol_type = other DNA
tagcgagctgtaaagcagcggcgacacgcaaatctgcgattattggtgcgagggcaccccacttctctctactgcccttacgtaaacgccatagcaagtggggtgccctcgcaccaataatcgcagatttgcgtgtcgccgctgctttacagctcgctaagacacttgtctattgtaaaagccttgtgataacctaagcaagtgctgctggcaacaacctcttcaggaatctttttgaaccccctttatttta

SEQ ID NO: 14848 - DNA, 332 bp, synthetic construct
  source 1..332: mol_type = other DNA
gtctggattgacttttcataataataatgactacagtcgtaaattgtgggcaaggatactttggtccagtaagtcattaaaagaaagtgctatagtcgaagctatagcactttcataagcagccttcgcgcggtaaccccgcggaacgctattctcctcgtcatggtatccccatgcgacgagataaaagcttgtgtctgtgttgtgtttcacaaacgcactttcttttaatgacttactggatcaaagtatccttgcccacaatttacgactgtggtgttattttgagtaactagtctctccttagtctggattgacttttcataataata

SEQ ID NO: 14849 - DNA, 472 bp, synthetic construct; identical to SEQ ID NO: 1967
  source 1..472: mol_type = other DNA

SEQ ID NO: 14850 - DNA, 440 bp, synthetic construct; identical to SEQ ID NO: 1890
  source 1..440: mol_type = other DNA

SEQ ID NO: 14851 - DNA, 578 bp, synthetic construct; identical to SEQ ID NO: 2144
  source 1..578: mol_type = other DNA

SEQ ID NO: 14852 - DNA, 585 bp, synthetic construct
  source 1..585: mol_type = other DNA
tatatattagacctaatttgttttgttaatattactttcatggtctttaaatgaggcgaaaagtaaatttaaccatcctaattgtttgttagtatatttcatggatgtaaaatgaggcgaatcaaactaacaactattttaatcaattccgaatactatgacgaaaccatttgaatactattcttgacctgattatgatataacgacaaacagcaattattataaactgtataaacttttaataacaacacggactacgaacctatatgtaaccaagatatcgatgagcaatctcgatcccaatataagagtgaaatctttgagggccgttttggcaatgtatatagacgtggggttttaatggctagtaaccacattacttgtgatgaaactcaataactagtactaattcttaaataatttaatcatgatataaatgctgaagacaagtatttcgatttatatcctctgaatttattaaagaatatgtaattactcggtggtgattacattttagtcgcagttaacctgcagttgtagagcatcctgtgtcggagcagtagtaatgcaacctatcaacgaaac

SEQ ID NO: 14853 - DNA, 440 bp, synthetic construct; identical to SEQ ID NO: 1891
  source 1..440: mol_type = other DNA

SEQ ID NO: 14854 - DNA, 425 bp, synthetic construct; identical to SEQ ID NO: 1845
  source 1..425: mol_type = other DNA

SEQ ID NO: 14855 - DNA, 327 bp, synthetic construct; identical to SEQ ID NO: 1571
  source 1..327: mol_type = other DNA

SEQ ID NO: 14856 - DNA, 834 bp, synthetic construct; identical to SEQ ID NO: 2468
  source 1..834: mol_type = other DNA

SEQ ID NO: 14857 - DNA, 429 bp, synthetic construct; identical to SEQ ID NO: 1857
  source 1..429: mol_type = other DNA

SEQ ID NO: 14858 - DNA, 277 bp, synthetic construct
  source 1..277: mol_type = other DNA
ggtttatgaagcgcgtcgaagaaaccgcaaggcccatcagttggcttctcaagcttttggctttgtccgtgagcctgatcattcgcaccggtcgatctatcagagatatgcggctaagagagctgcgaagacggaggtgtatcaagtgcacgaaggtcctactggggattctcacgtggctattgagtttaaaagtattccgcttgttagaagaaaataccacttcggtaagaaaatgaacaaaatatatgtgaaataaggaggtaggaggcgtaaa

SEQ ID NO: 14859 - DNA, 508 bp, synthetic construct; identical to SEQ ID NO: 2040
  source 1..508: mol_type = other DNA

SEQ ID NO: 14860 - DNA, 429 bp, synthetic construct; identical to SEQ ID NO: 1858
  source 1..429: mol_type = other DNA

SEQ ID NO: 14861 - DNA, 301 bp, synthetic construct; identical to SEQ ID NO: 1487
  source 1..301: mol_type = other DNA

SEQ ID NO: 14862 - DNA, 538 bp, synthetic construct; identical to SEQ ID NO: 2094
  source 1..538: mol_type = other DNA

SEQ ID NO: 14863 - DNA, 509 bp, synthetic construct; identical to SEQ ID NO: 2045
  source 1..509: mol_type = other DNA

SEQ ID NO: 14864 - DNA, 641 bp, synthetic construct; identical to SEQ ID NO: 2230
  source 1..641: mol_type = other DNA

SEQ ID NO: 14865 - DNA, 507 bp, synthetic construct; identical to SEQ ID NO: 2037
  source 1..507: mol_type = other DNA

SEQ ID NO: 14866 - DNA, 386 bp, synthetic construct; identical to SEQ ID NO: 1744
  source 1..386: mol_type = other DNA

SEQ ID NO: 14867 - DNA, 338 bp, synthetic construct; identical to SEQ ID NO: 1616
  source 1..338: mol_type = other DNA

SEQ ID NO: 14868 - DNA, 316 bp, synthetic construct; identical to SEQ ID NO: 1537
  source 1..316: mol_type = other DNA

SEQ ID NO: 14869 - DNA, 1000 bp, synthetic construct; identical to SEQ ID NO: 2577
  source 1..1000: mol_type = other DNA

SEQ ID NO: 14870 - DNA, 269 bp, synthetic construct
  source 1..269: mol_type = other DNA
gatgggacgggttggactttaagcgtcgggatgtctatgaggcacttgtctctgcggtggagtatcgacttgggcaactcacacaaggaaaactagtctatgatcccatcaagcttttcatcaagcaggagccgcacaaacgggctaagctggaggaaggccggttgcgacttatttctgccatctctttggtggatcaggtcgttgaccgagtgttgtttggccgattggtggagagggttctctccactgttggccgaacaccttgc

SEQ ID NO: 14871 - DNA, 1000 bp, synthetic construct; identical to SEQ ID NO: 2578
  source 1..1000: mol_type = other DNA

SEQ ID NO: 14872 - DNA, 326 bp, synthetic construct; identical to SEQ ID NO: 1569
  source 1..326: mol_type = other DNA

SEQ ID NO: 14873 - DNA, 486 bp, synthetic construct; identical to SEQ ID NO: 1996
  source 1..486: mol_type = other DNA

SEQ ID NO: 14874 - DNA, 411 bp, synthetic construct; identical to SEQ ID NO: 1803
  source 1..411: mol_type = other DNA

SEQ ID NO: 14875 - DNA, 436 bp, synthetic construct; identical to SEQ ID NO: 1877
  source 1..436: mol_type = other DNA

SEQ ID NO: 14876 - DNA, 349 bp, synthetic construct; identical to SEQ ID NO: 1641
  source 1..349: mol_type = other DNA

SEQ ID NO: 14877 - DNA, 495 bp, synthetic construct; identical to SEQ ID NO: 2016
  source 1..495: mol_type = other DNA

SEQ ID NO: 14878 - DNA, 412 bp, synthetic construct; identical to SEQ ID NO: 168
  source 1..412: mol_type = other DNA

SEQ ID NO: 14879 - DNA, 741 bp, synthetic construct; identical to SEQ ID NO: 2361
  source 1..741: mol_type = other DNA

SEQ ID NO: 14880 - DNA, 433 bp, synthetic construct
  source 1..433: mol_type = other DNA
ggggtgatgggaaacttacgtttcgccaacgttaaggtactgtgattttgtacttacgactcagggtcgaccttaactggtttatactctgtcgagtttgggcaaatagcgagactatcccccgggtttggtgaaccttattgcaaggccagcatgtcacctttcttttgttttagaaaagctagcaactcactgcaaaatgaaataaaaatttgaatagctaacaacttactgtaaaatgaaataaaaatttgataaagctagcatcttactgcaacatgaaataaaataaactctcgcttcacctgcgccaaaagtgaaaccgccgactggtttagtcgaagaagggcagccttgctaaccttagcactccgtgatgctcggttcttacttagtagtatagggcttccctccgaaaaagggacgaattaaa

SEQ ID NO: 14881 - DNA, 279 bp, synthetic construct
  source 1..279: mol_type = other DNA
aaagaaaaaactctctgtcggcacatcttcacgggtgtgccgccactatcttaacaacaactttttctgtttgattactttttcgcttctactttcgttgatacaatttcttgaacccttcttttatttaaaaataactcttttcgttgatttgatttttctttgttttggtaaaaacatatagcactaactcaatatacacggttataacgctaattgtttaaatttgtttagctaggttcaagcttttcgccgttcgattgttactttgcgggcacc

SEQ ID NO: 14882 - DNA, 160 bp, synthetic construct
  source 1..160: mol_type = other DNA
gatatttctgctagaaagactcttaatcgttctgaacactttcttgaaagttgcggctgaccaccgtacaggaattctctcgcactagtcgggtttgaagcgcgggtgtatctaggagggtaagcctagagcataaattgtaactaccgcgaataaggtc

SEQ ID NO: 14883 - DNA, 793 bp, synthetic construct; identical to SEQ ID NO: 2426
  source 1..793: mol_type = other DNA

SEQ ID NO: 14884 - DNA, 425 bp, synthetic construct; identical to SEQ ID NO: 1846
  source 1..425: mol_type = other DNA

SEQ ID NO: 14885 - DNA, 392 bp, synthetic construct; identical to SEQ ID NO: 1757
  source 1..392: mol_type = other DNA

SEQ ID NO: 14886 - DNA, 898 bp, synthetic construct; identical to SEQ ID NO: 2524
  source 1..898: mol_type = other DNA

SEQ ID NO: 14887 - DNA, 1000 bp, synthetic construct; identical to SEQ ID NO: 248
  source 1..1000: mol_type = other DNA

SEQ ID NO: 14888 - DNA, 989 bp, synthetic construct; identical to SEQ ID NO: 2570
  source 1..989: mol_type = other DNA

SEQ ID NO: 14889 - DNA, 1000 bp, synthetic construct; identical to SEQ ID NO: 2579
  source 1..1000: mol_type = other DNA

SEQ ID NO: 14890 - DNA, 461 bp, synthetic construct
  source 1..461: mol_type = other DNA
tttggaactcagctaatacactggtggctgagctgaggttccaccatttaatcaaactactcaaatatactttcactaggaataataaattatatatatcccttgtggacgtgattaacgaagtagcaggccacacttttaaattgagctatttgaataatgaacagaatttgaataaaccgacgtttttctttgattacgatactattgcacgtaaacacaattttaacaatgaacctactgaaataaatggtgcaatactacgctggatcttcttacaccccactcctccaagcgtatatgactacttaccaaactttagtgaagatcttaaactagaagaatctatacaggtcctcccagcacgatcgtatcttaatttagcaagtgtaccatacataccaccagaacgcttaggtgatactgactctaaaagtgagtacgtggaacttgacccccac

SEQ ID NO: 14891 - DNA, 1000 bp, synthetic construct; identical to SEQ ID NO: 2580
  source 1..1000: mol_type = other DNA

SEQ ID NO: 14892 - DNA, 1000 bp, synthetic construct; identical to SEQ ID NO: 2581
  source 1..1000: mol_type = other DNA

SEQ ID NO: 14893 - DNA, 1000 bp, synthetic construct; identical to SEQ ID NO: 2582
  source 1..1000: mol_type = other DNA

SEQ ID NO: 14894 - DNA, 284 bp, synthetic construct
  source 1..284: mol_type = other DNA
tttggaactcttccttcgccacccatacagtggaaaagttccgtaatatattaatcacttatggttatggtgtatcaagacaaccaaaccttgcggccatttgtgccgaagtgattcaattggtggcagatgttgcttttaaattgagcgattactcggctgaacagttggctgatcctttaggctgtttaactggaaagttggctaccaacttgattttcgattacgttaaggccaactcccaatttcgcttagatgatgagccgacagactcacgtaatgcg

SEQ ID NO: 14895 - DNA, 1000 bp, synthetic construct; identical to SEQ ID NO: 249
  source 1..1000: mol_type = other DNA

SEQ ID NO: 14896 - DNA, 1000 bp, synthetic construct; identical to SEQ ID NO: 250
  source 1..1000: mol_type = other DNA

SEQ ID NO: 14897 - DNA, 1000 bp, synthetic construct; identical to SEQ ID NO: 2583
  source 1..1000: mol_type = other DNA

SEQ ID NO: 14898 - DNA, 945 bp, synthetic construct; identical to SEQ ID NO: 2548
  source 1..945: mol_type = other DNA

SEQ ID NO: 14899 - DNA, 1000 bp, synthetic construct; identical to SEQ ID NO: 251
  source 1..1000: mol_type = other DNA

SEQ ID NO: 14900 - DNA, 1000 bp, synthetic construct; identical to SEQ ID NO: 252
  source 1..1000: mol_type = other DNA

SEQ ID NO: 14901 - DNA, 1000 bp, synthetic construct; identical to SEQ ID NO: 2584
  source 1..1000: mol_type = other DNA

SEQ ID NO: 14902 - DNA, 865 bp, synthetic construct; identical to SEQ ID NO: 2502
  source 1..865: mol_type = other DNA

SEQ ID NO: 14903 - DNA, 878 bp, synthetic construct; identical to SEQ ID NO: 2514
  source 1..878: mol_type = other DNA

SEQ ID NO: 14904 - DNA, 1000 bp, synthetic construct
  source 1..1000: mol_type = other DNA
acgcgtacgcgggcatgtctttagtaccagtggacttctcaccagttagcatggcggattacaagccagctagtaatctcacttttccatctttaacgcgtccgagtgccgtagatagtagtgatgtagcaaaaaatcctcgagttgctagttctaaacgtgcaccgcgagcagctgcctctgacatactaaataggtttaaggaattcaacgctcctccgccgcgcgaacctgcgccctcgcaattcatcaatgagccaccagctgctcagttaagttacgaggctaaatatcccgtcgaagagacccaagttccaggtgatttcaagtattaccagcccgtggtcgataacgatcgggtacatgtggaaccggccgatgcaccagacgcgtatgatcgcttgtcgaagcaacagctaaagcttgctattgaaaacaatatgcaactcttagctaagattcaaaactcacctattttaggtgagctagatttagatgccgagcgcaagcgccaagatgaattccgtcagctcgagactgcccgtaatgctcggatccaacgcagagctagttacgtacctttcggcccttcccgcccacgccctgttctcagcccgcgatctgtgcctaataaacctccactcgtgcacggcaagctttctgaaaaagaaatcgagcatacgccagtggaagtaaatgatgctgcagctgagcaggtgcaacgtgaggtccgctcactcggtaaaccagttccttcgcctagcacaattaatccttttgccactctcgctgctgacaaacgccgcccaggcacgtattatcagaagagtggcgttcctctcgattatgatgatctagtaaaagagcagctcccaacaaccaattttggacatactggcgcggacgttagcgtgcaagacgggatagcaactgattcactagcgaaaaactagtgtggaacgttgcttattaccgctctgcgcgtaacgttctcgccagt

SEQ ID NO: 14905 - DNA, 855 bp, synthetic construct
  source 1..855: mol_type = other DNA
gatttctggggatttctctggtgtccagctaccttttatgttacccgcttaattagctagcggttaacctcaggtcgggaggcaatccggccagtgtagtagggggcaggaaagaacgaagcatgtgcttatcggtttggctcatccaacttgggcgaaatcgtagcgtgtggatactcaaagtgtcaaagtatagtcaacatgccaacaagactgataccggaaactctcacaaactttgaggcctactacagagtgtacaagtgttagggtagaaagagctggggctataacccccggatctcttatcaggccagcaccgctcagcccctctttttatgtaaatcccacccggtctagcggagtgggccgcatataaaatgagcgagtgaaatcgctctacccgtccaagcacatgacactaaactgtactcgcccaggatatggcgttaaactgtaccgtccgcgtttgccagcggttaaaacaatggcttttcataacagccgcgtgtgagtccgcgggataataagtgttctaacagactcaaaaagacatcctatttccaagttctcgtcgctacgtcaaacgtcggcatttcttggatctggtggggtaacatacacgtcaagtatggtgtgaaccggggctacacaactaccgggaagctaacgtaactacgctagtgctctactttcaacgtgcttcaggaccgaaaccgtccgtaaaccaatgggttgcacagaaagtaaaggcgtagggaacgtgcctaggacaagaactaggtggacagactgacactcaccagtgccttctcgattgaaggcagtagcaaacagtcggtgcgggaactccgc

SEQ ID NO: 14906 - DNA, 511 bp, synthetic construct; identical to SEQ ID NO: 2048
  source 1..511: mol_type = other DNA

SEQ ID NO: 14907 - DNA, 312 bp, synthetic construct; identical to SEQ ID NO: 1523
  source 1..312: mol_type = other DNA

SEQ ID NO: 14908 - DNA, 502 bp, synthetic construct; identical to SEQ ID NO: 2028
  source 1..502: mol_type = other DNA

SEQ ID NO: 14909 - DNA, 303 bp, synthetic construct; identical to SEQ ID NO: 1491
  source 1..303: mol_type = other DNA

SEQ ID NO: 14910 - DNA, 527 bp, synthetic construct; identical to SEQ ID NO: 2081
  source 1..527: mol_type = other DNA

SEQ ID NO: 14911 - DNA, 642 bp, synthetic construct; identical to SEQ ID NO: 2232
  source 1..642: mol_type = other DNA

SEQ ID NO: 14912 - DNA, 572 bp, synthetic construct; identical to SEQ ID NO: 190
  source 1..572: mol_type = other DNA

SEQ ID NO: 14913 - DNA, 254 bp, synthetic construct
  source 1..254: mol_type = other DNA
aatacttacatgaccaaacctccgccaaatctcaccgtgctataaccgacctgactgacgggttggttcggtacggtcatctgactgacgctaaagttttaaatttcataattgataacctggaacccgaatcacccatctgcacttctggaaacattttggagacagaataccgagtcaaatctgatcttgctgtgactaggctgagactaaaagacatcattcacaaattggatcctgaaattattgcgttc

SEQ ID NO: 14914 - DNA, 817 bp, synthetic construct; identical to SEQ ID NO: 2451
  source 1..817: mol_type = other DNA

SEQ ID NO: 14915 - DNA, 808 bp, synthetic construct
  source 1..808: mol_type = other DNA
gcctatacagcgtcacagatcttcctaccgaaggttggtgggttactatgcggagtcgcctgtcgagggccaaccacaggagtgggtaaccctcgggagatgaaccggtgaccctttatcgctccgcttgggtcccggccctacctattttctcgttcacctggcgaggaagtaggggggtgggcgtatgcctgccgtacgagtaattgtacggcgtgatttcggtggggtacttagccttcctgctaggttcctcatcagaatttccccactagatctatccaatagttgtgggcagggtctatttttgcccagtgtatatggaaacactggagtctcttatagggtctgctcatgagagcactaactaagtcgatagcttactgatagtgagtaagtatttcttatataacaccttatatgaccactcctgcgaaatgcaggggtacctgaagtcttacagcgccgagacaatgagattctcggtggccaaaacgtcggtttggtatgaccagggcgtgctaagtgatctggcgctcgtttaggcggcggttccatatgaaccctaccggctaaacttgcttccttcattggataagatctaaatgccgagagactgcaacggccacaatgttgtaggggaacagtccctccttacgttagggtaagggggcagttggtgccttcactgttataccgaaagatttatgacaagcgatttccaagtgattttttagattgagaaccgagcgagcaaatttgaaagccagcgttaagttgagaaaactattcgagcctattgggcgtt

SEQ ID NO: 14916 - DNA, 333 bp, synthetic construct; identical to SEQ ID NO: 151
  source 1..333: mol_type = other DNA

SEQ ID NO: 14917 - DNA, 832 bp, synthetic construct; identical to SEQ ID NO: 2463
  source 1..832: mol_type = other DNA

SEQ ID NO: 14918 - DNA, 715 bp, synthetic construct; identical to SEQ ID NO: 2327
  source 1..715: mol_type = other DNA

SEQ ID NO: 14919 - DNA, 751 bp, synthetic construct; identical to SEQ ID NO: 2375
  source 1..751: mol_type = other DNA

SEQ ID NO: 14920 - DNA, 292 bp, synthetic construct
  source 1..292: mol_type = other DNA
ctggaccgaagctgatccattcactgatgagatcaatccggatgctgtaccacccgctaatgtcgggacggttgccgccgtgcctcacgccttcgaagtcatccatttatcagctgtctcgcaccagttggccaacgtttaccaggaccctgaaagtccgttatggagtaatcaagctgcagcagtcgatgagattgcgaatgctcaggctacattcgtggatgctgacggtctctcggaggatgagattgctttggtcattaaggcctttgcaccccaggctaaggaatac

SEQ ID NO: 14921 - DNA, 796 bp, synthetic construct; identical to SEQ ID NO: 2428
  source 1..796: mol_type = other DNA

SEQ ID NO: 14922 - DNA, 1000 bp, synthetic construct
  source 1..1000: mol_type = other DNA
catgggcctgatgggggtaggtttcgcggtctggatcacagtgggggttaggaccgccttgtagaagcctgccgacgccgtttagtcgtgctccgcctcctggtggtttgtatgatcttctcggctcaacctcgtccggcgtcagtacggatcggaggcggtagcgaccacactcgtaatggtcgatcctatggatcgggagtgggttgtagccgtcttcgtacctgaacctcgtcctacgtgtctgcccggtctcagtagggatcttctgtggtaggctaacactcgtaacgttcggaactttttccgggagtgtgcgctagctattgaagtacccgaacctgatcctgtagtttgctgagcagagttggatcgggcccacgccagcttaccattcttaaagggaggtcgtgcctcgagcacatgggaccggcgggacccgcaggtcccggccggagttgggcaaaatataccaagagtcaagccgctcaagtcgttctactcctccctgattacgtaaccaaccagttgaggtgtcgaagactgagtcgattcgagcgtagaggatacaggcgacgtcgcatagacggagggttgtcccaactcgctctcagacctacgggtctcgggtcgaagaagagcagccggactctgcactaactctgatactgtggccgaggtttatcggacagcaaggtgaccagcgtgtgtgccgttttacaggatgacaaaggggcgatccccctatagcatccgggaccggcacgacttccgtttagtctttggaactttcgggatagcaggaaggagtggtgtagagtagggctgggatgcttcgacctcgctccagggggttgccacggccccaggggtgcgtccgaggtccctgcgttcgaatcggtgatgtttgcgatacttcgattataccgcaattaattatttgtaaattatagatagtggttaggttggttaggttaggttaggcacaacattaatcata

SEQ ID NO: 14923 - DNA, 1000 bp, synthetic construct
  source 1..1000: mol_type = other DNA
atgggcctgatgggggtaggtttcgcggtctggatcacagtgggggttaggaccgccttgtagaagcctgccgacgccgtttagtcgtgctccgcctcccggtggtttgtatgatcttctcggctcaacctcgtccggcgtcagtacggatcggaggcggtagcgaccacactcgtaatggtcgatcctatggatcgggagtgggttgtagccgtcttcgtacctgaacctcgtcctacgtgtctgcccggtctcagtagggatcttccgtggtaggctaacactcgtaacgttcggaactttttccgggagtgtgcgctagctattgaagtacccgaacctgatcctgtagtttgctgagcagagttggatcgggcccacgccagcttaccattcttaaagggaggtcgtgcctcgagcacatgttgaccggagggacccgcaggtcccggccggaggtgggcaaaatataccaagagtcaagccgttcaagtcgttctactcctccctgattacgtaaccaaccagttgaggtgtcgaagactgagtcgattcgagcgtagaggatacaggcgacgtcgcatagacggagggttgtcccaactcgctctcagacctacgggtctcgggtcgaagaagagcagccggactctgcactaactctgatactgtggccgaggtttatcggacagcaaggtgaccagcgtgtgtgccgttttacaggatgacaaaggggcgatccccctatagcatccgggaccggcacgacttccgtttagtctttggaactttcgggatagcaggaaggagtggtgtagagtagggctgggatgcttcgacctcgctccagggggttgccacggccccaggggtgcgtccgaggtccctgcgttcgaatcggtgatgtttgcgatacttcgattataccgcaattaattatttgtaaattatagacagtggttaggttggttaggttaggttaggcacaatagtaatcata

SEQ ID NO: 14924 - DNA, 682 bp, synthetic construct; identical to SEQ ID NO: 2287
  source 1..682: mol_type = other DNA

SEQ ID NO: 14925 - DNA, 623 bp, synthetic construct
  source 1..623: mol_type = other DNA
atgatggccacgctaggggctgcactcaaggctggcgctgctgtcccgcgacctgtcaccccggtctcagaacctgaggaagtgccggtggaggtgattgctccagcgcccaagccacgccaaacatcgcgtgtggagcgtgacctactaacaccggcgaaggcaggggcacacgcaccattcgcgccctttgcccgggcgaaggtaatgtcactggctggcaatgccgttcgccggaaggccaagagcaatgaggaaataatggctcagtggagcgatgacggcagttcaacgtcgtcaaaaggcaacgcccagtagacaactggcgtgatgggctcttggagcacatctcctcatgccatctatgcattcctttcacttcatctatcttagggtccatcagggaatttgatcaattggaaaaaatatacaaaaacaaaaaccgactgcccgatagtattaagaagaataagtattaccaaaataatcaaccaaaaatttcatctttatattcggcgtgtaatgaggagttgttagaggcgttggactgttatgctgagcatgaacctgagctggctcgaactttctacgaagactggttctataacttcgcccctgactcg

SEQ ID NO: 14926 - DNA, 828 bp, synthetic construct
  source 1..828: mol_type = other DNA
tgccctcgggcaaccctccacttcggtggagggctcgctggttaaccactagtgtggttatactgagttcaaatctcagcttgggtaggggaaggcctccctaggatttcctaaattggtcagttgatctgctttggcggcagtataatctagtcatctttcgtatacttatttacacctatttatggaactgaatcgcttcgcatatagactcgggcaaagaactgctgatattataatagctggaataatggtagctccagctccaaaagtttatagaaaaattaaaaagattgcaaaactaagaaaaattagatcacatgttccagctgaagtaactgagaatgtatttgaatgtcttcaatatttagattaatttcaaattttacttataaaattaaattaattaataatgaggtttttaatatgtccgattctttaactggcgcgtgtaaagctttcatttgttcatttgctgctggaatgaccgataggcttgcttccagggcaacaggagttgaggtgagaattttgaagaattgctttactgatcctgctgaatgtgaaccttgggacgaacaatttcaggatggtgtttttgacgtaattttagaaactgcaaagaaggggaggtatcttgatgcagctgcaatggctctcgaaggtcccagtcccgatgcagactcattttgtattaattacgttgttgatgaatttctaaatatgcataaacacctggatgacgagtaatgatctgtgtagtaaagtttataacactttactacgctgtaagtttcttaaattatatatcttttttataaaataatt

SEQ ID NO: 14927 - DNA, 261 bp, synthetic construct
  source 1..261: mol_type = other DNA
acaacctttattggatatatcaagaaagaaaaagaaaaacaaaaaaataaaaaaaataaaaatccccccgacgtactgcgaccttgccgaggtggccatggggcttgtcacataacgaacagcagtaccacaagtatctatgaatttttattatcactgggtctcgattttgaggacgttgatgacctctatgacttcgaagttatacgcacctatgtcgcagacagaaactgggagcctgcaaaccgtgagaaattccgg

SEQ ID NO: 14928 - DNA, 320 bp, synthetic construct; identical to SEQ ID NO: 1546
  source 1..320: mol_type = other DNA

SEQ ID NO: 14929 - DNA, 283 bp, synthetic construct
  source 1..283: mol_type = other DNA
tatttttccccggggcggcgggactagaaggttgctagggctccgggcggtggtggtcgtcgaccttgcggggtcaacggcgttttcatttgttctctttcatacctgctttgtttcctatccattcgagttattgatttttacagtcagcacctgtaacttgctggctcgcctctcccatgggcgagcaatacaaatacatgagacgtgagagaaccgtgctagatacctcacgtatacccaaagtcggtacggggatcgtaaccattacgctttttcctta

SEQ ID NO: 14930 - DNA, 1000 bp, synthetic construct; identical to SEQ ID NO: 2585
  source 1..1000: mol_type = other DNA

SEQ ID NO: 14931 - DNA, 275 bp, synthetic construct
  source 1..275: mol_type = other DNA
tctctggcgcatcgctgcacgggggggcggacgtggattggtccgacgtctaggtcgtcttagactggattaaggaacatccgacgaccgtttccgatgtagctggagagccagctaggcactggcaattttctctcgagcgatcgcgctcgtttacgttcattaaaggcgtgaggcaccttggatacgcctcgttctgtcgttaccggtatgtacaaccgcagacctcgaattccgagtactatgcgaggttcctcgatgatcgtgccaacgag

SEQ ID NO: 14932 - DNA, 254 bp, synthetic construct
  source 1..254: mol_type = other DNA
aagccgcagaaccccacggtgcaccacgatcccctccggggcccggcaatgccacggcccctagccgggggcgggggcggtgctgtcgggcgtgggccgggagaacccccacggccggccgcagatccggttctcccaccaccagtcgcgcctgccggtggcgatgacccggcgcccttaccagcaggcccccttccccctgccctggcccccgagccacacggcgctgccccgcctgaacgggccgcagaaga

SEQ ID NO: 14933 - DNA, 515 bp, synthetic construct; identical to SEQ ID NO: 2062
  source 1..515: mol_type = other DNA

SEQ ID NO: 14934 - DNA, 1000 bp, synthetic construct
  source 1..1000: mol_type = other DNA
agttcggaaagccgctcttcttgcacagcggcttcaacggcggagtgagctgggtggatggtgaatccagcgctctttgtttcagatgtgctgggtggatggtgaatccagtgctcttcggtgacggactttggtgtggtgacggcctgtacaaccgtgttcgagggtgtccgcgtggtggtggcgcgggtaacggaatcaatcggcggggataataaacctgtcggtagggcgtgccctcctccttgatactgagttctgctctcctccgagcctaggagcgatccaggcgaaatctgatacagggcctaggagcgatccaggcaacattccaaccccactgtcattacagattctttggccatccttccggccgtcctgtctttacaacctctccttcctatcgtggtatatttccactcgctgaacgctgcgaccactgcagaggtaggaatcgacctgcgggtctctggcgttgatcagagaccttagacggtcgtgcacgatcctatgagttaggggctattaagctatgggggggtgaaaaacccctgccgagatgtgcccgcctctctatctgaaagcaaaccctaaaagtgaacaaagcgacttactaccggaggattacactgctgtaggcctttcgaggccgtgtgttggggctaggcatccgcgagccgaaccctattaatcaatcagcaaacggacctttgtcagggatgcgttaaccctgacccgagactatccgcttgaggcccattttagagaggaccggcggaccgagacgccacactggacgtatttcttgctgaccggccggattgcctgcgaatcccgcttcaacagtgaggggaacagtcctgctcagcctctgctgacaataccctgccgacgtgaaacatagtcgcgacatggtgcgctgcatacttttgtgggatcacgcccgagctcttcgatacctcaacgtgaaccggccgcgggtgttttaaaaacatttctt

SEQ ID NO: 14935 - DNA, 794 bp, synthetic construct
  source 1..794: mol_type = other DNA
ggagagagaaccccctacgctttcgcgtagcaaccctctcgggctggacacacacacactcctcaaaataagtgtggtgtcaggattcgacaagtttatttaccccacaagggggccctgcaagcatgcttgcagagttcgacgtcttgttaacgtcgggtaatccgaattttctctcgactccctctcatcaccgtagggtgagagttgtaagaatttaaaattttgaatttcgaatttcgaattttgaattttgaattttgaatttcgaattgagattttagactttctaatttcgatttccgattttcgatttgcgaatttcgacttacgattttcgattaatgattttcgagctcgttctgatagataacctgattctatcaacatccttatagatgatttgactctatatcttcttcgccgagggaagttcacctctcggcgtcgtaagcctgctgttgcacagcttctctgcgaagggaaaggctacacaaatctcagtatctcgctgagcctaaatgagatcggtggtaacgtagatagcccattttggctgcactagccggaagccggttgatgaccaagtaggaaggactgctagtaatcaagcatagtcgtgggggccgaaagcctgcaaccgtctatgcgccgatgaaagtagtagtacccaaatgcggaactcttctggcggatcgtaaagtgagtcgtgggctgaccccacgctaaataaccaagtctctgagagaacgggctacaccctatgatacctcaggctaaacaaagtcgtgaat

SEQ ID NO: 14936 - DNA, 380 bp, synthetic construct
  source 1..380: mol_type = other DNA
ggggatggtgctcctaggtttgatcttattagatcctaactaagaggaaacattgccctgtttcgtgatgatttcattgttcaatcactgaagcttctcttcaccaaaaaggagagagcttcgagagcttagctgtttcagctattttgaaccccgaaggattcgtgtcgtaaacatttgactttcttttgaaagtcgttcattcgttggcccgaaggcctcaaactactgcgtagtaacgtgatatgtctgaacactggaggtagtacggcatgagtggttgttctgtggagtagtgccctagaagaacaaatccccactcagacctttcagtctgactattggcactccgtgaggcccggaaccctggcatttcagcc

SEQ ID NO: 14937 - DNA, 469 bp, synthetic construct; identical to SEQ ID NO: 1959
  source 1..469: mol_type = other DNA

SEQ ID NO: 14938 - DNA, 945 bp, synthetic construct; identical to SEQ ID NO: 242
  source 1..945: mol_type = other DNA

SEQ ID NO: 14939 - DNA, 934 bp, synthetic construct
  source 1..934: mol_type = other DNA
gccgcctttgagatcttcctaggaaggccacctaaggaacttgccatagcccgtgtgagtgcttttatgcattctcatcacagttttctctcttggagaactatggttaagtttaggatttcattggtgaggccagtgggtctcggtcagggcacagtgagggtctgtgcgtggttgtctcccttctttcccgcaggggaagtaaaatatacttgcaccaggacgcgatgacgtccgttatgtggataaactatttctttaattaaaactcatcaaccgggggttgcatccgattgcaaaccaccactagaaatgacaacgaaagtagaagggtggcagagaagatgaaaaggtcggcggctaagatggtgtcttcttagtttgctttaagcgcggcaattcaacattgtcccgtcagattggctgcaatgcctcaaccttcaatcgcttcgggtactgagctcgcggtaaaccattgtaaacggtaacgcgtaggagtatagcactcttgcgtagtccctagtcattaaggaattactgtctctttacactacaccaagtggtcggatccgtgggatctgatctttagcctctccggctatcgctgcgtatactgcagtctattagtaggagtcatttcgaatggtggtcccattcatacgaccgtgacaaactgaagtcactgatgtctctaaaagctaactaaaatttagtctgcggggtcgcagtacggctccctcatcgatctttttctggatgtaaaactccgcgtctcatcgctcaagagtataaaaggaaattgaatggtgacagaccggaaagacggtcaaccccatcttatacgcagacaccagacagctccaactaagacctgttattctgcgttctcaagagacaatttcgtttagcaatatcgtaaattgcaaccatcgat

SEQ ID NO: 14940 - DNA, 420 bp, synthetic construct
  source 1..420: mol_type = other DNA
tggggatggtgctcctaggtttgatcctttcagatcctaactaggaggaaacattgccctgtttcgtgatgatttcaatgttcaatcactaaagcttctcttcaccaaaaaggagagagctttgagagcttagctgtttcagctatttgaaccccgaaggattcatgtctaagacatatgatttctttcagaaatcgttcgttctttcacccgaaggtgtaaaactactgcgttggcacgtgatggtcctgaatctcataagaagaacggcaggaatgattattctgtggagtagtgccctagaaggataaatcctcattcccacttattgaattggcccaaggcagtccgtgatgcccggttcgtcctctggacgtaaaaggttagagaccacgagagactgtggtagcttctgtcgaa

SEQ ID NO: 14941 - DNA, 313 bp, synthetic construct
  source 1..313: mol_type = other DNA
tttttggggatggtactctcaggtttgatctttgtagatcctaactaagaggaaacattgccctgtttcgtgatgatttctatgttcaatcactgaagcttctcttcaccaaaaaggagagagcttcgagagcttagctgtttcagctatttgaaccccgaaggattcatgtctaagacatttggtttctattcagaaactgttcattctttcatccgaagatgtaaaactacttcgtagtaacgagatggtcctgaaccctgacatgtagaacggcgacgacaggcattctgtggagtagtgtcctagaaga

SEQ ID NO: 14942 - DNA, 453 bp, synthetic construct; identical to SEQ ID NO: 1923
  source 1..453: mol_type = other DNA

SEQ ID NO: 14943 - DNA, 919 bp, synthetic construct
  source 1..919: mol_type = other DNA
gatcttcctaggaaggccacctaaggaacttgccatagcccgtgtgagtgcttttatgcattctcatcacagttttctctcttggagaactatggttaagtttaggatttcattggtgaggccagtgggtctcggtcagggcacagtgagggtctgtgcgtggttgtctccctcctctcccgcaggggaagcaaaatatacttgcaccgggacgcgatgacgtccgttatgtggataaactatctctctaattaaaactcatcgaccgggggttgcatccgattgcaagtcaccactagaaatgacgacgaaagtagaagggtggcagagaagatgaaaaggtcggcggctaagatggtgtcttcttagtttgctttaagcgcggcaattcaacattgtcccgtcagattggctgcaatgcctcaaccttcaatcgcttcgggtactgagctcgcggtaaaccatggtaaacggtaacgcgtaggagtatagcactcttgcgtagtccctagtcattaaggaattactgtctctttacactacaccaagtggtcgggtccgtagggcctgatctttagcctctccggctatcgctgcgtatactgcagtctattagtaggagtcatttcgaaatggtgatcccattcatacgaccgtgacgaactgaagtcactgatgtctctaaaagctaactaaaatttagtctgcggggtcgcagtacggctccctcatcgatctttttctggatgtaaaactccgcgtctcatcgctcaagagtataaaaggaaattgaatggtgacagctggaaagacagcaccccaattcttcaagtggtcacaaacatcgagcttcagtttgcagccactatcgccttaagaatatcgccgtttcgcaataccgtaaattgcattttccaac

SEQ ID NO: 14944 - DNA, 786 bp, synthetic construct; identical to SEQ ID NO: 2418
  source 1..786: mol_type = other DNA

SEQ ID NO: 14945 - DNA, 491 bp, synthetic construct; identical to SEQ ID NO: 2011
  source 1..491: mol_type = other DNA

SEQ ID NO: 14946 - DNA, 729 bp, synthetic construct; identical to SEQ ID NO: 2345
  source 1..729: mol_type = other DNA

SEQ ID NO: 14947 - DNA, 426 bp, synthetic construct; identical to SEQ ID NO: 1849
  source 1..426: mol_type = other DNA

SEQ ID NO: 14948 - DNA, 514 bp, synthetic construct; identical to SEQ ID NO: 2060
  source 1..514: mol_type = other DNA

SEQ ID NO: 14949 - DNA, 384 bp, synthetic construct; identical to SEQ ID NO: 1740
  source 1..384: mol_type = other DNA

SEQ ID NO: 14950 - DNA, 475 bp, synthetic construct; identical to SEQ ID NO: 177
  source 1..475: mol_type = other DNA

SEQ ID NO: 14951 - DNA, 457 bp, synthetic construct
  source 1..457: mol_type = other DNA
ggggtgtgaaaacctacacctatccacaatgttttcattgtgaatcgcaggtttgcttcgttgcacagggttaaaatcccgcgctattttgtccgttacagacgcatagcagtgcaagcatacttagtcttaggagtatgcatcctggaagtccgatcactcctcgtggagtgatcctttaaaatctcgggggagatcttcgtggatcctagcgagcatcaatcgtggtaagacaataaatcattgatgcgtgttaagacacacttgttagaaatttctttcagaaaccgtttgcagttggcgcacaactgtgatttgactgaaccccattatccgaacggcaggaaaggtgaacctgtggagtagtgccctagaaggttcaatcccctttctcgttaatggtttgtcactcaggatctggccgcaaaaccagtaactaagtaatcccagtttgagg

SEQ ID NO: 14952 - DNA, 461 bp, synthetic construct
  source 1..461: mol_type = other DNA
tggggggtgtgaaaacctacacctattcacaatgttttcattatgaatcgtaggttcgcttcgttgcacagggttaaaatcccgcgctattttgtccgttacagacgcatagcagtgcaagcatacttagtcttaggagtatgcatcctggaagtttgatcgaccctcacggggcgatcctctaaaatctcgagagagatcttcgtggatcctagcgagcatcaatcgtggtaagacaatttaatattgatgcgtgttaagacacacttgttagaaatttctttcagaaaccgtttgcagttagcgaataactgtgatttgactgaaacccattatcagaacggcaagaaaggtgaatctgtggagtagtgccctagaagattcaatcctctttctcgttaatggcttgtcacccaggatctggccgctaaaccagtaactatccaatcctaattcctagg

SEQ ID NO: 14953 - DNA, 994 bp, synthetic construct; identical to SEQ ID NO: 2572
  source 1..994: mol_type = other DNA

SEQ ID NO: 14954 - DNA, 353 bp, synthetic construct
  source 1..353: mol_type = other DNA
ttaataagtttggtcgctgcacgaccggggctcacgcccggggatttggtcccgttcaaggtgaggcccttgtagtaacctctcgccgctgcgcggacgaatacataagtccgtccagtactgacagagtcagcgccgcacatgcgtgaaatgtgtgaatcgcaaactgaagcgacctatggtgataacggatgtaccatctagctgtggagtagtgaccctagaagctaatccgatggttccaccagtcgttgtttgccggcaattgccacaaacggtttcgtgttttgcgtgaagaaacacggtctctaacgagtacatgtccggttggccccgaacgaggcccgataaac

SEQ ID NO: 14955 - DNA, 437 bp, synthetic construct; identical to SEQ ID NO: 1878
  source 1..437: mol_type = other DNA

SEQ ID NO: 14956 - DNA, 353 bp, synthetic construct
  source 1..353: mol_type = other DNA
ttaataattttggttgctgcacaaccggggcttttgcccggggatttcatcccgttcaaggtgaggcccttgtagtaacctctccccgctgcgtgagcgaatacataagttcacccagtactgacagtgtcagcgccgcacgtgcgtgaaacgtgtgactcgcagactgaagcgacctatggtgataacggatgtaccatctagctgtggagtagtgaccctagaagctaatccgatggttccaccagtcgttgtttgccggcaaacgccacaaacggtttcgtgctttgcgtgaagaagcacggtctcttaagagttcatgtacggttgaccccgaacgaggtccgaacata

SEQ ID NO: 14957 - DNA, 520 bp, synthetic construct; identical to SEQ ID NO: 2067
  source 1..520: mol_type = other DNA

SEQ ID NO: 14958 - DNA, 338 bp, synthetic construct; identical to SEQ ID NO: 1617
  source 1..338: mol_type = other DNA

SEQ ID NO: 14959 - DNA, 959 bp, synthetic construct; identical to SEQ ID NO: 245
  source 1..959: mol_type = other DNA

SEQ ID NO: 14960 - DNA, 541 bp, synthetic construct
  source 1..541: mol_type = other DNA
ggggtgatgggaaacttacgtttcgccaacgttaaggtactgtgattttgtacttacgactcagggtcgaccttaactggtttatactctgtcgagtttgggcagatagcagagccatcaccctaggtgtggaaacatctataatgcctggcaggcatattttctgacgttcctttctttcgtgttgtttcaaacctgacaagtcactgtcaaacttaaattccaacttaaacttaaatttaaatttatattcagactaaaactttaattcaaactaacacaaaattatttaaaactttaaacttaaaatgagatttagatttagcttgcatcttactgcgaaacacgcttagagcgaaatggcggcggctgtacgcaaaatatataaaacatatatcttacgtctcacttacggcaaatgtgaaaccgcctactggtttagtggaagagtgtcggaccgtgctcccacactggcaaccgtgatgcccggcacatctcttgattgagtagggcttccctccgaatacgggacgaaataatc

SEQ ID NO: 14961 - DNA, 395 bp, synthetic construct
  source 1..395: mol_type = other DNA
ggggtgatgggaaacttgcgtttcgccaacgttaaggtactgtgattttgtacttacgactctgggtcgaccttaactggtttatactctgtcgagtttgtgcaaatagcgagactatctccccgggttacggtggatcctagtgcatggctagcacatcaccatttcatttgtcatatgaaatagctagcaactcactgcaaaataaaataaaaacttgaacagctaacatcttactgtgaaatgaaataaaaatttgataaagctagcatctcactgcaacacttaataaaataaaatgaaatgaaatatctcacgtcccactcacgtcaaatgtggaaccgccgactggtttagtcgaagagcaacagccatgctaatgctggcactccgtg

SEQ ID NO: 14962 - DNA, 369 bp, synthetic construct
  source 1..369: mol_type = other DNA
ctttctttcgtgttgtttcaagcctgacaagtcactgtcaaacttaaattctaacttaaacttaaatttaaatttatattcagactaaaactttaattcaaactaacataaaattatctaaaaccttaaactaaaaatgaaatttagatttagcttgcatcttactgcgaaacacgcttagagcgaaatggcggcggctgtacgcaaaatatataaaacatatatcttacgtctcacttacggcaaatgtgaaaccgcctactggtttagtggaagagtgtcggaccgtgctcccacactggcaaccgtgatgcccggcacatctcttgattgagtagggcttccctccgaatacgggacgaaacaatc

SEQ ID NO: 14963 - DNA, 408 bp, synthetic construct; identical to SEQ ID NO: 1799
  source 1..408: mol_type = other DNA

SEQ ID NO: 14964 - DNA, 369 bp, synthetic construct; identical to SEQ ID NO: 1697
  source 1..369: mol_type = other DNA

SEQ ID NO: 14965 - DNA, 309 bp, synthetic construct; identical to SEQ ID NO: 1511
  source 1..309: mol_type = other DNA

SEQ ID NO: 14966 - DNA, 378 bp, synthetic construct; identical to SEQ ID NO: 1722
  source 1..378: mol_type = other DNA

SEQ ID NO: 14967 - DNA, 309 bp, synthetic construct; identical to SEQ ID NO: 1512
  source 1..309: mol_type = other DNA

SEQ ID NO: 14968 - DNA, 588 bp, synthetic construct; identical to SEQ ID NO: 2156
  source 1..588: mol_type = other DNA

SEQ ID NO: 14969 - DNA, 1000 bp, synthetic construct; identical to SEQ ID NO: 253
  source 1..1000: mol_type = other DNA

SEQ ID NO: 14970 - DNA, 1000 bp, synthetic construct; identical to SEQ ID NO: 2586
  source 1..1000: mol_type = other DNA

SEQ ID NO: 14971 - DNA, 280 bp, synthetic construct
  source 1..280: mol_type = other DNA
ggttgaggactgagatgtagatttctttacaattcatttatttctattttaaatgtatgggtatatacatttaaatcatttatttaacttattatgcatacattttcacatctgtgctagtaagttagtaatctttggagaacatttcagttctctaattcatcaacgttcagttgaaatactttaataaatgaatgaaatttacaactcagtttcaatggttgaggactgagatgtagattacattcattaacaaaaacatccagaaaggagctgattt

SEQ ID NO: 14972 - DNA, 827 bp, synthetic construct; identical to SEQ ID NO: 2460
  source 1..827: mol_type = other DNA

SEQ ID NO: 14973 - DNA, 374 bp, synthetic construct; identical to SEQ ID NO: 1714
  source 1..374: mol_type = other DNA

SEQ ID NO: 14974 - DNA, 457 bp, synthetic construct; identical to SEQ ID NO: 1932
  source 1..457: mol_type = other DNA

SEQ ID NO: 14975 - DNA, 375 bp, synthetic construct; identical to SEQ ID NO: 1717
  source 1..375: mol_type = other DNA

SEQ ID NO: 14976 - DNA, 741 bp, synthetic construct; identical to SEQ ID NO: 2362
  source 1..741: mol_type = other DNA

SEQ ID NO: 14977 - DNA, 317 bp, synthetic construct; identical to SEQ ID NO: 1541
  source 1..317: mol_type = other DNA

SEQ ID NO: 14978 - DNA, 368 bp, synthetic construct
  source 1..368: mol_type = other DNA
ggggttagagaaatcttgggagatttctatcgtcatagacatgtgtgatgtacttacgtctctaggacgcctatgactggtttatactctgtcgagttgaacgtctggtggttcctacgtataagaactgcagtcttatgtgtgaaaccctacccctcgctaaccgagaacggttgtgtgatttgaggaacgttcgttgtttaaacttctttggaggaactttaaattgtattaattttgcatttgcaagagttagcccatctctaaaatgaggctatcgctgtgaacagccttaaagaccctctgggcaaactgattatgaattgagagttagacttctcggaaaaagtctggtcttgtcctagatt

SEQ ID NO: 14979 - DNA, 538 bp, synthetic construct; identical to SEQ ID NO: 2095
  source 1..538: mol_type = other DNA

SEQ ID NO: 14980 - DNA, 383 bp, synthetic construct; identical to SEQ ID NO: 1736
  source 1..383: mol_type = other DNA

SEQ ID NO: 14981 - DNA, 1000 bp, synthetic construct; identical to SEQ ID NO: 2587
  source 1..1000: mol_type = other DNA

SEQ ID NO: 14982 - DNA, 392 bp, synthetic construct; identical to SEQ ID NO: 1758
  source 1..392: mol_type = other DNA

SEQ ID NO: 14983 - DNA, 746 bp, synthetic construct; identical to SEQ ID NO: 2367
  source 1..746: mol_type = other DNA

SEQ ID NO: 14984 - DNA, 328 bp, synthetic construct; identical to SEQ ID NO: 1574
  source 1..328: mol_type = other DNA

SEQ ID NO: 14985 - DNA, 254 bp, synthetic construct
  source 1..254: mol_type = other DNA
tgcattctgattatcttacatcttttatcaaatcttttaatctttgagacattcgtctcattcaaattccaattcacagaggaattaatgttaaaacatcaactcactctcttttgtaagataacaggaagtacctgtttcattagggagaagtaagtgttttacaaagatgcagaattctcaagctcctgcatttacttctgaaacatgaagggaaacagcttgaacaaagtcactcacagaaagggggagat

SEQ ID NO: 14986 - DNA, 530 bp, synthetic construct; identical to SEQ ID NO: 185
  source 1..530: mol_type = other DNA

SEQ ID NO: 14987 - DNA, 503 bp, synthetic construct
  source 1..503: mol_type = other DNA
cagaaaggaggaatctattgtggtttgtaaaatcattaattcaaaaccacatagtcactcattaatcgccaaatcacagtggatgctgtgtactttagcgattgagtgcagaaaggaggtatatcttgacagatatacagattaagtactggggtctcaaagaaaccggtcgtcacaatctcgctggagaaagacaagcggctaatgaactgaaagagactcacaggcacaatgtcactggtgagaaagaaaccaaacgacataatcaaacctttgagggtgagacaaagagacataatgttgtaggcgaaagagaaacgcacaggcatagtgtcgtgctcgaaggtattgagaaaggtaaactcaaagaggttactcgacataacgtagcttctgagaaaattgattctggtaagttgtctgaatccaaaagacataataaggttactgaatcaatccagcagcaagatgcaaatacaaggcttcaagttgcttatacccaa

SEQ ID NO: 14988 - DNA, 323 bp, synthetic construct; identical to SEQ ID NO: 1557
  source 1..323: mol_type = other DNA

SEQ ID NO: 14989 - DNA, 259 bp, synthetic construct
  source 1..259: mol_type = other DNA
atttaaacagaaaggagggatcatctaatgagagatggatccggaaaatcaaatttacaagaacaacacgaggtaatatttcgaaactactttatcagtagcgtagaacaacttctgaatggatttcacttagtgaaattatcattaggtgatatctgtttagaggattcagattacctgaaagaagaacgtgagctatttggtcatcttgctcactatctcgtaaatgtaaaacatccagaagaaaggagatgatggc

SEQ ID NO: 14990 - DNA, 580 bp, synthetic construct; identical to SEQ ID NO: 192
  source 1..580: mol_type = other DNA

SEQ ID NO: 14991 - DNA, 480 bp, synthetic construct; identical to SEQ ID NO: 1984
  source 1..480: mol_type = other DNA

SEQ ID NO: 14992 - DNA, 803 bp, synthetic construct; identical to SEQ ID NO: 2438
  source 1..803: mol_type = other DNA

SEQ ID NO: 14993 - DNA, 445 bp, synthetic construct; identical to SEQ ID NO: 1902
  source 1..445: mol_type = other DNA

SEQ ID NO: 14994 - DNA, 613 bp, synthetic construct; identical to SEQ ID NO: 2191
  source 1..613: mol_type = other DNA

SEQ ID NO: 14995 - DNA, 486 bp, synthetic construct; identical to SEQ ID NO: 1997
  source 1..486: mol_type = other DNA

SEQ ID NO: 14996 - DNA, 433 bp, synthetic construct; identical to SEQ ID NO: 1871
  source 1..433: mol_type = other DNA

SEQ ID NO: 14997 - DNA, 388 bp, synthetic construct; identical to SEQ ID NO: 1746
  source 1..388: mol_type = other DNA

SEQ ID NO: 14998 - DNA, 458 bp, synthetic construct; identical to SEQ ID NO: 1935
  source 1..458: mol_type = other DNA

SEQ ID NO: 14999 - DNA, 494 bp, synthetic construct
  source 1..494: mol_type = other DNA
gcctatgggtggtctacataggcgagcatgcgttgctcgatatagaccgccattattggtaacacgctaaaagtgttctcatctggagaaggtgatttgccttcttccatgaggctccctggagggattgcccaataatggttgataattttggtcgctgcacgaccggggccttcgcccggggatttcatcccgttcaaggtgaggcccttgtaataacctctcgccgctgcgcggacgaatacataagctcgcccagtactgacagagtcagcgccgcccatgcgtgaaatgagtgactcgcaaactgaagcgacctatggtgataacggatgtaccatctagctgtggagtagtgaccctagaagctaatccgatggttccaccagtcgttgtttgccggcaatggccacacacggtttcgtgctttgcgtgaagaagcacggtctctaacgagtacatgtccggttggccccgaacgaagcccgattaac

SEQ ID NO: 15000 - DNA, 832 bp, synthetic construct; identical to SEQ ID NO: 2464
  source 1..832: mol_type = other DNA

SEQ ID NO: 15001 - DNA, 431 bp, synthetic construct
  source 1..431: mol_type = other DNA
cttgtatagtttacaagtattctacgaagggaggtgtagcatgttgctataccaatcgcaattttatcaagcgattaacaaaaacatcctgacgttactgactagctacatgctggcatgcacagtaggtacagtcattgtaacggatctgtggaaaggaggtaatttatatcacagatattcaggttaagtactggacattgaacgaaagtaaacgtcacaatgttagtactgagacacaagcagccaatgaattggctgaaactaggcgacacaatgtgtcgactgaaactttgggacgtgacaccctaaatgaagataaacgtcacaatgtcacaactgaaacggagagtagacgccataatgtacaaactgaacgtgaggcgaagcgtcataatgttgctggtgaagtcgaaaccaaacgacataat

SEQ ID NO: 15002 - DNA, 522 bp, synthetic construct; identical to SEQ ID NO: 2072
  source 1..522: mol_type = other DNA

SEQ ID NO: 15003 - DNA, 316 bp, synthetic construct; identical to SEQ ID NO: 1538
  source 1..316: mol_type = other DNA

SEQ ID NO: 15004 - DNA, 346 bp, synthetic construct; identical to SEQ ID NO: 1634
  source 1..346: mol_type = other DNA

SEQ ID NO: 15005 - DNA, 274 bp, synthetic construct
  source 1..274: mol_type = other DNA
taggagtaagggctataagccatcctacaaaggtaaacagagtgggaaagactctaggtcccagagagtcaacctggataatgaacgcgttagtaagtatgacagaagtgttgaggatgatatcgagaaaggttcaaaagggaaagggaagaatgatatctcagacttcaaccgcaatcctgaattattaaaatcagctggttcgctgccctttgcgactattttgggcgacaggaacttgggtgatattgatccaagttcagctccgggtatc

SEQ ID NO: 15006 - DNA, 473 bp, synthetic construct; identical to SEQ ID NO: 1969
  source 1..473: mol_type = other DNA

SEQ ID NO: 15007 - DNA, 618 bp, synthetic construct; identical to SEQ ID NO: 2197
  source 1..618: mol_type = other DNA

SEQ ID NO: 15008 - DNA, 384 bp, synthetic construct; identical to SEQ ID NO: 1741
  source 1..384: mol_type = other DNA

SEQ ID NO: 15009 - DNA, 319 bp, synthetic construct; identical to SEQ ID NO: 1543
  source 1..319: mol_type = other DNA

SEQ ID NO: 15010 - DNA, 333 bp, synthetic construct; identical to SEQ ID NO: 1591
  source 1..333: mol_type = other DNA

SEQ ID NO: 15011 - DNA, 320 bp, synthetic construct; identical to SEQ ID NO: 1547
  source 1..320: mol_type = other DNA

SEQ ID NO: 15012 - DNA, 546 bp, synthetic construct; identical to SEQ ID NO: 2108
  source 1..546: mol_type = other DNA

SEQ ID NO: 15013 - DNA, 504 bp, synthetic construct
  source 1..504: mol_type = other DNA
agccgcggaatgcgggataataagcaaaccatctgctatggagctggtctagcagacacgacaaatccagtgatggagctagtactgagaggggccggtggtgtggtaacacccaccttttgtgcctaccttcggtggaacgggttgggaattccgtaaggaccccagtaatgtccgtgcgacggggaaaagctacaacagcctgcctgtaacctgtaagggccaagggactacccagagtgtaacgactgcgaatcgtttactcagtatctaggaacagtctacttcccacaactcaattgagtttctggtcgtcgaaagccagagttaaaatcgtgggcggtgttcgaccttcacaattcttgaaaccccgtttttgcaatagatcaactattgaatattgcccggcagagtgagttaatccaacagccaccaagatactacgaacacttcacaaacttcatctattcagagagagcgagctaatccagcactctgaacatc

SEQ ID NO: 15014 - DNA, 673 bp, synthetic construct; identical to SEQ ID NO: 2277
  source 1..673: mol_type = other DNA

SEQ ID NO: 15015 - DNA, 764 bp, synthetic construct; identical to SEQ ID NO: 2391
  source 1..764: mol_type = other DNA

SEQ ID NO: 15016 - DNA, 336 bp, synthetic construct; identical to SEQ ID NO: 1607
  source 1..336: mol_type = other DNA

SEQ ID NO: 15017 - DNA, 1000 bp, synthetic construct; identical to SEQ ID NO: 254
  source 1..1000: mol_type = other DNA

SEQ ID NO: 15018 - DNA, 298 bp, synthetic construct
  source 1..298: mol_type = other DNA
ggcaataaaatctatagttggattacggacaacttgggtgttaaaagctgcgtgccttatgttatctgcatttaagttgttgtatgcatagtaaccggccattgtcgctgctaaacctccaatgatgaatttggtttgtccacttgtaatagtacgtttcgtgaactgtccagcacctcgctggaacaccgatccaacacctcgtcggatcatatagagcctgtgcattattgctacacgctcttctaccgacacttacgaggtgtaagcgtttaacgaaatttattacgaggtgtaa

SEQ ID NO: 15019 - DNA, 608 bp, synthetic construct; identical to SEQ ID NO: 197
  source 1..608: mol_type = other DNA

SEQ ID NO: 15020 - DNA, 533 bp, synthetic construct; identical to SEQ ID NO: 2090
  source 1..533: mol_type = other DNA

SEQ ID NO: 15021 - DNA, 471 bp, synthetic construct; identical to SEQ ID NO: 175
  source 1..471: mol_type = other DNA

SEQ ID NO: 15022 - DNA, 500 bp, synthetic construct; identical to SEQ ID NO: 2025
  source 1..500: mol_type = other DNA

SEQ ID NO: 15023 - DNA, 373 bp, synthetic construct; identical to SEQ ID NO: 1712
  source 1..373: mol_type = other DNA

SEQ ID NO: 15024 - DNA, 278 bp, synthetic construct
  source 1..278: mol_type = other DNA
gacctgatgtccgagctatccgctcttcgtaaagagataagtaacatcagcgtaaaaatgaataaagggacagcaccagcttccggagcaccgagggctgagcctacaggagggagagtccactcaggcagacaggtggtacaggccacacctgcgcaagaaccaaagcaagacgattctgtggtggctggacaacctgcctggaaacgacctatccaattctagttcgatgacaaccaaggttgagtgaggggactaaggagttaacagattgcgaa

SEQ ID NO: 15025 - DNA, 263 bp, synthetic construct
  source 1..263: mol_type = other DNA
cgccgcaaggcgacgaggccggggtctagcccaccccggtcaccccgacggaatcatccgtcgggggcccccccgcagctctcaagaagaactgcaagggagtccgaggtcgtctggaaacagaccccttgggcgcaaccctagcatggcttcggagggccgcccggctgcctgccttcataggccagcagccggacaacttccggattgccaggcgtgggccgaggtctggtggctccacccgagcggtttcccgctcggtt

SEQ ID NO: 15026 - DNA, 928 bp, synthetic construct
  source 1..928: mol_type = other DNA
aggatcctatacccccttgtttgggtggtatgtgattccccatgcatgctggttacatgcatgtagagtgtatggttttattgcgctccatacggaagcaatcatggacgggctttcgcctctaaccattatcttccttatgcgccgcctttgaagaaggtgagcataacaggttggttagtcgcagacgtcacagtacccatgtcctctatacgttagaagttatagagggagaactatcggaacacctacaaatgatgtggaaaggcaatgttgacccaaagtggcgcatcctttacgtatcattaaaatataacagtgttatatgttatacaattattactaattgtataatatataataatctatatattaataaccaaaactagttaatatctatcagaatgacagatatcaacaccgttttgcagaacgtacaatctgctcaatcacctaaagcactagccgaggcccttggtattcgccctgggacaaaaggactcgatgacctatacgaacaccgtgaggtgtggtataagttcatcgaggctgttgtccaggcggataacgaaggctcggttagcgctttaggccgcagcatgcaccctattcaggctcttgtttcgaagaccatcgctggtcacaaaacaagcgcccagatagggagcatgactgcagatcaaatcagggcaatattggctaagattgagaaggaagagggaaaataatgtggtgacacattatttcctttcttctctctcaacttagtcagtatggccttgaaatggtccatcttttacgctgggtacggcatgcccagtatcatataaaggtcactttaaaagtggtctttatatgaagctgcattttccacatcattcggttaccgagtatccttacattatacagtttgatttattaattagtc

SEQ ID NO: 15027 - DNA, 433 bp, synthetic construct; identical to SEQ ID NO: 1872
  source 1..433: mol_type = other DNA

SEQ ID NO: 15028 - DNA, 268 bp, synthetic construct
  source 1..268: mol_type = other DNA
cttggttttcggtcctgtgcggatgttcaacaggtcagtacgtgaataatgggccagtaccacctcgctattttttatgcgcagcgtgacctaccggatttcttgtaaaaattttttcttttctaaaaaaaaattatagtatatccagcggttgtttgtctttgatttcttctcgcagttctccgtcaaaaaagaactgaaaagaataccaggtacaatagcataattaggttaatgggtctaaaaccgagtatgcgttgatttacgt

SEQ ID NO: 15029 - DNA, 624 bp, synthetic construct; identical to SEQ ID NO: 2205
  source 1..624: mol_type = other DNA

SEQ ID NO: 15030 - DNA, 321 bp, synthetic construct; identical to SEQ ID NO: 1550
  source 1..321: mol_type = other DNA

SEQ ID NO: 15031 - DNA, 635 bp, synthetic construct; identical to SEQ ID NO: 2220
  source 1..635: mol_type = other DNA

SEQ ID NO: 15032 - DNA, 510 bp, synthetic construct; identical to SEQ ID NO: 2046
  source 1..510: mol_type = other DNA

SEQ ID NO: 15033 - DNA, 559 bp, synthetic construct; identical to SEQ ID NO: 2124
  source 1..559: mol_type = other DNA

SEQ ID NO: 15034 - DNA, 394 bp, synthetic construct; identical to SEQ ID NO: 1763
  source 1..394: mol_type = other DNA

SEQ ID NO: 15035 - DNA, 468 bp, synthetic construct; identical to SEQ ID NO: 1958
  source 1..468: mol_type = other DNA

SEQ ID NO: 15036 - DNA, 388 bp, synthetic construct; identical to SEQ ID NO: 1747
  source 1..388: mol_type = other DNA

SEQ ID NO: 15037 - DNA, 263 bp, synthetic construct
  source 1..263: mol_type = other DNA
tggacgagccacgacggacgcatgcgggtaggtactacctaccgcagcgcgcgtacgggtgtggagccgtggcccccctgagggggtccaggcatccaaagaggaagcttgcgcccccccttgtaacccggagaaaggagatagaggtacggaggaatgaggcagctgcagagcagcgcctgaccaacctcgcggccgttgcgatcgtgcctggtgaacgagaggtctcgcttagcgcagaagacgtgcgcgccattgaccgg

SEQ ID NO: 15038 - DNA, 716 bp, synthetic construct; identical to SEQ ID NO: 2328
  source 1..716: mol_type = other DNA

SEQ ID NO: 15039 - DNA, 779 bp, synthetic construct; identical to SEQ ID NO: 220
  source 1..779: mol_type = other DNA

SEQ ID NO: 15040 - DNA, 801 bp, synthetic construct; identical to SEQ ID NO: 2434
  source 1..801: mol_type = other DNA

SEQ ID NO: 15041 - DNA, 705 bp, synthetic construct; identical to SEQ ID NO: 2311
  source 1..705: mol_type = other DNA

SEQ ID NO: 15042 - DNA, 724 bp, synthetic construct; identical to SEQ ID NO: 211
  source 1..724: mol_type = other DNA

SEQ ID NO: 15043 - DNA, 515 bp, synthetic construct; identical to SEQ ID NO: 182
  source 1..515: mol_type = other DNA

SEQ ID NO: 15044 - DNA, 743 bp, synthetic construct; identical to SEQ ID NO: 213
  source 1..743: mol_type = other DNA

SEQ ID NO: 15045 - DNA, 891 bp, synthetic construct; identical to SEQ ID NO: 2522
  source 1..891: mol_type = other DNA

SEQ ID NO: 15046 - DNA, 664 bp, synthetic construct; identical to SEQ ID NO: 2262
  source 1..664: mol_type = other DNA

SEQ ID NO: 15047 - DNA, 864 bp, synthetic construct; identical to SEQ ID NO: 2500
  source 1..864: mol_type = other DNA

SEQ ID NO: 15048 - DNA, 736 bp, synthetic construct; identical to SEQ ID NO: 2356
  source 1..736: mol_type = other DNA

SEQ ID NO: 15049 - DNA, 877 bp, synthetic construct; identical to SEQ ID NO: 2509
  source 1..877: mol_type = other DNA

SEQ ID NO: 15050 - DNA, 506 bp, synthetic construct; identical to SEQ ID NO: 2035
  source 1..506: mol_type = other DNA

SEQ ID NO: 15051 - DNA, 251 bp, synthetic construct
  source 1..251: mol_type = other DNA
cctccctaaaaggagggtatccggtagaaccgcggcattaaattctgtggattctatctgtaaaaagcgcaacgctgtactttctaccctttatgggtgatccgtactaatctttaagctgatatatcttaaaggatatttgcgattactatggtattgaaatttaaataccacttacaatcataataagggctactccgtaacagaagtagactctcattggggtttgcaccctctctaaaactgctttg

SEQ ID NO: 15052 - DNA, 781 bp, synthetic construct; identical to SEQ ID NO: 221
  source 1..781: mol_type = other DNA

SEQ ID NO: 15053 - DNA, 322 bp, synthetic construct
  source 1..322: mol_type = other DNA
ggcaattctaggatgtatcctccggttgaaaacgcttgggaaaggtgggagtgtaggacaagaaggcgtgatgtagggctaggaaactggttaaaggagtgtgttgggtttgaggggggcatgcggtcaccggcagagataaagaattgccgcgctgcgatcaccgtgagatgccttgttcctcgaaatggtagagtaaggaaaggatcctgcccgatctgcagtatttagctacagttctcaccgtgagatgccttgttcctcgaaataggtaggaatccgaaaggaccctgcccgatctgcagtatttagctacagttct

SEQ ID NO: 15054 - DNA, 280 bp, synthetic construct
  source 1..280: mol_type = other DNA
gtcaacggacaatttttctcccctacgggagtaaaaaatgcacgatccagagttcgctccggttcggtgatgtttacgtacatcacatacggccaattctcgtatggcaatccgtcctggttatccacaccaggcagtggtggtctgactccactcgagagtaaactcgatgaaatcacgttaggagacgttctcaaaccagattggtggtttgtaaaaaatcctcggcgaaggcgactgcagctagaaacggcagaagaaaaccttgaattaactcacg

SEQ ID NO: 15055 - DNA, 674 bp, synthetic construct; identical to SEQ ID NO: 207
  source 1..674: mol_type = other DNA

SEQ ID NO: 15056 - DNA, 335 bp, synthetic construct; identical to SEQ ID NO: 1601
  source 1..335: mol_type = other DNA

SEQ ID NO: 15057 - DNA, 262 bp, synthetic construct
  source 1..262: mol_type = other DNA
tcagcgtcgccgctgtcccggttttagagacttgtaacctgtctatgtctcgaaagactggagcggatggtaaacgctacgcaagtggcacctggcccctggtggatttagcgcttacacaccctgaacaaaaggaaaacgcacccgtcgaccacttcgaaagtggtaccctacaggtggggcggagaacatactccgtaaagaaagtcactgtccgtgggagacaacccgtgggacataaaataacaaaaacaagacaaaa

SEQ ID NO: 15058 - DNA, 481 bp, synthetic construct; identical to SEQ ID NO: 1986
  source 1..481: mol_type = other DNA

SEQ ID NO: 15059 - DNA, 308 bp, synthetic construct; identical to SEQ ID NO: 1507
  source 1..308: mol_type = other DNA

SEQ ID NO: 15060 - DNA, 504 bp, synthetic construct; identical to SEQ ID NO: 2032
  source 1..504: mol_type = other DNA

SEQ ID NO: 15061 - DNA, 611 bp, synthetic construct; identical to SEQ ID NO: 2189
  source 1..611: mol_type = other DNA

SEQ ID NO: 15062 - DNA, 256 bp, synthetic construct
  source 1..256: mol_type = other DNA
ggacgaaacgtgctggcacgtcgataaaaaaacaaaaatgccaaaaccagcaccgtcgggagtgggatttaataagtgcgatctataagttggaaaaactgcatattaaatcaaccaccctgaggagtaccttgaaataggacgaaacgtgctggcacgtcggtggaaaagatttacagatacaagaattcacaccagcaaggcagataaacgtagttgagtcaattgataatatactacgaacaaactaaacacg

SEQ ID NO: 15063 - DNA, 343 bp, synthetic construct; identical to SEQ ID NO: 1628
  source 1..343: mol_type = other DNA

SEQ ID NO: 15064 - DNA, 393 bp, synthetic construct
  source 1..393: mol_type = other DNA
cttgaattactctgaaacactaagtctattgtctttgcactagtattcaaggcgttgtaaccctcaccagggattgtaacttctatgcacctaactgtttggttatcgacttaatctgttgtctgtgttcttagccacttgagtgtatgcgttttaaccctcgccagggatatttcctactgctaaccaaattgtttgctcttacttgttactcttggcttaagctcgtgtctatattcttaagctcttgggagtatgcgttttaaccctcgccagggatatcctttcagggatattttctatttctaactagattgccttatctcgtttgtactgcacttgttagtaacttagaataagaaactaatcggattcccaatttcgttcttattc

SEQ ID NO: 15065 - DNA, 293 bp, synthetic construct
  source 1..293: mol_type = other DNA
gataaaaacaaaaaatccctaggcatggcaagaaaactaagaacaatgcagtttgaatagatttaaaaacaattaatttgtttaatttaatttaacatttgaactgtctggcacagttagactgtcgagccgtctgatgagtagcacctcagggtcacgaaacgctggacgtaacggcggaacagattattgaggttagtagaacactttcagaacacaacaacacaacaaacaaatacaacacaacaacacaacacaacaacacaacacaacaacactgtcaaacaaacaag

SEQ ID NO: 15066 - DNA, 807 bp, synthetic construct; identical to SEQ ID NO: 222
  source 1..807: mol_type = other DNA

SEQ ID NO: 15067 - DNA, 778 bp, synthetic construct; identical to SEQ ID NO: 2404
  source 1..778: mol_type = other DNA

SEQ ID NO: 15068 - DNA, 307 bp, synthetic construct; identical to SEQ ID NO: 1501
  source 1..307: mol_type = other DNA

SEQ ID NO: 15069 - DNA, 635 bp, synthetic construct; identical to SEQ ID NO: 2221
  source 1..635: mol_type = other DNA

SEQ ID NO: 15070 - DNA, 387 bp, synthetic construct
  source 1..387: mol_type = other DNA
aaaaaagaagaaaaggggaaagcgtcttgacacggaggcctttcttccttggggcttcttttttggcaatggtaatgtccatgccttctcgcagcttgctgcgagcggacatgggttcgagagggttttatagttacatgcgtctttgacaattgtagctttctaaaatatccatctcggccattgtgtttattactccagcaacgatcactaaacttgcacgctctctcctccagcgtatcctggtcgcaccttcgcttctagcaacggtgtgttcttttctgcgcttgttttcaggtagagtgttcactagcagcggtaagtgcgtgcgcgattgtttagtttctgcccgtagccctagtttctaacgacggcagcgtagcggtg

SEQ ID NO: 15071 - DNA, 765 bp, synthetic construct
  source 1..765: mol_type = other DNA
ccagtgtagtagggggcaggaaagaacgaagcacgtgcttatcggtttggctcacccaacttgggcgaaatcgtagcgtgtggatactcaaagtgtcaaggtacagtcaacatgcaaacacgactagtaccgaaaactcccacaaactttgaggcctactacagagcgtacaagtgctagggtagaaagagctggggctataacccccggatctcttatcaggccagcaccgctcagcccctctttttgtgtaaatcccacccggtctagcggagtgggacgcatataaaatgagcgtgtaacatcgctcaacccgtccaagcacatgacactaaactgtactcgcccaggatatggcgttaaactgtaccgtccgcgtttgccagcggttaaaacaacggcttttcatcacagccgcgtgcgagtccgcgggataataaatgttctaacagactcgaaaagacatcctattttcaagttctcgtcgctacgttaaacgtcggcatttcttggatctggtggggtaacatacaagtcaagtatggtgtgaaccggggctacacaactaccgggaagctaacgtaactgcgctggtgctctactttcaacgtgcttcaggaccgaaaccgtccgtaaaccaatgggttgcacagaaagtaaaggcgtagggaacgtgcctaggacaagaactaggtggacagactgacactcatcagtgctttctcgattgaaagcagtagcaaacagtcggtgcgggaactccgc

SEQ ID NO: 15072 - DNA, 539 bp, synthetic construct; identical to SEQ ID NO: 2100
  source 1..539: mol_type = other DNA

SEQ ID NO: 15073 - DNA, 619 bp, synthetic construct; identical to SEQ ID NO: 198
  source 1..619: mol_type = other DNA

SEQ ID NO: 15074 - DNA, 452 bp, synthetic construct; identical to SEQ ID NO: 1920
  source 1..452: mol_type = other DNA

SEQ ID NO: 15075 - DNA, 729 bp, synthetic construct
  source 1..729: mol_type = other DNA
gtcaaaaaagcccccctccgtcaggagggtgcgtgctttttctgactcgactgcactgtcgatcaacgagtgcgctagaacgatcagaacggttcaactgaacctagtaggacgttcggctgatacacttttacccctccatatctgggggggtgatgtgtattgcggacgaaggaggggccaccatcagtctgcgcggccgaaagcgcgctcatgttcgtatgtgtttgtatgcgttcgtctcttgtctcacagcttttcttgaaatatgttaaattatatatgccacaaaaaacataaattatgaaaaattgtctacccgcactggagcctcctcgaggcgtcagatggtaacgctcgttttagacgagtggcgaatgccagtgcacggcggcctagtccactccccccagtccacgatgattcgaaattgtcgcgtgtgctggcgggctaggtgttaatcctcagggtccgcgaccggccattccagcgtaccaattttacgggagctccgtgcctccacctcccagtggaggagcgaggagacctgtttttgcgatcggttggaggctagcctagtaactccgcgcacgagtagtagttcgccttttcgcgacgtggcttggtaccccgtgcctcatctttagggatgaggagcgaggggtgctgggcctaggtcccaagaggttcgagcgagtccacagactgcacaggtttccagggtcgcgg

SEQ ID NO: 15076 - DNA, 455 bp, synthetic construct; identical to SEQ ID NO: 1926
  source 1..455: mol_type = other DNA

SEQ ID NO: 15077 - DNA, 391 bp, synthetic construct
  source 1..391: mol_type = other DNA
tacatagtgactactttacaatcaaagcctaaacaggcattactataaaagaaccgtcgtgttagcattgtgtttggctaacatcccaacgatagttggcgacattgaactgagagcaacatacgttaccaattcgattatcgttcaaaaagctctgggcaggaatttgaaaaatcaaacttcctgctaaagttaaacacacaaaccttatttttattttcctaatttaacgtttacgttattttatgtcagttgttcgtttgatagaagaagttgaagaaaacagtgaagaaatacatccgtttcaacaacgattacaagaagcaagtacaaattttcaattacgtcgatcaaattacccaataggcactacaagattatacaatcaaca

SEQ ID NO: 15078 - DNA, 559 bp, synthetic construct; identical to SEQ ID NO: 2125
  source 1..559: mol_type = other DNA

SEQ ID NO: 15079 - DNA, 924 bp, synthetic construct
  source 1..924: mol_type = other DNA
tttccattttaaatacatcttcggtactttagggctctcctttaatgttcttgccttgttaactcaccaccattactgcacccctatcttatcagagtgactcggttacttagatgttctacttaaccttgccccttatggcaacaggaaaagttccaaaactgctcgttccgggagattcccatccggtaaaaacccaagaccacactcaacatccggagtgtctaaacccaaggacgaccattgataatatttgtaaaattcatttcaacgtacttattttaaagcatcaagcgtcattatgtcagttgattaattagtttcactgattaattgagataacaaacaacttcctaaatttattttaagtgttttgagttgaagttcacaaatattatgcgatcatattactaatcaccgcctatttccatatcttccgatgaattccgtacaggaatgtaataatttttgttatttgtatttaatttataactttgatctatgctcatcccaccgtttagccattattaggttctgttatgaaactagtaattattgtttgaaaaccagtagttccagcgcgtcgtggcctattgacccccaaacaaagtctttgtctttccccaaaggtttggtcacctataagtctggctctaacatcgagtacagcaagtctgcccaacatttgttgcatctgactctgggggcaacaaatgtggcgggataaagttacaaacctgataacacaggtagctttagcacaaaaccccacattcccacccgagtaatgtcaattttattattttatgcactttataactatgttatggcaaatttattataaaaatgtattttaactatccaccttcttctttcacctttactgtcgaaactcttttccagtcaagaaaatcttaatgaaaa

SEQ ID NO: 15080 - DNA, 410 bp, synthetic construct; identical to SEQ ID NO: 1800
  source 1..410: mol_type = other DNA

SEQ ID NO: 15081 - DNA, 843 bp, synthetic construct
  source 1..843: mol_type = other DNA
ccctatcttatcagagtgactcggttacttagatgttctacttaaccttgccccttatggcaacaggaaaagttccaaaactgctcgttccgggagattcccatccggtaaaaacccaagaccacactcaacatccggagtgtctaaacccaaggacgaccattgataatatttgtaaaattcatttcaacgtacttattttaaagcatcaagcgtcattatgtcagttgattaattagtttcactgattaattgagataacaaacaacttcctaaatttattttaagtgttttgagttgaagttcacaaatattatgcgatcatattactaatcaccgcctatttccatatcttccgatgaattccgtacaggaatgtaataatttttgttatttgtatttaatttataactttgatctatgctcatcccaccgtttagccattattaggttctgttatgaaactagtaattattgtttgaaaaccagtagttccagcgcgtcgtggcctattgacccccaaacaaagtctttgtctttccccaaaggtttggtcacctataagtctggctctaacatcgagtacagcaagtctgcccaacatttgttgcatctgactctgggggcaacaaatgtggcgggataaagttacaaacctgataacacaggtagctttagcacaaaaccccacattcccacccgagtaatgtcaattttattattttatgcactttataactatgttatggcaaatttattataaaaatgtattttaactatccaccttcttctttcacctttactgtcgaaactcttttccagtcaagaaaatcttaatgaaaa

SEQ ID NO: 15082 - DNA, 748 bp, synthetic construct; identical to SEQ ID NO: 2371
  source 1..748: mol_type = other DNA

SEQ ID NO: 15083 - DNA, 352 bp, synthetic construct
  source 1..352: mol_type = other DNA
cgtcgcaactcgcaattcgcgccccacgtagcgggctacgtggttccgctttcgtcaagcgtttagtataaaagctaaaatacgtcagacctctcgactcgtgacacagtctagctcgtcagccgccgcgtttcggcgttcctggggtgaaaaagcggttatactagtctggggagggttccgttgatccagctttagtatagtcgatggtctttcgtcaatactttcgtcgccgatacctccaatttgtcaacaacggattcacttaaattacaaactaaataaaatataaaacatattaaaataggaaaacaaaaaaaacacatacacgtctacgtagtgagtgatcaac

SEQ ID NO: 15084 - DNA, 685 bp, synthetic construct; identical to SEQ ID NO: 2291
  source 1..685: mol_type = other DNA

SEQ ID NO: 15085 - DNA, 762 bp, synthetic construct; identical to SEQ ID NO: 2389
  source 1..762: mol_type = other DNA

SEQ ID NO: 15086 - DNA, 459 bp, synthetic construct; identical to SEQ ID NO: 1938
  source 1..459: mol_type = other DNA

SEQ ID NO: 15087 - DNA, 357 bp, synthetic construct; identical to SEQ ID NO: 1659
  source 1..357: mol_type = other DNA

SEQ ID NO: 15088 - DNA, 504 bp, synthetic construct; identical to SEQ ID NO: 180
  source 1..504: mol_type = other DNA

SEQ ID NO: 15089 - DNA, 411 bp, synthetic construct; identical to SEQ ID NO: 166
  source 1..411: mol_type = other DNA

SEQ ID NO: 15090 - DNA, 348 bp, synthetic construct; identical to SEQ ID NO: 1640
  source 1..348: mol_type = other DNA

SEQ ID NO: 15091 - DNA, 460 bp, synthetic construct; identical to SEQ ID NO: 1939
  source 1..460: mol_type = other DNA

SEQ ID NO: 15092 - DNA, 486 bp, synthetic construct; identical to SEQ ID NO: 1998
  source 1..486: mol_type = other DNA

SEQ ID NO: 15093 - DNA, 393 bp, synthetic construct; identical to SEQ ID NO: 164
  source 1..393: mol_type = other DNA

SEQ ID NO: 15094 - DNA, 339 bp, synthetic construct; identical to SEQ ID NO: 1618
  source 1..339: mol_type = other DNA

SEQ ID NO: 15095 - DNA, 288 bp, synthetic construct
  source 1..288: mol_type = other DNA
gttatttttattcaaagactgtttgagctacaacctgaacctgcttgactagattgcgcgacgatttattcaacacaagcatttatcagtacttagtttctttcaaccgcaattcaaaatagtaaaataagtattttgatttattccattataccatttagttataataccgtgactttgggacaattattagttattaagcgtaaacatagtatttgaggatcattcaacttaatatatacattacttaaaacattctacttaatctacatatttactgttctcgaa

SEQ ID NO: 15096 - DNA, 956 bp, synthetic construct; identical to SEQ ID NO: 244
  source 1..956: mol_type = other DNA

SEQ ID NO: 15097 - DNA, 1000 bp, synthetic construct; identical to SEQ ID NO: 2588
  source 1..1000: mol_type = other DNA

SEQ ID NO: 15098 - DNA, 774 bp, synthetic construct; identical to SEQ ID NO: 2399
  source 1..774: mol_type = other DNA

SEQ ID NO: 15099 - DNA, 323 bp, synthetic construct; identical to SEQ ID NO: 1558
  source 1..323: mol_type = other DNA

SEQ ID NO: 15100 - DNA, 534 bp, synthetic construct; identical to SEQ ID NO: 2092
  source 1..534: mol_type = other DNA

SEQ ID NO: 15101 - DNA, 608 bp, synthetic construct; identical to SEQ ID NO: 2187
  source 1..608: mol_type = other DNA

SEQ ID NO: 15102 - DNA, 378 bp, synthetic construct
  source 1..378: mol_type = other DNA
ggaatttgaaagaaatcaatactcatgaattcattctgagtaaactgagcctcaaggcaaaagtcaatagaacaaaagtgccgatgttttgcggatggaggttgtgttgtgacggcctcatcaaggaaccttgtttgatatacgagaggttgcaagttgcaattgagaatgggagactgatggatgtgatagactcatattttctggaattttcattcgcctacaaattaggtgagaggctctattcacatcttgaaattgaacagctgaattatcatcaagttttaacaaggttctttataaggaacaagcatctgttgagaggtgattcaaggcataacatctcagagctcgagtggctttcagacgaggatggcg

SEQ ID NO: 15103 - DNA, 401 bp, synthetic construct; identical to SEQ ID NO: 1782
  source 1..401: mol_type = other DNA

SEQ ID NO: 15104 - DNA, 435 bp, synthetic construct; identical to SEQ ID NO: 1875
  source 1..435: mol_type = other DNA

SEQ ID NO: 15105 - DNA, 1000 bp, synthetic construct; identical to SEQ ID NO: 255
  source 1..1000: mol_type = other DNA

SEQ ID NO: 15106 - DNA, 298 bp, synthetic construct
  source 1..298: mol_type = other DNA
aaacatcaacttctatactatccaatactttacattgtcgaggattggacagatggcccaactcacctacaggagtccattagaagttgatgtttcgttttacgatgctagtgctcaagctgcaatagctactacttcagctaatcactatgccaatagcgagagggagaatttcaaatacttttcctatcacttgcggcctgaggctaagaagaagctatctacagctggattatatttaagtcctttttcttttaccccacattcacacccagtttgtaagactttagaaaattat

SEQ ID NO: 15107 - DNA, 936 bp, synthetic construct; identical to SEQ ID NO: 239
  source 1..936: mol_type = other DNA

SEQ ID NO: 15108 - DNA, 705 bp, synthetic construct; identical to SEQ ID NO: 2312
  source 1..705: mol_type = other DNA

SEQ ID NO: 15109 - DNA, 922 bp, synthetic construct; identical to SEQ ID NO: 2539
  source 1..922: mol_type = other DNA

SEQ ID NO: 15110 - DNA, 531 bp, synthetic construct; identical to SEQ ID NO: 2088
  source 1..531: mol_type = other DNA

SEQ ID NO: 15111 - DNA, 269 bp, synthetic construct
  source 1..269: mol_type = other DNA
agtcagcaaaagaagaggacacagagttgatttttggtaaggtgtttggtgggacaatcagaggtgaaatcatttgttttgagaaggaagtggaggagcttttaaggagtcattcagccaactttcatcacccttgtgatcttcgtggtgctgagtttgacgacgtgactttcatctctgctcgcaccgaccttcaagagatagttggacctgatttgtatgtggtactaaccagggctaagaaaagcctcacaatactgcagccataa

SEQ ID NO: 15112 - DNA, 848 bp, synthetic construct; identical to SEQ ID NO: 2478
  source 1..848: mol_type = other DNA

SEQ ID NO: 15113 - DNA, 411 bp, synthetic construct; identical to SEQ ID NO: 1804
  source 1..411: mol_type = other DNA

SEQ ID NO: 15114 - DNA, 483 bp, synthetic construct; identical to SEQ ID NO: 1989
  source 1..483: mol_type = other DNA

SEQ ID NO: 15115 - DNA, 466 bp, synthetic construct; identical to SEQ ID NO: 1952
  source 1..466: mol_type = other DNA

SEQ ID NO: 15116 - DNA, 640 bp, synthetic construct; identical to SEQ ID NO: 2228
  source 1..640: mol_type = other DNA

SEQ ID NO: 15117 - DNA, 862 bp, synthetic construct; identical to SEQ ID NO: 2496
  source 1..862: mol_type = other DNA

SEQ ID NO: 15118 - DNA, 748 bp, synthetic construct; identical to SEQ ID NO: 2372
  source 1..748: mol_type = other DNA

SEQ ID NO: 15119 - DNA, 295 bp, synthetic construct
  source 1..295: mol_type = other DNA
gtggctttttcccttgtctttagtctgatcagctaaagagagtatcttgtcatctcgttgccaagactttgatcaaacctccttcctctagttcatcaccttccttctctcagtctgagaggaatattgccgtcacttggtgtcgcggccgacaacctatctgcaagagagagctcagtgtgtaatcctgtggctcgtcgccctctcgctctcatccccttattcttgttgtctcctcaccctccagcatcatcaccatcatcattcgcttcactggcccctccagtctcccacc

SEQ ID NO: 15120 - DNA, 413 bp, synthetic construct; identical to SEQ ID NO: 1809
  source 1..413: mol_type = other DNA

SEQ ID NO: 15121 - DNA, 1000 bp, synthetic construct; identical to SEQ ID NO: 2589
  source 1..1000: mol_type = other DNA

SEQ ID NO: 15122 - DNA, 389 bp, synthetic construct; identical to SEQ ID NO: 162
  source 1..389: mol_type = other DNA

SEQ ID NO: 15123 - DNA, 278 bp, synthetic construct
  source 1..278: mol_type = other DNA
aacatctgcgacgacaaaacaaagtaaagaaaccaggcgcatctcgtgcgccttacacaccccattccgtgaccacccgattttagcagtcgcaggctattgcgtgtttgcaaagacacattcggaccactttgggacgtctaagcgctgcatcccgttgtgtttcaactctcggtcagaaaccgactccgttgacacagtctcgggctccaccgctttttcacatacggttcacacaccgtcttagcgagacctaaactcgccttcatagacggctc

SEQ ID NO: 15124 - DNA, 366 bp, synthetic construct; identical to SEQ ID NO: 1688
  source 1..366: mol_type = other DNA

SEQ ID NO: 15125 - DNA, 622 bp, synthetic construct; identical to SEQ ID NO: 2201
  source 1..622: mol_type = other DNA

SEQ ID NO: 15126 - DNA, 1000 bp, synthetic construct; identical to SEQ ID NO: 2590
  source 1..1000: mol_type = other DNA

SEQ ID NO: 15127 - DNA, 445 bp, synthetic construct; identical to SEQ ID NO: 1903
  source 1..445: mol_type = other DNA

SEQ ID NO: 15128 - DNA, 348 bp, synthetic construct; identical to SEQ ID NO: 154
  source 1..348: mol_type = other DNA

SEQ ID NO: 15129 - DNA, 381 bp, synthetic construct; identical to SEQ ID NO: 1732
  source 1..381: mol_type = other DNA

SEQ ID NO: 15130 - DNA, 975 bp, synthetic construct; identical to SEQ ID NO: 2562
  source 1..975: mol_type = other DNA

SEQ ID NO: 15131 - DNA, 662 bp, synthetic construct
  source 1..662: mol_type = other DNA
ttatgttaacggccattcagaattaatgtatgaacttgtattaaatggattaggacaggatttgaaaatggaaacgaacaacctccttccacagtcagcgtacaacccaacttgtccgctaactgtcgaagaaaataatgtacaattgagtgattcagaatcgaatatgagcaagcatgaatttgtgattattatgagtgaaatgattgacaccctgaaagacgaaaagaaaactagcaacgcatatgatcgtttggctagtaagattattgattcacttttatggaaattgttcaaaatatttactatactcgtattgattgtatgtgtgattgttagtgcctatggcacatattactattttataagggaagatgtcgacaacgtatatactagatttgtcggttatcttgatcattttgtgacattgattacgaaacttgttgaattgattgaaaagctttacactctgctagttgattttggagaaggtgcagagaaggtcgttcatgacatgaaaacacaggttcttagtagtgatgatgccatggatgctatattcctagccatcaattgattgatagtgtacttaaattaatatttgtatgtgtaatgtaattatttgattgattaattatttgattgtttattaaatatttgat

SEQ ID NO: 15132 - DNA, 291 bp, synthetic construct
  source 1..291: mol_type = other DNA
ctttcggcagcacgtgcatcttcgacgttttgaataatcttgttctccatctccacctcggtgaggattaggggcaagatatattaaaacgtcgaagatgcacgtgctgccgaaaggcataaccaacgtcttaaaaacgctatcgctcttgattttgatctcaccgagactgacttacagttcttggaaagtatctacaaaccgataagatttagacctggtaaaaaaccatgcactgcacatcccatagccgccgcgcatcagcggtttgcttacaatcaatttaagcaa

SEQ ID NO: 15133 - DNA, 826 bp, synthetic construct; identical to SEQ ID NO: 2458
  source 1..826: mol_type = other DNA

SEQ ID NO: 15134 - DNA, 946 bp, synthetic construct; identical to SEQ ID NO: 2550
  source 1..946: mol_type = other DNA

SEQ ID NO: 15135 - DNA, 445 bp, synthetic construct; identical to SEQ ID NO: 1904
  source 1..445: mol_type = other DNA

SEQ ID NO: 15136 - DNA, 522 bp, synthetic construct; identical to SEQ ID NO: 2073
  source 1..522: mol_type = other DNA

SEQ ID NO: 15137 - DNA, 357 bp, synthetic construct; identical to SEQ ID NO: 1660
  source 1..357: mol_type = other DNA

SEQ ID NO: 15138 - DNA, 1000 bp, synthetic construct; identical to SEQ ID NO: 2591
  source 1..1000: mol_type = other DNA

SEQ ID NO: 15139 - DNA, 1000 bp, synthetic construct; identical to SEQ ID NO: 2592
  source 1..1000: mol_type = other DNA

SEQ ID NO: 15140 - DNA, 623 bp, synthetic construct
  source 1..623: mol_type = other DNA
cgcaaagtgtaccttggtgcatagtatagccatttggcgacgggatttcccggaaaatcgaggcatttgcctctggccatttggccctaagtgtttagtgtgtgtaggaaagtttgtcgcttatttccgagcacatgtatgagttgtatataataggtctcgtaactggggcggcccttgttggactagcgtggtttataacgacgcgcgtgcagcattggctcattgtgcgaggactaccggcccacgtcggggatcttgagttacctagcgaatccggcatcggatattcgctgagttctttcgatctcgactcggttgatgattaggttgtaagccttttggcgtcttagttttcggcctttcggcgtttagttgtaagtctgacccgtttgggcctttagttataagttgcctcttttggcttattgtaagtttccctttcgggttagttttaagccttttcaggtcttaggttctaggtccattggattttctattgtagctttttagcttttgttttgtgcccccttttggggccgacccacgtttggcgtggcttatctttatgtttgcttaattgtaggttgcgccgacttaagtcggcgcgttgtagatttaag

SEQ ID NO: 15141 - DNA, 374 bp, synthetic construct; identical to SEQ ID NO: 1715
  source 1..374: mol_type = other DNA

SEQ ID NO: 15142 - DNA, 781 bp, synthetic construct
  source 1..781: mol_type = other DNA
ctggcaacaaatgtcacgggtgcgttcgtggaagacgtaaaatctctaatagactattatatcgctagggctaattttactaacactaccatagattacgataagttgagcgaagttctatcgaatgtaaaaattaacgtaaccactacgcagtctaaaccgtcgttttcttactaccgccggcttatagattactatattgaccacgactacaatatcacacaccatatttttggtggcggttctatagttggtgataggactaaaaggtttacgttcgctggattgttcgagagctccattcttgccatagttagaccgattttacatataatacacgaatttttcttggaatttattgaacccttattagaacgtttgatagatatattcgcaaaaataacattaccattagttaaaacaatatttacattttcaaaaactttgttcgaacacatatacaattacataatcgaaaacgtacctgaacagacattgatagactttttcgaaagatttttaaaatttttatacagaatattgcatgttgttgttgaaaaatttgtagacattctaataaacactaacactacacataaaatttttgagtttgttgcactatatttaattctgttttactattttaaagcatatttcttatcattaattatcacaatagtaacttttgtaatcattggcatagaacgcaccgacgaacataccataatggttatattaatttttacttttctattgattcgctgctacactaacccacgaa

SEQ ID NO: 15143 - DNA, 290 bp, synthetic construct
  source 1..290: mol_type = other DNA
aaagaacggtacgaagcactcaactcattcttttatttataaagatacatctttgcattttgccttttctgctcgtttcatgaatgatcatgtcgttaatgttgatttgcttggcaaagaaattcattcgttgctcaaggggttacttgctattgagattttgattgaaggggcacccaacaagtgtgtcaatctctttgactataaacacagagtgccacgtgagcatctgtggtttagtcaacatgttgggcggacatagtctgttttgattcttcagttttatcaca

SEQ ID NO: 15144 - DNA, 1000 bp, synthetic construct; identical to SEQ ID NO: 2593
  source 1..1000: mol_type = other DNA

SEQ ID NO: 15145 - DNA, 514 bp, synthetic construct
  source 1..514: mol_type = other DNA
tgaacttacctggatcccagcgcgagctatacaggtgttgcatgatctccttctggacgtaaatgcatttagtggatactgggatgtaccacgcttgtattggttcgtactgtgatatggtatgttcttctggggatttgttatttgaatttaccattttgacatagacttaaatggttctcaaccttcatcggcagttacagctacgcttcggcccagactgtatttggtggtacctggaatgcccacacctttgaagacagtacctgagagtcatatgtttcgattgtgtatattcattttacaattctcattacttgaactgtgccatattttacgtgtatgggatggtccttaaccttcatcggcagttacagctacgcttcggcccagactgtatttggtggtacctggaatgcccacacctttgaagacagtaccatgattctcgtgttttgttggcattagttcattttataacattagcactttgaatttaccatggtttatatag

SEQ ID NO: 15146 - DNA, 291 bp, synthetic construct
  source 1..291: mol_type = other DNA
gcagctgagaccagttaattcaagttgtgtcatttcaaacatatttgagatgacttgaatcacgtccatctcaatattgttatcctattgagatgaacctgtatcggtcacattttgtatttatgtaaataggtaagggttcttgcgtgccaagagtcttctgtattgatgtagtggactgctgtttcgatggagttacagcagtacttgcattgatatgtaaatgcacagagatacgtatcgatgttccacaccttaatacaatgacaaatcaaggtatgagttcacacg

SEQ ID NO: 15147 - DNA, 644 bp, synthetic construct; identical to SEQ ID NO: 2234
  source 1..644: mol_type = other DNA

SEQ ID NO: 15148 - DNA, 1000 bp, synthetic construct
  source 1..1000: mol_type = other DNA
atgcggggacttgtgtttgtcatttgccatacttcacaaacatgtgctagcaagtgaatacatatgtttgtacactgtatcatttgtttcatgagctgtttcagtcgggcatagtataaataagagcgcaagggaagggactgcgcatactaatacagctgttcgagctcatgttgcttgtgaatcataggtagtcaacgcaggatttgtctgcaatatctacggatcaagggaaattgcgtggagatcatgtacggagacggcactacgctgtataggatcttgagggatcaaaccagccttaatccgcttgccccaatgcggggacgtgtatgtattgaagcgcggtttcctacgagaagcagattgcgttgacatattcttgactatcatgattgatggagcttttgtttaaccacgtagtacttggacggaacggtgcatcgccttgaggtaaggtcataaagccgattgccccaatgcggggacgtccattgtacgaagcggggcgacaaagttttcacttacagtttacatcacttgtatttcactttaagtatattggtcatttgattgctatttgacttgtcatatagttatcacttgacctttgaactaatacagcgagtattgaacgctggtacgtatactactagggtttagtcctaatagtattcattttcaaccactttcaatattctttgttttcattgaatattgataattgttagatttattgctagggcttagccctagcagtattcatcttcaaccaccttcaatattctttgcttatgccacgagtcacatatgatttgagatgaattgtagttgtgactacatgtaaccataattgatttgggagcgttggcttccaggttgatgccgaccggtttgtatatattgtaaatgttgtaaatacagtttcatacgtacgtgcggaacagtttgctgtaaatacgagagcctacagcaaattaagctaaaatagtattgtcaa

SEQ ID NO: 15149 - DNA, 464 bp, synthetic construct; identical to SEQ ID NO: 1948
  source 1..464: mol_type = other DNA

SEQ ID NO: 15150 - DNA, 359 bp, synthetic construct; identical to SEQ ID NO: 1670
  source 1..359: mol_type = other DNA

SEQ ID NO: 15151 - DNA, 711 bp, synthetic construct; identical to SEQ ID NO: 2322
  source 1..711: mol_type = other DNA

SEQ ID NO: 15152 - DNA, 278 bp, synthetic construct
  source 1..278: mol_type = other DNA
tgaatcaggaaataacaccaacccactcattcttcaacgaagaattaaacacacacacacacacacaaaccgcaccagtgaattctggtgcggttacgcgtgtagcgggtttactaaatggtaacttgactacacgcgatggatccttttcccttacgggcactggatccacaaaacaaattactcaatttaacgagcacggaccttctattaataaaggtaaaggctccttacaaattggtaatgcacttgttgctaattcgacaagttccacatct

SEQ ID NO: 15153 - DNA, 475 bp, synthetic construct; identical to SEQ ID NO: 1976
  source 1..475: mol_type = other DNA

SEQ ID NO: 15154 - DNA, 501 bp, synthetic construct
  source 1..501: mol_type = other DNA
tatatatatattacaaataccattaccaccatgtctaactacaccaaaaccaacaccagcaccatgaaccaaccaccacgaaacaaaataacaaacattattgattctgttgctctcgaggctagcaacagaatcatgactctcgaaaaagcctcggaaaagaaaagaaaacaacaaacaaaatcacaagatgttgacgatcttgatgacaacaattataacagcaaatctttaacccacactggtagccaagtggcactaccacaacttaaccatggtagcgccgctgacaacagcgttaaccacaaccgctacaaaggaccatttgcaactttagtcagcgatgttcaaatgccgcccaaacatgctgaacgtagtgtggtgactgacttcgctgactaaagttgcaaatgccgcccaaacatgctgaacgtagtgtggtgactgacttcgctgaatgacaagagtgacttcaatgaagcacccaccaccttcacagag

SEQ ID NO: 15155 - DNA, 590 bp, synthetic construct; identical to SEQ ID NO: 2159
  source 1..590: mol_type = other DNA

SEQ ID NO: 15156 - DNA, 468 bp, synthetic construct; identical to SEQ ID NO: 174
  source 1..468: mol_type = other DNA

SEQ ID NO: 15157 - DNA, 922 bp, synthetic construct; identical to SEQ ID NO: 2540
  source 1..922: mol_type = other DNA

SEQ ID NO: 15158 - DNA, 929 bp, synthetic construct
  source 1..929: mol_type = other DNA
gttcagagttttatggtctcgtataccagggaatacggctcaattctcgaccacctttaacaggggagaaaagaacaggaatcgggtgtctactatcctgaagtagaagtaacggctatttgagctaggtcgttacattgtaaaatagtgtggttttctttttactcttagtttgtttttctttttgtaaaatattgtgtgttaggtaggcggctcgacggttttgggagttattggtgagattttggtcttgggaaaaactcgatgcgtaaggttatgcgttgagttctgtatagaatggtctcgtataccagggaatacggctcaattctcgaccacccgtaaatggggagaaaagaacaggaatcgggtgtctactatcctgaagtagaagtaacgactatttgagctaggtcgttgcactgtaaaatagtgtgtatatttatagttttctttgtttctaggttttttgtttgttttagtgtatagtgtagtttctcctttttcgttatttttaagtttagtatttctaggggaggtatggtaagatcgcggcgtacgctacgttgccgagccgtatgcctagaaggcttacgccgcgaacgagaggggaactggccgtgttgtgctgtgatggcactaggggggtaggcatgcggcttggcttcttggggaggttctggtaagattattattatatacagtaatatatataatgtaaatatatagtatgatgctatagcgcaaaaatatgtagtggtaatactagggtcatcccgggttttatcacgtatgcctataaggtagtagtgttgtgctgcgcgtatttagcgttttaatcgtcagtatataaccgtgttattgccatgtttgtattatactctcagtacagcgatgtgttatgggtttgaataatatactttttcttt

SEQ ID NO: 15159 - DNA, 339 bp, synthetic construct; identical to SEQ ID NO: 1619
  source 1..339: mol_type = other DNA

SEQ ID NO: 15160 - DNA, 644 bp, synthetic construct; identical to SEQ ID NO: 2235
  source 1..644: mol_type = other DNA

SEQ ID NO: 15161 - DNA, 1000 bp, synthetic construct
  source 1..1000: mol_type = other DNA
ttccttattttcgcgctctttatttagttttactgtgttttctactacccctacgttaagcttcgttccgtatattaccgctagtagtgtttaacgtcttgtgtatagatatattaacaccacttcgtgtttccttggttatcctttgtttttgtgcgtgctccccttttttaaaaaagaaaaaatatttgctcgttccttggtcgctaggttatatataatacatcgtctctatcctatttagcagtaaattatctctgttccttacagttgtgcgtcgtcgtttgtatttttcaatatataattaacaaaaagatttaacgttttccttttacttgtagcttgctggtttttaatttcaactttaaagatttaacgttttccttttacttgtagcttgctggtttttaatttcaactttaaaatccaaaaaataattttatttttccttttacctgttgcttgttatttccgagttttattttaaaaaatacaaaaagattttaagtttttctttcacctgtcgcttgttttaaataatttttacgtctaaaaacacaaaaagatttaaagctttcctttcgcattttacgctctgttagtttgatctgtatagaaatattataaaattatcgtttgtttcctttgagcgttttgtttagtttaaaccgtcttttctgtttaggtttatttggtttcgttagtttcccttcgtcttcttcgtattatattctcataaggtacgaaaaccccaaaaatattttaaagttttccttggtcttgtttttagatcttttgaactcttgtttaaaatcaccaaaccctcttgttacgttatccactagcttttctcttatatctgttatcttttgttcttggtttttactccccttttttagtttccgccatctgttgttgctgatttacgatttaatttggtgtgtgttttagggttttgttatccggttttttgcccttttcgatcattttttctgtaact

SEQ ID NO: 15162 - DNA, 640 bp, synthetic construct
  source 1..640: mol_type = other DNA
gcgagtgtcatttttaaatatttttatttggtttaagccgatgtgtagctatttttagagccaatactttattcgtttctttgcgtaattacctgatttgttacaatgcgcaattttgtttagcgtattgtcattttttgattctttattgcttgtaccgtcatgtgaatattagttgagcttggtatttttgttttaggttgtttctaattaatgttcgttttgttttgtacagcttcatacagaccctccgattatatcgcttgcaaggcggttagtgcggggacacggggggggtcttagtggtgatgttggcctgacacagtaggtctcctcacagcatcaccacttttggttgggagaggagtcctcgctttctttgcgagtgaggcgcatctccttttgtatatatacgcgttattttgttgttttaattatagcgttgatattactattataacatattctcagggttttttagtttatgttagtttataattaggttttcttacagtttaatataattctattttttcacgattaggtattggctctatcttgcgtagagtggtagtattgtatattatcgattgtagattgtcaggtaacacgagattgatatgagtgtatacattaacag

SEQ ID NO: 15163 - DNA, 415 bp, synthetic construct; identical to SEQ ID NO: 1812
  source 1..415: mol_type = other DNA

SEQ ID NO: 15164 - DNA, 421 bp, synthetic construct; identical to SEQ ID NO: 1833
  source 1..421: mol_type = other DNA

SEQ ID NO: 15165 - DNA, 532 bp, synthetic construct; identical to SEQ ID NO: 2089
  source 1..532: mol_type = other DNA

SEQ ID NO: 15166 - DNA, 648 bp, synthetic construct; identical to SEQ ID NO: 2240
  source 1..648: mol_type = other DNA

SEQ ID NO: 15167 - DNA, 520 bp, synthetic construct
  source 1..520: mol_type = other DNA
gatttgtgaatttttattcaaacccggcttgaacattgataacgcaggttcaaaagagaaagtcagaaagagcttttgtgatgttaatggggagtgtgtgacagcacttacactttttcaggtgacccggtccaacggaccccggttgagttcacaaccggtttgcgaaggtccgacccaatctcagtgggtagcgtgttaggagaggtaatgacgatgagatagaggtatctcatatctcagcacaacgttgcttcgtccgagacgaccgtcgacccgggttaggggtgctgagataagaagggatgatagtggtgcctagttaaaccactattgcgtggtgtttagaccgggcgacgggggaccgtccgaacgcagcacactagggttctgtgggattattaatgtaaataaatggagtagttttgttttgcagattttgtttgtacagagtatttttattcttttaatataacaatctataatttgtttaaaacctgtactgttgatagacatcact

SEQ ID NO: 15168 - DNA, 264 bp, synthetic construct
  source 1..264: mol_type = other DNA
taacagagtatataaatcaggtgtattgctgtcgttgagagaaaaggtcgattgaaaaaatttttcttgcttattcactggcgtattgtaactgtcgcgaggaaaggttgattttaatcgttctatccgcttattcgctgattctagttgttacaaatataatcgttccaaaattgtgcggtaagaaaactgaaatagttgttttaaaaataatttacatttttgttctaatacactgcgtgaaatactatacccgttgtcata

SEQ ID NO: 15169 - DNA, 315 bp, synthetic construct; identical to SEQ ID NO: 1531
  source 1..315: mol_type = other DNA

SEQ ID NO: 15170 - DNA, 606 bp, synthetic construct; identical to SEQ ID NO: 2177
  source 1..606: mol_type = other DNA

SEQ ID NO: 15171 - DNA, 283 bp, synthetic construct
  source 1..283: mol_type = other DNA
gattctaccaaatttcttaaactcgttttcaaggtcggactccgtgacagatgggggaacatttcccacgtaaaccttgattggttatagaccactcaggagccaaaatataacaaaacttcaaaacatcacgactttccagtcacatcaacaaaacatttcccaatcactttggttgctttatttttctcaatccctaatcgctttccagtaagttcatatatttctatatgttctaaacaaattttaaagaaaaaaccaaaaatattttatttttccactc

SEQ ID NO: 15172 - DNA, 446 bp, synthetic construct; identical to SEQ ID NO: 1908
  source 1..446: mol_type = other DNA

SEQ ID NO: 15173 - DNA, 268 bp, synthetic construct
  source 1..268: mol_type = other DNA
gaaatttccacggtttccccgaggtaatgggaagtcccaatcccctcgaaccaaccccctcgctttctcagcgtggaaactgagagagagccgcggtgatgcgtgggcgcccaatgggtatacgcgcacaacgctgtctcgaactcagagtctgagatggctcagcttggcagcacacagctgtcaacctgtactacactacaataataataattaacaaaacaaaacaacacacgcctgccactaaactgaactggtgtcaacgatc

SEQ ID NO: 15174 - DNA, 662 bp, synthetic construct
  source 1..662: mol_type = other DNA
gctggaaaggagacgtgtgtttaaaaatattatattattattattagtgaataaggtgtcagtcaaattcgatttctcaggtcagcagtcataaaaactttaaactgtgtcgccgttcgtacatagcgtcgacattaactcaacaagttggtattgagtatttgattgatgttttgaggatgagaatttgattaactttaaagttgataaaccgtgattttgcggaatggtagtctataatgttatagatcgctaaaccgttcaatcatgatgttaatcacttgtaataaagtaggcattaagttgtctacctttttcttaaactaaaaaagagtaaaaacaattttgtaaatgaactctttttctttcatttctttgtccttttatttttaagattactcgaggatcgatataaaaataaaaatttttatcactttatttaataaatttcagtataaaaaccttatttctcctttttcgtagtcaataaattgacgatcttgcgagttgtccataaaacaagtaaattttaaaccattcaaaaaatcaaaaatatttatcagttcttaattttttatgtattagatcgattttagacttaatcattttatcttcatttgtagtaaattctttctcttcagttatcacttatcgatgcgtcg

SEQ ID NO: 15175 - DNA, 412 bp, synthetic construct; identical to SEQ ID NO: 1807
  source 1..412: mol_type = other DNA

SEQ ID NO: 15176 - DNA, 391 bp, synthetic construct; identical to SEQ ID NO: 1756
  source 1..391: mol_type = other DNA

SEQ ID NO: 15177 - DNA, 259 bp, synthetic construct
  source 1..259: mol_type = other DNA
gtctgtagtctggtttctcctttctgtcagcattttagttagagcatgtaggtaggtgaaggtggagaggtagaaaccaattgggccttgcaaccattcaaagggttgaggtctagtagaaggttggtgaaaaataagggttgatgtttgcgattgagataacttcatggttatccaagttcgtgttcaactacttagcttcaaagcctgaaccttgcatttagaatagtttgcattcattgtatattcttgtgtcagc

SEQ ID NO: 15178 - DNA, 583 bp, synthetic construct; identical to SEQ ID NO: 2150
  source 1..583: mol_type = other DNA

SEQ ID NO: 15179 - DNA, 428 bp, synthetic construct; identical to SEQ ID NO: 1854
  source 1..428: mol_type = other DNA

SEQ ID NO: 15180 - DNA, 427 bp, synthetic construct; identical to SEQ ID NO: 1852
  source 1..427: mol_type = other DNA

SEQ ID NO: 15181 - DNA, 260 bp, synthetic construct
  source 1..260: mol_type = other DNA
tcaatttcaagcagtgattggtgacttggaccacaagaaagacgtgtacttgttctttggacgcgcagacaacgctgtggttctcaagtttctaacaaacgcagcccaagctcagtgggtgcgtgacaaccgtgctgatctgattccaacacatccacctggtattccgccttctgatcacagaatcgcttctgtgtttgaggagaactacgttctgccattgttcaggtttcaatacttgttctggctgaagacgcaag

SEQ ID NO: 15182 - DNA, 528 bp, synthetic construct; identical to SEQ ID NO: 2082
  source 1..528: mol_type = other DNA

SEQ ID NO: 15183 - DNA, 1000 bp, synthetic construct; identical to SEQ ID NO: 2594
  source 1..1000: mol_type = other DNA

SEQ ID NO: 15184 - DNA, 314 bp, synthetic construct; identical to SEQ ID NO: 1528
  source 1..314: mol_type = other DNA

SEQ ID NO: 15185 - DNA, 1000 bp, synthetic construct; identical to SEQ ID NO: 2595
  source 1..1000: mol_type = other DNA

SEQ ID NO: 15186 - DNA, 291 bp, synthetic construct
  source 1..291: mol_type = other DNA
gaagttgggggtggctctggtgccgtgccaggtaccaccccctccccaggggaacaggagacaccaactccaactgttcccggtgagaaccctccagccaaggccactggcttcgcgaaaggcattgggcttgttgacagcaccaattggcttggtgttgctgcatcaaaactaacagagcatgtcagttataaatactattcggattcattttcgtatctgctgtacaatccgtaccagcaggctgtctatgtacagcttgttatctggacttctcgggatgtgcacacg

SEQ ID NO: 15187 - DNA, 495 bp, synthetic construct; identical to SEQ ID NO: 2017
  source 1..495: mol_type = other DNA

SEQ ID NO: 15188 - DNA, 1000 bp, synthetic construct; identical to SEQ ID NO: 2596
  source 1..1000: mol_type = other DNA

SEQ ID NO: 15189 - DNA, 711 bp, synthetic construct; identical to SEQ ID NO: 2323
  source 1..711: mol_type = other DNA

SEQ ID NO: 15190 - DNA, 585 bp, synthetic construct; identical to SEQ ID NO: 2152
  source 1..585: mol_type = other DNA

SEQ ID NO: 15191 - DNA, 477 bp, synthetic construct; identical to SEQ ID NO: 1979
  source 1..477: mol_type = other DNA

SEQ ID NO: 15192 - DNA, 351 bp, synthetic construct; identical to SEQ ID NO: 1648
  source 1..351: mol_type = other DNA

SEQ ID NO: 15193 - DNA, 299 bp, synthetic construct
  source 1..299: mol_type = other DNA
aggggctagccttattggtcatccaataggatcggatcagtctgtaacctccatatccgagaccaaaagcgatcacggtaacggcagtagcggtatcgggcttgatgttgaaactatcaagacccttatcccgatgtaactcttcgagaatcctggaggaggagatatttgtatccaggagcgcttcttcgccaatggctttggcgactgctttagtttctaaggaacgaatccggccagggattttgcacgcaaatttcaaagcaacattaaagctgtaagcaagagcatcggtagcc

SEQ ID NO: 15194 - DNA, 637 bp, synthetic construct; identical to SEQ ID NO: 2224
  source 1..637: mol_type = other DNA

SEQ ID NO: 15195 - DNA, 562 bp, synthetic construct; identical to SEQ ID NO: 2126
  source 1..562: mol_type = other DNA

SEQ ID NO: 15196 - DNA, 926 bp, synthetic construct; identical to SEQ ID NO: 2542
  source 1..926: mol_type = other DNA

SEQ ID NO: 15197 - DNA, 670 bp, synthetic construct; identical to SEQ ID NO: 2272
  source 1..670: mol_type = other DNA

SEQ ID NO: 15198 - DNA, 762 bp, synthetic construct; identical to SEQ ID NO: 217
  source 1..762: mol_type = other DNA

SEQ ID NO: 15199 - DNA, 281 bp, synthetic construct
  source 1..281: mol_type = other DNA
ctcagaatcccaaataggtagacggagaaccggggccgaaaccaggtccggaccccacacccccaccagcaccaccacctgaaccgacgccagccaaacatgaaagattcattgtttacaccgggacactgtcaacactcatcagtgctcgacagaactcagacagtatatcactctactcaattcgagaccagagggttagatatattgaagatgagaatgcaaactggacgtacatcaaagcgcaatggtatacacagaattctgtggaagcagtacca

SEQ ID NO: 15200 - DNA, 1000 bp, synthetic construct; identical to SEQ ID NO: 256
  source 1..1000: mol_type = other DNA

SEQ ID NO: 15201 - DNA, 1000 bp, synthetic construct; identical to SEQ ID NO: 2597
  source 1..1000: mol_type = other DNA

SEQ ID NO: 15202 - DNA, 1000 bp, synthetic construct; identical to SEQ ID NO: 2598
  source 1..1000: mol_type = other DNA

SEQ ID NO: 15203 - DNA, 825 bp, synthetic construct; identical to SEQ ID NO: 2457
  source 1..825: mol_type = other DNA

SEQ ID NO: 15204 - DNA, 640 bp, synthetic construct; identical to SEQ ID NO: 2229
  source 1..640: mol_type = other DNA

SEQ ID NO: 15205 - DNA, 772 bp, synthetic construct; identical to SEQ ID NO: 2397
  source 1..772: mol_type = other DNA

SEQ ID NO: 15206 - DNA, 323 bp, synthetic construct; identical to SEQ ID NO: 1559
  source 1..323: mol_type = other DNA

SEQ ID NO: 15207 - DNA, 281 bp, synthetic construct
  source 1..281: mol_type = other DNA
atttccaaggaccatgctaggtagacgcagctcctcagccaagccctactcctgacccaactccacccccaccatctccagaacccacaccagtaaaacacgaacgatttatctgttacgctggtgtaccaaaagctacaattcaaactcgagagaatgatgaatccattgcgctcaagaggttagaagatcagaattttcggttcctggaagacgactaccagtccacaacaagcatcgcttcgtgttggtatagccagaacaatgttcaggctactcca

SEQ ID NO: 15208 - DNA, 500 bp, synthetic construct; identical to SEQ ID NO: 2026
  source 1..500: mol_type = other DNA

SEQ ID NO: 15209 - DNA, 1000 bp, synthetic construct; identical to SEQ ID NO: 2599
  source 1..1000: mol_type = other DNA

SEQ ID NO: 15210 - DNA, 1000 bp, synthetic construct; identical to SEQ ID NO: 2600
  source 1..1000: mol_type = other DNA

SEQ ID NO: 15211 - DNA, 316 bp, synthetic construct; identical to SEQ ID NO: 1539
  source 1..316: mol_type = other DNA

SEQ ID NO: 15212 - DNA, 1000 bp, synthetic construct; identical to SEQ ID NO: 2601
  source 1..1000: mol_type = other DNA

SEQ ID NO: 15213 - DNA, 281 bp, synthetic construct
  source 1..281: mol_type = other DNA
ctcagaatcccaaataggtagacggagaaccggggccgaaaccaggtccggaccccacacccccaccagcaccaccacctgaaccgacgccagccaaacatgaaagattcattgtttacaccggtacactgtcaacactcatcagtgctcgacagaactcagacagtatatcactctactcaattcgagaccagagggtcagatatattgaagatgagaatgcaaactggacgtacatcaaagcgcaatggtattcacagaattctgtggaagcagtacca

SEQ ID NO: 15214 - DNA, 290 bp, synthetic construct
  source 1..290: mol_type = other DNA
taaacggtgtagaatggcacccctccgatgaagatcaattcaggattctctacaaagggaacggagggtcgacgattgccggatcctttcggattcgaatttcagttgccgttcaaaacccgaaataggtaagcgccgagccgggcccgcgtccagggcccactccctcccccactcccacacctcagaaacatgagcgatttatcgcgattgttggaatcccttccgtcattattactgcaaaggaaaatgacgatgccatctccgttggcgcccttggcagccagcga

SEQ ID NO: 15215 - DNA, 281 bp, synthetic construct
  source 1..281: mol_type = other DNA
ctcagaatcccaaataggtagacggagaaccggggccgaaaccaggtccggaccccacacccccaccagcaccaccacctgaaccgacgccagccaaacatgaaagattcattgtttacaccggtacactgtcaacactcatcagtgctcgacagaactcagacagtatatcactctactcaattcgagatcagagggtcagatatattgaagatgagaatgcaaactgggcgtatatcaaagcgcaatggtattcacagaattctgtggaagcaatacca

SEQ ID NO: 15216 - DNA, 782 bp, synthetic construct; identical to SEQ ID NO: 2412
  source 1..782: mol_type = other DNA

SEQ ID NO: 15217 - DNA, 444 bp, synthetic construct; identical to SEQ ID NO: 1900
  source 1..444: mol_type = other DNA

SEQ ID NO: 15218 - DNA, 332 bp, synthetic construct; identical to SEQ ID NO: 1586
  source 1..332: mol_type = other DNA

SEQ ID NO: 15219 - DNA, 338 bp, synthetic construct
  source 1..338: mol_type = other DNA
ctattagtttcaattattgcagtctacttggtttatttagtatatattaaccgaattattattacagaatacatatccattttattaacattgttccagaaacctgagctatatgtctctgaggtaggagaagatggttatatgatccctaacccacaataaatgactacaatactcaatatatttgatactcaatccttattaaataaaataaaattaattcattaaaaatgaattaaaatataagaaaacccactttaagaaaacccgttttaataaaatattgagttcagtcatcatagaatttatatttaaaagaacatttaaaactatacaat

SEQ ID NO: 15220 - DNA, 533 bp, synthetic construct; identical to SEQ ID NO: 2091
  source 1..533: mol_type = other DNA

SEQ ID NO: 15221 - DNA, 627 bp, synthetic construct; identical to SEQ ID NO: 2210
  source 1..627: mol_type = other DNA

SEQ ID NO: 15222 - DNA, 598 bp, synthetic construct; identical to SEQ ID NO: 2165
  source 1..598: mol_type = other DNA

SEQ ID NO: 15223 - DNA, 707 bp, synthetic construct; identical to SEQ ID NO: 2316
  source 1..707: mol_type = other DNA

SEQ ID NO: 15224 - DNA, 496 bp, synthetic construct; identical to SEQ ID NO: 2020
  source 1..496: mol_type = other DNA

SEQ ID NO: 15225 - DNA, 406 bp, synthetic construct; identical to SEQ ID NO: 1796
  source 1..406: mol_type = other DNA

SEQ ID NO: 15226 - DNA, 255 bp, synthetic construct
  source 1..255: mol_type = other DNA
catgggtaggtagaaccgccacaccaagtttatatttatcttttgctcaagcacaatgcaacctagcaaatgcattaatatatctatatattttgaagattatacatattgtgcagctacattatcatcactgtgaggcttcttttctttatttatatttggctaatttattcaatgcataggttctcttgcttataaaaaacccgccagttacagatcacttatcgtgtatttggaacattgaaaatcgaaaat

SEQ ID NO: 15227 - DNA, 284 bp, synthetic construct
  source 1..284: mol_type = other DNA
aaaaaaggcaaaaagtcagagaagcagagcaacaaaagattatgaatcagaataaacaataatatgagtgaacaatagcaattgatcttgtatttgttttaatttaacaaaaccttagtaaaagtcattattataatatcatattatagattttatatactctgacttaactataattaagcgtaatccaaacaaatatattatactaaattaagtatttcaaataaaaatactgttaaaaattaatagaatacattctttgaagagattatattaattacaga

SEQ ID NO: 15228 - DNA, 511 bp, synthetic construct
  source 1..511: mol_type = other DNA
tcctgtatacaaggagtatgcctttaacattcataacagatatatatattaacaaacccgtagtaaaagtcatgatattatcagtgatttttaaaacatttattttactttttatatccattatttttataaacaattttttagagtaccgagattgtcatcccgagttttattggttcgggatttcaaaattctactgtagatggaatatactagcagagactagtaattctgtagctttattggctattttatctttgttacgtttatggggttcttacctttattataggtttcgttttattcggatattttatgataatattttccattaataaataaataaactttcaaattcaaaattctttgtattaaattttaattaaacaaaaccgtagtaaaagtcacataatttaaattgactctcatatatactatatatttgaaataaatcctttcgaaaaaacacctcaaatataataatctctacggtaaatacaaaaataacata

SEQ ID NO: 15229 - DNA, 320 bp, synthetic construct; identical to SEQ ID NO: 1548
  source 1..320: mol_type = other DNA

SEQ ID NO: 15230 - DNA, 434 bp, synthetic construct; identical to SEQ ID NO: 1873
  source 1..434: mol_type = other DNA

SEQ ID NO: 15231 - DNA, 597 bp, synthetic construct; identical to SEQ ID NO: 2162
  source 1..597: mol_type = other DNA

SEQ ID NO: 15232 - DNA, 258 bp, synthetic construct
  source 1..258: mol_type = other DNA
ttatcccctccttgactcttaataccagctcggttatactcgagctgagaaagtgttctcatttagatataagcatacaccatatacctcattaagctagtgggcgttacttaatggcatggttttttaaccagtaggatatagggttggcattacttgtaaccacaccactatacaggattgaactttatttagaaaaagatagtaaaggaaatttactccacgcatagcgccagggatagaaactgccaggacaac

SEQ ID NO: 15233 - DNA, 371 bp, synthetic construct; identical to SEQ ID NO: 1704
  source 1..371: mol_type = other DNA

SEQ ID NO: 15234 - DNA, 439 bp, synthetic construct; identical to SEQ ID NO: 1884
  source 1..439: mol_type = other DNA

SEQ ID NO: 15235 - DNA, 583 bp, synthetic construct
  source 1..583: mol_type = other DNA
tcgtctgtaggaactgtatcttagtaagattaatcataatagtataacagtattaatctaatccttttgggtgagttataaccatcacctatctgcctaaacgtatctagtgcgatccatatgtaagttagcctttagaagctttataataataataataagcatcggaagcaagtgtggtatcattataaaaacccgccagttacaaatcatgcctgtttcaatagcttgtgcacattgccactatcccattgacatccagtcagtgggtgctcccagtgatattgggataaactgcaagatgtgtgggaaaacatcatacgtaatcaatgccccatcttagcatgggtaggtagaaccgccacaccaagtttatatttatcttttgctcaagcacaatgcaacctagcaaatgcattaatatatctatatattttgaagattatacatattgtgcagctacattatcatcactgtgaggcttcttttctttatttatatttggctaatttattccatgtataggttctcttgcttataaaaaacccgccagttacagatcacttatcgtgtgtttggtgat

SEQ ID NO: 15236 - DNA, 377 bp, synthetic construct
  source 1..377: mol_type = other DNA
aaaaaaatatatgaattgatacgtattttattaaataaacatcttattattttataatgtatatcatttgagtattaatttttctaatttcttacattatcatttttatatattattatattattatattattatattttttcatgtttatatatctctatttttataattttatacattaagactttataaaaacccgtgagaaaagtcataatggacacacactacattattttaatttgtcaaaattgtggttgtaatattacattctcaagaattattacctatattagaattagtatctctgatgatactctaatcatagagtgtcctcgttgtttttctcttgtttactaccaatttactaacacataaaa

SEQ ID NO: 15237 - DNA, 768 bp, synthetic construct
  source 1..768: mol_type = other DNA
tatcacgtcggggtcaccaatttgccgtattgattacgcgtatattatcacgtcggggtcaccaatttgccgtagggtcggaaaatataccacacttggttaaccattacgatcgaattcaccaacttttaatcagactcaggaggaaatacaaaaatatttttttcgaaataatgaagaactgggatgcttactgcataggatgtacagtgtctgatgagattgaggaccttggatttcgaaccctcaaggagtctatagaagaggatctaaccgccaagtttggacgaagcgatgcaagagagatgctagatttgatgtcctgctctggactctctcacgaaagggatatcacggtccctatttctttatacttctcaaacttgagctagaactatgggcacccaatactacaccctactgaaggcatcgaaaaacttaggataaactcgaaaaaaccaatcatggtagatgaccagattgcgagaaaagcactttggatgttccggaaaacctacttcatgaactactttagaaagaaaggaaactaccctcatcacaaatgtcttggggacctgcacccagtgctcgaagaatgtctccgggatgaacgtacgctgactcgcaatgagtcaaagactctccccttatcagcttggagcaacatcaaactagagaaaaaccacgacatgagtcttgagatagacgaaaaggaactcctcaaagacaccgcgtgttcccccccgagggaagagtggttccgccctt

SEQ ID NO: 15238 - DNA, 819 bp, synthetic construct
  source 1..819: mol_type = other DNA
atttattctctctatatacgttcgaatattgcatttaaaaatagcaaaacatatactatgagttgacatctatatattcaatatattattctttaaaaccaacagttataaaaatataataatatgactgatctaatcaattttctcatcagcatcttaaacaatattgtacgtttcggagaatcttatatagctatacattactacattattggcatattatcattttcctcattactagtaatttcctgtaaattaataatgtcgagtcaatctccaaaaaacctcacagatatgaggaaaaaagttcttcaggagaaaattaaggaaataggtgcccctcctgatgatttatggagggaagttcgagaaatgcgtttaaggatggaaatactcaccgatgagatcagatctctgcgtcgagatttaaaaggaccacctgcatatgcacaagatgttaccccgtccactcgccgagcattggcgcctcctccaatgccgaatacaagctacgcaattctgagtgcagattatgagtagaatgattgtataacaccaatctttatactctactaattgattttgcttattcggctttacctcttgacatgatttttctcttactcataataaatcctcttaagaaaagaaaatctcaatatgatatttaaaaaatgactgataagtttaaaaaaacatctttctttaactacatctagttgttttcttacgtttgcagtagtttatagctaatattagctacaaccgcatttgacgtattcgcagcatttgattgaatttcatcataccatcttcatt

SEQ ID NO: 15239 - DNA, 430 bp, synthetic construct; identical to SEQ ID NO: 1864
  source 1..430: mol_type = other DNA

SEQ ID NO: 15240 - DNA, 863 bp, synthetic construct; identical to SEQ ID NO: 231
  source 1..863: mol_type = other DNA

SEQ ID NO: 15241 - DNA, 438 bp, synthetic construct
  source 1..438: mol_type = other DNA
acaagaactttcgactgtatatatatttttagaaaaacccgttagttacccatcaaagttattattatcttctgaacccgattgctgtgttagctttgttatcgtaaagagccctcgcatactgtccagaacacaggtacataaatgtatacgcccatacatagatatttttccagcacactttgatcctaattacttcttttactttcaatttttgatttttatttttattttaatttttaattttaatcttaattttaacttgtaactttaattttagctttaattctaattttaatttgtcttccaccctaactctagctctgattactatatctctgtcgttctttcgttgtctgcttccagcctcactgcccttccaggaaagatttctcccgggtcatcaacaaatcaatcaccccatttacaatctcccag

SEQ ID NO: 15242 - DNA, 674 bp, synthetic construct; identical to SEQ ID NO: 2279
  source 1..674: mol_type = other DNA

SEQ ID NO: 15243 - DNA, 385 bp, synthetic construct; identical to SEQ ID NO: 1743
  source 1..385: mol_type = other DNA

SEQ ID NO: 15244 - DNA, 513 bp, synthetic construct; identical to SEQ ID NO: 2056
  source 1..513: mol_type = other DNA

SEQ ID NO: 15245 - DNA, 679 bp, synthetic construct
  source 1..679: mol_type = other DNA
attaaccttacgttaaaatataagagaaaaatgtttataaaaacccgcaggatcaatcatgaataatccaattaagaaagacgccacctgtcccagatgtggaactaaattctccgtacatttctttaaaatgcaagaagaaagactcattgacaaagataagataattcaacaacaacaacaagagatagataaaatgatgaaagatcttgccataaaaaatggtaagtaatcatataagtctgtagataaattgaactgttcattttgaacatatcatccgtcctaataagatatttgaatataaattaatgatatcaattaattctatttagtaataattttcaagtattgttaaaatttccaattgaaaataaaaattaaaatgtaaatcaaaaacaaaaaataccataatatatttcatttagaaaaaaccgttaggatttatcccaatagaagttattgatcattttaaattaattttgagaatacaatttacttggaaatcaaaatatacccggactatcaacagatgattttaaatataatacaatcaaaacataataaaattaaaaaacaaaaataaaaataaaaactagacaaaatacttggaaagaaaagaaaaaatactcaaaacacttgtcaaccctatcttagaaataacattatatctactatt

SEQ ID NO: 15246 - DNA, 627 bp, synthetic construct; identical to SEQ ID NO: 2211
  source 1..627: mol_type = other DNA

SEQ ID NO: 15247 - DNA, 381 bp, synthetic construct; identical to SEQ ID NO: 1733
  source 1..381: mol_type = other DNA

SEQ ID NO: 15248 - DNA, 290 bp, synthetic construct
  source 1..290: mol_type = other DNA
aaggaatcaaccacgaatcaactctacttcggaaattgcaagtattcacaatacagtttccagccatcttagaaaggagactacattttaggaaatttcttgctagggaaaagcacatactaagccttctgattgatcaccaaattaaaatgcctaatgattaaattaaaaaaatgatcttgagagtgaaatccaatcatttatataagacataactaagaattccctttcttgcatgctttcctaggacatataagttgtttaactgatatatcttattaaatcagatt

SEQ ID NO: 15249 - DNA, 1000 bp, synthetic construct; identical to SEQ ID NO: 2602
  source 1..1000: mol_type = other DNA

SEQ ID NO: 15250 - DNA, 456 bp, synthetic construct; identical to SEQ ID NO: 1929
  source 1..456: mol_type = other DNA

SEQ ID NO: 15251 - DNA, 264 bp, synthetic construct
  source 1..264: mol_type = other DNA
ggcaccaatgttaatgatcacttttgtattttcttattcaactctctaatcattgatataatctctcatatatgcacgttatcacaaatttatgcaaactaattatattatcatgaaaaaggttctttgtagattatcagccaaacttgggctcatgccacctgttttaaaacttagtttgttgttgaatttgttgtattaacgatactaagtttaacacattatagataattatttttgcatttgtgtggaaaatttcttgaa

SEQ ID NO: 15252 - DNA, 344 bp, synthetic construct; identical to SEQ ID NO: 1631
  source 1..344: mol_type = other DNA

SEQ ID NO: 15253 - DNA, 381 bp, synthetic construct; identical to SEQ ID NO: 1734
  source 1..381: mol_type = other DNA

SEQ ID NO: 15254 - DNA, 464 bp, synthetic construct; identical to SEQ ID NO: 173
  source 1..464: mol_type = other DNA

SEQ ID NO: 15255 - DNA, 429 bp, synthetic construct; identical to SEQ ID NO: 1859
  source 1..429: mol_type = other DNA

SEQ ID NO: 15256 - DNA, 507 bp, synthetic construct; identical to SEQ ID NO: 2038
  source 1..507: mol_type = other DNA

SEQ ID NO: 15257 - DNA, 374 bp, synthetic construct; identical to SEQ ID NO: 1716
  source 1..374: mol_type = other DNA

SEQ ID NO: 15258 - DNA, 260 bp, synthetic construct
  source 1..260: mol_type = other DNA
agatcctgggcatcttagagtccctgcgtgtcatgaccgatgctccaactcatcgggtgaccacatactcaaagtatgttcctcgtcaacccccaactgaatgagacccctttacaggcacgtgtttgcttaacactcagttgggtggtaggcgttttagctggattaaaactcctagatgctttgcacgtagtatggattatacaatacttccgctatccttatgaatttagtcaaaaaactaatgagcatgagacaat

SEQ ID NO: 15259 - DNA, 413 bp, synthetic construct; identical to SEQ ID NO: 169
  source 1..413: mol_type = other DNA

SEQ ID NO: 15260 - DNA, 671 bp, synthetic construct; identical to SEQ ID NO: 2273
  source 1..671: mol_type = other DNA

SEQ ID NO: 15261 - DNA, 557 bp, synthetic construct; identical to SEQ ID NO: 2121
  source 1..557: mol_type = other DNA

SEQ ID NO: 15262 - DNA, 470 bp, synthetic construct
  source 1..470: mol_type = other DNA
aaaaaaacaaacaaatctagcccagcaatcccaacccacccttctagccttagggtttcacttaattcttttttatttctgagttcgctgttgtcgcttccctttctccttaacccgttctcccaactccggtctaaatctgaacttcctacggatgaactaattaatttcccagctcctactccccgtctttagagattatgtcgtcgtcaaaaactccaggcgtaacccccgataatcatctgccggagcctaattcacagtccaccgagtccaatcttccagatcaagctatcacttctccaaaacccgatgttttaccgcccggtcctccgtcgataaacttggcgaatctccggaaattaattggcaagggtggaacggcacctgctttgggtttttgagcacaaacaaccccggtttcgaccaccaatcagtctaacttctttaaaactctttcgtttgattcg

SEQ ID NO: 15263 - DNA, 400 bp, synthetic construct; identical to SEQ ID NO: 1778
  source 1..400: mol_type = other DNA

SEQ ID NO: 15264 - DNA, 526 bp, synthetic construct; identical to SEQ ID NO: 2078
  source 1..526: mol_type = other DNA

SEQ ID NO: 15265 - DNA, 276 bp, synthetic construct
  source 1..276: mol_type = other DNA
aagccccaaacgcatccgtgaaactccaagacacagcactcaggtactctagcaaatgcacctcagcaccagtcttgtcattttataacgcattcatgcactcgcagatatgccatctcggagcataaccattggatgaagtaatcctatgcgctcccccgagcaagccctgcaatgtgagatgtgcttctctcctgtatatacactttcctgcattatcattgacttaagaaaaaaataccccgtgagacaacagtcaaatatcttcctagcatc

SEQ ID NO: 15266 - DNA, 440 bp, synthetic construct; identical to SEQ ID NO: 1892
  source 1..440: mol_type = other DNA

SEQ ID NO: 15267 - DNA, 398 bp, synthetic construct; identical to SEQ ID NO: 1772
  source 1..398: mol_type = other DNA

SEQ ID NO: 15268 - DNA, 303 bp, synthetic construct; identical to SEQ ID NO: 1492
  source 1..303: mol_type = other DNA

SEQ ID NO: 15269 - DNA, 421 bp, synthetic construct; identical to SEQ ID NO: 1834
  source 1..421: mol_type = other DNA

SEQ ID NO: 15270 - DNA, 447 bp, synthetic construct; identical to SEQ ID NO: 1911
  source 1..447: mol_type = other DNA

SEQ ID NO: 15271 - DNA, 677 bp, synthetic construct; identical to SEQ ID NO: 2283
  source 1..677: mol_type = other DNA

SEQ ID NO: 15272 - DNA, 617 bp, synthetic construct
  source 1..617: mol_type = other DNA
tgtacaaaataatattaatacttcatataaaagatcatattcagtcctatttatacttaggacgaatattgttaggagaaatggctattcccctgcctaaaatggaattgatgaagatgatctcgtcaatagaattaaagttagaggaatgctggtacattcatataaaacttgatcctgtattctcccaacgatacggagttgtctcacatcatagttttatcaacatctcagtcagtgaggtactaggacttgccaatcatatgttgaatgttatggatctggatattaccgatcaggatatagagtacaccgagatataacatatctataacatcaattttatgtagttgcttcacatgagttgcgtgtgcttcccattgtaagctcttggttgtgggttgtttggcagcatataatagtatttatatatctgtatctatatacattaatcctcaacatatattatgcttgcgcatcatttacacctactagcacttatacgtatacgtcttcaagaaagttaaatagttttaaaaactttctaaattacttcacaagattgtatttagttatttacattaacaatagacactaattgttgtttataccaccag

SEQ ID NO: 15273 - DNA, 418 bp, synthetic construct
  source 1..418: mol_type = other DNA
aagacactgggaaaaatcctgcgtccccgatatggtgtttacaattgatatatctaagaaaggtaaaggcttctgggataaaattaatgactaagaaaataataacaatatataatagaagagatacgagtagacatactaacagtatacttccaataacacgatccatttgaatgggtgtggatataaaatttatacacaacaaaaatactaatataagaaattaagattgaaatatagatcaaacttaattaatactactatagaaaaagcaagtctgcaagagaagtgcggactgacaaatccgtaaacggataaattgatgactaaataaataaatagataaataaataaatacataaataagtaagtaaataaataaacatataacaaaaataaaaataaaaatcttaataat

SEQ ID NO: 15274 - DNA, 763 bp, synthetic construct; identical to SEQ ID NO: 2390
  source 1..763: mol_type = other DNA

SEQ ID NO: 15275 - DNA, 723 bp, synthetic construct; identical to SEQ ID NO: 2339
  source 1..723: mol_type = other DNA

SEQ ID NO: 15276 - DNA, 657 bp, synthetic construct; identical to SEQ ID NO: 2252
  source 1..657: mol_type = other DNA

SEQ ID NO: 15277 - DNA, 423 bp, synthetic construct
  source 1..423: mol_type = other DNA
aaaaactataacatacaacacattaccatgctatacaccataggactacccagtgtactgcagtgggtccaggacggaaaccaccggtccactcaggctactctgtatttgggcacaaccaggaacaagacaatacctaaagctgaatacatagaactcttagaaacatctgtcagtgtgagcccctccaccggcctggccattgtattcaaaagaccggagtcaaatgatctacttcccatgtggagacggcattggccaaacaccagcgaaatcactgtgaatttagctggatacatgggtatcactcctcaacaatcgctaggagttgaagtggagatcgcattttgggaccctatagttatgtaatttctgttctgttgcactaataatgtaaaaaaaccaacatcttaaccagctata

SEQ ID NO: 15278 - DNA, 261 bp, synthetic construct
  source 1..261: mol_type = other DNA
gaaaataagacaataaccaaaacttataatcttctcttaacatccccataccctggcaaccaaacgtgaaacacatatgctcaaaaacgcgcaatctctcagagcatttcactctccacaaaacgaatcctatactctctaccatggcacgaacgccagcccagataatcacgattctaaccaatctcgtagcatgggggttcaaattccgagacactgaggtaaatttaattctaatattaaagagtgttatgcaacatc

SEQ ID NO: 15279 - DNA, 511 bp, synthetic construct; identical to SEQ ID NO: 2049
  source 1..511: mol_type = other DNA

SEQ ID NO: 15280 - DNA, 1000 bp, synthetic construct
  source 1..1000: mol_type = other DNA
gccgcccgggccaagtaccagaggcaagagaaatattgtcactgtggctgtggaccccaatgcaaaaagaaagaaacttgtcacaaagcagtctgcaggcacagctcaggcaaatgctctccagaaacaccacgaagacatgctaacacaaagcaagaacatcatgaatcagctagcagcccataacaagttgcttcttgaaataagagcacttgtggggtcttatgaggctcggatagtggagcttgagagaacagtctctggcttaactctcgcacaaggagcacatgcagcacccgcccccattgtaagaggctcagccaatatagcaggccttcccagagggagaatgccggcccctgctcctcggcaggtgggatctgctacgattagagggttgggggtcagaggcagaggcagaacccctagttacaggccagtttctcctccaggtcacggcagtgacagtgatgatgcaaatacctcagctatgtcagggatacaggatgagaagtctttccttgatgcactcttgtaaacctgttttatacaatgtacaatataaatttataaaaactgacatcaggaaaatgacaagaattgtagggctagatgttttagtgacatacaccagggaccatgagaagacaacatccggcctcatggtcttaggggcctgcaaagagaagccccgagactttacagtggatgagctatcatctattgagatggagcttgtcctacttcagtcccagcccagactctacatccatgcagggggctctaatattccgtgcctcacaaaaggggtctactatgatttagcaggatttttggagatacctgctgctgcactgttctcataccagatagagatcattattgtaggtggaggagtctttccataactgtgattgtcagtgatggggtctattatttaacctatactactttaagaccttaaattaaccaactaataaaaactgacaacaaggagaaa

SEQ ID NO: 15281 - DNA, 337 bp, synthetic construct; identical to SEQ ID NO: 1612
  source 1..337: mol_type = other DNA

SEQ ID NO: 15282 - DNA, 339 bp, synthetic construct; identical to SEQ ID NO: 1620
  source 1..339: mol_type = other DNA

SEQ ID NO: 15283 - DNA, 733 bp, synthetic construct; identical to SEQ ID NO: 2351
  source 1..733: mol_type = other DNA

SEQ ID NO: 15284 - DNA, 289 bp, synthetic construct
  source 1..289: mol_type = other DNA
gacgctacaacagaccaaaaatagtatcaaaccatcttttgtctggggttcttactggggggaacggtcaagccgttaggaaatgttttttcgtggattgatgtaccgtccggacgctttgcttcttcatgcctttggaagattgagcaagaaactttagaaccagtattaactcttatttaaaaaggtctattcattgagattaatctgtttagtctttttataacttttatacttaatattgagaacatttagcacattgacaccagtcagtatctttaaagcaata

SEQ ID NO: 15285 - DNA, 357 bp, synthetic construct; identical to SEQ ID NO: 1661
  source 1..357: mol_type = other DNA

SEQ ID NO: 15286 - DNA, 955 bp, synthetic construct; identical to SEQ ID NO: 2555
  source 1..955: mol_type = other DNA

SEQ ID NO: 15287 - DNA, 260 bp, synthetic construct
  source 1..260: mol_type = other DNA
accaagaacccctctaaatgtaaggagatcagattcaaatcctaaaataaaaaaatcacaaaccttaaagaaaataaaattccatacttgtgaagttatatttctttttattagtattttttgttttttaatcccttttaccatttaatcactccaccatcccacccaatttattacatctattttgttatctcatccgtcatattcgactgtcattccaattttttgttcatatcctctgcttttcatttaattatatc

SEQ ID NO: 15288 - DNA, 531 bp, synthetic construct
  source 1..531: mol_type = other DNA
aaattgttaacaataacaacaaatataatattttaattttttaccataaaaatcagattacagcgaatcactgtaaaaccatattccaattcacaacatacatctccactaaaaaatcctctctgtatgcaatcattgaaccctaatttgtttgataattgcgacattgcatctgtattcattaataaaactcaacattgtccttcctattcctattgtatcagtgacttaaaccaaaccaaaagtgccatataattccaaagatttatcttttcagtaattaaaaaaatcacttaaagaaaataaaatcttcaccggttttcttaaaaattattgtctcatttgatacacactctcatactccaataaaaatcttttgtttttatccttatgtagcgatctaaaattgaaaattccatttaattatttaaattacctctataacaaattgttcaatccttttttattaattaagattatattcatcagagctggtcaaatttaaccgaaaacaagacatttgtgtttctc

SEQ ID NO: 15289 - DNA, 269 bp, synthetic construct
  source 1..269: mol_type = other DNA
attaatataagaagcattaaaaaaaccacgtaaagaaaataaacacagttaatccttaaaccaatcaaaagtaataatccttgtttatcaaaatcaacatataaataacaaagtcaattttggcttaaaaaaaccttaatttatatttaaccagtcataacagttcattaatttcttttgcctaactgtgcaactaacctccaaactctataactactatcattttccaaataaataaaaaagttgttttaaaaattaaaaatcaagct

SEQ ID NO: 15290 - DNA, 606 bp, synthetic construct
  source 1..606: mol_type = other DNA
aaaaatcaccgtcttctccaaacaattttcttacactttttatagcttttatcttgtcaatggaaattccccttgacgactttattcaatattcagatcaatccttttttgatcccctgtacaatccattattaaatcaaaatcattcttcttattcccactcttctaaagcagtaactcacataattttaatcatctttcttattgtgtttcacttgattcaaatttcaaataccttaattcagtcatcatgcacaactatcatggacactctgagcctcttaacaaaccaaacgctcagaatactgcacaatcttatttaaaaatcctccatattatatggatcataattaaattttgttttcaactaataatagttttctgtgtagttgggtcatttgttattgattgtttagtatttaaagttgtggctcctgaagattggagagatctgatcaaaaacaagtctttatttacttggcaaaatatgacagtataaaaatcacaaagaaaataaaatcctttattctcttaatcagaactaataattttattagtaatcataacaaattaaaaaaatcacatcgtatcattccaattgttata

SEQ ID NO: 15291 - DNA, 270 bp, synthetic construct
  source 1..270: mol_type = other DNA
cctttttcttctacatcagtgagttgattcatacaaactttctacctacattcttcacttcacaatcataatcaccaaccctctgtggttcaactaatcaaacaaaacccatctggagcctcagatcatcccaagtcattgttcatcagatctagtactcaaataagttaataaaaatatccacatggggcaaataatcattggaggaaatccaactaatcacaatatctgtcaacatagacaagtcaacacgccagacaaaatcaacca

SEQ ID NO: 15292 - DNA, 307 bp, synthetic construct; identical to SEQ ID NO: 1502
  source 1..307: mol_type = other DNA

SEQ ID NO: 15293 - DNA, 654 bp, synthetic construct; identical to SEQ ID NO: 2248
  source 1..654: mol_type = other DNA

SEQ ID NO: 15294 - DNA, 1000 bp, synthetic construct; identical to SEQ ID NO: 2603
  source 1..1000: mol_type = other DNA

SEQ ID NO: 15295 - DNA, 783 bp, synthetic construct
  source 1..783: mol_type = other DNA
taaaaacacatcagagtgggataaatgacaatgataacattagatgtcattaaaaatgatgggtcttcaaaaacatgtactcacctcaaaaaaaataattaaagaccactctggtaaagtgcttattgtacttaagttaatattagctttactaacatttctcacagtgacaatcaccatcaattatataaaagtagaaaacaatctgcaaatatggcagtcaaaaactgaatcagacaataaggactcatcatcaaataccacatcagtcacaaccaagactactctaaatcatgatataacacagtattttaaaagtttgattcaaaggtatacaaactctgcaataaacagagacacatgctggaaaataagcagaaatcaatgcacaaacataacaacatacaaatttttatgttttaaatctgaagacacaaaaaccaacaattgtgataaactgacagatttatgcagaaacaaaccaaaaccagctgttgaagtgtatcacatagtagaatgccattgtatatacacagttaaatggaagtgctatcattactcaatagatgaaacccaatcctaaatgttaacactaggttaggatccatccaagtctgttagttcaacaatttagttatttaaaaatattttgaaaacaagtaagtttctataatacttcataataataagtaataattaattgcttaatcatcatcacaacattattcaaaaccataactattcaatttaagaagtaaaaacaataatatgggacaagtagtt

SEQ ID NO: 15296 - DNA, 1000 bp, synthetic construct
  source 1..1000: mol_type = other DNA
aataggttataatcaatagcttaatcataattaaaacattatttaaaaccataaccattcaattcacaaagcaaaaacaaaaacatgggacaagtagctatggaggtgaaagtagagaacactcgagcaacagacatgctcaaagcaagagcgaaaaatcgtgtggcacgcagcaaatgctccaaaaatgcctcttcaatcctcataggaataactactctgagtatagccctcaatatttatctgatcataaactacacaatacaaaaaactacatctgaatcagaacaccacactagctcaccacccacagaatccaacaaagaaacttcaacaatccctatagacaacccagacatcaatccaaactcacagcatccaacccaacagtccacagaaagcctcacactccaccccgcatcctcggtgagcccatcagaaacagaaccagcatcaacaccaggcataacaaaccgcctgtcctccgcagacagatccacaacacaaccaagcgaaagcagaacaaagacaaactcgacagtccacaaaaaaaccatctcaaacacaacttccagaacacagtccccaccacgaacaacagcgaaggcggtccccagaaccaccgcccttcgcacaagcagcacaggagaaagaccaaccacaacatcagtccagtccgacagcagcaccacagctcaaaatcatgaggaaacaggctcagcgaacccacaggcatctgcaagcacaatgcaaacccagcacaccaacactgcaagaccaaatcagtcaacaaaaaacatgaaacagctctaaagtaaaacatgtaggtgctaacaatcaagaaatcaaaagataactaataatctctctaaaacagcaacaacatcatgtcaactttgctcaaatctccctgggagaaactttcgcccccatactgacaacatcacaattatctcaagaaaagaaactgggcaaaacatcaccaaagagacaaataaca

SEQ ID NO: 15297 - DNA, 1000 bp, synthetic construct
  source 1..1000: mol_type = other DNA
agctgcattaaatgaggataatggtaaaacccataagagactcagaggaataagtaattttgaagtaaaggatcaatatcaagaagagactgacaaacctgttaaaaaaggcatagacgggaatactgcatcgatgtctttgaagggaaaacgtacatcagggaatggtgcaacccagtctgttctccaatcacccctcaaccaaaattcgccccatgcatatgtggagaatgcccaaggacctgcgagagatgcagagaggatgaattccaacctagacagggataaaagtaattctgaacaagacgaaatacaatccaagttggataaaattttagagaatcaaaatatgatactaaaaaaattagatatcgtttatgaggttagagaagagattaatagtattcagaaagtacttagaaatcaaggactatcactctcagtaattgatagttgtttaaatgatctcatgatagcgataccatcacaaggaaaagatcagtctagcaaaaatgtagatactaatcctgatttaaagttagtgattggaagagataatagaagaggcttaagtgatcttacagacagaaagcaatcaatcaaagatgtcaaatttggagaagacatttacaaatgttaccccattgacaaacgatatatgcaagaacctttaaactttaatactaacaatgcagcaaattttgtaccgcaagatgataacatatctttatctgttgtaatggcaatgatagatagaaaagtaaaagacaaatccaaggttgaaagattgaagaaattaataatggagggatatggaaagataccactaaaagaaatttactcacaaataatcaagctcatgaattaatctcaaatgttaaacttactaaatgtagttaggattaacattatataaaattaacaattcaactaatcttaaatttatatattgaatcattattattacaaaaaacttaggatcaaaggattcaaaacagca

SEQ ID NO: 15298 - DNA, 522 bp, synthetic construct
  source 1..522: mol_type = other DNA
agaaatatttaattcagatataagagattttgaatgttgttgtaactgtaaattacatagccactttgattttataattaataatatcttagccttgattaataaatgttataaataaataaaaaactaaggattaaatgttaggtcttaagaaactgtttcaatttgccttagattttaaagtttaaaaaacaagtaatcattttgttttatagagtaatttgataagttaaaagatgtttctttatagtttacacaattaattatttatattagttattggaatatgtaaataatttgtattgtaattaagtaaatgaacttaacagttcatatatcaagaaataagccgatatttaaggtgctgctatagtaaattctttaggatattagttttaaagatattctttttatataaaagatcaataattgcaataaatcaatttatactcattttattaatttagtactaacattaaaacttattgaaattaataaaattattaaatattaacttaaata

SEQ ID NO: 15299 - DNA, 687 bp, synthetic construct
  source 1..687: mol_type = other DNA
ttaagatagcttagattggattgtagatcatgctatagaaaataatataatattaccattaatcattatttgaattactgatgtaatactgtgaatatattaataatagtaatttataatttaaactattatattgattctaaattatttataaataaatgtttaaatgttattatatatgaataataaatttagtagttgttaacaattatataataataatagtattagtattccgattgtttaggaattcttttaaacttataattatacataaattatttaatttaataaatcactaagttaataataaaaatgttatttatcatgatatatagtaaaatcaagattaggttcaaaatctttaaatactaataattattataatatatccatcataaaataatgtagttggtatcattaatagttgtgagttatttaaaataaatgtttaatatagattacaaaaaacttaggatgaatgatcacttcaatgatcattatctttattattactgtcttgttaaatcaatagaaattaaaattaacattaaaatttacatttaattgcaaaaaccatatataaattgtgtttaagctcactattctacttaagatagattgatatatagttttaacaacagttagatataagtattatattgaatactttaaaatacaataaca

SEQ ID NO: 15300 - DNA, 273 bp, synthetic construct
  source 1..273: mol_type = other DNA
cattaacaaaagtaagcttactacaagttataacgcttgaattatcaatataaacaatgcataaataatttcaaaaattaattcttgatattacaacttattctgagtcaatcatgattcgtttaagtcaattatatatagtcaatgttcttgtgattttaaatatactatagttaataaatttagtaactaatgtgaaaattataaaaaacttaggattaatgttgacacattctgtaagaagatagtgtctacatttatccttgacacgat

SEQ ID NO: 15301 - DNA, 892 bp, synthetic construct; identical to SEQ ID NO: 233
  source 1..892: mol_type = other DNA

SEQ ID NO: 15302 - DNA, 262 bp, synthetic construct
  source 1..262: mol_type = other DNA
cgaactggcaattttccatctactgaataagctgttctcacttaattttaccctatcaactctactaggagctttgcttgtagtttgctattagttgttaagaagtattttaaagaaaacttagaaaaaagacagatgagcccgaacagggtaaaagcgtgggcatttccctagttcgggtagtctagtgctctacaccagattataaaagttgtttctattgctcctgcatctgcacgtctatctaaaaaccttaaaagct

SEQ ID NO: 15303 - DNA, 654 bp, synthetic construct; identical to SEQ ID NO: 2249
  source 1..654: mol_type = other DNA

SEQ ID NO: 15304 - DNA, 372 bp, synthetic construct; identical to SEQ ID NO: 1707
  source 1..372: mol_type = other DNA

SEQ ID NO: 15305 - DNA, 285 bp, synthetic construct
  source 1..285: mol_type = other DNA
cacatcaacaacccagtcatagctacacaacaatcacaaaccgaaaaaatctcaaagatacacaatcgcacacatacaatgaaagcaatcactcccgttctacatcacaacccagaaatcccaccaagcgcaacaccacgaccaatcaactgataacacatagtagaatacaagaacacaactgcattgatttaagaaaaaactaagataggcctgaacggttgcattcaggattctcaatcgttcaggccaatacaattctcagcttcaaacgaaaacaacaag

SEQ ID NO: 15306 - DNA, 803 bp, synthetic construct; identical to SEQ ID NO: 2439
  source 1..803: mol_type = other DNA

SEQ ID NO: 15307 - DNA, 494 bp, synthetic construct; identical to SEQ ID NO: 2014
  source 1..494: mol_type = other DNA

SEQ ID NO: 15308 - DNA, 722 bp, synthetic construct
  source 1..722: mol_type = other DNA
tcaataggattgctctgtaacacaaactgattttataaggtgaaatatgctcatataaaatggttaatagacaaataataataataatcattataacaaaattaaaaggataaaataattataagaacactacgaactaatcaagaaacaaacataacattaactaacaacagctaacatgaccaatgatactccatgaagcatcatccattaataacaaaaagtataatctatcaattagaaccaaacttgatctattctaagtaatctaccaagcaaaaacatacaccaagaatcaccagccatcgaatctgattaatctgacacaaaaatccgaacaaccgccggaacaggcctggtcctaataaacaacccacccggccaccagcccactcaaaatcaagacacaatcaatctcaccccaatcaccagttcaatccgcgagccagacaagtccttccacatgcccagagattcaattgatctgatacattgctatattttttaagaaaaaagaaaaatgagtgggtgagacattctagttctcatacacagaataaacttcgaacattggatgtagtatggatcaaaattgaagattgaagaactagtatgattccgcacactagcagacaagcaatgaggaataaaaagaatagacaattgcccaggaggaatgacacaaagcatccaacactaggggggaagagaccacctctaag

SEQ ID NO: 15309 - DNA, 273 bp, synthetic construct
  source 1..273: mol_type = other DNA
accattaacagcccactcgtaatcacacagcaatcataatccaaaaaaatccctgatacccgcaatctcacacacacaacaggcaaaatcaactccacaccacaatacaaatcaaaactcccaccaaacacgccatcacaaatgatcaatacagcatgcaagaacctaatcactatgatttaagaaaaaactacgataggcctgaacggttgcattcaggtcactcaatcgttcaggctactataatttctaattccgaacaaaattgacaaa

SEQ ID NO: 15310 - DNA, 494 bp, synthetic construct; identical to SEQ ID NO: 2015
  source 1..494: mol_type = other DNA

SEQ ID NO: 15311 - DNA, 722 bp, synthetic construct; identical to SEQ ID NO: 2337
  source 1..722: mol_type = other DNA

SEQ ID NO: 15312 - DNA, 610 bp, synthetic construct
  source 1..610: mol_type = other DNA
agggatggatgctcgcctgcaacatcttgaacaaaaggtggacaaggtgcttgcacagggcagcatggtgacccaaataaagaatgaattatcaacagtaaagacaacactagctacaattgaaggaatgatggcgacagtaaagatcatggatcctggaaacccgacaggggtcccagttgatgagcttagaaggagttttagtgatcatgtaactattgttagtggaccaggagatgtgtcattcagctccagtgaagaacccacactgtatttggatgaactggcgaggcctatccccaagcctcgtcctgcaaagcagccaaaaccccaaccagtaaaggatttagcaggaaggaaggtgatgataaccaaaatgatcactgactgtgtggccaatcctcaaatgaagcaggcgttcgagcaacgattggcaaaggccagcaccgaggatgccctgaatgatatcaagcgagacatcatacgaagcgccatatgaacctacaaagaacaccagactcacgggaaaatccatgaactgagagccgcaataattccttattaaataaaaaataagcacgaacacaagtccaatccagccatagcagca

SEQ ID NO: 15313 - DNA, 595 bp, synthetic construct
  source 1..595: mol_type = other DNA
agggatggatgctcgcctgcagcatcttgaacaaaaggtggacaaggtgcttgcacagggcagcatggtgacccaaataaagaatgaattatcaacagtaaagacaacactagctacaattgaaggaatgatggcgacagtaaagatcatggatcctggaaacccgacaggggtcccggttgataagcttagaagaagttttagtgatcatgtaacaattgttagtggaccaggagatgtgtcgttcagctccggtgaagaacccacactgtatttggatgaactcgcgaggcctgtccccaagccccgtcctgcaaagcagccaaaaccccaaccagtaaaggatttagcaggacggaaagtgatgataaccaaaatgatcactgactgtgtggccaatcctcaaatgaagcaggtgtttgagcaacgattagcaaaggccagcaccgaggatgctctgaatgatatcaagcgagacatcataagaagcgccatatgaattcaccaggactaccagactcacggggaaatccataaactgaaagccacaatgattctctgttaaataaaaaataagcacgaacacaagtccaat

SEQ ID NO: 15314 - DNA, 808 bp, synthetic construct; identical to SEQ ID NO: 223
  source 1..808: mol_type = other DNA

SEQ ID NO: 15315 - DNA, 372 bp, synthetic construct; identical to SEQ ID NO: 1708
  source 1..372: mol_type = other DNA

SEQ ID NO: 15316 - DNA, 260 bp, synthetic construct
  source 1..260: mol_type = other DNA
tactattgaatgaagactccagattcaataataattgaaaggctctctatcttatgcaatagttatacgttttggctgtattagaatgttatagattctgctgtttttcccatatgaagcaatccttcaacaccgacttaggttcaattttctcatcatttactgttgtaattcaatcttactaaagttattccgatatttaagaaaaaataacctttatataatgtaacaatactattaagattatgatataggccaga

SEQ ID NO: 15317 - DNA, 1000 bp, synthetic construct; identical to SEQ ID NO: 2604
  source 1..1000: mol_type = other DNA

SEQ ID NO: 15318 - DNA, 358 bp, synthetic construct; identical to SEQ ID NO: 1668
  source 1..358: mol_type = other DNA

SEQ ID NO: 15319 - DNA, 254 bp, synthetic construct
  source 1..254: mol_type = other DNA
gttgggtgtcttctcaaacgaatcagcctgcatgtctaacactactgttataccgatctacctctacctggtgttgggtctataaacactgtactaccttctgtaatgtagggaatgcattactcaaaactggaatctccccagtagtttaataaaaaaccggttgaacatgacagtatattatttagcttatggctaatactccatacagctaagtaggcccgactcaggtgctacccaacccccagccagcc

SEQ ID NO: 15320 - DNA, 742 bp, synthetic construct; identical to SEQ ID NO: 2363
  source 1..742: mol_type = other DNA

SEQ ID NO: 15321 - DNA, 255 bp, synthetic construct
  source 1..255: mol_type = other DNA
ttctaattacagtataagtaagctgttaactacccattaatatacatgtttcttgaactaatcattcctatatatttaatttaagaaaaaatgataggcacgaacccttatggtgccgtaacgtctcgtggcactgggttcaacaaaaccctcgctttagacactacatccaatttcctttccctatccaatcaattacctcacagttggtaacccactacaagaagtcatatacactacactggtgccgccacc

SEQ ID NO: 15322 - DNA, 773 bp, synthetic construct; identical to SEQ ID NO: 218
  source 1..773: mol_type = other DNA

SEQ ID NO: 15323 - DNA, 255 bp, synthetic construct
  source 1..255: mol_type = other DNA
attaagatctctaacgatccgatatcagatgagttcggataacatacagatgattaacacctataaccttcttaatattgcatttgaacaaaaagaaattgatatcaatctgagtttaacaatactgtaagagatcatatactatgattttggataattaagaaaaacttaggattacacattatatacatcattctgtgtgacaacattcatcaaactagcttcaaaggcgttagcctctcaaaaagtgtcagt

SEQ ID NO: 15324 - DNA, 262 bp, synthetic construct
  source 1..262: mol_type = other DNA
aggccaagaaccctgacctggaagtaactatatccgtgatcgagtaatgcttcagaaaattgcgaccacccgagcaatcccggaatacatccgactcgaatctaccccaaatgacaactcacaatttgactctctttgacctagcactgagcattaatacatttttaaatatccaattatttaataaaaaactgaatgggggagaacacccgattatcactcaacagccaacctttgtctcgtgttgcttcgtggaacccaa

SEQ ID NO: 15325 - DNA, 506 bp, synthetic construct; identical to SEQ ID NO: 2036
  source 1..506: mol_type = other DNA

SEQ ID NO: 15326 - DNA, 549 bp, synthetic construct; identical to SEQ ID NO: 2113
  source 1..549: mol_type = other DNA

SEQ ID NO: 15327 - DNA, 441 bp, synthetic construct; identical to SEQ ID NO: 1894
  source 1..441: mol_type = other DNA

SEQ ID NO: 15328 - DNA, 1000 bp, synthetic construct; identical to SEQ ID NO: 257
  source 1..1000: mol_type = other DNA

SEQ ID NO: 15329 - DNA, 273 bp, synthetic construct
  source 1..273: mol_type = other DNA
agagaagtataaaaattattaataaagatatgatttgcaataggatgttagagtcagataatataatgatgaggggcagatattcagggggaatttcgaaataatggttgtataaataatgcgaaaattaagaaaaaaccataacatgggggcgacccttcacattgagaatcacacaaatacccatagcaatctataacccactcatcttgatcagaactttcaacaagccctcctgtagttctctatcactgctgaatcatgagtacatct

SEQ ID NO: 15330 - DNA, 336 bp, synthetic construct; identical to SEQ ID NO: 1608
  source 1..336: mol_type = other DNA

SEQ ID NO: 15331 - DNA, 334 bp, synthetic construct; identical to SEQ ID NO: 1595
  source 1..334: mol_type = other DNA

SEQ ID NO: 15332 - DNA, 1000 bp, synthetic construct; identical to SEQ ID NO: 258
  source 1..1000: mol_type = other DNA

SEQ ID NO: 15333 - DNA, 587 bp, synthetic construct; identical to SEQ ID NO: 2155
  source 1..587: mol_type = other DNA

SEQ ID NO: 15334 - DNA, 390 bp, synthetic construct; identical to SEQ ID NO: 163
  source 1..390: mol_type = other DNA

SEQ ID NO: 15335 - DNA, 411 bp, synthetic construct; identical to SEQ ID NO: 167
  source 1..411: mol_type = other DNA

SEQ ID NO: 15336 - DNA, 394 bp, synthetic construct; identical to SEQ ID NO: 1764
  source 1..394: mol_type = other DNA

SEQ ID NO: 15337 - DNA, 267 bp, synthetic construct
  source 1..267: mol_type = other DNA
tcatttaattatgctgttattattttagcatattgtatcagcattatctgcttgcatgcagctcctaagagaaacccagatacaacaatggtaattattgagggataatgtctaggatggattaaaagcatcaatgtggttactacactcagacctatatactatatcaattaatctacacaataaatctgtatactagattttattatccaattaagaaaaacttaggatcaaagaaagttgcacatcactgacagcattgtagca

SEQ ID NO: 15338 - DNA, 363 bp, synthetic construct; identical to SEQ ID NO: 1681
  source 1..363: mol_type = other DNA

SEQ ID NO: 15339 - DNA, 423 bp, synthetic construct; identical to SEQ ID NO: 1838
  source 1..423: mol_type = other DNA

SEQ ID NO: 15340 - DNA, 1000 bp, synthetic construct; identical to SEQ ID NO: 2605
  source 1..1000: mol_type = other DNA

SEQ ID NO: 15341 - DNA, 708 bp, synthetic construct; identical to SEQ ID NO: 2318
  source 1..708: mol_type = other DNA

SEQ ID NO: 15342 - DNA, 647 bp, synthetic construct; identical to SEQ ID NO: 201
  source 1..647: mol_type = other DNA

SEQ ID NO: 15343 - DNA, 748 bp, synthetic construct; identical to SEQ ID NO: 214
  source 1..748: mol_type = other DNA

SEQ ID NO: 15344 - DNA, 294 bp, synthetic construct
  source 1..294: mol_type = other DNA
tcaaaggatcccggtgtacggacatatgagagaaacactacatagttttaaactaattatacttcagcaacctagctggagaataaatgtacctcaatcaacttaattacaacttggcttgatgattctctttaagcttaccacggcctgaattaattcctcactgtaactattaagatttataatggcatgatctatgttaggttaacgtaattgtaaaataaaaaacttaggagcaaagctctttaagacctctccgagcgtttttgaaaggagatataatacgtgactaag

SEQ ID NO: 15345 - DNA, 1000 bp, synthetic construct; identical to SEQ ID NO: 259
  source 1..1000: mol_type = other DNA

SEQ ID NO: 15346 - DNA, 1000 bp, synthetic construct
  source 1..1000: mol_type = other DNA
atcactccacccccgccgcaccgtcccgcagagacccacagcagggcagaacgcccgacaccagcctcaacccagccgaacaacaaggcctagacccccacagcgcagccccccaccccgaactcaacacacggagcacccagctctgggcagcacccgcaccccacctgccctgcacccccacctggtccggacctccccacggctccgcccaccgccgcagccgaccaaggcccgaccaacacgcggccgctgcacatccagagcgcacacccgacaacaaccccgacagtcccctaccgaaaggacaaccccagacacccaaccagggccaacagaggaaggaaaccacaggaaccagacacccccgagacgaggcaacctacccaccatgaataccaaacaaaacttagggtcaaagaatcacatcaacccgaatcgccggaagagacaacatcaccgacacacaaccaaaccgggaaccaaggggcaaccacccgcagggcccagggcccgggcccaccacccagagcagcgcagaaccgaaggacaggcccgccccacgcacagcagcagagcacctccagaccccccacccagagccaccccgacgccggaccgagcccaagagcacccagggggaccctccggtcccagatccccaacagcagcaccccccacgcaccccccccaccaccgcccccgggactccacctccacaccacgccagatgggaacagagggccccactcccccgcccccctccgcccgagcactcccatcgagaccacccccgcaccccaacacagcggaccctggtcacccatcgccgccggagagccggccaggcggagcaccaagggcaagccactgggtcccgcggcagatctccccagccgggcagcccaaggccaccaaatccatccgagcatcaaaccacggcatagcgaccgagacactgcccaataaacacacccagatcacccacataatctctagc

SEQ ID NO: 15347 - DNA, 551 bp, synthetic construct; identical to SEQ ID NO: 2115
  source 1..551: mol_type = other DNA

SEQ ID NO: 15348 - DNA, 377 bp, synthetic construct; identical to SEQ ID NO: 1720
  source 1..377: mol_type = other DNA

SEQ ID NO: 15349 - DNA, 1000 bp, synthetic construct
  source 1..1000: mol_type = other DNA
gaaacagcgccgacacagccacccctctggcggaacgaggccgaaccccccaacaaactcgctccaggggggggccccccccacgacccgccgggcgccgaccgcgcgagccggcgagacacccccaagaggccccgacgaagaccgggcaaccctcccccagaaaacggcccaccaacacacccgaggccaggcgccgggcacccccagccccgccaccggcgggacaggaggacaagacggggtccccccaaccaaagggaccaccagggaagggtccgccgacccagcacagacccggcccaaacaaagcagacccccaagacgaaatcgcccagcacaccccattcatcatcaaacaaaacttaggggtcaagtccagacgacagaccccggtccgccaggcagcaagccgcagaaaggaaggagacaagaccggcccggaaggaggacacccaaccacagaaacccccaacaccaggggaggagccccccctccacacggcggaggaacgggcgagggacaccgaggagaacccgatcgggagccaggagccggagacgccagcggtaaacaggccgggcacacatccgacaccaccggaggaccagagaagggcccgaccccgcgtggacccgacggcaggggatctaaccccgccacaaagagaggcgagaaccctcccccccgcacacaaccggcagacagaccgagggaggaccacctcccaaccagacaggcggctctcccgcagccgagccgcaggtcccaagaagaggacacccccgaaacctcccagaacccctccgctcccggccgccgggacaggagctccgccgccaaaaaccagagtcaccgagagccaaccaggggtcccccccaatccctcccggcgccctcccacagaggctccagcaaagtccctcggcccgacgacccctgcatgcgccgaaagagaaacccaccaaaggacgtccagtacatccatgtataaacatc

SEQ ID NO: 15350 - DNA, 1000 bp, synthetic construct; identical to SEQ ID NO: 260
  source 1..1000: mol_type = other DNA

SEQ ID NO: 15351 - DNA, 1000 bp, synthetic construct; identical to SEQ ID NO: 2606
  source 1..1000: mol_type = other DNA

SEQ ID NO: 15352 - DNA, 1000 bp, synthetic construct; identical to SEQ ID NO: 2607
  source 1..1000: mol_type = other DNA

SEQ ID NO: 15353 - DNA, 372 bp, synthetic construct; identical to SEQ ID NO: 1709
  source 1..372: mol_type = other DNA

SEQ ID NO: 15354 - DNA, 469 bp, synthetic construct; identical to SEQ ID NO: 1960
  source 1..469: mol_type = other DNA

SEQ ID NO: 15355 - DNA, 251 bp, synthetic construct
  source 1..251: mol_type = other DNA
atgagcatggaacaatgggatgattcaaccgacaaatagctaacattaagtagtcaaggaacgaaaacaggaagaatttttgatgtctaaggtgtgaattattatcacaataaaagtgattcttatttttgaatttaaagctaccttattattactagccgtacgtgcccttctaattaagaaaaaatcggcgatgaagattaagccgacagtgagcgtaatcttcatctctcttagattatttgttttcc

SEQ ID NO: 15356 - DNA, 283 bp, synthetic construct
  source 1..283: mol_type = other DNA
cgtacgttttcaaagttcaatttgagtcttaatgcaaataggcgttaagccacagttatagccataattgtaactcaatattctaactagcgatttatctaaattaaattacattatgcttttataacttacctactagcctgcccaacatttacacgatcgttttataattaagaaaaaactaatgatgaagattaaaaccttcatcatccttacgtcaattgaattctctagcactcgaagcttattgtcttcaatgtaaaagaaaagctggtctaacaag

SEQ ID NO: 15357 - DNA, 327 bp, synthetic construct; identical to SEQ ID NO: 1572
  source 1..327: mol_type = other DNA

SEQ ID NO: 15358 - DNA, 580 bp, synthetic construct; identical to SEQ ID NO: 2148
  source 1..580: mol_type = other DNA

SEQ ID NO: 15359 - DNA, 440 bp, synthetic construct; identical to SEQ ID NO: 1893
  source 1..440: mol_type = other DNA

SEQ ID NO: 15360 - DNA, 480 bp, synthetic construct; identical to SEQ ID NO: 1985
  source 1..480: mol_type = other DNA

SEQ ID NO: 15361 - DNA, 753 bp, synthetic construct; identical to SEQ ID NO: 2377
  source 1..753: mol_type = other DNA

SEQ ID NO: 15362 - DNA, 461 bp, synthetic construct; identical to SEQ ID NO: 1940
  source 1..461: mol_type = other DNA

SEQ ID NO: 15363 - DNA, 882 bp, synthetic construct; identical to SEQ ID NO: 2517
  source 1..882: mol_type = other DNA

SEQ ID NO: 15364 - DNA, 492 bp, synthetic construct; identical to SEQ ID NO: 2013
  source 1..492: mol_type = other DNA

SEQ ID NO: 15365 - DNA, 512 bp, synthetic construct; identical to SEQ ID NO: 2052
  source 1..512: mol_type = other DNA

SEQ ID NO: 15366 - DNA, 299 bp, synthetic construct
  source 1..299: mol_type = other DNA
ctaggtctccggagggggcaagggcatcagtgtgctcagttgaaaatcccttgtcaacatctaggccttatcacatcacaagttccgccttaaactctgcagggtgatccaacaaccttaatagcaacattattgttaaaggacagcattagttcacagtcaaacaagcaagattgagaattaactttgattttgaacctgaacacccagaggactggagactcaacaaccctaaagcctggggtaaaacattagaaatagtttaaagacaaattgctcggaatcacaaaattccgagt

SEQ ID NO: 15367 - DNA, 439 bp, synthetic construct; identical to SEQ ID NO: 1885
  source 1..439: mol_type = other DNA

SEQ ID NO: 15368 - DNA, 327 bp, synthetic construct
  source 1..327: mol_type = other DNA
gccaatctcttttccctccgaaagaggcaactaatagcagaggcttcaactgctgaactatagggtatgttacattaatgatacacttgtgagtatcagccctagataatataagtcaatcaaacaaccaagataaaattgttcatatcccgccagcagccttaaagataaatgtaataggagctatacctctgacagcattataattaattgttattaagtaacccaaaccaaaaatgatgaagattaagaaaaacctacctcgactgagagagtgttttttcattaaccttcatcttgtaaacgttgagcaaaattgttaaaaat

SEQ ID NO: 15369 - DNA, 579 bp, synthetic construct
  source 1..579: mol_type = other DNA
ttgcaataattgactcagatccagttttacagaatcttctcagggatagtgataacatctttttaataatccgtctactagaagagatacttctaattgatcaatatactaaaggtgctttacaccattgtctcttttctctcctaaatgtagagcttaacaaaagactcataatatacctgtttttaaaagattgattgatgaaagatcatgactaataacattacaaacaatcctactataatcaatacggtgattcaaatgtcaatctttctcattgcacatactctttgtccttatcctcaaattgcctacatgcttacatctgaggacagccagtgtgacttggattggagatgtggaggaaaaatcggggcccatttctaagttgttcacaatctaagtacagacattgctcttctaattaagaaaaaatcggcgatgaagattaagccgacagtgagcgtaatcttcatctctcttagattatttgtcttccagagtaggggtcatcaggtccttttcaattggataaccaaaataagcttcactagaaggatattgtgaggcgacaacaca

SEQ ID NO: 15370 - DNA, 480 bp, synthetic construct
  source 1..480: mol_type = other DNA
ctaagatggaatacttcatattgggctaactcatatatgctgactcaatagttaacttgacatctctgccttcataatcagatatataagcataataaataaatactcatatttcttgatagtttgtttaaccacagataaatcctcactgtaagccagcttccaagttgacacccttacaaaaaccaggactcagaatccctcaaataagagattccaagacaacatcatagaattgctttattatattaataagcattttatcactagaaatccaatatacgaaatggttaattgtaactaaacccgcaggtcatgtgtgttaggtttcacaaattatatatattactaactccatactcgtaactaacattagataagtaggttaagaaaaaagcttgaggaagattaagaaaaactgcttattgggtctttccgtgttttagatgaagcagttgacattcttcctcttgatattaa

SEQ ID NO: 15371 - DNA, 1000 bp, synthetic construct
  source 1..1000: mol_type = other DNA
ccctcttcgagggacgcgcgcgtggccccgagagaacccccccgggcccgacggcgcgacccgcccggggcgcactggggacagtccgccccgcccccacccgcgcgggcccccgtcgccgggggtgcggggagggggtgggagagcggtcgcgccgtgggaggggtggcccggccccccacgaggaacgccggcgcgcccccgcgggggggaccccctcgcggggggcccccgcgggggtgggcgccgggaggggggagagcgcggcgacgggtctcgctccctcggccccgggattcggcgagtgctgctgccggggggctgtaacactcggggggtggtcccgccgccaccgccgccgccgccccgccccgcgccccccggggggaggacgggggcggggggaagacggggcgggacggggccccccgagccaccttccccgccgggccttcccagccgtcccggagccggtcgcggcgcaccgccgcggtggaaatgcgcccggcggcggccggtcgccggtcgggggacggtcccccgccgaccccacccccggccccgcccgcccacccccgcacccgccggagcccgccccctccggggaggaggaggaggggcggcgggggagggagggcgggtggaggggtcgggaggaacggggggcgggaaagatccgccgggccgccgacacggccggacccgccgccgggttgaatcctccgggcggactgcgcggaccccacccgtttacctcttaacggtttcacgccctcttgaactctctcttcaaagttcttttcaactttcccttacggtacttgttgactatcggtctcgtgccggtatttagccttagatggagtttaccacccgctttgggctgcattcccaagcaacccgactccgggaagacccgggcccggcgcgccgggggccgctaccggcctcacaccgtccacgggctgggcctcgatcagaaggacttgggccccccacg

SEQ ID NO: 15372 - DNA, 346 bp, synthetic construct; identical to SEQ ID NO: 153
  source 1..346: mol_type = other DNA

SEQ ID NO: 15373 - DNA, 440 bp, synthetic construct; identical to SEQ ID NO: 172
  source 1..440: mol_type = other DNA

SEQ ID NO: 15374 - DNA, 296 bp, synthetic construct
  source 1..296: mol_type = other DNA
ttacaatgaacagataccgattgggtgaatgacaaactcagggacacttattcactctgttaaaatattacaagaaagtaatgcactgttcgaagagtcgagtactcaagactttgtgaatctttagccttaacatctgggaggctctcaggaattgaaagcatcaatgttctaactgataagcgtgcaaaacactttgaggaaataatttctagttgtcatcagggtattaataataagcacttccacgaagtcaagagtttaatgaggaggagtatcaaatcttcagaaacaaa

SEQ ID NO: 15375 - DNA, 646 bp, synthetic construct
  source 1..646: mol_type = other DNA
tatgtcaggtcacacccaacaatagtgtggacaaattattgcgtgagtaaaaacgcctaggatcccccgtgcgctcgctccgccgtccccctcttcgagggacgcgcgcgtggccccgagagaacccccccgggcccgacggcgcgacccgcccggggcgcactggggacagtccgccccgcccccacccgcgcgggcccccgtcgccgggggtgcggggagggggtgggagagcggtcgcgccgtgggaggggtggcccggccccccacgaggaacgccggcgcgcccccgcgggggggaccccctcgcggggggcccccgcgggggtgggcgccgggaggggggagagcgcggcgacgggtctcgctccctcggccccgggattcggcgagtgctgctgccggggggctgtaacactcggggggtggtcccgccgccaccgccgccgccgccccgacccgcgccctcccgggggaggacgcgggcggggggaagacggggcgggacggggccccccgagccaccttccccgccgggccttcccagccgtcccggagccggtcgcggcgcaccgccgcggtggaaatgcgcccggcggcggccggtcgccggtcgggggacggtcccccgccgaccccacccccg

SEQ ID NO: 15376 - DNA, 257 bp, synthetic construct
  source 1..257: mol_type = other DNA
ccccgtgacccaccgccttttggcggtgggtcacgggggcgtccatttacaggacgacttttggtgttgatgttctaaacaccatgtccctgggcaatacagccctgagaaccgatgcatttagtcctcctgacacagcagcatcgaacatgatgcaatccattagcgcacagtggatcctaggctattggattgcgctttgcattaatcaccttagtggtttctcacagctttgaacaacatctatcagctcaata

SEQ ID NO: 15377 - DNA, 355 bp, synthetic construct; identical to SEQ ID NO: 1656
  source 1..355: mol_type = other DNA

SEQ ID NO: 15378 - DNA, 632 bp, synthetic construct; identical to SEQ ID NO: 2217
  source 1..632: mol_type = other DNA

SEQ ID NO: 15379 - DNA, 734 bp, synthetic construct; identical to SEQ ID NO: 2352
  source 1..734: mol_type = other DNA

SEQ ID NO: 15380 - DNA, 311 bp, synthetic construct; identical to SEQ ID NO: 1517
  source 1..311: mol_type = other DNA

SEQ ID NO: 15381 - DNA, 345 bp, synthetic construct
  source 1..345: mol_type = other DNA
gcagcacgctgtgcctatattttgataaggagtataataataactgttaagtggtatatatatttatgtttaagcttttcttatttgtaactgtaacatatacaagtatcataactacaatattactaattaagacatcttataatattccagcattagaaggtagaaagggttgtttggtttatcagggtgaggagtattgtcgtagatcaactcctaattgtactgacacatcttgtgttgtcatatatatctattatactatatatttaactgttagattattaaccccaattttcttaactaaattaatagttagtcttatagtatcaattaaccaacaaa

SEQ ID NO: 15382 - DNA, 445 bp, synthetic construct; identical to SEQ ID NO: 1905
  source 1..445: mol_type = other DNA

SEQ ID NO: 15383 - DNA, 859 bp, synthetic construct; identical to SEQ ID NO: 229
  source 1..859: mol_type = other DNA

SEQ ID NO: 15384 - DNA, 390 bp, synthetic construct; identical to SEQ ID NO: 1753
  source 1..390: mol_type = other DNA

SEQ ID NO: 15385 - DNA, 522 bp, synthetic construct; identical to SEQ ID NO: 2074
  source 1..522: mol_type = other DNA

SEQ ID NO: 15386 - DNA, 316 bp, synthetic construct
  source 1..316: mol_type = other DNA
ctcacattgtcgtagggatttatataaaaagtgaaaagtgacattaccagtttaattaagattttcgagtttgaaactaaataaaaagagatttaaactctatatcatatttgaagatttaagactagtgcattataatttaaattccatctgacattaattgcttgcattcaaaatattaattttatgataaaattggaaaaattgtggtatattttatcattaatatatttaagttctaatatagtttatagaatttttataatttttgttatattattaataaagaatttattatataatatttatagacaaa

SEQ ID NO: 15387 - DNA, 547 bp, synthetic construct
  source 1..547: mol_type = other DNA
aaacaaacaataaatttttatcaaagaagaaaatataaaaagagatgattatatcttaaaattaaaacataaacttatgtgattattagtatgtgaaatacctttgatttcattgtgaatagtgagaaaaaactcaagataaagcttaaaagtaaaagaaaatatataacagatttgatcctttaagatgaggcaagcctaaatgacaacaatagaaatagaatgagacaaagctagctagatgtcaaatcttaacctaacttaaaataagtgctgtatgtacaaagcttatgtagtaataaaacttaaagtattgattgattaaactaaggattacatataatataaaacattaaattataaactaaaataaccaataattatagataaacttaacataatgtgtgttttaacaaaataatggcttaagataaattataactaacttaaatttatgaattatgattaaaggaagaatatatgattttaaaattaaataaaactaaaatattaaaattacttataaaaatagcaatacttactatta

SEQ ID NO: 15388 - DNA, 898 bp, synthetic construct; identical to SEQ ID NO: 234
  source 1..898: mol_type = other DNA

SEQ ID NO: 15389 - DNA, 435 bp, synthetic construct; identical to SEQ ID NO: 1876
  source 1..435: mol_type = other DNA

SEQ ID NO: 15390 - DNA, 717 bp, synthetic construct; identical to SEQ ID NO: 2331
  source 1..717: mol_type = other DNA

SEQ ID NO: 15391 - DNA, 549 bp, synthetic construct; identical to SEQ ID NO: 2114
  source 1..549: mol_type = other DNA

SEQ ID NO: 15392 - DNA, 690 bp, synthetic construct; identical to SEQ ID NO: 2297
  source 1..690: mol_type = other DNA

SEQ ID NO: 15393 - DNA, 607 bp, synthetic construct; identical to SEQ ID NO: 2183
  source 1..607: mol_type = other DNA

SEQ ID NO: 15394 - DNA, 378 bp, synthetic construct; identical to SEQ ID NO: 1723
  source 1..378: mol_type = other DNA

SEQ ID NO: 15395 - DNA, 307 bp, synthetic construct; identical to SEQ ID NO: 1503
  source 1..307: mol_type = other DNA

SEQ ID NO: 15396 - DNA, 350 bp, synthetic construct; identical to SEQ ID NO: 1644
  source 1..350: mol_type = other DNA

SEQ ID NO: 15397 - DNA, 271 bp, synthetic construct
  source 1..271: mol_type = other DNA
tctcgtacgccagctttcttagcccgcttttatttaacacgtttaattgttttcaagattatttcccgtagggtagtgaccttggttaattgacagtaagaatattattcttgcaattatatatatatatatatagtttaactttatctttaatttaataggtattttatatcacatagttagtttttagaatttggtagtaaaataatatatatattataataaaataaaatataatagaaataaaaataaatataaataaacattgaca

SEQ ID NO: 15398 - DNA, 448 bp, synthetic construct; identical to SEQ ID NO: 1913
  source 1..448: mol_type = other DNA

SEQ ID NO: 15399 - DNA, 415 bp, synthetic construct; identical to SEQ ID NO: 1813
  source 1..415: mol_type = other DNA

SEQ ID NO: 15400 - DNA, 276 bp, synthetic construct
  source 1..276: mol_type = other DNA
aatttacattctgacacgccaatttagtcgctaccaacatttaggtcgctacacagtttaaccactggttcaacgtttcagaatattgttaaattacaccaattcagaattgaacaacacccaatattgaatggtattataaaacaaacacaatataacataatataataaattataataaacaaaaaacacacacataaaacaaacaaacaaaaaacaaaacactcaaacaacatacttagaagaataacccggctgggtccacttctcaagaca

SEQ ID NO: 15401 - DNA, 323 bp, synthetic construct; identical to SEQ ID NO: 1560
  source 1..323: mol_type = other DNA

SEQ ID NO: 15402 - DNA, 424 bp, synthetic construct
  source 1..424: mol_type = other DNA
tacactccgctaggaatgctcctggagcaccccccctagcagggcgtgggggatttcccctgcccgtctgcagaagggtggagccaaccaccttagtatgtaggcggcgggactcatgacgctcgcgtgatgacaagcgccaagcttgacttggatggccctgatgggcgttcatgggttcggtggtggtggcgctttaggcagcctccacgcccaccacctcccagatagagcggcggcactgtagggaagaccggggaccggtcactaccaaggacgcagacctctttttgagtatcacgcctccggaagtagttgggcaagcccacctatatgtgttgggatggttggggttagccatccataccgtactgcctgatagggtccttgcgaggggatctgggagtctcgtagaccgtagcac

SEQ ID NO: 15403 - DNA, 366 bp, synthetic construct
  source 1..366: mol_type = other DNA
ctgcgttgtcagcgttttgcgcttgcatgcgctacacgcgtcgtccaacgcggagggaacttcacatcaccatgtgtcactccccctatggagggttccaccccgcttacacggaaatgggttaaccatacccaaagtacgggtatgcgggtcctcctagggcccccccggcaggtcgagggagctggaattcgtgaattcgtgagtacacgaaaatcgcggcttgaacgtctttgaccttcggagccgaaatttgggcgtgccccacgaaggaaggcgggggcggtgttgggccgccgccccctttatcccacggtctgataggatgcttgcgagggcacctgccggtctcgtagaccataggac

SEQ ID NO: 15404 - DNA, 916 bp, synthetic construct; identical to SEQ ID NO: 2536
  source 1..916: mol_type = other DNA

SEQ ID NO: 15405 - DNA, 360 bp, synthetic construct; identical to SEQ ID NO: 1674
  source 1..360: mol_type = other DNA

SEQ ID NO: 15406 - DNA, 334 bp, synthetic construct; identical to SEQ ID NO: 1596
  source 1..334: mol_type = other DNA

SEQ ID NO: 15407 - DNA, 311 bp, synthetic construct; identical to SEQ ID NO: 1518
  source 1..311: mol_type = other DNA

SEQ ID NO: 15408 - DNA, 488 bp, synthetic construct; identical to SEQ ID NO: 2000
  source 1..488: mol_type = other DNA

SEQ ID NO: 15409 - DNA, 270 bp, synthetic construct
  source 1..270: mol_type = other DNA
cactcaatactacactccgcatttggggagaagcgctggcgttcgcggaaccgcgttaaccatacgcgtagtacgagtgcgacagaccccggtgctactggtggtagcgagacacgagccgaagtctgtggggggaactccacttagagggcatgcccgggcgtaggcttctgagttgggatgggccccaacttggcccctgagtgggggggtgttacgacctgatagggtgcgggctggcgcctaccactttccagtcgtacatgagtc

SEQ ID NO: 15410 - DNA, 400 bp, synthetic construct; identical to SEQ ID NO: 1779
  source 1..400: mol_type = other DNA

SEQ ID NO: 15411 - DNA, 393 bp, synthetic construct
  source 1..393: mol_type = other DNA
gctggcctctcggccggggtacgccccacgtaggtcacgttgtgaccacagcgcggaagcgcacgtcaccttagcctattggtaaggcgattcactaccctctagcagctagctgcattcggaccagattctgtatccgacactacgtaagactagcgtacctagagctaacgtctaacgtctcaggtaccgggccagtcagccggttagctcacgcgccggctgatcatgcccttaatcctgctctgccagggttagaggtgaaatacattatgcaagtgaagctatgaaaccatccgtcgtcgggtgggtttgggaccccaccttaacggacgatgctacagcctgatagggcgttgccactaccttgcattcttaagtggttgtaacaca

SEQ ID NO: 15412 - DNA, 557 bp, synthetic construct; identical to SEQ ID NO: 2122
  source 1..557: mol_type = other DNA

SEQ ID NO: 15413 - DNA, 280 bp, synthetic construct
  source 1..280: mol_type = other DNA
gggaacaatggtccgtccgcggaacgactctagccatgagtctagtacgagtgcgtgccacccattagcacaaaaaccactgactgagccacacccctcccggaatcctgagtacaggacattcgctcggacgacgcatgagcctccatgccgagaaaattgggtatacccacgggtaaggggtggccacccagcgggaatctgggggctggtcactgactatggtacagcctgatagggtgctgccgcagcgtcagtggtatgcggctgttcatggaac

SEQ ID NO: 15414 - DNA, 384 bp, synthetic construct
  source 1..384: mol_type = other DNA
acctccgtgctaggcacggtgcgttgtcagcgttttgcgcttgcatgcgctacacgcgtcgtccaacgcggagggaacttcacatcaccatgtgtcactccccctatggagggttccaccccgcttacacggaaatgggttaaccatacccaaagtacgggtatgcgggtcctcctagggcccccccggcaggtcgagggagctggaattcgtgaattcgtgagtacacgaaaatcgcggcttgaacgtctttgaccttcggagccgaaatttgggcgtgccccacgaaggaaggcgggggcggtgttgggccgccgccccctttatcccacggtctgataggatgcttgcgagggcacctgccggtctcgtagaccataggac

SEQ ID NO: 15415 - DNA, 503 bp, synthetic construct; identical to SEQ ID NO: 2031
  source 1..503: mol_type = other DNA

SEQ ID NO: 15416 - DNA, 445 bp, synthetic construct; identical to SEQ ID NO: 488
  source 1..445: mol_type = other DNA

SEQ ID NO: 15417 - DNA, 389 bp, synthetic construct; identical to SEQ ID NO: 1750
  source 1..389: mol_type = other DNA

SEQ ID NO: 15418 - DNA, 422 bp, synthetic construct; identical to SEQ ID NO: 1835
  source 1..422: mol_type = other DNA

SEQ ID NO: 15419 - DNA, 386 bp, synthetic construct
  source 1..386: mol_type = other DNA
acctccgtgctttgcacggtgcgttgtcagcgttttgcgcttgcatgcgctccacgcgtcgtccaacgcggagggaatttcacattaccatgtgtcactccccctgtggagggacccacccgtttacacggaaatgagttaaccatactcagagtacgggtactcgggtcctcccagggcccccccggcaggtcgagggagctggaattcgtgaatccgtgagtacacggaaatcgcggcttgaacgtctgttatgaccttcggagccgaaagttgggcgtgccccacgaaggaaggcgggggcggtgttgggccgccgccccctttatcccacggtctgataggatgcttgcgagggcacctgccggtctcgtagaccataggac

SEQ ID NO: 15420 - DNA, 381 bp, synthetic construct
  source 1..381: mol_type = other DNA
acctccgtgctgagcacggcgtcgttagcgttttgcgctacacgcgctacacgcgtcgtccgacgcggagggaatttcacattaccatgtgtcactccccctatggagggttccaccccgcttacacggaaatgggttaaccatacccagagtacgggtatgcgggtcctcctagggcccccccggcaggtcgagggagctggaattcgtgaattcgtgagtacacgaaaatcgcggcttggacgtcattgacctccggagccgaaatttgggcgtgccccacgaaggaaggcgggggcggtgttgggccgccgccccctttatcccacggtctgataggatgcttgcgagggcacctgccggtctcgtagaccataggac

SEQ ID NO: 15421 - DNA, 385 bp, synthetic construct
  source 1..385: mol_type = other DNA
acctccgtgctgcgcacgggggcgttgtcagcgtattgcgcttgcatgcgctccacgcgtcgtccaacgcggagggaacttcacattaccatgtgtcactccccctatggagggatccacccgtctacacggaaatgggttaaccacacccatagtacgggtattcgggtcctcctagggcccccccggcaggtcgagggagctggaattcgtgaatccgtgagtacacggaaatcgcggcttgaacgtcttaggaccttcggagccgaaatttgggcgtgccccacgaaggaaggcgggggcggtgttgggccgccgccccccttgtcccacggtctgataggatgcttgcgagggcacctgccggtctcgtagaccataggac

SEQ ID NO: 15422 - DNA, 376 bp, synthetic construct
  source 1..376: mol_type = other DNA
acctccgtgcttaccacggaaacgggttaaccattttgcgctacacgcgtcgtccaacgcggagggaatttcaccttaccatgatgtcactccccctatggagggatccacccgtctacacggaaatgggttaaccacacccatagtacgggtattcgggtcctcctagggcccccccggcaggtcgagggagctggaattcgtgaatccgtgagtacacggaaatcgcggcttgaacgtcttaggaccttcggagccgaaatttgggcgtgccccacgaaggaaggcgggggcggtgttgggccgccgccccccttgtcccacggtctgataggatgcttgcgagggcacctgccggtctcgtagaccataggac

SEQ ID NO: 15423 - DNA, 334 bp, synthetic construct
  source 1..334: mol_type = other DNA
tccacgcgtcgtccaacgcggagggaacttcacattaccatgtgtcactccccctgtggagggacccacccgtttacacggaaatgggttaaccatacccagagtacgggtactcgggtcctcccagggcccccccggcaggtcgagggagctggaattcgtgaatccgtgagtacacggaaatcgcggcttgaacgtcttttgaccttcggagccgaaatttgggcgtgccccacgaaggaaggcgggggcggtgttgggccgccgccccctttatcccacggtctgataggatgcttgcgagggcacctgccggtctcgtagaccataggac

SEQ ID NO: 15424 - DNA, 367 bp, synthetic construct
  source 1..367: mol_type = other DNA
gtgcgttgtcaggttttgcgcttgcatgcgctccacgcgtcgtccaacgcggaggaggaactccacatcaccatgtgtcactccccctatggaggaacccacccgtctacacggaaatgggttaaccatacccagagtacgggtattcgggtcctcctagggcccccccggcaggtcgagggagctggaattcgtgaatccgtgagtacacggaaatcgcggcttgaacgtctttggaccttcggagccgaaatttgggcgtgccccacgaaggaaggcgggggcggtgttgggccgccgccccccttgtcccacggtctgataggatgcttgcgagggcacctgccggtctcgtagaccataggac

SEQ ID NO: 15425 - DNA, 354 bp, synthetic construct
  source 1..354: mol_type = other DNA
gtattgcgcttgcatgcgctccacgcgtcgtccaacgcggagggaatttcacattaccatgtgtcactccccctgtggagggacccacccgtttacacggaaatgggttaaccatacccagagtacgggtattcgggtcctcccagggcccccccggcaggtcgagggagctggaattcgtgaatccgtgagtacacggaaatcgcggcttgaacgtctatgtgaccttcggagccgaaatttgggcgcgccccacgaaggaaggcgggggcggtgttgggccgccgccccctttatcccacggtctgataggatgcttgcgagggcacctgccggtctcgtagaccataggac

SEQ ID NO: 15426 - DNA, 533 bp, synthetic construct
  source 1..533: mol_type = other DNA
ccggcgcgcaccgcccccccgagggggggcgctgcgtccccgtaagccggggaacacgaagcctaagggcatcctcattttagaatgagcttatggcttcacttaatcggccggaaagtcctgggttcccatgacagggttccgcaggtgggtaaatcccggtggggttccactcaggatatacggtgggttggtgacgtccggcggctcggacgacgtgaggctagcctatggtggactgatcacaggatgggcactccggtgtgaataggccccgtcagggtgcgctgacgtaaaactcaggccttgcgcggttgccgggaaggagtaagggtcacgccgcctctaagggccgtatggcacaatacttctccgggcgggttgtcaagaccctccaacgcggcaccgttgccacggcaggcatggggccacccagctcggcgccccgcacacaggcggcgtaggggaaaatcggaaacgtgaccccgggtggcattctttctttctattcaagcatgatcaataccgcaatc

SEQ ID NO: 15427 - DNA, 374 bp, synthetic construct
  source 1..374: mol_type = other DNA
ggcacggtgcgttgtcagcgtattgcgcttgcatgcgctccacgcgtcgtccaacgcggagggaacttcacattaccatgtgtcactccccctgtggagggaccaaacccgtttacacggaaatgggttaaccatactcagagtacgggtactcgggtcctcccagggcccccccggtaggtcgagggagctggaattcgtgaatccgtgagtacacggaaatcgcggcttgaacgtctttatgaccttcggagccgaaatttgggcgtgccccacgaaggaaggcgggggcggtgttgggccgccgccccctttatcccacggtctgataggatgcttgcgagggcacctaccggtctcgtagaccataggac

SEQ ID NO: 15428 - DNA, 324 bp, synthetic construct
  source 1..324: mol_type = other DNA
ccaacgcggagggaacttcacattaccatgtgtcactccccctatggagggttccaccccgcttacacggaaatgggttaaccatactcaaagtacgggtatgcgggtcctcctagggcccccccggcaggtcgagggagctggaattcgtgaattcgtgagtacacgaaaatcgcggcttgaacgtcttttgaccttcggagccgaaatttgggcgtgccccacgaaggaaggcgggggcggtgttgggccgccgcccccttttatcccacggtctgataggatgcttgcgagggcacctgccggtctcgtagaccataggac

SEQ ID NO: 15429 - DNA, 325 bp, synthetic construct
  source 1..325: mol_type = other DNA
ccaacgcggagggaacttcacattaccatgtgtcactccccctgtggaggaacccacccgtttacacggaaatgggttaaccatacccaaagtacgggtactcgggtcctcccagggcccccccggcaggtcgagggagctggaattcgtgaatccgtgagtacacggaaatcgcggcttgaacgtcttgtaatgaccttcggagccgaaatttgggcgtgccccacgaaggaaggcgggggcggtgttgggccgccgccccctttatcccacggtctgataggatgcttgcgagggcacctgccggtctcgtagaccataggac

SEQ ID NO: 15430 - DNA, 329 bp, synthetic construct
  source 1..329: mol_type = other DNA
cgtcgtccaacgcggagggaatttcacattaccatgtgtcactccccctgtggagggacccacccgtttacacggaaatgggttaaccatacccagagtacgggtattcgggtcctcccagggcccccccggcaggtcgagggagctggaattcgtgaatccgtgagtacacggaaatcgcggcttgaacgtctatgtgaccttcggagccgaaatttgggcgcgccccacgaaggaaggcgggggcggtgttgggccgccgccccctttatcccacggtctgataggatgcttgcgagggcacctgccggtctcgtagaccataggac

SEQ ID NO: 15431 - DNA, 330 bp, synthetic construct
  source 1..330: mol_type = other DNA
gcgtcgtccaacgcggagggaacttcacattaccatgtgtcactccccctgtggaggaacccacccgtttacacggaaatgggttaaccatacccagagtacgggtactcgggtcctcccagggcccccccggcaggtcgagggagctggaattcgtgaatccgtgagtacacggaaatcgcggcttgaacgtctgtacgaccttcggagccgaaatttgggcgcgccccacgaaggaaggcgggggcggtgttgggccgccgccccctttatcccacggtctgataggatgcttgcgagggcacctgccggtctcgtagaccataggac

SEQ ID NO: 15432 - DNA, 329 bp, synthetic construct
  source 1..329: mol_type = other DNA
cgtcgtccaacgcggagggaacttcacattaccatgtgtcactccccctgtggaggaacccacccgtttacacggaaatgggttaaccatacccagagtacgggtactcgggtcctcccagggcccccccggcaggtcgagggagctggaattcgtgaatccgtgagtacacggaaatcgcggcttgaacgtctgtacgaccttcggagccgaaatttgggcgcgccccacgaaggaaggcgggggcggtgttgggccgccgccccctttatcccacggtctgataggatgcttgcgagggcacctgccggtctcgtagaccataggac

SEQ ID NO: 15433 - DNA, 328 bp, synthetic construct
  source 1..328: mol_type = other DNA
gtcgtccaacgcggagggaacttcacattaccatgtgtcactccccctgtggaggaacccacccgtttacacggaaatgggttaaccatacccagagtacgggtactcgggtcctcccagggcccccccggcaggtcgagggagctggaattcgtgaatccgtgagtacacggaaatcgcggcttgaacgtctgtacgaccttcggagccgaaatttgggcgcgccccacgaaggaaggcgggggcggtgttgggccgccgccccctttatcccacggtctgataggatgcttgcgagggcacctgccggtctcgtagaccataggac

SEQ ID NO: 15434 - DNA, 319 bp, synthetic construct
  source 1..319: mol_type = other DNA
cgcggagggaatttcacattaccatgtgtcactccccctgtggaggaacccacccgtttacacggaaatgggttaaccataccctgagtacgggtactcgggtcctcccagggcccccccggcaggtcgagggagctggaattcgtgaatccgtgagtacacggaaatcgcggcttgaacgtctttatgaccttcggagccgaaatttgggcgtgccccacgaaggaaggcgggggcggtgttgggccgccgccccctttatcccacggtctgataggatgcttgcgagggcacctgccggtctcgtagaccataggac

SEQ ID NO: 15435 - DNA, 300 bp, synthetic construct
  source 1..300: mol_type = other DNA
taccatgtgtcactccccctgtggagggacccacccgtctacacggaaatgggttaaccatacccagagtacgggtattcgggtcctcccagggcccccccggcaggtcgagggagctggaattcgtgaatccgtgagtacacggaaatcgcggcttgaacgtctttgtgaccttcggagccgaaatttgggcgtgccccacgaaggaaggcgggggcggtgttgggccgctgccccctttatcccacggtctgataggatgcttgcgagggcacctgccggtctcgtagaccataggac

SEQ ID NO: 15436 - DNA, 301 bp, synthetic construct
  source 1..301: mol_type = other DNA
accatgtgtcaccccccctgtagaggaacccacccgtttacacggaaatgggttaaccatacccaaagtacgggtactcgggtcctcccagggcccccccggcaggtcgagggagctggaattcgtgaatccgtgagtacacggaaatcgcggcttgaacgtcttttaatgaccttcggagccgaaatttgggcgtgccccacgaaggaaggcgggggcggtgttgggccgccgccccctttatcccacggtctgataggatgcttgcgagggcacctgccggtctcgtagaccataggac

SEQ ID NO: 15437 - DNA, 299 bp, synthetic construct
  source 1..299: mol_type = other DNA
accatgtgtcactccccctgtggagggacccacccgtttacacggaaatgggttaaccatacccagagtacgggtactcgggtcctcccagggcccccccggcaggtcgagggagctggaattcgtgaatccgtgagtacacggaaatcgcggcttgaacgtctttgtgaccttcggagccgaaatttgggcgtgccccacgaaggaaggcgggggcggtgttgggccgccgccccctttatcccacggtctgataggatgcttgcgagggcacctgccggtctcgtagaccataggac

SEQ ID NO: 15438 - DNA, 298 bp, synthetic construct
  source 1..298: mol_type = other DNA
ccatgtgtcactccccctgtggagggacccacccgtttacacggaaatgggttaaccatacccagagtacgggtactcgggtcctcccagggcccccccggcaggtcgagggagctggaattcgtgaatccgtgagtacacggaaatcgcggcttgaacgtctttgtgaccttcggagccgaaatttgggcgtgccccacgaaggaaggcgggggcggtgttgggccgccgccccctttatcccacggtctgataggatgcttgcgagggcacctgccggtctcgtagaccataggac

SEQ ID NO: 15439 - DNA, 445 bp, synthetic construct
  source 1..445: mol_type = other DNA
accacaaacactccagtttgttacactccgctaggaatgctcctggagcaccccccctagcagggcgtgggggatttcccctgcccgtctgcagaagggtggagccagccaccttagtatgtaggcggcgggactcatgacgctcacgtgatgacaagcgccaagcttgacttggatggccctgatgggcgttcatgggttcggtggtggtggcgcattaggcagcctccacgcccaccacctcccagatagagcggcggcactgtagggaagaccggggaccggtcactaccaaggacgcagacctctttttgagtatcacgcctccggaagtagttgggcaagcccacctatatgtgttgggatggttggggttagccatccataccgtactgcctgatagggtccttgcgaggggatctgggagtctcgtagaccgtagcac

SEQ ID NO: 15440 - DNA, 399 bp, synthetic construct
  source 1..399: mol_type = other DNA
cactccccgaggggaatgcgccagccctggccgtgtcggacagggtagcgagagggtcactccattttctttacctctcgccactgggctggtcaatggcacagacgtgggacgctttagcctccgtggtctggttggtcgtagtctggccggtctagtgggcccccttggactgataacctggaagagggctaacgtgaactacccggacggaactccggggcttgggattgagcgcaccagtagacgcttcggcctctgatgctgggttggtagccgcctttatggtacccaagctgggcatgcccataggaatcggggaaggcgttgggttgcctcctgcctactgcctgatagggtcgtgccgtgcgtccaggttcttacggctgtataacactt

SEQ ID NO: 15441 - DNA, 294 bp, synthetic construct
  source 1..294: mol_type = other DNA
accatcgacactccaggctcatggatcaagttaggttccgccgaagcgggctaaccaggcccctagtaggaggcgcctatcccatgagccctttccccacagattgagtggagctggagctgggaaggaccgagtacggtccaatcgagaagaaccctgatgaacattccaggcctcttcggtagatttgggtatacccaccagtgaaggcggggtcgtgggcacaggccccctagtccacacagcctgatagggtcctgccgcaggatctgtgggtgcggctgtacatgtaat

SEQ ID NO: 15442 - DNA, 386 bp, synthetic construct
  source 1..386: mol_type = other DNA
aatgcgccagccctggccttgtcggacagggtagcgagagggtcactccatttttctttacctctcgccactgggctggtcaatggcacagacgtgggacgcttatgcctccgtggtctggttggctgtagtctggtcggtccagtgggcccccttggattgataacctggaagagggctaacgtgaactacccggacggaactccggggcttaggattgagcgcaccagtagacgcttcggcctctgatgctgggttggtagccgcctttatggtacctaagctgggcatgcccatagggatcggggaaggtgttgggtcgcctcctgcctactgcctgatagggtcgtgctgcgcgtccaggtccttgcagctgtataacactt

SEQ ID NO: 15443 - DNA, 401 bp, synthetic construct; identical to SEQ ID NO: 1783
  source 1..401: mol_type = other DNA

SEQ ID NO: 15444 - DNA, 400 bp, synthetic construct
  source 1..400: mol_type = other DNA
cactccccaaggggaatgtgccagccctggccttgttggacagggtagcgagagggtcactccatttttctatacctctcgccactgggctggtcaatggcacagacgtgggacgcttatgcctccgtggtctggttggctgtagtctggtcggtccagtgggcccccttggattgataacctggaagagggctaacgtgaactacccggacggaactccggggcttaggattgagcgcaccagtagacgcttcggcctctgatgctgggttggtagccgcctttatggtacctaagctgggcatgcccataggaatcggggaaggtgttgggtcgcctcctgcctactgcctgatagggtcgtgctgcgcgtccaggtccttgcagctgtataacactt

SEQ ID NO: 15445 - DNA, 379 bp, synthetic construct; identical to SEQ ID NO: 1729
  source 1..379: mol_type = other DNA

SEQ ID NO: 15446 - DNA, 294 bp, synthetic construct
  source 1..294: mol_type = other DNA
accatcaacactccaggctcatggattaagttaggttccgccgaagcgggctaaccaggcccctagtaggaggcgcctatcccatgagccctttccccacagattgagtggagctggagctgggaaggaccgagtacggtccaatcgagaagaaccctgatgaacattccaggcctcttcggtagatttgggtatacccaccagtgaaggcggggtcgtgggtacaggccccctagtccacacagcctgatagggtcctgccgcaggatctgtgggtgcggctgtacatgtaac

SEQ ID NO: 15447 - DNA, 388 bp, synthetic construct; identical to SEQ ID NO: 1748
  source 1..388: mol_type = other DNA

SEQ ID NO: 15448 - DNA, 294 bp, synthetic construct
  source 1..294: mol_type = other DNA
accatcaacactccaggctcatggattaagttaggttccgccgaagcgggctaaccaggcccctagtaggaggcgcctatcccatgagccctttccccacagattgagtggagctggagctgggaaggaccgagtacggtccaatcgagaagaaccctgatgaacattccaggcctcttcggtagatttgggtatacccaccagtgaaggcggggtcgtgggcacaggccccctagtccacacagcctgatagggtcctgccgcaggatctgtgggtgcggctgtacatgtaac

SEQ ID NO: 15449 - DNA, 402 bp, synthetic construct; identical to SEQ ID NO: 1786
  source 1..402: mol_type = other DNA

SEQ ID NO: 15450 - DNA, 293 bp, synthetic construct
  source 1..293: mol_type = other DNA
ccatcgacactccaggctcacggattaagttaggttccgccgaagcgggctaaccaggcccctagtaggaggcgcctatcccgtgagccctttccccacggattgagtggagctggagctgggaaggaccgagtacggtccaatcgagaagaaccctgatgaacattccaggcctcttcggtagatttggatatatccaccagtgaaggcggggtcgtgggtacaggccccctagtccacacagcctgatagggtcctgccgcaggatccgtgggtgcggctgtacatgtacc

SEQ ID NO: 15451 - DNA, 292 bp, synthetic construct
  source 1..292: mol_type = other DNA
ccatcgacactccagtgatgggataccgccaggttccgccgaagcgggctagccacgcccctagtaggaggcgcctggtcccatcacacaaaccccacggattgagtggagctggagctaggaagtcccgagtacgggacaatcgagaggaactccgatgcacattccggacctcctcggtagatttgggtatacccactagtgaaggcggggtcgtgggttcagaccccctcgtccacacagcctgatagggtcctgccgcaggatccgtgggtgcggctgtacatggaac

SEQ ID NO: 15452 - DNA, 294 bp, synthetic construct
  source 1..294: mol_type = other DNA
accatcaacactccaggctcatggattaagttaggttccgccgaagcgggctaaccaggcccctagtaggaggcgcctatcccatgagccctttccccacagattgagtggagctggagctgggaaggaccgagtacggtccaatcgagaagaaccctgatgaacattccaggcctcttcggtagatttgggtatacccaccagtgaaggcggggtcgtgggcacaggccccctagtccacacagcctgatagggtcctgccgcgggatctgtgggtgcggctgtacatgtaac

SEQ ID NO: 15453 - DNA, 293 bp, synthetic construct
  source 1..293: mol_type = other DNA
ccatcgacactccaggctcacggattcagttaggttccgccgaagcgggctaaccaggcccctagtaggaggcgcctatcccgtaagccctttccccacagattgagtggagctggagctgggaaggaccgagtacggtccaatcgagaagaaccctgatgaacattccaggcctcttcggtagatttggatgtatccaccagtgaaggcggggtcgtgggtacaggccccctagtccacacagcctgatagggtcctgccgcaggatctgtgggtgcggctgtacatgtacc

SEQ ID NO: 15454 - DNA, 332 bp, synthetic construct
  source 1..332: mol_type = other DNA
agggtctgcgcctgtacactcccccacgggattaacaccagctccgagaaagtctgacgagtatcggtgttataaaggtggtgtgccctaccaacgtcataatgggtcgtgccaatgttcgaaggcaaggactaccactgggtgcccgtgggaaaaagggggcggatagggagctggggtgaaccgaacgaccgtagacggtcgaggtcacaggcatgggacgcttcggcctccgtagcctggttgggccttggattcccggtgtagctaccagcttactgcctgatagggtgtgggccagcacatccgcccttctggttgttgataacgcc

SEQ ID NO: 15455 - DNA, 300 bp, synthetic construct
  source 1..300: mol_type = other DNA
taacaccagctccgagaaagtctgacgagtatcggtgttataaaggtggtgtgccctaccaacgtcataatgggtcgtgccaatgttcgaaggcaaggactaccactgggtgcccgtgggaaaaaaggggcggatagggagctggggtgaaccgaacgaccgtagacggtcgaggtcacaggcatgggacgcttcggcctccgtagcctggttgggccttggattcccggtgtagctaccagcttactgcctgatagggtgtgggccagcacatccgcccttctggttgttcataacgcc

SEQ ID NO: 15456 - DNA, 329 bp, synthetic construct
  source 1..329: mol_type = other DNA
tctgcgcctgtacactcccccacgggaataacaccagctccgagaaagtctgacgagtatcggtgttaaaaaggtggtgtgccctaccaacgtcataacgggtcgtgccgatgttccgaggcaaggactaccactgggtgcccgtgggaaaaaaggggcggatagggagctggggtgaaccgaacggccgtagacggccgaggccacaggcatgggacgcttatagcctccgtagcctggttgggccttggactcccggtgtagctaccagcttactgcctgatagggtgcgggccagcgcatccgcccttctggttgttcatgacgcc

SEQ ID NO: 15457 - DNA, 283 bp, synthetic construct
  source 1..283: mol_type = other DNA
aagtctgacgagtatcggtgttataaaggtggtgtgccctaccaacgtcataatgggtcgtgccaatgttcgaaggcaaggactaccactgggtgcccgtgggaaaaaaggggcggatagggagctggggtgaaccgaacgaccgtagacggtcgaggtcacaggcatgggacgcttcggcctccgtagcctggttgggccttggattcccggtgtagctaccagcttactgcctgatagggtgtgggccagcacatccgcccttctggttgttcataacgcc

SEQ ID NO: 15458 - DNA, 333 bp, synthetic construct; identical to SEQ ID NO: 1592
  source 1..333: mol_type = other DNA

SEQ ID NO: 15459 - DNA, 358 bp, synthetic construct
  source 1..358: mol_type = other DNA
ggcacgtatctgctccgtttacattatttgagcagggctggggaactgaatggcaccggtgtggcaccgctgttgcgctgcgtgaccgggttggctggagtctcagtctctccatgcgggcctggacggaccacaggggaggggagagagcaactgaaggtgtatccatgagtacatggagcgctgcagtgagcgcacatctaccacgcttcggcctggctaagatggttggtagccgcctatatggtactgcagtagggtatacccgcactggaggggggatagcgttgggtcgctccctgcttactgcctgatagggtcctgccaggggcccctcccttctggctgtaaaccactt

SEQ ID NO: 15460 - DNA, 341 bp, synthetic construct
  source 1..341: mol_type = other DNA
acctgctctctatgagagcaacactccaccatgaaccgctcccctgtgaggaactactgtcttcacgcagaaagcgtctagccatggcgttagtatgagtgttgtacagcctccaggatcccccctcccgggagagccatagtggtctgcggaaccggtgagtacaccggaatcgccgggatgaccgggtcctttcttggattaaacccgctcaatgcccggaaatttgggcgtgcccccgcgagactgctagccgagtagtgttgggtcgcgaaaggccttgtggtactgcctgatagggtgcttgcgagtgccccgggaggtctcgtagaccgtgcacc

SEQ ID NO: 15461 - DNA, 340 bp, synthetic construct
  source 1..340: mol_type = other DNA
acctgcccctaataggggcgacactccgccatgaatcactcccctgtgaggaactactgtcttcacgcagaaagcgcctagccatggcgttagtatgagtgtcgtacagcctccaggcccccccctcccgggagagccatagtggtctgcggaaccggtgagtacaccggaattgccgggaagactgggtcctttcttggataaacccactctatgcccggccatttgggcgtgcccccgcaagactgctagccgagtagcgttgggttgcgaaaggccttgtggtactgcctgatagggcgcttgcgagtgccccgggaggtctcgtagaccgtgcacc

SEQ ID NO: 15462 - DNA, 268 bp, synthetic construct
  source 1..268: mol_type = other DNA
agcgtctagccatggcgttagtatgagtgtcgtacagcctccaggaccccccctcccgggagagccatagtggtctgcggaaccggtgagtacaccggaattgccaggacgaccgggtcctttcttggataaacccgctcaatgcctggagatttgggcgtgcccccgcaagaccgctagccgagtagtgttgggtcgcgaaaggccttgtggtactgcctgatagggtgcttgcgagtgccccgggaggtctcgtagaccgtgcacc

SEQ ID NO: 15463 - DNA, 322 bp, synthetic construct
  source 1..322: mol_type = other DNA
cgacactccaccatggatcactcccctgtgaggaacttctgtcttcacgcggaaagcgcctagccatggcgttagtacgagtgtcgtgcagcctccaggaccccccctcccgggagagccatagtggtctgcggaaccggtgagtacaccggaatcgctggggtgaccgggtcctttcttggaacaacccgctcaatacccagaaatttgggcgtgcccccgcaagatcactagccgagtagtgttgggtcgcgaaaggccttgtggtactgcctgatagggtgcttgcgagtgccccgggaggtctcgtagaccgtgcaac

SEQ ID NO: 15464 - DNA, 314 bp, synthetic construct
  source 1..314: mol_type = other DNA
caccatgaatcactcccctgtgaggaacttctgtcttcacgcggaaagcgtctagccatggcgttagtacgagtgtcgtgcagcctccaggcccccccctcccgggagagccatagtggtctgcggaaccggtgagtacaccggaatcgccgggacgaccgggtcctttcttggaacaacccgctcaatgcccggaaatttgggcgtgcccccgcgagatcactagccgagtagtgttgggtcgcgaaaggccttgtggtactgcctgatagggtgcttgcgagtgccccgggaggtctcgtagaccgtgcatc

SEQ ID NO: 15465 - DNA, 289 bp, synthetic construct
  source 1..289: mol_type = other DNA
aactactgtcttcacgcagaaagcgtctagccatggcgttagtatgagtgtcgtgcagcctccaggaccccccctcccgggagagccatagtggtctgcggaaccggtgagtacaccggaattgccaggacgaccgggtcctttcttggatcaacccgctcaatgcctggagatttgggcgtgcccccgcgagactgctagccgagtagtgttgggtcgcgaaaggccttgtggtactgcctgatagggtgcttgcgagtgccccgggaggtctcgtagaccgtgcacc

SEQ ID NO: 15466 - DNA, 472 bp, synthetic construct; identical to SEQ ID NO: 1968
  source 1..472: mol_type = other DNA

SEQ ID NO: 15467 - DNA, 296 bp, synthetic construct
  source 1..296: mol_type = other DNA
ccctgcttgctccccgatgagcaggggccgttgcagtatcgcagcggcgcggcacttgccctccgtttaatgggtaagatcaaccgggcgtcgtcgtgttcacacgacgccccagacacaggcattgcctgaggacaacgcggcgtacctgtacgagtatccactacaaggtcagcgactattgtgtctgccgacacacgcacgcgctctggagagcgctgacaacacggggcaggttctacaagcactgtctgtcgggccgttcatcaaagtagactcagtttgtgtttgctgcg

SEQ ID NO: 15468 - DNA, 1000 bp, synthetic construct; identical to SEQ ID NO: 2608
  source 1..1000: mol_type = other DNA

SEQ ID NO: 15469 - DNA, 977 bp, synthetic construct
  source 1..977: mol_type = other DNA
ttccaacggtgaggtacgagggcttgcgagagatttggtatgtttagctgtggtggagcgtttgaatgccttagcctcggttgacccccgccagcataactggacacccagggagctggtagagaaaggtctttgtgaccctgtgcgtttgttcgttaagaacgagccacacccacggaggaaattgcttgaacgccgattcaggctgatttcctccgtttctctagttgaccagctggtggagcggatgcttttcgggcctcagaacaacactgagatttcaacttggtggcagtggccttcgaagccgggcatgggtcttttgacccctgaacaaatccgtttggtgtgggacgatgtgttccagaagcaccaggcccaccctgcggctgaggcagacatatcggggtttgactggtccgttcaggactgggagttgtggtcagacctcgcgatccgaattaacagggggaattttcagggaaacctcaggagggcggctatcagccgctactactgctttatgaactctgttttccagctctcagatggaacccttatccagcaggagttgcccggattgatgaaatccggctcctactgcacctcatccactaactcgcgcatacgctgcttaatggctgagctcatcggctcgccgtggtgcatagctatgggcgatgactctgtggaggggtggattgagggggcccaatccaagtacgccgcgctaggtcacacctgcaaggagtactacccatgtaagaccaggggccgggaactcctggaattcaacttctgttcacatctgatcaggaggggtcatgctgagctcacttcttggccgaaagcgttgtttcgctttctgtcgagcaagcatgaggattttgaagatctgtgggttgagctccacacgtgcggggtgtggagccggatcgaacgatatctgcgtgggataggccgagtctcccacaaag

SEQ ID NO: 15470 - DNA, 1000 bp, synthetic construct
  source 1..1000: mol_type = other DNA
gtgccgctcgcgggccttgccaactccaacggtgaggtccgagggctagcgagagatttggtatgtttagctgtggtagagcgtttaaatgccttagcctcggttgacccccgccagcataactggacacccagggagctggtagagaaaggtctttgtgacccggtgcgcttgttcgtgaagaatgagccgcacccacggaagaaattgcttgaacgtcgattcaggctgatctcttccgtttctctagttgaccagctggtggagcggatgcttttcgggcctcagaacaacaccgagatttccacttggtggcagtggccttcgaagccgggcatgggtcttttgacccctgaacaaatccgtttggtgtgggacgatgtgttccagaagcaccaggcccaccctgcggctgaggcagacatatcggggtttgactggtccgttcaggactgggagttgtggtcagacctcgcgattcgtataaacagagggaattttacgggaaacgttaggaaagcggccataagtcgctattactgttttatgaactctgttttccaactctcagatggaacccttatccagcaggagttgcccgggctgatgaagtctggctcctattgcacgtggtccaccaactcacgcatacgatgcctaatgggtgagctcatcggctcgccatggtgcatagcgatgggtgatgattcagaggaggggtggatcgagggggcccagtccaagtacgccgcgataggtcatacctgcaaggagtactacccatgtaagaccagagggcgcgagctcctggaattcaacttctgttcacatttgatcaggaggggtcatgctgagctcacttcatggccgaaggcgttgtttcgctttctgtcgagcaagcatgaggactttgaagatctgtgggttgagcttcacacgtgcggggtgtggagccgaatcgaacgatatctgcgtgggatagggcgtgtctcccacaaag

SEQ ID NO: 15471 - DNA, 930 bp, synthetic construct; identical to SEQ ID NO: 238
  source 1..930: mol_type = other DNA

SEQ ID NO: 15472 - DNA, 972 bp, synthetic construct; identical to SEQ ID NO: 2560
  source 1..972: mol_type = other DNA

SEQ ID NO: 15473 - DNA, 854 bp, synthetic construct
  source 1..854: mol_type = other DNA
tcctgtgagattgtttgtaaagaatgagccccaccctgccaacaaggtgcgggaagggcgctttagactaatctcatcggtatcgctggttgaccaactagttgaaaggctgctattcgggccccaaaacaaggcagagattgccttgtggcagtcggtgccttcaaaacctggtatgggattgtcacagaagtggcagttcgaggcgctgtggaaggatttgcaaatcaaacacgccagtgcccccgccgctgaggcggatatatcgggttttgattggtctgtgcagaaatgggagttagaagctgatgtgtgcatgagaatagaaaggggaaacttccctgcaagaatgaggaaagccgccttgaaccgcttcaagtgtttcgccaacgctgtgttccagctaagcaacggcgagttaatagagcaaggcttaccgggtctaatgaagtctggtagttactgtacctcgagtactaacagccggataagatgcctcatggctgaaataatacaagccccgtggtgcatcgccatgggagacgactcggtagaaggatatgttgagggggcccgagagctctacgaagaactgggtcacacatgtaaagactacatcccgtgtgctgctgagggagagatcctcaaggaagtgaacttttgctcacacagcatagctgcggatcgttgctatctccaatcctgggctaaaaccttatttagatatctggaacaccctgacgactttgaggagttggcagtggaattgcagggttgtcagtggccgcggatatacaagtacttacgtcggattggaagagtctccgacaaaattcccgaaccaagagaagaaa

SEQ ID NO: 15474 - DNA, 629 bp, synthetic construct; identical to SEQ ID NO: 2213
  source 1..629: mol_type = other DNA

SEQ ID NO: 15475 - DNA, 881 bp, synthetic construct; identical to SEQ ID NO: 2516
  source 1..881: mol_type = other DNA

SEQ ID NO: 15476 - DNA, 1000 bp, synthetic construct; identical to SEQ ID NO: 2609
  source 1..1000: mol_type = other DNA

SEQ ID NO: 15477 - DNA, 833 bp, synthetic construct; identical to SEQ ID NO: 2467
  source 1..833: mol_type = other DNA

SEQ ID NO: 15478 - DNA, 501 bp, synthetic construct; identical to SEQ ID NO: 2027
  source 1..501: mol_type = other DNA

SEQ ID NO: 15479 - DNA, 667 bp, synthetic construct; identical to SEQ ID NO: 2268
  source 1..667: mol_type = other DNA

SEQ ID NO: 15480 - DNA, 265 bp, synthetic construct
  source 1..265: mol_type = other DNA
gactaacatgctagtgtcgtctgttgggtccaggagtctttcaaaatagccactagtgcgatttctaattatctcccttgtgctgatcgtcatatcatgtgcgctcaccaatctactcaccaaccaactattcgctttctcgtaatcaatatctctcatgactaaataaatagccactacagtcattataccactataaaaaacgtgtaatttgtttatatcattatcacattttttgtaaatcacaattacatcaattgacaac

SEQ ID NO: 15481 - DNA, 343 bp, synthetic construct; identical to SEQ ID NO: 1629
  source 1..343: mol_type = other DNA

SEQ ID NO: 15482 - DNA, 308 bp, synthetic construct; identical to SEQ ID NO: 148
  source 1..308: mol_type = other DNA

SEQ ID NO: 15483 - DNA, 984 bp, synthetic construct; identical to SEQ ID NO: 2566
  source 1..984: mol_type = other DNA

SEQ ID NO: 15484 - DNA, 1000 bp, synthetic construct; identical to SEQ ID NO: 261
  source 1..1000: mol_type = other DNA

SEQ ID NO: 15485 - DNA, 853 bp, synthetic construct; identical to SEQ ID NO: 2484
  source 1..853: mol_type = other DNA

SEQ ID NO: 15486 - DNA, 875 bp, synthetic construct
  source 1..875: mol_type = other DNA
atacaaccctgacgtatctttagttgattttgaagccttgaaataaagcttttaaaaaccccttttggtttgcccaccatacgggcagttttcagaccgcagagtcttgtcaaggaggttcagccttgaccttacttctctgtgaggaatctactcagaaaaactgcttgcgcactagtagttacaagggttgtcacttagtacttacaagcgggttaaaccgccctccggaacggttacaaccccctcccgaacgtgcgcttgacgtgactggttctcagtctggctttctgagaaatactccagggttgtatcccaccatcttgacctctggtcattttggtaacaccataaccaaacaaactctacacacctaacccacctccagcttgctgcaggccttttggactaaacgggtttaggtgttttgtgaccaactcgtctacccacctccagttttactgcaggcctttttggactaaacgggtttagacttttgtggttagtttttaactacccactgtttagccgccaacctgattttcattgttgtaaaattttgtgtttatacactattttcatacggttggcagtttgtttggttgtttgcacagtttttgttgataccaatttttactgtgcttttagtgtattctgctaaggctgtattttacatacttagtttggttgaagcaatttttacaacatttatattgtttttgatttctaaggtaaagagtcttaggaaacaccatagacgccattcttgtggtgtctagttccaactaatctggcaaacaagtaccaagtcattgactcactttggagtgagacttacgagtaccaatttgcctatttcggacatccatataaag

SEQ ID NO: 15487 - DNA, 419 bp, synthetic construct; identical to SEQ ID NO: 1828
  source 1..419: mol_type = other DNA

SEQ ID NO: 15488 - DNA, 788 bp, synthetic construct; identical to SEQ ID NO: 2420
  source 1..788: mol_type = other DNA

SEQ ID NO: 15489 - DNA, 711 bp, synthetic construct
  source 1..711: mol_type = other DNA
gacattgttcagaccgcagtgtctcgtcaaggaggtccagccttgactttactaccctgtgaggaatctactcagaaatactgcttgcgtactagtagttacaagagttgacacctagtacttacaagcgggtcaaaccgccctccggaacggtggaaactccctcccgaacgtgcgcttgacgtgaccaactttggtctagctttctgagaaacactccagggctgtatctaaccacttttgttcaattgtggttattttcaaccaaacatcgtgtgactcacctccagctttgctgcaggccttcgggactaaacgagttcatacgctttgtggttagttttaggacttatcatttttttcatcgccaacctgattctttttattcttaaattttgcgtctatacgctattttcttatggttggcagtttgtttggttgtttgcacagtttcttttaataccaatttttactgtgcttttagtttttacagctaaggctgttttttacttacttaagttgctcgaagcagcttttacaacattagttttaattttgattgaaaagttaaagggtgtcaggaaacaacatagacgcccttcttgtggtgtctagtttgctttaatctggcaaacaaataccaggttattgactccttgtggagtgagacatacgagtatcaatttgcttattttggacacccatataaaa

SEQ ID NO: 15490 - DNA, 363 bp, synthetic construct; identical to SEQ ID NO: 1682
  source 1..363: mol_type = other DNA

SEQ ID NO: 15491 - DNA, 370 bp, synthetic construct; identical to SEQ ID NO: 1700
  source 1..370: mol_type = other DNA

SEQ ID NO: 15492 - DNA, 821 bp, synthetic construct; identical to SEQ ID NO: 2456
  source 1..821: mol_type = other DNA

SEQ ID NO: 15493 - DNA, 315 bp, synthetic construct; identical to SEQ ID NO: 1532
  source 1..315: mol_type = other DNA

SEQ ID NO: 15494 - DNA, 992 bp, synthetic construct; identical to SEQ ID NO: 2571
  source 1..992: mol_type = other DNA

SEQ ID NO: 15495 - DNA, 473 bp, synthetic construct
  source 1..473: mol_type = other DNA
gtggaggcacagatccagatcctgatcctaacccggatccggatccagagcctgggcccgaccccgaacctggggtcgatcaactcgatcttagcaaattcattccaaatcaacttattgatttgcttatttgtggtagttatgttccaaataatgtaagcgatgattttataagtacttatccaaatttaaacttttctgttcataatattactgatgttgtggtttcttcaaaaccatatacacttgctctttttgaaactgaaagccaaattaattctgctagtgtttggagaggtgatataactcaattaagtgtttatatccaatataaattttatactcgcgtagaagcttataatcaagttactacagttcattcggaaaaatggactccaaattttcaaggaaccatttataaacctgtggatgttaaaattgaacatgcatatggaacttatgaattaacaact

SEQ ID NO: 15496 - DNA, 441 bp, synthetic construct; identical to SEQ ID NO: 1895
  source 1..441: mol_type = other DNA

SEQ ID NO: 15497 - DNA, 928 bp, synthetic construct; identical to SEQ ID NO: 2543
  source 1..928: mol_type = other DNA

SEQ ID NO: 15498 - DNA, 807 bp, synthetic construct; identical to SEQ ID NO: 2443
  source 1..807: mol_type = other DNA

SEQ ID NO: 15499 - DNA, 768 bp, synthetic construct; identical to SEQ ID NO: 2392
  source 1..768: mol_type = other DNA

SEQ ID NO: 15500 - DNA, 456 bp, synthetic construct; identical to SEQ ID NO: 1930
  source 1..456: mol_type = other DNA

SEQ ID NO: 15501 - DNA, 734 bp, synthetic construct; identical to SEQ ID NO: 2353
  source 1..734: mol_type = other DNA

SEQ ID NO: 15502 - DNA, 513 bp, synthetic construct
  source 1..513: mol_type = other DNA
ctattcataaaataaaaacataaaaatagtaaaataaataaaataaaataaaaatgtaacttgatcgcttttatgatgacgactgcgcgataatgctaaatagagatgtatttattagtatttactcatcgagagacccctggcaaagtcccggatttatggggccagagtcggtatagaaactcctcaattttaccatctattttctatacttgggttagggtaagtggcttagctcgttcttggatgatgcctaataagactctcttaagcttgtgtgtagcgattagtatgagtgtatccggtaggtgagggctgaaaacccggctagtatgatagatatacttagcttgcctactgccgtgcttgtgcgtttggttgctctgtccaggcttgtgctgttcaaataatcaatattctcttataacgaatctgcaatttaattcgcatggaaaaacgacgcgttcaagaggtttagtcagccggaattgactaccaggattcacttttatt

SEQ ID NO: 15503 - DNA, 487 bp, synthetic construct; identical to SEQ ID NO: 1999
  source 1..487: mol_type = other DNA

SEQ ID NO: 15504 - DNA, 438 bp, synthetic construct; identical to SEQ ID NO: 1879
  source 1..438: mol_type = other DNA

SEQ ID NO: 15505 - DNA, 291 bp, synthetic construct
  source 1..291: mol_type = other DNA
ttttcttttaaaaccttttttaaaagattctcccctatgtttctatatgggaactatgggaggcttgatgccattcgaaatatactgttacataatgggtaacgaggtaggtggggtccgcagtggcctgatcccattcgaaaaatagtaggtggggtccgtcacttttcttttaaaaccttattttaatgtaacttagttttagtattttagtttagtttagtatggcataacactcgcccgaattatgtttagactgttattgtcatctatccatcaagttattttact

SEQ ID NO: 15506 - DNA, 861 bp, synthetic construct; identical to SEQ ID NO: 230
  source 1..861: mol_type = other DNA

SEQ ID NO: 15507 - DNA, 520 bp, synthetic construct; identical to SEQ ID NO: 2068
  source 1..520: mol_type = other DNA

SEQ ID NO: 15508 - DNA, 336 bp, synthetic construct; identical to SEQ ID NO: 1609
  source 1..336: mol_type = other DNA

SEQ ID NO: 15509 - DNA, 775 bp, synthetic construct
  source 1..775: mol_type = other DNA
gttagttattttgttttatattttggaccaaattggaaatttaagttttatgtatattttggaggtgggagataagcagccacttccattttaattccggtatgtgcttttgttgaccgaagaatactatatatgacccgtgagccagtccagacaagcgcagtaatatatactattgaagtttgccttgaagtcttagcgttagtgcggcactgaagcaccgttgtgtatggttgcagaaggatcatgtgtgaactcggagcagtgaattggcatagttaggctgctagcatgtagcagggatcttaatgtacccctgtagtgttctgagtagtatgcttgaccatgtgctgtgaatttagtaactatacgaattctgtaattgtccatggtattggagaaataatagatcccggttcccaaaggatgtcgtagtgggctatgaggagaaaagccgattgggctccaatattaaggtgtggaatttattcgacagacccaaagtgtgcaagttgggatcccatctgttaggtgttgacattgaactttgatggatgtaggttattaattcggaatgctttcaaaattgctctgggcaagaactttgtgaaaaaccaaacttcttgctaaataattgcacatcccaattctgtacgtttacctgcagttttatgttctatttgctattgcaaatattttacttaatagatttgatattgctttcatttttatccttgttatttttgaaacattatatatatataaataatttaaa

SEQ ID NO: 15510 - DNA, 312 bp, synthetic construct; identical to SEQ ID NO: 1524
  source 1..312: mol_type = other DNA

SEQ ID NO: 15511 - DNA, 279 bp, synthetic construct
  source 1..279: mol_type = other DNA
caccctcatttcaaagcttgctactttcatccccattaagatttgcaacactggtgacgggagataccgaagtatagtaggtcccgaaggtgataatacgtaacgcatctagggccgtctccatgtagccaaatgttgtagagccgataagaatgatcaactccttacttgtgtgggatatctagccattagatcagaagagaatcaagtgtaatgctgacctagtttcacgtcttaggacgcgctgcttgaactctctatccatgttctcggtggagc

SEQ ID NO: 15512 - DNA, 438 bp, synthetic construct
  source 1..438: mol_type = other DNA
tgagatacccaaagaagtgagttatacgactttgcacacaaatatatataagttcataactagttattttgcaagaagaactctacggatgccagtgagttatttaacatcaagcacgccttgcaggatatgcatattatattttacgcgagttacatgctctttgatatcttagagtggccggttagaaattgtctcctgtagcgcccaattgataaaggtactattttagtccctggcaagcagattcaataacgaccccccgtcctatactctttgactcataacatggttaatcagcgagagctaatatgtgtgtgaccttacgcagaaatgcacagggtaatgacctccaagtagaactagtatgtatttgtacccctggacacgatttgaaacaatgatggatgattaaggcgaagatttattcaatgaaat

SEQ ID NO: 15513 - DNA, 301 bp, synthetic construct
  source 1..301: mol_type = other DNA
ttttaaatagatcgcatatacagactcctgtatagggagggcatcattggtcggcatggtaaagcatgggctgtggtgtcttatcagcggagggcagtattggtcggcatggtaaagcatgggctgtattgtcttatcgttgcgaaatgacgtttaaataggctgatatacccgaatgtatatccctcctttctttttctatcttgtagttttaagttagttttagttagcatgaggcggtgctccggcggaattatgtagaggaccatcgtttattgcacaactgtacctgattatttta

SEQ ID NO: 15514 - DNA, 750 bp, synthetic construct; identical to SEQ ID NO: 2373
  source 1..750: mol_type = other DNA

SEQ ID NO: 15515 - DNA, 662 bp, synthetic construct
  source 1..662: mol_type = other DNA
ccttttgatgtttaaattttaattccgttctcgccggagatgagtaccggtttgagtttaattcccaggtagcgcgagccgtgagtcagcccagacaagcgcagtagccctacttggagaggttctccttgagcgaccagaagctggcattgaatcgagtcacataatgctgagagtagagggatttgcattctattgtgaaagcaataatttgagagttaagcccatcacattgtgcactcggaatattgtgcagcgcgaaaggttagtaacattaagttggcgaaaggttagcgcagcaatgattggtggtaacgctggatcttattgtggaagcaatggatgaatatgaagttgaaatcaggatcaccacacccccgcagcatagcggtaccgtactgaatgtcacaatccagtgatgattcgaagcctataacgggcggacgtgtttaaatggtgttttatgtggatgttagttcgccggaatgtgcagctccggatatcgagtcgaagattcagtgaccagtggagcaagcaacataggtaactatttcgtatgattttactcacaaaattgcactgggcaggagcttccaaaggaaccttctgcttctcgtaactgcacacaaactagatttcttattttcggagagcatatcaaa

SEQ ID NO: 15516 - DNA, 290 bp, synthetic construct
  source 1..290: mol_type = other DNA
tcgcatatacagactcctgtatagggagggcatcattggtcggcatggtaaagcatgggctgtggtgtcttatcagcggagggcagtattggtcggcatggtaaagcatgggctgtactgtcttatcgttgcgaaatgacgtttaaataggctgatatacccgaatgtatatccctcctttctttttctatcttgtagttttaagttagttttagtcagcatgaggcggtgctccggcggaattatgtagaggaccatcgtttattgcacaactgtacctgattatttta

SEQ ID NO: 15517 - DNA, 561 bp, synthetic construct
  source 1..561: mol_type = other DNA
aggactcgccaattattgatgatgacgaacgtgttcaatctaatttggaaactgagacagaaataccgaatgaagctgaggaagggttatcagagactgttgaggcagttggtgaggttacgactggagttgaggcagctgaggcgaccgctgcggtgtccactccttggaccttgctggctatagccaatcaacaactaggccaagcagttagtacagcacatgtgtcagggttgcaacagcaatcctcggcggattacacggccaatatgcagtctcacggcttgaatgtaggtcttaatgcagatctcattcgagaacagcagagccagaccatttcgaggcagcaggcaggaggttctattgggtctttgcttgggccccttggaacgttgatcggacaggctattgccggatataactctgtgaaccaggaggatttgaaaacagccgcttctttcaacggttatattaatccccaaatgagtaacatcgttgcttcacagacaacatctggtgatgcaggacaagcaacccaggttgataatgtcgacacaacaa

SEQ ID NO: 15518 - DNA, 663 bp, synthetic construct; identical to SEQ ID NO: 2259
  source 1..663: mol_type = other DNA

SEQ ID NO: 15519 - DNA, 272 bp, synthetic construct
  source 1..272: mol_type = other DNA
tataggtaacctttcatggaacctatatgtgagtaactattctcgttatagaggtagttaccttgtgcagtaatacttcgttacgacgtcttattacaaaacactcgagtattttaaatgacagctggaaagacagcaccccccttaaaatcccttttatcctcgcaatttaattgcaaatctagtttaacttagatttaagtcaatccgatctgttaacacaaagaaattatgttgagtcttaacagaaaagattatttgaaccaaaaaca

SEQ ID NO: 15520 - DNA, 1000 bp, synthetic construct; identical to SEQ ID NO: 2610
  source 1..1000: mol_type = other DNA

SEQ ID NO: 15521 - DNA, 537 bp, synthetic construct; identical to SEQ ID NO: 2093
  source 1..537: mol_type = other DNA

SEQ ID NO: 15522 - DNA, 687 bp, synthetic construct; identical to SEQ ID NO: 210
  source 1..687: mol_type = other DNA

SEQ ID NO: 15523 - DNA, 279 bp, synthetic construct
  source 1..279: mol_type = other DNA
ccgatctggcctccctatattgggagacccatagccaggttattctaaggtttaaaccgcaaccttagtattttgcgtgtagaactttgcccctcaagtgttagcaatttttaagtttttatataggtgtatgcacaacatgcacttctttctagcttaatttgttgcaaccttgataggcatttgttttatcagtttaatttagtttttattcaattagaattaattttatgttagtaacgaaacattcccccagcagttagtaatatttctttagtt

SEQ ID NO: 15524 - DNA, 442 bp, synthetic construct; identical to SEQ ID NO: 1898
  source 1..442: mol_type = other DNA

SEQ ID NO: 15525 - DNA, 561 bp, synthetic construct
  source 1..561: mol_type = other DNA
aggactcgccaattattgatgatgacgaacgtgttcaatctaatttggaaactgagacagaaataccgaatgaagctgaggaagggttatcagagactgttgaggcagttggtgaggttacgactggagttgaggcagctgaggcgaccgctgcggtgtccactccttggaccttgctggctatagccaatcaacaactaggtcaagcagttagtacagcacatgtgtcaggattgcaacagcaatcctcggcggattatacggccaatatgcagtctcacggcttgaatgtaggtcttaatgcagatcttattcgtgaacagcagagccagaccatttcgaggcagcaggcaggaggttctattgggtctttgcttgggccccttggaacgttgatcggacaggccattgccggatataactctgtgaaccaagaggatttgaaaacagccgcttctttcaacggctatgttaatccccaaatgagtaacatcgttgcttcgcagacaacatctggtgatgcaggacaagcaactcaggttgataatgtcgacacaacaa

SEQ ID NO: 15526 - DNA, 662 bp, synthetic construct
  source 1..662: mol_type = other DNA
ccttttgatgtttaaattctaattccgttctcgccggagatgagtaccggtttgagtttaattcccaggtagcgcgagccgtgagtcagcccagacaagcgcagtagccctacttggagaggttctccttgagcgaccagaagctggcattgaatcgagccacataatgctgagagtagagggatttgcattctattgtgaaagcaataatttgagagctgagcccatcacattgtgcactcggaatattgtgcagcgcgaaaggttagtaacattaagttggcgaaaggttagcgcagcaatgattggtggtaacgctggatcttattgtggaagtaatggatgaatatgaagttgaaatcaggatcaccacacccccgcagcatagcggtaccgtactgaatgtcacaatccagtgatgattcgaagcctataacgggcggacgtgtttaaatggtgttttatgtggatgttagttcgccggaatgtgcagctccggatatcgagtcgaagattcagtgaccagtggagcaagcaacataggtaactatttcgtatgattttactcacaaaattgcactgggcaggagcttccaaaggaaccttctgcttctcgtaactgcacacaaactagatttcttattttcgaagagcatattaaa

SEQ ID NO: 15527 - DNA, 1000 bp, synthetic construct; identical to SEQ ID NO: 2611
  source 1..1000: mol_type = other DNA

SEQ ID NO: 15528 - DNA, 555 bp, synthetic construct
  source 1..555: mol_type = other DNA
atattctagttgttagtttataaaatttataaaaatacaaaaacattataaaataaaaacccaaaaatatttagatttaaggaaaattacttctaggtacctatttaactaagtgcagtagatagcaaaatgtagacttggtttttaccatttcttctgagcgttgatgccattttgtgtttcaagccacttagagcgatgtgggaacgaggtgtctctgatatggagttggcgaatcatattattgagaataaaagccccccgactacttccacactccagggattaaacatttttattaaattattatgactgagaccctagcgggatcgaaccggatcgtctagcgaccactagagatgagaaactggctaatcatagatttaataaaacttgttggagagtaggtaatcaaacccccctttttacattggtcacaagcattatatattgagtttttacagcattttaaataacgttctaaagatatcaaataaaatattttacattttcacgactataatttttattttcgcatacatttgtatattaaac

SEQ ID NO: 15529 - DNA, 357 bp, synthetic construct; identical to SEQ ID NO: 1662
  source 1..357: mol_type = other DNA

SEQ ID NO: 15530 - DNA, 779 bp, synthetic construct; identical to SEQ ID NO: 2405
  source 1..779: mol_type = other DNA

SEQ ID NO: 15531 - DNA, 946 bp, synthetic construct; identical to SEQ ID NO: 243
  source 1..946: mol_type = other DNA

SEQ ID NO: 15532 - DNA, 390 bp, synthetic construct; identical to SEQ ID NO: 1754
  source 1..390: mol_type = other DNA

SEQ ID NO: 15533 - DNA, 589 bp, synthetic construct; identical to SEQ ID NO: 2158
  source 1..589: mol_type = other DNA

SEQ ID NO: 15534 - DNA, 846 bp, synthetic construct; identical to SEQ ID NO: 2474
  source 1..846: mol_type = other DNA

SEQ ID NO: 15535 - DNA, 422 bp, synthetic construct; identical to SEQ ID NO: 1836
  source 1..422: mol_type = other DNA

SEQ ID NO: 15536 - DNA, 626 bp, synthetic construct; identical to SEQ ID NO: 2209
  source 1..626: mol_type = other DNA

SEQ ID NO: 15537 - DNA, 834 bp, synthetic construct; identical to SEQ ID NO: 227
  source 1..834: mol_type = other DNA

SEQ ID NO: 15538 - DNA, 988 bp, synthetic construct; identical to SEQ ID NO: 2569
  source 1..988: mol_type = other DNA

SEQ ID NO: 15539 - DNA, 774 bp, synthetic construct
  source 1..774: mol_type = other DNA
ttcggaatcccctccatttagtaatacttttgtattattcgtgcgtacaggcacattattttttactgtacattttgaaacaaacacttgtgatcttttattagatcacataatgtttattttaattactatgattgctcctgtagttgatctgtgattaaggcatactatatttataaatttggcgcttatccatgttatcactctcaggcaatcatacccctgagtttagaatatcatggacctccttatttaattcatatggccctttttcattgaaatcgtaaatcttacaaatcatttgttattaaaatgtcattgaataagagcatgtattctaatgacgtttctaacttcatgcaaaaacaccttttatatgttccaataaaaacaattaaaaaaaaatatataaaaattaaaataattataaaaaatataaacaatataaaacaataaaatataaaaataagatttgtaatgtgtgttcttgttagatttcattctcctaataattaaatttttgtgaaacacatcgaatgtttgatgttagtatttgcatagtactactgtggtaaagcaagtggtttgatattttgtcttcaaacctctcagctgtaacgttctcagctcacgttgccatctctgtttatgcggtggatcatcaccatcgtccacggtacgaaatgatgatattattacttatcaaggttagaaccctagatatatcctgcagcgggagaaaacaaaatctgaatttaaagataagaacaagaa

SEQ ID NO: 15540 - DNA, 294 bp, synthetic construct
  source 1..294: mol_type = other DNA
tcagcgatgcgatgcatatgtccgaaatgacaataaactaatggaagtccgcaatgacattaaactattgtgaggacttttattcatttcgtcctccttaaagtgagatggtatcgtcctccatccaccaagattagaaaatgtcaaactcacaagcgaagcgcttgtgtctgtgcggatgcagtgttgtaactttcgttcatgcaatttagcgtagcatgagcaacattgctggggcctataattataagcccaccttgcgtgataaaggcacaggataattacatattactc

SEQ ID NO: 15541 - DNA, 529 bp, synthetic construct; identical to SEQ ID NO: 2084
  source 1..529: mol_type = other DNA

SEQ ID NO: 15542 - DNA, 423 bp, synthetic construct; identical to SEQ ID NO: 1839
  source 1..423: mol_type = other DNA

SEQ ID NO: 15543 - DNA, 304 bp, synthetic construct
  source 1..304: mol_type = other DNA
tcacttcggagatttcaaatccgacccagttttaaatctgatggtaagcaaaattaatgtatgtatatggataccacatgtattttgatctttatgtgttttgtagagtatgtgtaggctttgcatatgtgaacgctccctaaaggggaatcgatagatgggttcagcgtgcccaattgtaaatacttcgttccgtgtgagttaatctgctccacggtctgtacataaatagattggtaataattgtaaattaaatattttagatagtgtacgtgtgggtcttggcacgagcactactacccca

SEQ ID NO: 15544 - DNA, 711 bp, synthetic construct; identical to SEQ ID NO: 2324
  source 1..711: mol_type = other DNA

SEQ ID NO: 15545 - DNA, 483 bp, synthetic construct; identical to SEQ ID NO: 1990
  source 1..483: mol_type = other DNA

SEQ ID NO: 15546 - DNA, 807 bp, synthetic construct
  source 1..807: mol_type = other DNA
ttatgaaaggtgggttagtaacccactaggagacctgcacggtctctgttgaaattgtacctggagtgatactgattgcttgcgttagttgatatgctcgccgttgtacaccaatttcgagttttagtcctaattcaagtggatagcatacacagtttgtgtggttgttgcattgacggatacctcgacgttgtacaccaatttcgagataattaccattctgcaattacacatcacatttcaataactaagtgcaaaaccccccaaaatcgactacgtttgctctttcgttataagagtcgtctgtgccgcgtaaaaagcatcgcatctactgcgtaaaatagaacccccccccttatatgtttatttgtcttgtgtcgtatattctcatgtagagttttaaagaaaaatgctcaaataaaaagatagttttgtcgtaatttatatgttagtgcttgctgagtagcagacttttgtagtaattttggtggaaatagttttcactggttcttcttggtcaaagaccttagctctcttccctgcattccctagttgaaagattcccgacatatcggttgaaggccggattctagtaagaggttcacattagagataagagtgggttgtgtctgtcatgacttatgtttaaactttgtttgagatcaaagaggatgccaccatttttattatgggatactgatcatgtaaaagtcaagatccgtttgctggtttagtaaaaccagctatccttggaccgggagaaataatacgtttacaccaaaccctctgaactacaactttacgata

SEQ ID NO: 15547 - DNA, 738 bp, synthetic construct; identical to SEQ ID NO: 2360
  source 1..738: mol_type = other DNA

SEQ ID NO: 15548 - DNA, 337 bp, synthetic construct; identical to SEQ ID NO: 1613
  source 1..337: mol_type = other DNA

SEQ ID NO: 15549 - DNA, 901 bp, synthetic construct; identical to SEQ ID NO: 2526
  source 1..901: mol_type = other DNA

SEQ ID NO: 15550 - DNA, 1000 bp, synthetic construct; identical to SEQ ID NO: 2612
  source 1..1000: mol_type = other DNA

SEQ ID NO: 15551 - DNA, 724 bp, synthetic construct; identical to SEQ ID NO: 2340
  source 1..724: mol_type = other DNA

SEQ ID NO: 15552 - DNA, 474 bp, synthetic construct; identical to SEQ ID NO: 1973
  source 1..474: mol_type = other DNA

SEQ ID NO: 15553 - DNA, 521 bp, synthetic construct; identical to SEQ ID NO: 2071
  source 1..521: mol_type = other DNA

SEQ ID NO: 15554 - DNA, 453 bp, synthetic construct
  source 1..453: mol_type = other DNA
ggaagaaaaaggaaagatttctctcttgccccaagcccgtccagcacacgacgtgatataaacttctgcattaagcccgtctagctcccgacgtgatataaacgtagcaataagcccgtctagctcccgacgtgaaataaacgtagcaattaagcccggccagctcacgccgtgatataaacctcagcaacactttccaaccaaaacaccaattagatatttaagttatttttacaattgattataaatatttactgcgtacgtccttgatcggagctcgtacagtattcgtactgatttgcacaaatcttcgcagtgttattggcttctttttgcctaaagttttgctcttgatatttacactctttttcttttgcggtctcgtaaataagaagagttatttatcttgtttgtttttgatttacgcatttgacacttataaaaccatacaaa

SEQ ID NO: 15555 - DNA, 630 bp, synthetic construct; identical to SEQ ID NO: 200
  source 1..630: mol_type = other DNA

SEQ ID NO: 15556 - DNA, 322 bp, synthetic construct; identical to SEQ ID NO: 1556
  source 1..322: mol_type = other DNA

SEQ ID NO: 15557 - DNA, 383 bp, synthetic construct; identical to SEQ ID NO: 1737
  source 1..383: mol_type = other DNA

SEQ ID NO: 15558 - DNA, 391 bp, synthetic construct
  source 1..391: mol_type = other DNA
ttaaaaatcgtgcgtggtttatgcgccacgcacgatttaatactaccagttagtcacacttgagtacactcttagactctactcaattctgacgtctgttagtatcatttattaaataaggcataagtgctcatagcacaatagttttgttttgtctctattcaaaagacaacacactcggggggacgtcccgctcctcgttttatttcaaccattgactcgacatcaattggtggaccttcatcaccctccgccgtaagttgctttagcctcgcgctatattttcaatacttgtggttctataagagtagcttaaaacgtatatagacggcctacatattatagaatgcgtatccggaacgccaagcccggacaagtccctgatatatag

SEQ ID NO: 15559 - DNA, 371 bp, synthetic construct
  source 1..371: mol_type = other DNA
gttttatacttgcaatactttctcattgacgacagctcctagcgtacgctcataacgccttgtagcggaaacaatacttgtgctgtggtgtgcgtgtggtcaagctagcggtgagaaacaacttatgttattgtaagtgtgatgcttgcaatactctctcattgacgacagctcctagcgtacgctcataacgccttgtagcggaaacaatacttgtgctgtggtgtgcgtgtggtcaagctagcggtgagagacaacttagatttaatttaattttaagtcaatataccccctaaattaattctatatattggatacccatctaaattaactacgctccagacgactaaatttagtaaggcttatatagg

SEQ ID NO: 15560 - DNA, 279 bp, synthetic construct
  source 1..279: mol_type = other DNA
atataaacctcagcaacactttccaaccaaaacaccaattagatatttaagttatttttacaattgattataaatatttactgcgtacgtccttgatcggagctcgtacagtattcgtactgatttgcacaaatcttcgcagtgttattggcttctttttgcctaaagttttgctcttgatatttacactctttttcttttgcggtctcgtaaataagaagagttatttatcttgtttgtttttgatttacgcatttgacacttataaaaccatacaaa

SEQ ID NO: 15561 - DNA, 663 bp, synthetic construct
  source 1..663: mol_type = other DNA
agtgattaacccgcctttatatattattgccgattaaatactcatgttcatgtgtgtttattttggacgtggaaactagattcaaaaagactttgaagagcgcaatatcgtcgaacttaaccgtttgtatacccgcaagctctgggaatcatcgttgatgagaaattgagaatttgcatattgcatcttctcacccacctaagcggacgtttattgtccttagataggagcctttgaataaggaagcccacgagttgtagaggtacattagtgcgttgtctgccaaaacaggtacgtacggattacaccacaaggaccattagagttgttcattttgcccccttaaccggattcggcgaacactctattttatttacccacccatttaaagttaaagctttacaacttaaaagtaagccggttggaaacgttaatccaaatttattttattttattttacttagtttatattattcaatatagattattttagatatttaagaccagtatttagctgccttaagcaactattatacttattttttgttattcttaaatttttaggagctaaagtagctttattagctattgcacttttatttattttaggaatattgtcccctaggaattatttgttaataacactttgtttatcattatata

SEQ ID NO: 15562 - DNA, 416 bp, synthetic construct; identical to SEQ ID NO: 1819
  source 1..416: mol_type = other DNA

SEQ ID NO: 15563 - DNA, 414 bp, synthetic construct
  source 1..414: mol_type = other DNA
ctttaaaagtcgtgcgtggcttcaccaggcacgatcagtactatcagttaaccactcttgaatatgctcaatgaccctattcaacactggtgtctcttagtacattgttttagcacttaacgtgcatgagttttgcccatttctttcaaaaatgagcattcgaggagacgtcccgctccccgtcttatttcaaccgtagactcgacatctattggtggacatttaattccagtcgccgtaagttgcttctgccccgcgctatattttctcatacttatggttctataggtctggtttaaaacgtaaatagacggcccacaaactatagaacgcgtacccggaacgccaatcccggataagtccctggatatatagatgcaccgcaatataagcctgcagactggctcatatact

SEQ ID NO: 15564 - DNA, 538 bp, synthetic construct; identical to SEQ ID NO: 2096
  source 1..538: mol_type = other DNA

SEQ ID NO: 15565 - DNA, 768 bp, synthetic construct; identical to SEQ ID NO: 2393
  source 1..768: mol_type = other DNA

SEQ ID NO: 15566 - DNA, 390 bp, synthetic construct
  source 1..390: mol_type = other DNA
ccacgcacgattagtactatcagttaaccactcttgaatatgctcaatgaccctattcaacactggtgtctcttagtacattgttttagcacttaacgtgcttgagttttgcccatttctttcaaaaatgagtattcgaggagacgtcccgctccccgtcttatttcaaccgtagactcgacatctattggtggacatttaattccagtcgccgtaagttgcttctgccccgcgctatattttcttatacttatggttctataggtctggtttaaaacgtaaatagacggcccacaaactatagaacgcgtacccggaacgccaatcccggataagtccctggatatatagatgcaccgcaatataagcctgcagactggctcatatact

SEQ ID NO: 15567 - DNA, 662 bp, synthetic construct
  source 1..662: mol_type = other DNA
tgattaacccgcctttatatattattgccgattaaatactcatgttcatgtgtgtttattttggacgtggaaactagattcaaaaagactttgaatgagcgcaatatcgtcgaacttaaccgtttgtatacccgcaagctctgggaatcatcgttgatgagaaattgagaatttgcatattgcatcttcttgcccacctaagcggacgtttattgtccttagataggagcctttgaataaggaagcccacgaattgtagaggtacattagtgcgttgtctgccaaaacaggtacgtacggattacaccacaaggaccattagagttgttcattttgcccccttaatcggattcggcgaacactctatttaatttacccacccatttaaagttaaagctttacaacttaaaagtaagccggttggaaacgttaatccaaatttattttattttattttacttagtttatattgttcaatatagattattttaggtatttaagaccagtatttagctgccttaagcaactattatacttattttttgttattcttaaatttttaggagctaaagtagctttattagctattgcacttttatttattttaggaatattgtcccctaggaattatttgttaataacactttgtttatcattatata

SEQ ID NO: 15568 - DNA, 691 bp, synthetic construct; identical to SEQ ID NO: 2298
  source 1..691: mol_type = other DNA

SEQ ID NO: 15569 - DNA, 350 bp, synthetic construct
  source 1..350: mol_type = other DNA
cgctcaaggaccctattcaacactggtttctcttagtacattattttagcacttaatgtgcacgagttttgcccgtttctttcaaaaatgagcattcgaggagacgtcccgctccccgtcttatttcaaccgtagactcgacatctattggtggacatttaattccagtcgccgtaagttgcttctgccccgcgctatattttcttatacttatggttctataggtctggtttaaaacgtggatagacggcccacaaactatagaacgcgtacccggaacgccaagcccggataagtccctggatatatagatgcaccgcaatataagcctgcagactggctcatatact

SEQ ID NO: 15570 - DNA, 756 bp, synthetic construct
  source 1..756: mol_type = other DNA
ttacgggcctacgtggcctacgctagtacaatgtagtatagcagggacttaaaggtcctttcaaaaccaatataggctcggaaatccgaagtacaccctataccagcatttacgcaggattgcgtaaaggtcaatgaaattaacaataagtatatcgtatacaagagattgtatccacaaaaaaggagccgtaattcctgatgagcagcatatagcgcggtgtgacgcggtgtgcgaagggattataggttcttttttgtggatacaatctcttgtatacgatatacttattgttaatttcattgacctttacgcaatcctgcgtaaatgctggtatagggtgtacttcggatttccgagcctatattggttttgaaaggacctttaagtccctgctatactatattgtactagcgtaggccacgtaggcccgtaagatattataattattttattatattttattcaccccccacattaactccagttaaagctttataactataagtaagccgtgccgaaacgttaatcggtcgctagttgcgtaacaactattagtttaattttccaaaatttatttttcacaatttttagttaagattttagcttgccttaagcagtctttatatcttctgtatattattttaaagtttataggagcaaagttcgctttactcgcaatagctattttatttattttaggaatattatcacctcgtaattatttaattataacgttagctctatctatttata

SEQ ID NO: 15571 - DNA, 396 bp, synthetic construct
  source 1..396: mol_type = other DNA
ggtttaccacgcacgatcagtactaccagttaaccactcttgaatatgctcaatgaccctattcaacactggtgtctcttagtacatcatcttagcacttaacgtgcacgagttttgcccatttctttcaaaaatgagtattcgaggagacgtcccgctccccgtcttatttcaaccgtagactcgacatctattggtggacattcatttccagtcgtcgtaagttgcttctgccccgcgctatattttcttatacttatggttctataggtctggtttaaaacgtaaatagacggcccacaaactatagaacgcgtacccggaacgccaagcccggataagtccctggatatatagatgcactgcaatataagcctgcagactggctcatatact

SEQ ID NO: 15572 - DNA, 618 bp, synthetic construct
  source 1..618: mol_type = other DNA
gtgtatctacggcactgacggactaattatgtgttgagaatattgatggacagatttatgaaataatatatttctgacagcaatattgtcatacgaaatcccccataggcgttatctacggcactggcgaatatggactaaaaatgtttacccaactgatcacttagagatcacccctaaaattcacacaaaatacacttataaaatgattgataacattatgataatctgtaggcaacaatttattagaatttaagtataatgatgttagtaacctcatagtaacctagatatatttgtttgacaaatatcccaaaattgagtgaaatcaataatgggccgtttaggcaatgttatgagaactgaggcgttaaattttgacaaatacaatacctgacaagtccctttaggattgacttaatataagaatagtatcaatagtttttgaatttaaatatgttattgtagatgaagacatgtatttcttgcaataacctctgtatttcttaaactatatgcaattactcggtggtatttgcattttgatcgaagttaaccttcattcttatattgctgtgtcggagcagtggtattggcgccggactattttacataaac

SEQ ID NO: 15573 - DNA, 634 bp, synthetic construct
  source 1..634: mol_type = other DNA
agccacataagtaggacgtgtatctacggcactgacggactaattatgtgttgagaatattgatggacagatttatgaaataatatatttctgacagcaatattgtcatacgaaatcccccataggcgttatctacggcactggcgaatatggactaaaaatgtttatccaactgatcacttagagatcaccctaaaattcacacaaaatacacttataaaatgattgataacaatatgataatctgtaggcagcaatttattagaatttaagtataacgatgttagtaacctcatagtaacctagatatatttgtttgacaaatatcccaaaattgagtgaaatcaataatgggccgtttaggcaatgttatgagaactgaggcgttaaattttgacaaatacaatacctgacaagtccctttaggattgacttaatataagaatagtatcaatagtttttgaatttaaatatgttattgtagatgaagacatgtatttcttgcaataacctctgtatttcttaaactatatgcaattactcggtggtatttgcattttgatcgaagttaacctttattcttatattgctgtgtcggagcagtggtattggcgccggactattttacataaac

SEQ ID NO: 15574 - DNA, 580 bp, synthetic construct
  source 1..580: mol_type = other DNA
gataaaagaacctataatcccttcgcacaccgcgtcacaccgcgctatatgctgctcattaggaattacggctccttttttgtggatacaatctcttgtatacgatatacttattgttaatttcattgacctttacgcaatcctgcgtaaatgctggtatagggtgtacttcggatttccgagcctatattggttttgaaaggacctttaagtccctactatactacattgtactagcgtaggccacgtaggcccgtaagatattataactattttattatattttattcaccccccacattaatcccagttaaagctttataactataagtaagccgtgccgaaacattaataggtcgcataccggcctaacaacatgtatagcttaattttccaaaatttattcttcacaatttttagttaagattttagcttgcttaacaatctttatatcgtctgtatatgattttaaagtttttaggtgcaaaggtagctcttctagctatcgcgctcctttttattttaggaatattatcccctaggaattatttgctgattacattatgcttgtcattatata

SEQ ID NO: 15575 - DNA, 722 bp, synthetic construct
  source 1..722: mol_type = other DNA
gtatagtagggacttaaaggtcctttcaaaaccaatataggctcggaaatccgaagtacaccctataccagcatttacgcaggattgcgtaaaggtcaatgaaattaacaataagtatatcgtatacaagagattgtatccacaaaaaaggagccgtaattcctgatgagcagcatatagcgcggtgtgacgcggtgtgcgaagggattataggttcttttttcgtggatacaatctcttgtatacgatatacttattgttaatttcattgacctttacgcaatcctgcgtaaatgctggtatagggtgtacttcggatttccgagcctatattggttttgaaaggacctttaagtccctactatactatattgtactagcgtaggccacgtaggcccgtaagatattataattattttattatattttattcaccccccacattaactccagttaaagctttataactataagtaagccgtgccgaaacgttaatcggtcgctagttgcgtaacaactatcagtttaattttccaatatttatttttcacaatttttagttaagattttagcttgccttaagcagtctttatatcttctgtatattattttaaagtttataggagcaaagttcgctttactcgctatagctattttatttattttaggaatattatcacctcgtaattatttaattataacattagctttatctatttata

SEQ ID NO: 15576 - DNA, 614 bp, synthetic construct
  source 1..614: mol_type = other DNA
acgtgtatctacggcactgacggactaattatgtgttgaggatatcgacggatagatttatgaaataatatatttctgacggcgatattgtcatacgaaatcccccataggcgttatctacggcactggcgaatatggactaaaaatgtttaccaaactgatcacttagagatccccaaccacacataaatacacttataaacgattgataacactataacaatttgtaggcaatattttattagaatttaagcataatgatgttagtaacctcatagtaacctagatatatttgtttgacaaatatcccaaagttgagtgaaatcaacaatgggccgtttaggcaatgttatgagaactgaggcgttaaattttgacaaatacaatacctgacaagtcccttttggattgactaaatataagaatagtatcaatagtttttgaatttaaataagttattgtagatgaagacatgtatttcttgcaataacctctgtatttcttaaactatatgcaattactcggtggtacttgcatcttgatcgaagttaacctttattcttatattgctgtgtcggagcagtggtattggcgccggactaattaacataaac

SEQ ID NO: 15577 - DNA, 753 bp, synthetic construct
  source 1..753: mol_type = other DNA
acgtacgcagtaaatatttataatcaattgtaaaaataacttaaatatctaattggtgttttgattggaaagtgttgctaaggtttatatcacggcgtgagctggccgggcttaattgctacgtttatatcacgtcgggagctagacgggcttattgctacgtttatatcacgtcgggagctagacgggcttaatgcagaagtttatatcacgtcgtgtgctggacgggcttcagctacgtaaaagcgcaagaaatgtatattgtaagaatatatagtttcttgcgcttttaaggagaaatcctcaaaccttagacccgtaagacactaaggaagaaaaaggaaagatttctctcttgccccaagcccgtccagcacacgacgtgatataaacttctgcattaagcccgtctagctcccgacgtgatataaacgtagcaataagcccgtctagctcccgacgtgatataaacgtagcaattaagcccggccagctcacgccgtgatataaaccttagcaacactttccaatcaaaacaccaattagatatttaagttatttttacaattgattataaatatttactgcgtacgtccttgatcggagctcgtacagtattcatactgatttgcacaaatcttcgcagtgttattggcttctttttgcctaaagttttgctcttgatatttacactctttttcttttgcggtctcgtaaataagaagagttatttatcttgtttgtttttgattt

SEQ ID NO: 15578 - DNA, 579 bp, synthetic construct
  source 1..579: mol_type = other DNA
gataaaagaacctataatcccttcgcacaccgcgtcacaccgcgctatatgctgctcattaggaattacggctccttttttgtggatacaatctcttgtatacgatatacttattgttaatttcattgacctttacgcaatcctgcgtaaatgctggtatagggtgtacttcggatttccgagcctatattggttttgaaaggacctttaagtccctactatactacattgtactagcgtaggccacgtaggcccgtaagatattataactattttattatattttattcaccccccacattaatcccagttaaagctttataactataagtaagccgtgccgaaacgttaatcggtcgctagttgcgtaacaactgttagtttaattttccaaaatttatttttcacaatttttagttaagattttagcttgccttaagcagtctttatatcttctgtatattattttaaagtttataggagcaaagttcgctttactcgcaatagctattttatttattttaggaatattatcacctcgtaattatttaattataacattagctttatctatttata

SEQ ID NO: 15579 - DNA, 639 bp, synthetic construct
  source 1..639: mol_type = other DNA
cgagtagccacataagtaggacgtgtatctacggcactgacggactaattatgtgttgagaatattgatggacagatttatgaaataatatatttctgacagcaatattgtcatacgaaatcccccataggcgttatctacggcactggcgaatatggactaaaaatgtttacccaactgatcacttagagatcaccctaaaattcacacaaaatacacttataaaatgattgataacaatatgataacctgtaggcaataatttattagagtttaagtataacgatgttagtaacctcatagtaacctagatatatttgtttgacaaatatcccaaaattgagtgaaatcaatgatgggccgtttaggcaatgttatgagaactgaggcgttaaattttgacaaatacaatacctgacaagtccctttaggattgacttaatataagaatagtatcaatagtttttgaatttaaatatgttattgtagatgaagacatgtatttcttgcaataacctctgtatttcttaaactatatgcaattactcggtggtatttgcattttgatcgaagttaacctttattcttatattgctgtgtcggagcagtggtattggcgccggactattttacataaac

SEQ ID NO: 15580 - DNA, 867 bp, synthetic construct; identical to SEQ ID NO: 232
  source 1..867: mol_type = other DNA

SEQ ID NO: 15581 - DNA, 668 bp, synthetic construct
  source 1..668: mol_type = other DNA
tgagtgattaacccgcctttatatattattgccgattaaatactcatgttcatgtgtgtttattttggacgtggaaactagattcaaaaagactttgaagagcgcaatatcgtcgaacttaaccgtttgtatacccgcaagctctgggaatcgtcgttgacgagaaattgagaatttgcctattgcatcttctcacccacctaagcggacgtatattgtccttagataggagcctttgaataaggaagcccacgaattgtagaggtacattagtgcgttatctgccaaaacaggtgcgtacggattacaccacaaggaccactagagttgttcattttgcccccttaaccggattcggcgaacactctattttatatacccacccatttaaagttaaagctttacaacttaaaagtaagccggttggaaacgttaatccaaatttattttaatttattttaaatagcttatataatattacaatatagattattttagatatttaagaccagtatttagctgccttaagcaactattatacttattttttattattcttaaatttttaggagctaaagtagctttattagttattgcgcttttatttattttaggaatattatcccccaggaattatttgttaataacactttgtttatcattatata

SEQ ID NO: 15582 - DNA, 523 bp, synthetic construct; identical to SEQ ID NO: 183
  source 1..523: mol_type = other DNA

SEQ ID NO: 15583 - DNA, 351 bp, synthetic construct; identical to SEQ ID NO: 1649
  source 1..351: mol_type = other DNA

SEQ ID NO: 15584 - DNA, 535 bp, synthetic construct
  source 1..535: mol_type = other DNA
cggcgaatttgtcatacgaaatcccccataggcgttatctacggcactggcgaatatggactaaaaatgtttaccaaactgatcacttagagatccccaaccacacataaatacacttataaacgattgataacactacaacaatttgtaggcaatattttattagaatttaagcataatgatgttagtaacctcatagtaacctagatatatttgtttgacaaatatcccacagttgagtgaaatcaacaatgggccgtttaggcaatgttatgagaactgaggcgttaaattttgacaaatacaatacctgacaagtcccttttggattgactaaatataagaatagtatcaatagtttttgaatttaaataagttattgtagatgaagacatgtatttcttgcaataacctctgtatttcttaaactatatgcaattactcggtggtacttgcatcttgatcgaagttaacctttattcttatattgctgtgtcggagcagtggtattggcgccggactaattaacataaac

SEQ ID NO: 15585 - DNA, 461 bp, synthetic construct; identical to SEQ ID NO: 1941
  source 1..461: mol_type = other DNA

SEQ ID NO: 15586 - DNA, 284 bp, synthetic construct
  source 1..284: mol_type = other DNA
tcccctccccgaccccgtaccgcaataaccacttcaggtgcagacgttggacgaatgtgtgtaagaatgtgtgtgtggccccttcagggcaaatgcttccgcaagaaaggagaaaactcacggtcaagtttgaaccacgagtcgagtatccggacctaggaaagtatctccgccaaatcggaaataggcacccgacgtgtgaagtctctacgatagtgagacccttacaggcaaaggaagagcttaccctgtattgtaactagctcgcgttacgacacccaccc

SEQ ID NO: 15587 - DNA, 476 bp, synthetic construct; identical to SEQ ID NO: 1978
  source 1..476: mol_type = other DNA

SEQ ID NO: 15588 - DNA, 585 bp, synthetic construct
  source 1..585: mol_type = other DNA
atccacaaaaaaggagccgtaattcctgatgagcagcatatagcgcggtgtgacgcggtgtgcgaagggattataggttctttttttgtggatacaatctcttgtatacgatatacttattgttaatttcattgacctttacgcaatcctgcgtaaatgctggtatagggtgtacttcggatttccgagcctatattggttttgaaaggacctttaagtccctactatactatattgtactagcgtaggccacgtaggcccgtaagatattataattattttattatattttattcaccccccacattaactccagttaaagctttataactataagtaagccgtgccgaaacgttaatcggtcgctagttgcgtaacaactattagtttaattttccaatatttatttttcacaatttttagttaagattttagcttgccttaagcagtctttatatcttctgtatattattttaaagtttataggagcaaagttcgctttactcgctatagctattttatttattttaggaatattatcacctcgtaattatttaattataacattagctttatctatttata

SEQ ID NO: 15589 - DNA, 737 bp, synthetic construct
  source 1..737: mol_type = other DNA
atcaaggacgtacgcagtaaatatttataatcaattgtaaaaataacttaaatatctaattggtgttttggttggaaagtgttgctaaggtttatatcacggcgtgagctggccgggcttaattgctacgtttatttcacgtcgggagctagacgtgcttagtcttacgggtctaaggtttgaggatttctccttaaaagcgcaagaaatgtatattgtaagaatatatagtttcttgcgcttttaaggagaaatcctcaaaccttagacccgtaagacactaaggaagaaaaaggaaagatttctctcttgccccaagcccgtccagcacacgacgtgatataaacttctgcattaagcccgtctagctcccgacgtgatataaacgtagcaataagcccgtctagctcccgacgtgaaataaacgtagcaattaagcccggccagctcacgccgtgatataaaccttagcaacactttccaaccaaaacaccaattagatatttaagttatttttacaattgattataaatatttactgcgtacgtccttgatcggagctcgtacagtattcgtactgatttgcacaaatcttcgcagtgttattggcttctttttgcctaaagttttgctcttgatatttacactctttttcttttgcggcctcgtaaataagaagagttatttatcttgtttgtttttgatttacgcatttgacacttataaaaccatacaaa

SEQ ID NO: 15590 - DNA, 582 bp, synthetic construct
  source 1..582: mol_type = other DNA
ttaaataagaactatataaatttgtattctatacaatttcttgcgcttttaaggaataacctgaaaccttagacccgtaagatcctaaggaagaaaaacgaaagttatctcctcattctacctccgaattaaaacgagttgacacgacctacctccggtctaaaacgagtcgatacaacctacctccggtttaaaacgagttgacattccgcccgcttgcgcgagacaatcagctacctacctccggtataaaacgagttgacttacctacctccggtataaaacgagaagaatctagctcgtgatttaaaacttagcaaccccccccaaatcttaaactccaacaatttagattttaataaattattgattataaaaggatactgcgtacgtccttagtcggagctcgtacagtaattttactgatttgcacaaatcttcgcagtttactaggatttttcctacccaaaattttattagtgatatttactcttttcttcctttgcggtatcgtaaataagaaaagttatctatcttgtttatttttgatttacgcatttgacacttatcgaactattcaaa

SEQ ID NO: 15591 - DNA, 942 bp, synthetic construct; identical to SEQ ID NO: 240
  source 1..942: mol_type = other DNA

SEQ ID NO: 15592 - DNA, 350 bp, synthetic construct
  source 1..350: mol_type = other DNA
gtgtgatattcgggaggctttctcttatggttacccatcatttgaggaaatttccaataaactcgaatgtaaggcttagagaaaggtcaaggtgccctatttagggtgaggagccttgctggcagccccagtgaatcctctattggatagaaaccgctatatcgggtagctatagcagtcagttagtaacatagctggcgtttcgaaataccatacctgctgactcccaaaacaatactaccgacgtacacaatacggaactcgcatcgtcctcacaggaaaactctatcgaaacggaacaaatcaccacctttcatgatgtggaaactccaaatcggatcgataccccc

SEQ ID NO: 15593 - DNA, 516 bp, synthetic construct
  source 1..516: mol_type = other DNA
ggaggaatcctcaaaccttagacccgtaagacactaaggaagaaaaaggaaagattcttctcttaccctaagcccgtccgaactaaaacgagttgacacgacctacctccggtctaaagacttgacgtcgacacaaccttcctccggtttaaaaccggcagttcacactcagcccgcttgcgcgagacaatcagctacctacctccggtataaaacgagttgacttacctacctccggtataaaacgagaagaatctagctcgtgatttaaaacttagcaaccccccccaaatcttaaactccaacaatttagatatttaagttatattattgattataaaagtatactgcgtacgtccttaatcggagctcgtacagtatttatactggtttgcacaaatcttcgcagtttgctaggcttctttttgcctaaaattttattattgatatttactcttttcttcttttgcggactcgtaaataagaaaagttatctatcttgtctatttttgattt

SEQ ID NO: 15594 - DNA, 524 bp, synthetic construct
  source 1..524: mol_type = other DNA
tatatttttacaatatacatttcttgcgcttttaaggaggaatcctcaaaccttagacccgtaagacactaaggaagaaaaaggaaagatttctctcttaccccaagcccgtctagctcccgacgtgatataaacgtcagcattaagcccgtctagctcccgacgtgatataaacgtagcattaagcccgtctagctcccgacgtgatataaacgtagtactaagcccggccagctcacgccgtgatataaacctcagcaacactttccaaccaaaacaccaattagatatttaagctatttttacaattgactataaatatttactgcgtacgtccttgatcggagctcgtacagtattcgtactgatttgcacaaatcttcgcagtgttattggcttctttttgcctaaagttttgctcttgatatttacactctttttcttttgcggtctcgtaaataagaagagttatctatcttgtttgtttttgatttacgcatttgacacttataaaactatacaaa

SEQ ID NO: 15595 - DNA, 681 bp, synthetic construct
  source 1..681: mol_type = other DNA
gctcggaaatccgaagtacaccctataccagcatttacgcaggattgcgtaaaggtcaatgaaattaacaataagtatatcgtatacaagagattgtatccacaaaaaagaacctataatcccttcgcacaccgcgtcacaccgcgctatatgctgctcatcaggaattacggctccttttttgtggatacaatctcttgtatacgatatacttattgttaatttcattgacctttacgcaatcctgcgtaaatgctggtatagggtgtacttcggatttccgagcctatattggttttgaaaggacctttaagtccctactatactatattgtactagcgtaggccacgtaggcccgtaagatattataattattttattatattttattcaccccccacattaactccagttaaagctttataactataagtaagccgtgccgaaacgttaatcggtcgctagttgcgtaacaactattagtttaattttccaatatttatttttcacaatttttagttaagattttagcttgccttaagcagtctttatatcttctgtatattattttaaagtttataggagcaaagttcgctttactcgctatagctattttatttattttaggaatattatcacctcgtaattatttaattataacattagctttatctatttata

SEQ ID NO: 15596 - DNA, 744 bp, synthetic construct
  source 1..744: mol_type = other DNA
cgcgacgattgtacttagctatgattctcgtatttgggagttggactcccaggaccctgccatcatagttatttagcgattaaacccgcacacatttaaataagtgtgttagcgtgatggattttgccaaatggtgaatttccctttcaggaacattttaacttgaatcagaattttgtacagatggaatcgacgattgtacttagctatgattctcgtattagtgttaggaaattttgtgaaatttttcacacctactagttttaaggccctttagtttagttgcaagtattttgatagaatagtactctttgagtatgcgattgtatcatgtgctcggcgagccaggggcaatttaagtaaagtaggatccctattcttagccaattgatgaatattgttaattcggaaagtgtagactacctctgtatatttttgatgatatgcgaggaacatcgtgttttaccgtccaataggtagtttttctacgaggacgagatgcttagctgcacacgtgaacttaattgattgcgattttcgatgatataatacaatttaattgacttttgaatagactatgcgtagttcttgtcccaaccaggaatgattgcacttaatttgtttctaccgattaaagtgatcattcaagtactctctgtagtctattcttgattgtacttgcactagcttaaggatttatgttttgtgtttgttttgtcttgttttgtccccccccacttttcc

SEQ ID NO: 15597 - DNA, 519 bp, synthetic construct
  source 1..519: mol_type = other DNA
atttttgcaatatacatttcttgcgcttttaaggaggaatcctcaaaccttagacccgtaagacactaaggaagaaaaaggaaagatttctctcttgccccaagcccgtccagctcacgacgtgatataaacctcagcactaagcccgtctagctcccgacgtgatataaacgtagcaaagcccgtctagctcccgacgcgatataaacgtagcactaagcccggccagctcacgccgtgatataaacctcagcaacactttccaaccaaaacaccaattagatatttaagttatttttacaattgattataaatatttactgcgtacgtccttgatcggagctcgtacagtattcgtactgatttgcacaaatcttcgcagtgttattggcttctttttgcctaaaattttattattgatatttactcttttcttcttttgcggtctcgtaaataagaaaagttatttatcttgtttatttttgatttacgcttttgacacttacaaaaccatacaaa

SEQ ID NO: 15598 - DNA, 470 bp, synthetic construct
  source 1..470: mol_type = other DNA
tacccgtaagacactaaggaagaaaaaggaaagatttctctcttgccccaagcccgtccagcacacgacgtgatataaacttctgcattaagcccgtctagctcccgacgtgatataaacgtagcaataagcccgtctagctcccgacgtgatataaacgtagcaattaagcccggccagctcacgccgtgatataaacctcagcaacactttccaaccaaaacaccaattagatatttaagttatttttacaattgattataaatatttactgcgtacgtccttgatcggagctcgtacagtattcgtactgatttgcacaaatcttcgcagtgttattggcttctttttgcctaaagttttgctcttgatatttacactctttttcttttgcggtctcgtaaataagaagagttatttatcttgtttgtttttgatttacgcatttgacacttataaaactatacaaa

SEQ ID NO: 15599 - DNA, 486 bp, synthetic construct
  source 1..486: mol_type = other DNA
aaatcctcaaaccttagacccgtaagacactaaggaagaaaaaggaaagatttctctcttgccccaagcccgtccagcacacgacgtgatataaacttctgcattaagcccgtctagctcccgacgtgatataaacgtagcaataagcccgtctagctcccgacgtgaaataaacgtagcaattaagcccggccagctcacgccgtgatataaacctcagcaacactttccaaccaaaacaccaattagatatttaagttatttctacaattgattataaatatttactgcgtacgtccttgatcggagctcgtacagtattcgtactgatttgcacaaatcttcgcagtgttattggcttctttttgcctaaagttttgctcttgatatttacactctttttcttttgcggtctcgtaaataagaagagttatttatcttgcttgtttttgatttacgcatttgacacttataaaaccatacaaa

SEQ ID NO: 15600 - DNA, 668 bp, synthetic construct
  source 1..668: mol_type = other DNA
gggcttattgctacgtttatatcacgtcgggagctagacgggcttaatgcagaagtttatatcacgtcgtgtgctggacgggcttggggcaagagagaaatctttcctttttcttccttagtgtcttacgggtctaaggtttgaggatttctccttaaaagcgcaagaaatgtatattatgagaatatatagtttcttgcgcttttaaggagaaatcctcaaaccttagacccgtaagacactaaggaagaaaaaggaaagatttctctcttgccccaagcccgtccagcacacgacgtgatataaacttctgcattaagcccgtctagctcccgacgtgatataaacgtagcaataagcccgtctagctcccgacgtgatataaacgtagcaattaagcccggccagctcacgccgtgatataaacctcagcaacactttccaaccaaaacaccaattagatatttaagttatttttacaattgattataaatatttactgcgtacgtccttgatcggagctcgtacagtattcgtactgatttgcacaaatcttcgcagtgttattggcttctttttgcctaaagttttgctcttgatatttacactctttttcttttgcggtctcgtaaataagaagagttatttatcttgtttgtttttgattt

SEQ ID NO: 15601 - DNA, 609 bp, synthetic construct
  source 1..609: mol_type = other DNA
aagtatatcgtatacaagagattgtatccacaaaaaaggagccgtaattcctgatgagcagcatatagcgcggtgtgacgcggtgtgcgaagggattataggttcttttttgtggatacaatctcttgtatacgatatacttattgttaatttcattgacctttacgcaatcctgcgtaaatgctggtatagggtgtacttcggatttccgagcctatattggttttgaaaggacctttaagtccctactatactatattgtactagcgtaggccacgtaggcccgtaagatattataattattttattatattttattcaccccccacattaactccagttaaagctttataactataagtaagccgtgccgaaacgttaatcggtcgctagttgcgtaacaactattagtttaattttccaatatttatttttcacaatttttagttaagattttagcttgccttaagcagtctttatatcttctgtatattattttaaagtttataggagcaaagttcgctttactcgctatagctattttatttattttaggaatattatcacctcgtaattatttaattataacattagctttatctatttata

SEQ ID NO: 15602 - DNA, 484 bp, synthetic construct
  source 1..484: mol_type = other DNA
atcctcaaaccttagacccgtaagacactaaggaagaaaaaggaaagatttctctcttgccccaagcccgtccagcacacgacgtgatataaacttctgcattaagcccgtctagctcccgacgtgatataaacgtagcaataagcccgtctagctcccgacgtgatataaacgtagcaattaagcccggccagctcacgccgtgatataaaccttagcaacactttccaaccaaaacaccaattagatatttaagttatttttacaattgattataaatatttactgcgtacgtccttgatcggagctcgtacagtattcgtactgatttgcacaaatcttcgcagtgttattggcttctttttgcctaaagttttgctcttgatatttacactctttttcttttgcggtctcgtaaataagaagagttatttatcttgtttgtttttgatttatgcatttgacacttataaaaccatacaaa

SEQ ID NO: 15603 - DNA, 507 bp, synthetic construct
  source 1..507: mol_type = other DNA
tattcttgcgcttttaaggagaaatcctcaaaccttagacccgtaagacactaaggaagaaaaaggaaagatttctctcttgccccaagcccgtccagcacacgacgtgatataaacttctgcattaagcccgtctagctcccgacgtgatataaacgtagcaataagcccgtctagctcccgacgtgaaataaacgtagcaattaagcccggccagctcacgccgtgatataaaccttagcaacactttccaaccaaaacaccaattagatatttaagttatttttacaattgattataaatatttactgcgtacgtccttgatcggagctcgtacagtattcgtactgatttgcacaaatcttcgcagtgttattggcttctttttgcctaaagttttgctcttgatatttacactctttttcttttgcggtctcgtaaataagaagagttatttatcttgtttgtttttgatttacgcatttgacacttataaaaccatacaaa

SEQ ID NO: 15604 - DNA, 310 bp, synthetic construct
  source 1..310: mol_type = other DNA
taagcccgtctagctcccgacgtgatataaacgtagtaattaagcccggccagctcacgccgtgatataaacttcagcaaactttccaattttacacaattacctagtttattaagttttataattgattacaaacgttatctgcgtacgtccttaatcggagctcgtacagtatttatactggtttgcacaaatcttcgcagtttgctaggcttctttttgcctaaaattttattattgatatttactcttttcttcttttgcggactcgtaaataagaaaagttatctatcttgtttatttttgattt

SEQ ID NO: 15605 - DNA, 501 bp, synthetic construct
  source 1..501: mol_type = other DNA
tgcgcttttaaggagaaatcctcaaaccttagacccgtaagacactaaggaagaaaaaggaaagatttctctcttgccccaagcccgtccagcacacgacgtgatataaacttctgcattaagcccgtctagctcccgacgtgatataaacgtagcaataagcccgtctagctcccgacgtgaaataaacgtagcaattaagcccggccagctcacgccgtgatataaaccttagcaacactttccaaccaaaacaccaattagatatttaagttatttttacaattgattataaatatttactgcgtacgtccttgatcggagctcgtacagtattcgtactgatttgcacaaatcttcgcagtgttattggcttctttttgcctaaagttttgctcttgatatttacactctttttcttttgcggtctcgtaaataagaagagttatttatcttgtttgtttttgatttacgcatttgacacttataaaaccatacaaa

SEQ ID NO: 15606 - DNA, 654 bp, synthetic construct; identical to SEQ ID NO: 2250
  source 1..654: mol_type = other DNA

SEQ ID NO: 15607 - DNA, 338 bp, synthetic construct
  source 1..338: mol_type = other DNA
tctagctcccgacgtgatataaacgtagcaattaagcccggccagctcacgccgtgatataaacttcagcaaactttccaattttattattatacaattacctagtttattaagttttataattgattacaaacgttatctgcgtacgtccttagtcggagctcgtacagtatttatactggtttgcacaaatcttcgcagtttgctaggcttctttttgcctaaaattttattattgatatttactcttttcttcttttgcggtctcgtaaataagaaaagttatttatcttgtttatttttgatttacgcttttgacacttacaaaacaatacaaa

SEQ ID NO: 15608 - DNA, 812 bp, synthetic construct; identical to SEQ ID NO: 224
  source 1..812: mol_type = other DNA

SEQ ID NO: 15609 - DNA, 399 bp, synthetic construct; identical to SEQ ID NO: 1774
  source 1..399: mol_type = other DNA

SEQ ID NO: 15610 - DNA, 640 bp, synthetic construct
  source 1..640: mol_type = other DNA
gggacttttatgtccctacgtacaattttcgccgaaattagcgatataatttcaaaaccgtttcgcggcgcctgagcagcctttccaatggtaggagcgtcgatcccccgtatggagtggagaatataaggctcagctaggatgacacgcctgtacactgtcgacattagttaagttgcaattacacgtctgttgccgaagaaaccattttagtcaactgattatgatttttgtataatgacaaacagtgatgaactgtataactcatcaacaacaaaacggattacgaacctatttgtaactatcttgatcgaagtctagtagatccccaatatagccctgaaaagcttgagggatgggatagctctataaatagacgtgaggctttaaatcctgataagtacattacctgagaattcctccttttggagtttgaatttatataagttagtaccaatagttaatatcatttaagtatgttattatcgctgaaggcatgtatttcggataataacctctacattgatatataaactatatgcaagtctcggtggatattgcgttatggtcgcagttaacctgtagcttatatattcctgtgtcggagcagtggtaatggagccggacaatttcgccaaaa

SEQ ID NO: 15611 - DNA, 711 bp, synthetic construct
  source 1..711: mol_type = other DNA
tgattttaaaggtaaccttggttattatgctttacggttttcattgttgatggtatttgcggcctgcggtccctaattgttgaattatttattctgatacgttgttttcttgttgatggtaaggattcttattttggagtggtttttcagaagataactctaaatatgaattatgccttattgttttcaatgttgatggccttcgtttgaatatttttttttgttaatgacggtaatcaaagattacatctcaaacttagattaatattttaagtagggtatactgagttagtcctctctctttactgattttgatatctggtaattgacttcgaagaaagatgcgtcttttggatttgtaatgactgggccttaagttcataggtgttattgcatggaggaacacattactttggttgatgatgatgttttgatgatgactttcaatgtatgtgcttatgttaagcctgacataagaacttactaatttgcatagtgcaaagggttagtatatgatttttagtatgtggattttgacactgcctttgattaggatgtgtgaatgattttgaaacatattaagatgtttatacgagcgtgttgtttaccattttcaggatatgtggaagcggttgtgtatgatctatacgcacatttagttcccagagggcgttgtcgtctccccctaagcaagggagaaacacgtggcac

SEQ ID NO: 15612 - DNA, 341 bp, synthetic construct
  source 1..341: mol_type = other DNA
ttaagatgtgatcttgcttccttatacaattttgagaggttaataagaaggaagtagtgctatcttaataattaggttaactatttagttttactgttcaggatgcctattggcagccccataatatccaggacaccctctctgcttcttatatgattaggttgtcatttagaataagaaaataacctgctaactttcaaacaaacaataataacattgaaaatgaagatcggaaaattacttccgagcaaaaagagattgtacacttttctagtgaaggagttacccctagtaccactgcggtgcctgatatcgttagcctttcaacagattatttgtct

SEQ ID NO: 15613 - DNA, 628 bp, synthetic construct
  source 1..628: mol_type = other DNA
ctatacgcgcttggttgttttcacatatcaagtgggttaaaagccccgtatgcttggagaccaggtttgtttgccgacttacggaacgtcgttaaactctaggctttccggatggcttctaattatccgaggcccgtacgtgggctcgaagtttagtagagagtacgcgtacaaaagtcctagttgttttcatacatcaagtgggttaaaagccccgtgtacttggaggctaggcagcacgattacagtagcctgtactacctgaagcatgtagtaaaactgcacagttgaacattgtcacaaacgggctgatagcgtatagctggattgttgagagatagcatcttgcgggatgtgaaagagcatgttagacatgtattatggcttttctcaatacgcagtctttgctatgcgtgtgtaggcaaaaggaagtgagagagttgaccgtctctcatgggtatttaggttattcagagtacgctgctactgcggtagtggacacaacccaggtgttcgggtctctgtcttagaaactatatgaaaggcgaaagttgtgaagagttttctaacgtcactcttaaatggtacgtgtcgattaaacttgtagcaatgaatagccaaccctata

SEQ ID NO: 15614 - DNA, 316 bp, synthetic construct; identical to SEQ ID NO: 1540
  source 1..316: mol_type = other DNA

SEQ ID NO: 15615 - DNA, 1000 bp, synthetic construct; identical to SEQ ID NO: 2613
  source 1..1000: mol_type = other DNA

SEQ ID NO: 15616 - DNA, 971 bp, synthetic construct; identical to SEQ ID NO: 2559
  source 1..971: mol_type = other DNA

SEQ ID NO: 15617 - DNA, 853 bp, synthetic construct; identical to SEQ ID NO: 2485
  source 1..853: mol_type = other DNA

SEQ ID NO: 15618 - DNA, 976 bp, synthetic construct; identical to SEQ ID NO: 2563
  source 1..976: mol_type = other DNA

SEQ ID NO: 15619 - DNA, 783 bp, synthetic construct; identical to SEQ ID NO: 2415
  source 1..783: mol_type = other DNA

SEQ ID NO: 15620 - DNA, 706 bp, synthetic construct; identical to SEQ ID NO: 2314
  source 1..706: mol_type = other DNA

SEQ ID NO: 15621 - DNA, 840 bp, synthetic construct; identical to SEQ ID NO: 2471
  source 1..840: mol_type = other DNA

SEQ ID NO: 15622 - DNA, 1000 bp, synthetic construct
  source 1..1000: mol_type = other DNA
cacgcgtcaagcgtgcatactttgtgagtgtggctacgtctaggtgcaactttagctacgctctggtccagaattatcgatactatatccatgaggtataggtcgacaatgttcttgatactttgtgagttattgtcattttgtgttatcgggtcactgtggatatcggacacacccgagagcaacttgtttattgcatactatttgagttaatactacgcttaggtgcatgtggaagcgtaatggcttttcaaaccctagttaagaaacctataattacaaaactataaaaataatgataaagtataaaacccgttcgtatacttgtatacttgggacaaaaattacagtggaaaactgtttcttttccaaccgttttaaccggaaggttaggagttcggataaactcccggaagatatgtatttcgataaaggctacatataggagcataccctcagtatgatgtttttgcttgttttgcattctaaacgagacgtgatgtagtgcactattgattgaactattagtctgctattccagaaaactcacgacatccctgttatcagttcgggacgtgagttagtatggtttgtgaggcaggaggttgaagtcctccctaatagagactgtcgtaactatcattaagaactgccgtaattctgtagtcagttggtaagctttttgagcgtgggctcttgaggcctgaagaacctcaatcccagacgtagtaacagtcctacaatagttgtatttcttcccatcacgatgtgcaccggccgtggtacgctgcacattatttgttcaattgttgggagactaacgttgttcacgccatcgccggctccggacgggcatttaattacctacaggtcgtaaaaggaattttcgatctgttcttcagcggttttaaacctcttcaattttcttcgattttcttcgattttatcttcagtttttttattataattattaaatatttttacttcaattatatttaaa

SEQ ID NO: 15623 - DNA, 819 bp, synthetic construct; identical to SEQ ID NO: 2454
  source 1..819: mol_type = other DNA

SEQ ID NO: 15624 - DNA, 1000 bp, synthetic construct; identical to SEQ ID NO: 2614
  source 1..1000: mol_type = other DNA

SEQ ID NO: 15625 - DNA, 344 bp, synthetic construct
  source 1..344: mol_type = other DNA
agctaaggcttaacgattcataccccttgtgttctctttgtttaatagcgtctcttgcttaaacaactgaattggttctttccttttcagaacttattgtttattgtgattgaagaccttttactcatacatttggcgtacgtttgtaagctatttttctcgctttcgagcttattgctctgcaagcatcccttgcctgcataaggctatataactgctatagtgaagcaagtaattaaggatttattattaagttttattattgttgttttttttattttagttataatatttagttttggtatttatattgtgtaagataatatatttaaccacctataaaa

SEQ ID NO: 15626 - DNA, 930 bp, synthetic construct; identical to SEQ ID NO: 2544
  source 1..930: mol_type = other DNA

SEQ ID NO: 15627 - DNA, 728 bp, synthetic construct; identical to SEQ ID NO: 2343
  source 1..728: mol_type = other DNA

SEQ ID NO: 15628 - DNA, 676 bp, synthetic construct; identical to SEQ ID NO: 2282
  source 1..676: mol_type = other DNA

SEQ ID NO: 15629 - DNA, 448 bp, synthetic construct; identical to SEQ ID NO: 1914
  source 1..448: mol_type = other DNA

SEQ ID NO: 15630 - DNA, 878 bp, synthetic construct
  source 1..878: mol_type = other DNA
gcgggggccaaacccccgtctactgatgagctgcacctctatatttagtttcaagagattcttcttatatgtgttgttctccctaactagactatcctctgcacacctaaaagcgtcgcatgatactctaccacacctaaaagcgtggcttccctccccctaacttaaccttatttagttttaataattttagttttaatttttagttcacgggactaccacttggaatccctaatagtaacaaaatactaaatacccagaaaattaactacagtttatagtcatgtcttataaaatgtagctagtagttttgatatactaaagtacattcacgtatacgtgttaccgctccgattcttggaatcaagtgtatcaaaattacgagattgttatgttgggcagtaaagatctcggtataactcttattaaattctttaccgccttgcagagctatacgtaattagaagtgggtagttttgagtggtgttaatctaacgcaggagaaaatgcttcggccctattacttttgtagataggggcgagtagggagctctgaaggccttggaaaccttcatctctaatccgggacgattttaacattcggctgcttctagttcgtatatgatgatcacaaggttgctcacacccgtggaggtcggctgtgtagtatttgggaggataaaaggttagccacaccttccttcttgtacctcttctctctattgaataatagaacttttaaaacaaacaagaaaatatagttatattttctgctccaagcttccagctttccaaacaattccaattttccagcctttccaatttaatccaatttattccaattttatcaccagattttccaacttatttcacttata

SEQ ID NO: 15631 - DNA, 1000 bp, synthetic construct
  source 1..1000: mol_type = other DNA
ttcgattctttattggttcgataattgtgtgtaacaaactttgacaacttactatgtgattttcgttgactttactttataaacaaacttaattatagggctttcattaactattctcacgtagtgagtttattgattgagcatacattatgttccattgatgttccgaaaaggttcgattctttattggttcgatgattgtgtgtaacaaactttgacaacttactatgtgattttcgttaactttactttataaacaaacttaattataagcataaacttacttagtaataaatataaacgtagttagttggttttatatatatattataacgtatagtgtcattaaaatataaaaactcggtgccgaccggggttgtatctaacaattaataaaatttatattatgtgttttcactatcggcccgtcttattagtcttttagtagcatagacaaatagtgacactggcataatcacccccagtggcaacaagcacctctaatatttcttttattaaaatgatttacaatgcaaaaatattaattttaaggcaaggctatttcatatttcaaatgtctatgagtagatgaaacgttgtatataagtaagtgcgataaaacagggacccctctgactggcaaacaccagcgcctactgctttttatacgtttgcgacataatcgaaaatgaccgctttgtttttgaagatagtgaccactattctaggcaactggaggtagtgttaacccagctggatttattccaaaacctcgatgacgtgtgtatccatggacttcgggaatatatcttaaagatatagttgggcttctgaaccctagttttacggacgtttttataggaagaataaaacgtgtccgatttttatttctctttctcttatggttacaattctgtgaatattattttcggaatttttattgattgcgtatttgtgtctcacctttctttaaccaattgaattattttacattgaaaac

SEQ ID NO: 15632 - DNA, 1000 bp, synthetic construct
  source 1..1000: mol_type = other DNA
ttactttgcaagttggagcttactattttggattatgaatatgtgcacttagtgtctgtatttatagtcgtttgtggttcaaggttttgtgttagtagtacacttatgtatgaatgtacctttagtatgaatgttatagaatgacaatatcgaaggaaaaatctttataaaatacaaaaatattgtttttattatttcgatatggtgttttatagagtagattgccatgtgaccgctcatagaagtccattatggtttatcaatcgaagttgaatgtatttataagaatattatacttaattagtaatattagtagtccgtaactattatcatccttttacagtttgatgtgataatagaccactgcagtatcgagtagagtttcgaatgcgtagtgcaatagtacaatcactgtcaccgaccatctatcgtaatgatagatctgtcggaaaccattatttatgaagtgactagcaatcatggattaaattagatggtattctagtttagaggtgattcggcgctgcggtgcgactgaaacttctaaattagcatgtcagattgtattatgaatgcgttagtagtaatttctgcgatagagctgggacccctcagtctctcaggtattgtatgaggcgaaagtgtgaaagttttgtatgtatttttttatatgtacgactgtatcgggaattcctttagcaagaatccttttaatacagtataatctgtgctacggtacgttatgttcgcagggcacccgttaatgtctcatagcccagacgatggcggatggaaagacatcatattttattttaatgctgtctttattgctgatttattttgctgtttttatttgctattttatatttgctaattttcattattgcgaaatatattatattgctatttttattatatacgctagattcaattttattctttctatattttcaatttaattttgatttcgaaggtaaatatatataattgattattaaaa

SEQ ID NO: 15633 - DNA, 921 bp, synthetic construct
  source 1..921: mol_type = other DNA
attatcggtatttccgtgtaattagctaatgaagagttaccacatgctggctgcttattagatatgcggaaagatcggtaagatctttttctatacacaaacgtaggttaagaatcatttccattattaacaaggcttggatagacagattgaaactccaagttttcatctcggaatagacagattgaaatttccgtctcatccttttactaaccaatcatcttgtaggaatcaaattctttcctagtcgtataattaatgatagtgttgcgactttaaaattttacacttcgtcattatagttgagatctatttcttctcacatggtttataagatgtgaatgtaccatgttaaataacacaaaccaactggaattttccaggattgttttgtagtagtgcttcaatccattcaaagcactctcatcttgcgcgtcgtgctagatgttaaagacgtcacgatcggttttttggcttgagttttacgataaataaccaaacaatgataacgctaatagcaagtaaagaacgattaaagatttttagatatgtgtacaattgtgtcatacgaaagtgtttcaccattgaaatgatatccaattcgactgaaaaatgtcgcggttgatcgatttcctgatgcccttgagaaaggctaaatggaggttgtacacgtgtttttaattgttgtttcgctaggctaatcagcccgttgcagaccccggtacaatccgtggtggtggagttaaatgcccatccaacgttaatggtcaagtttcccgatgattccctggggctggggtcgttaattctctaaagtgacaagtgatttcttttgctctcccaagttcttacccaaagctttctctccccaattttcttttaaacgtttttctttttaaatcttttaaaataatttataaa

SEQ ID NO: 15634 - DNA, 816 bp, synthetic construct; identical to SEQ ID NO: 2450
  source 1..816: mol_type = other DNA

SEQ ID NO: 15635 - DNA, 1000 bp, synthetic construct; identical to SEQ ID NO: 2615
  source 1..1000: mol_type = other DNA

SEQ ID NO: 15636 - DNA, 792 bp, synthetic construct; identical to SEQ ID NO: 2424
  source 1..792: mol_type = other DNA

SEQ ID NO: 15637 - DNA, 1000 bp, synthetic construct
  source 1..1000: mol_type = other DNA
tgttactttgcaagttggagtttactatcttggattatgagtatgtgcacttagtgtctgtatttatagtcgtttgtggttcaaggttttgtgttagtagtacacttatgtatgaatgtacctttagtatgaatgttatagaatgacaatatcgaaggaaaaatttttataaaatacaaaaatattgtttttattatttcgatatggtgttttatagagtagattgccatgtgaccgctcatagaagtccattatggtttatcaatcgaagttgaatgtacttataagaatattatacttaattggtaatattagtagtccgtaactattatcatcctttttcagtttgatgtgataatagaccactgcagtatcgagtagagttccgaatgcgtagtgcaatagtataatcactgtcaccgaccatctattgtaatgatagatctgtcggaaaccattatttatgaagtgactagcaatcatggattaaattagatggtattctaatttagaggtgattcggcgctgcggtgcgactgaaacttctaagttagcatgtcagattatattatgaatgcgttagtagtaatttctgcgatagagctgggacccctcagtctctcaggtattgtacgaggcgaaagtgtgaaagttttgtatgtgtttttatatgtacgactgtatcgggacttcctttagcaagaatccttttaatacagtataatttgtgctacggtacgttacgttcgcagggcacccgttaatgtctcatagcccagacgatgacggatggaaagacatcatattttattttaatgctgtctttattgctgatttattttgctgtttttatttgctattttatatttgctgattttcattattgcgaaatatattacattgctatttttattatacacgctagattcaattttatttttcctatattttcaatttaattttgattttgaaggtaaatatatataattaattattaaaa

SEQ ID NO: 15638 - DNA, 428 bp, synthetic construct; identical to SEQ ID NO: 1855
  source 1..428: mol_type = other DNA

SEQ ID NO: 15639 - DNA, 618 bp, synthetic construct
  source 1..618: mol_type = other DNA
atgcccctcgggcggggggcctttaccccccgctcgagttttaaacctagttaagtttatgttaagattttctataatttcattaacatggaaaagaaacgtaggttcggtgtggatcttaatagtttcatacagaaatcgcagccttttccagcttgactttatatgaaactttattttgttttatttagtttatagtttaagttactctttagttcacgggataactactagttgcggctagcaagaatccttattagtaacaaaagtgccttaacaggacaaaatataagaaaactctactccaattttagtacctatacgaaagaacacagtttagcgaagctttgagctggcaacgctatgtatcggattatttaacgtcacctcctagtgagtgcgtgtcgacttaatttgtatatagttatttagtccctcaaagaataagcagaattgttagtatggatcatgtgggaattaattgtttgatgtaggactgcttcatgtaggtttagcaccctaatatgacagtataaaagtttttgctcgttttcaacctcagcaacgtttttcgttataaagcgtagatttgttttatttctttcttttcagttcatt

SEQ ID NO: 15640 - DNA, 728 bp, synthetic construct
  source 1..728: mol_type = other DNA
tttgcatgagtataagaaatacgcaacgttatcctaaacaggaccagaattaactgaaaatgaaaaacgttggaactcttacggagcagagaggggagcgttgaggggtgtagtccttagtctgaaactttggaactactactattgcaagacgagtctcacaatagccactaagcaatcacgaagattcttaatggctattgtgagactcgtcttgcaatagtagtagttccaaagtttcagactaaggactacacccctcaacgctcccctctctgctccgtaagagttccaacgtttttcattttcagttaattctggtcctgtttaggataacgttgcgtatttcttatactcatgcaaagatttgttgacaaacatggctcagtctcctacacttgtcaaaagtgtaggagattgagccatgtttgtcaacaaatctttgcatgagtataagaaatacgcaacgttatcctaaacaggaccagaattaactgaaaatgaaaaacgttggaactcttaagaatcttcgtgattgcttagtggctattgtgagactcgtcttgcaatagtagtagttccaaagtttcagactaaggactacacccctcaacgctcccctctctgctccgtaagagttccaacgtttttcattttcagttaattctggtcctgtttaggataacgttgcgtatttcttatactcatgcaaagatttgttgacaaac

SEQ ID NO: 15641 - DNA, 936 bp, synthetic construct; identical to SEQ ID NO: 2546
  source 1..936: mol_type = other DNA

SEQ ID NO: 15642 - DNA, 400 bp, synthetic construct; identical to SEQ ID NO: 1780
  source 1..400: mol_type = other DNA

SEQ ID NO: 15643 - DNA, 732 bp, synthetic construct; identical to SEQ ID NO: 2349
  source 1..732: mol_type = other DNA

SEQ ID NO: 15644 - DNA, 915 bp, synthetic construct
  source 1..915: mol_type = other DNA
attaattaatgagtctcttaaatgagttttatatttcttgagtttcatgttccgaaaaggttcgatgattatactcttggataatatttaatgacatttttggattggctcattattaagtcttttctctgtacttagttaaggtttatttgcttttaaattatatgtattatacaacttatatgttttagaaactgaaatactcggttcagaccggggctatatctaacaacttgtaataaataatttacctattttcactatcggcctctcttattagtcttttagtagcatagagaaatagtgacatgagcataatcacccctcatggcaacaagtagctctttattttctattacaagtatgatttatagtgtataaaaattaattttaaggcaaggcaacataatattgtagatgtctatgagtagatgaaacgtagttgacatgtgtgtgcgataaaatggggacccctccaactggctaacaccagcgcctactacatttcaatatattgcgacataatcgaaaatgaccgctctatatattagggttgtgaccactattctgatttattttggaggtagtgttaatccggctgagtttatctcaaaacctcgatgacaagtgtatccttggacttcgggcatatatctctaagatatagtcggacttttgaaccgtaaatttgcggaggctttaagtacgaagaataagcctgtccattttcattttactttttcttatggttacaatttcagattacattaaagcgatttcattgttcattgttgtttcaattattctcaattgcaatcctattacccctttgttttatttttattccaattttataatccttttgttaattgtttctcatattgattttaaatttgtatcaaaatatttttgaag

SEQ ID NO: 15645 - DNA, 937 bp, synthetic construct
  source 1..937: mol_type = other DNA
tagattttcagattatcggtatttccgtgtaattagctaatgaagagttaccacatgctggctgcttattagatatgcggaaagatcggtaagatctttttctatacacaaacgtaggttaagaatcatttccattactaacaaggcttggatagacagattgaaactctaagttttcatctcggaatagacagattgaaatttccgtctcatccttttactaaccaatcatcttgtaggaatcaaattctttcctagtcgtataattaatgatagtgttgcgactttaaaattttacacttcgtcattatagttgagatctatttcttctcacatggtttataagatgtgaatgtaccatgttaaataacacaaaccaactggaattttccaggattgttttgtagtagtgcttcaatccattcaaagcactctcatcctgcgcgtcgtgctagatgttaaagacgtcacgatcggttttttggcttgagttttacgataaataaccaaacaatgataacgctaatagcaagtaaagaacgattaaaaatttttagatatgtgtacaattgtgtcatacgaaagtgtttcaccattgaaatgatatccaattcgactgaaaaatgtcgcggttgatcgatttcctgatgcccttgagaaaggctaaatggaggttgtacacgtgtttttaattgttgtttcgctaggctaatcagcccgttgcagaccccggtacaatccgtggtggtggagttaaatgcccatccaacgttaatggtcaagtttcccgatgattccctggggctggggtcgttaattctctaaagtgacaagtgatttcttttgctctcctaagttcttacccaaagctttctctcccccaatttttttttaaacgtttttctttttaaatcttttaaaataattttttaaaaaa

SEQ ID NO: 15646 - DNA, 879 bp, synthetic construct; identical to SEQ ID NO: 2515
  source 1..879: mol_type = other DNA

SEQ ID NO: 15647 - DNA, 941 bp, synthetic construct
  source 1..941: mol_type = other DNA
ggggtgtatccccgcgatcttttcctctattctccttatcaggcttgcttgttagttagtctcgtttggagcttagagtttcttgctaggttttgatgtatcttgccttcgtttcgtttgtgacgtatcgattttcctagcaattattcttatattctatttagttttaaggttttaggttagttagttttaagttaaaatataaaatcaaatacaaaagttatttccttatatcttttatagtgcagttgtcatattattatggcgttgtactatattttaatttttcttgtcttgtctttctacttgtgcctgaactataagttactaccatgttatctacggccagtagcctgttctctatgctagtacgtgcggctccggccttaacggaactgtctttgtgttgtgagtatatttgaattgtgtgacgtgccctcatagatttgaggaacttcggttctatgtcccaaagttcagatataaatagtggaatccccccaagtggtaagggctcctcccatccgaggtacccctgtgtaaacgcgctgccccgagcgcggttaataatgtgtctttttttttaatatttagccgttggatgtatactattgctcctgatcacacattgaacaccatgggctcaggggaattctgtagtggtatggtagatacttacttataggtataataggttttagctctccctatttccaattgagtagtgcttattgctgtgtcttggcaagactaggctttagtgatggtcgagcactagtcctgttatagagaggctatgataggacgaatcctaattttggtggccctccaccgccttttaccccacaagtgcagaacaactataagaatctccgttttgttttcgtaagcaccttccagtaagttttatcccccaaaacttttcccttacgtaatttaaa

SEQ ID NO: 15648 - DNA, 905 bp, synthetic construct; identical to SEQ ID NO: 2528
  source 1..905: mol_type = other DNA

SEQ ID NO: 15649 - DNA, 551 bp, synthetic construct
  source 1..551: mol_type = other DNA
atcattttcgggagtttttgaggaggaggagagcttcggcggcctttcgtcgtgcgattcggtcttcggcgtctcgcataaaagcgtcaagtcgttgagcgtgttggaaagagttcgctgtagattgggcgatgtttcgtcgggcatcttcgattcgcttttgttgttgggtgtgttggacacaatgtccacaagagttgatatagctaactcgcctacaggtttgacaagtgtaggagactgagccatgtttgtcaacaaatctttgcatgagtataagaaatacgcaacgttatcctaaacaggaccagaattaactgaaaatgaaaaacgttggaactcttaagaatcttcgtgattgcttagtggctattgtgagactcgtcttgcaatagtagtagttccaaagtttcagactaaggactacacccctcaacgcacccctctctgctccgtaagagttccaacgtttttcattttcagttaattctggtcctgtttaggataacgttgcgtatttcttatactcatgcaaagatttgttgacaaac

SEQ ID NO: 15650 - DNA, 254 bp, synthetic construct
  source 1..254: mol_type = other DNA
cctggttaactacgcttacttgcgattcacgcgcttcgagaattttgaatgcccttttcttttttgcgacgacctataccccctggttaactacgcttacttgcgattcacgcgcttcgagaattttgaatgcccttttcttttttgcgacgaaaaagaccccctttcagaaatcttacgcgattttgcacgttagtagaaccccgttatagaacgacgcttagtttgcccatttgggccaaacaatcacaaca

SEQ ID NO: 15651 - DNA, 253 bp, synthetic construct
  source 1..253: mol_type = other DNA
gatgactgtaagtttatactattgattacgccgtacttatgtgccgttagtttgatatagagtactataaatgataaagaaccccgtgggcaagtaaaatattgtatcgttacagaaattaacgacgctttgtgaaaagaataaattctctattgtctatagaaatagaatagttgaaggtagaaatcttccgtttgcaactgacgttcagaatgcaccaaaaagttttttaaatttatatggttacaatcaa

SEQ ID NO: 15652 - DNA, 606 bp, synthetic construct
  source 1..606: mol_type = other DNA
actacagtttatagtcatgtcttataaaatgtagctagtagttttgatatactaaagtacattcacgtatacgtgttaccgctccgattcttggaatcaagtgtatcagaattatgaaattgttatgttgggcagtaaagatctcggcatacctcttactaaattctttaccgccttacagagctatacgtaattggaagtgggtagttttgagtggtgttaatctaacgcaggagaaaatgcttcggctctattacattgtatatagaggcgagtagggagctctgaaggccttggaaaccttcatctctaatccgggacgattttaacattcggctgcttttagttcgtatatgatgatcataaggttgctcacacccgcggaggtcggctgtgtagtatttgggaggataaaaggttagccacaccttccttcttgtacctcttctctctattgaataatagaatttaataaacaaataggaaaatatagttatattttctgctccaagcttccagctatccaaaccattccaattttccaattcttccagcttattccaacttttgtaccaaacttttcaactttactccagaaatataata

SEQ ID NO: 15653 - DNA, 271 bp, synthetic construct
  source 1..271: mol_type = other DNA
tgctttttaaggtttcatatatgctataacggttatgggtactagtatagtggattaatatcaatatatggcattttacaccaacaatgtgatcttgcttgcggaggcaaaaatatgcacagtataaaatctgcaagtagtgctattgttggaatcaccgtacctatttaggtttacgctccaagatcggtggatagcagccctatcaatatctaggagaactgtgctatgtttagaagattaggtagtctctaaacagaacaatttacct

SEQ ID NO: 15654 - DNA, 410 bp, synthetic construct
  source 1..410: mol_type = other DNA
taggagactgagccatgtttgtcaacaaatctttgcatgagtataagaaatacgcaacgttatcctaaacaggaccagaattaactgaaaatgaaaaacgttggaactcttacggagcagagaggggagcgttgaggggtgtagtccttggtctgaaactttggaactactactattgcaagacgagtctcacaatagccactaagcaatcacgaagattcttaatggctattgtgagactcgtcttgcaatagtagtagttccaaagtttcagaccaaggactacacccctcaacgctcccctctctgctccgtaagagttccaacgtttttcattttcagttaattctggtcctgtttaggataacgttgcgtatttcttatactcatgcaaagatttgttgacaaac

SEQ ID NO: 15655 - DNA, 618 bp, synthetic construct
  source 1..618: mol_type = other DNA
aaattaactacagtttatagtcatgtcttataaaatgtagctagtagttttgatatactaaagtacattcacgtatacgtgttaccgctccgattcttggaatcaagtgtatcagaattacgaaattgttatgttgggcagtaaagatctcgacatagctcttattaaattctttaccgccttgcagagctatacgtaattagaagtgggtagttttgagtggtgttaatctaacgcaggagaaaatgcttcggccctattattgtagataggggcgagtagggagctctgaaggccttggaaaccttcacctctaatccgggtcgattttaacattcggctgcttctagttcgtatatgatgatcacaaggttgctcacacccgcggaggtcggctgtgtagtatttgggaggataaaaggttagccacaccttccttcttgtacctcttctctctattgaacaatagaactttttaaacaaacaagaaaatatagttatattttctgctccaagcttccagctttccaaacaattccaattttccagcttttccaatttattccaatttattccaattttatcaccagatttccaacttatttcacctatacaata

SEQ ID NO: 15656 - DNA, 694 bp, synthetic construct
  source 1..694: mol_type = other DNA
taatattagtagtccgtaactattatcatcctttttcagtttgatgtgataatagaccactccagtatcgagtagagtttcgaatgcgtagtgcaatagtacaatcactgtcaccgaccatctattgtaatgatagatttgtcggaaaccattatttatgaagtgactagcaatcatggattaaattagatggtattctagtttagaggtgattcggcgctgcggtgcgactgaaacttctaaattagcatgtcagattgtattatgaatgcgttagtagtaatttctgcgatagagctgggacccctcagtctctcaggtattgtacgaggcgaaagtgtgaaagttttgtatgtgtttttatatgtacgactgtatcgggaattcctttagcaagaatccttttaatacagtataatctgtgctacggtacgttacgttcgcagggcacccgttaatgtctcatagcccagacgatggcggatggaaagacatcatattttattttaatgctgtctttattgctgatttattttgctgtttttatttgctattttatatttgctaattttcattattgcgaaatatattacattgctatttttattatatacgctagattcaattttatttttcctatattttcaatttaattttgattttgaaggtaaatatatataattaattattaaaa

SEQ ID NO: 15657 - DNA, 393 bp, synthetic construct
  source 1..393: mol_type = other DNA
ttttgttgttgggtgtgttggacacaatgtccacaagagttgatatagctaactcgcctacaggtttgacaagtgtaggagactgagccatgtttgtcaacaaatctttgcatgagtataagaaatacgcaacgttatcctaaacaggaccagaattaactgaaaatgaaaaacgttggaactcttaagaatcttcgtgattgcttagtggctattgtgagactcgtcttgcaatagtagtagttccaaagtttcagactaaggactacacccctcaacgctcccctctctgctccgtaagagttccaacgtttttcattttcagttaattctggtcctgtttaggataacgttgcgtatttcttatactcatgcaaagatttgttgacaaac

SEQ ID NO: 15658 - DNA, 777 bp, synthetic construct; identical to SEQ ID NO: 2402
  source 1..777: mol_type = other DNA

SEQ ID NO: 15659 - DNA, 370 bp, synthetic construct
  source 1..370: mol_type = other DNA
gtataagaaatacgcaacgttatcctaaacaggaccagaattaactgaaaatgaaaaacgttggaactcttacggagcagagaggggagcgttgagggatgtagtccttagtctgaaactttggaactactactattgcaagacgagtctcacaatagccactaagcaatcacgaagatgcttaatggctattgtgagactcgtcttgcaatagtagtagttccaaagtttcagactaaggactacacccctcaacgctcccctctctgctccgtaagagttccaacgtttttcattttcagttaattctggtcctgtttaggataacgttgcgtatttcttatactcatgcaaagatttgttgacaaac

SEQ ID NO: 15660 - DNA, 718 bp, synthetic construct; identical to SEQ ID NO: 2334
  source 1..718: mol_type = other DNA

SEQ ID NO: 15661 - DNA, 488 bp, synthetic construct; identical to SEQ ID NO: 2001
  source 1..488: mol_type = other DNA

SEQ ID NO: 15662 - DNA, 630 bp, synthetic construct; identical to SEQ ID NO: 2215
  source 1..630: mol_type = other DNA

SEQ ID NO: 15663 - DNA, 473 bp, synthetic construct; identical to SEQ ID NO: 1970
  source 1..473: mol_type = other DNA

SEQ ID NO: 15664 - DNA, 606 bp, synthetic construct; identical to SEQ ID NO: 2178
  source 1..606: mol_type = other DNA

SEQ ID NO: 15665 - DNA, 322 bp, synthetic construct
  source 1..322: mol_type = other DNA
gtgtgagtgccgctagtgagtggagtatgatgttatacgattgtatattaaatttagctctgagtaaaatggctgaaccccatgttgaaatgacgctatctgatatacgaacgtatgagccagaatgttgacaacacctaataatgcacaattgcaacaacctcggttggagcctcaaactgcgattggtcatgtaatttactagcttttaaactatcgacctagacaagtcttagggagtttaaaagaataggaaaccaattcgtgaatgtttgtgtacccgtgtcggagcggattattaggacggcggacgttttaaaag

SEQ ID NO: 15666 - DNA, 667 bp, synthetic construct; identical to SEQ ID NO: 204
  source 1..667: mol_type = other DNA

SEQ ID NO: 15667 - DNA, 316 bp, synthetic construct
  source 1..316: mol_type = other DNA
atataaaataagtaaatagaactaagtaagtataatataataatatatttgaaaataatctaaaatagcttaataaaagttaatgtaattaatattttgtgtatacacgtatttaataaaacttaataaaatgcttagtaatatttgtttttagaactctgtctgtaaactttaattaactcagtaataatgtttgattttcaacgggtttgtaacgggttttgtaaataactctgtattcgctttgatatttcttttcaaatatattattatattatacttacttagttctatttacttattttatatttataat

SEQ ID NO: 15668 - DNA, 258 bp, synthetic construct
  source 1..258: mol_type = other DNA
gaagaagagtaagattctttgcgattgaactaaacaacgtcggcccgtttttaagcggtttaccacgtttgatgttctgggttttgatcattcaatttcttcaattcctgcttggctattttgtcactcgttggcttttaaatagtccgcagtatattgactttgtgattgatcattttcgagagatttttactctttttattggcttagtccttgtgtttttctcacattttttggttaaaattgtttcaactaaag

SEQ ID NO: 15669 - DNA, 437 bp, synthetic construct
  source 1..437: mol_type = other DNA
tctagcacctgcattccaaggagtatttgcgaaaatcttattcttaaaaccaattcttaattttaagtacaaacctcgcagaacttacaaatcgtgctcacgccttttgttctatttagttaatttgtatttgaagaatttagacgaataatataacgtgcttattattcacgagaccctctaacgtttttaacgcattgatctcgtaaaatctgaagactgatcttacattgatattgaattagacaaaagaaacgcaccacgacagtagtgtggccttactgttaaaataactaggcctaacgagtatttctaactgtgacgttcgatgaattattccgaactatgtactaactgatctaaatcgttgttctacaaggaacgtttcaccgcctcaatagatcctaactatagaggaaaagaaacaacaaacaaac

SEQ ID NO: 15670 - DNA, 672 bp, synthetic construct; identical to SEQ ID NO: 2274
  source 1..672: mol_type = other DNA

SEQ ID NO: 15671 - DNA, 284 bp, synthetic construct
  source 1..284: mol_type = other DNA
cagagtatttttacttaaagcagagcgtacatacagccgcttcggtctggggtgcagtttcacaccaattcaccagagagaccgccggattgaatgcttctaagcttggattttccttgtctccagaaaaagagatatataatggacattcattggcatatccccctgggtggggggaaatacctgcacattatgttccggaaaatattgtcaagtactggcaagaaaatccaccagtgtttgctaagaacactgagtacctaacatttggagagtatgtaacc

SEQ ID NO: 15672 - DNA, 677 bp, synthetic construct
  source 1..677: mol_type = other DNA
tcgaccaagttggaggacacgttggaaagtacattgatggaaaaaataatttagaccttcaaaatttaaaggggagaaatttattagaccttcaaaatttaatcggtgaacaaaaaaaagatgtcaccggtatggagatagctggaaataaagatttgcagaagaatcagcttgacaaccaggataagtggatcaatgcaggacgtgactcgttcactaaagcaggcctcccggaattttcattctgggatcggggtcgcggtggaccactcaatgtcggttcgacgagaagttcaatcggtggtaataactttgtgaactcctttggaggcccaaacacaaacttaccgtcaaccggttcctcgccatacgcagacttgaatggattatcccgcccgttctgatcagggttgtcataaattttcttcatcatctcttgcattcttaagcgttttgtcatgagtcgcaggttgctgttactcatggggtactggtttgcgcacaacaaagtgttcttactggaaaagcgtttcattatgcacaaaaaattagaattcctaaggagcttaactcccgtcattctagctatcgtgtaaactaaattagtttagtagtctttattaaaaagataaattaaaattcaatttgggttaaacataacatcatacacatggatc

SEQ ID NO: 15673 - DNA, 754 bp, synthetic construct
  source 1..754: mol_type = other DNA
taaaacaaccatcaccatcatcatggcagctctactaggtttacttggtggattaggtaaattgggagaaagctcccctttttcaaaattaacagatcatgcgcttggaataggcgataaggctatagatcgagaaacagctatgaatttacaaaaactaatcaatcaaggtaaaatcgatacctccgaattaaacattggaggtcaaatgaatttattgaaagaacaacttgggcaccaagataagtggaaccagaaaggacttgattcctttaaagaagctggtcttccaggcttttcgtttttcaacggaggcggcttaaatattggctcatcgaggagttatatcggtggaaacaattcagtgggatcaatcggaggccccggggttcgactccccagaacgggtacatccacatttgctgatctcaatggtttgtcgaaaccgttttagctcgtccatgttctttcaatttattcatccaaattcaaaataaatttagctctcaatgctcggttgcgtgcttgtcgttcaactaggttccggaacccgttctcagtagttggttcctattgaaagttcaatttatccaaaatttgagggtgtctaggtgtgcttaacacaccgtcgcccagtaatagtaaaataaagtaaaatatatcaactcgatctatttccttcatttaactttaactttaaatttaaatttcttctttttattgtttttttttaaagtccttcatcatcaaatcc

SEQ ID NO: 15674 - DNA, 621 bp, synthetic construct; identical to SEQ ID NO: 2199
  source 1..621: mol_type = other DNA

SEQ ID NO: 15675 - DNA, 754 bp, synthetic construct
  source 1..754: mol_type = other DNA
taaaacaaccattatcatcatcatggcagctctactaggtttacttggtggattaggtaaattgggagagagctcccctttttcaaaattaacagatcacgcgcttggaataggcgataaggctatagatcgagaaacagctatgaatttacaaaaactaatcaatcaaggtaaaattgatacctccgaattaaatattggaggtcaaatgaatttattgaaagaacaacttgggcaccaagataagtggaaccagaaaggacttgattcctttaaagaagctggtcttccaggcttttcgtttttcaacggaggcggcttaaacattggctcatcgaggagttacatcggtggaaacaattcagtaggatcaatcggaggccccggggttcgactccccagaacgggtacatccacatttgctgatctgaatggtttgtcgaaaccgttttagctcgtccatgttctttcaatttattcatccaaattcaaaataaatttagctctcaatgcttggttgcgtgcttgtcgttcaactaggttccggaacccgttcttagtagttggttcctattgaaagttcaatttatccaaaatttgagggtgtctaggtgtgcttaacacaccgtcgcccagtaatagtaaaataaagtaaaatatatcaactcgatctatttccttcatttaactttaactttaaatccaaatttcttcttttcattatttttttttaaagtccttcatcatcaaatcc

SEQ ID NO: 15676 - DNA, 601 bp, synthetic construct
  source 1..601: mol_type = other DNA
aatctctagcgtcaagaatctcatcaatgtatgtatgtttgtgatgtcttttatgtttgtgacgtcagtgtttgttttgtatatatgttgtgacgatggaacaattaaaatgagttttaaataaaatataaaaatcaaaaatattaatgttgttttgtgtgttaatgtgtaaatgttgattgtgtgttttattttaattgttcccacattgtaggaggttaactctacaatggcgattcaagtctgttcgtatcatagaatgaggcagggcggagcgtccggactaagtggaggaaggcgcgcgatgaagtgttgataagttctatgatttggatagcaacgtgtatttaagaaatctgcaaaacgagtttagtagtggctagaaggtttttcgtgcaaacccttaggagaacatcgggagactggtgcctttgggcagaggctgataaccggctaggtttaccactattcgaattgtgctgcggcgttcttatttacatatgggttacttgcgttgacgaatgcaagagtttgttgtaccgttctgcattgcggctaaagtaagtgtgaggacgtgactttgagcccgtttcaagagcaa

SEQ ID NO: 15677 - DNA, 712 bp, synthetic construct; identical to SEQ ID NO: 2325
  source 1..712: mol_type = other DNA

SEQ ID NO: 15678 - DNA, 721 bp, synthetic construct; identical to SEQ ID NO: 2336
  source 1..721: mol_type = other DNA

SEQ ID NO: 15679 - DNA, 751 bp, synthetic construct; identical to SEQ ID NO: 2376
  source 1..751: mol_type = other DNA

SEQ ID NO: 15680 - DNA, 545 bp, synthetic construct; identical to SEQ ID NO: 2105
  source 1..545: mol_type = other DNA

SEQ ID NO: 15681 - DNA, 367 bp, synthetic construct; identical to SEQ ID NO: 156
  source 1..367: mol_type = other DNA

SEQ ID NO: 15682 - DNA, 727 bp, synthetic construct
  source 1..727: mol_type = other DNA
ttgtatttatgtttgtattgtttatttacgtgtatatgttttgtatatgttttattatatgtttgttttgtgttgtgttatctttgttatttgataactgtaaaaatataaaatcactataagttggtatcattttatatcaaagtttaaatattacgaagttaatctggatttataacagaagtaaatgccaaattggatgtcgctcacttaataatcaaaatgctctttgagtgatttttagtcaaaaccatctgtagttcatatcactgaagaaatcttttaaagctcttcaaatacatgctacggggactattaatcgggtcatgccgttgttttattatgatagatatatcaccgagcccaatttggactggacgtttatggagttatattggtaggttaacaattcgttttattaattacaaactcttgtttcgagaaatccttctttggaccgccaaagaatcgtcaaagttatgagcgagatatgcacatacaccgagacgttgcaagactttctaattaatatgacagtatttttaccgaggtataaagtgggtttgtcgcgtgtttccatggttctgccgccgaataacatgcgggttcgtattccttaagtacgggagacaggggaagacctgtgacggatggaaagacatcatttttcagtacccaatgtttttatgaagtgttttattattgtattattatattgtttttcaaa

SEQ ID NO: 15683 - DNA, 623 bp, synthetic construct; identical to SEQ ID NO: 2203
  source 1..623: mol_type = other DNA

SEQ ID NO: 15684 - DNA, 415 bp, synthetic construct; identical to SEQ ID NO: 1814
  source 1..415: mol_type = other DNA

SEQ ID NO: 15685 - DNA, 1000 bp, synthetic construct; identical to SEQ ID NO: 2616
  source 1..1000: mol_type = other DNA

SEQ ID NO: 15686 - DNA, 1000 bp, synthetic construct; identical to SEQ ID NO: 2617
  source 1..1000: mol_type = other DNA

SEQ ID NO: 15687 - DNA, 1000 bp, synthetic construct
  source 1..1000: mol_type = other DNA
aaccacacatgggaagttattgccctcatgtgagtccagctaaatagtttggcattaggtaaagattgcagtgagcaaattccattgcagtcgaggtttagcctcgccattcgtcttttaaaattagtttcttttaagatgctagaagataaaacacggtaaaaaattgtatataacgatataggtctggagtatagtaatcaatgttattcgttgcattggtgataacgacatactgtatactcccaactttcgcgccggacgattccggatatattgtacgtgataataatgtcttcttaattgagactgactttttaagtcaattaaacaactctaccagagcctacgcgttctatctctgacacgggatagttctcagggttgaagattccataggtctttaacctgccgaaactctgtgctgtactgtagggtcgactaccatctacctatttaggtttgaatcggtctgagataatttcaatacatgaccggccttaaaatagttcttcagagccaccggatggttagttcagatgtggcatagcgaaaaacgcagcacactgatgatattctttcaaacgaattttgttccctcacgatcggtgaggacctgcttcaagcaggagataatggatttttgcttgcccctgttatattagggcaggctcaagaaactcatgtacatggacctactattgtacgtgattttacagattgggacgcctttgatttgtggcaggtcccagatcttaattatgatggtccggaagcagattttgctgaacgagatggttttaataactatcaaaatgaagcaaatttgcgacggactacgactaccgtcgttgaaaaagatctacctccttatgaggtgttaatttttagtgatgaagaagaaagttctcgaactttcttttcctgtgagtcggataatgaagggtacactccttcgtcttctgattcacaagaacagatgcctgatatcatatatcag

SEQ ID NO: 15688 - DNA, 780 bp, synthetic construct
  source 1..780: mol_type = other DNA
attatggcggcaatccttggctcacttggtggactctcgggtctactaggcaaaaagactccctttgacaaaactgtggatggtggttttgaccttttgaacaaaggcatcgaccgtgaaacagctcttggcattggtgatcaacaaattaaaggtagaaaggatttagctaaaataattggagatcaaaatttaaaaatcactgataaaaacattggcggccaattacagttgctgaaagaggctcttggaaatcaagacaagtggactcaagccggattagactcctacaccaaggcgggattaccaggcttttctttctttgatcgaaatagaggtaatctcaatgtcggctccacttcaagttacattggtggaaacaactttgttcgatcctttggaggtcccggtacaaaacttccaatgactggcacttctccctttgcggatatgaatgggttgtctcgaccattttgataactaagagcaaatttcatcaactccaaattcgaaacagatttgcttagtgtgcttagctgtgtcaacatgtggcatggccgggtttcgtgaaagttgcataacaatcagctggatctacactaaaccactctgtctaaatttgagcatttctcgtcaggcttaacctgacttcatgcagaatcagtaaattaaaacgaacttaacatctctcgctttaattaactcttgttaaacttctaaatttttctgttcttttaaatttttctgtttaactttgtgtaatgtatcttaattctctaa

SEQ ID NO: 15689 - DNA, 416 bp, synthetic construct; identical to SEQ ID NO: 1820
  source 1..416: mol_type = other DNA

SEQ ID NO: 15690 - DNA, 850 bp, synthetic construct; identical to SEQ ID NO: 2482
  source 1..850: mol_type = other DNA

SEQ ID NO: 15691 - DNA, 753 bp, synthetic construct; identical to SEQ ID NO: 2378
  source 1..753: mol_type = other DNA

SEQ ID NO: 15692 - DNA, 360 bp, synthetic construct
  source 1..360: mol_type = other DNA
gcatgtcatttcagtcgcgcgagggggatgacgttaactacccccgccggaatactaatccttagacgttcttccctttggattaagtaaatcttaataacttttaaatggctaatagcgatttaccggaatttttacaaaaatacgtcacaaattttcccaaggccagttctggattgagcattcaacaaaagcaaaatattgaagaattgagaaaacttcccattcaggattcagactcacctcgtttaatttgcttaaagtgctttcctgatatctcttacgagcgtatgttaaaagaagaggtgtttaggaacgcttggtattcatacttagaacatagcagtcagtggaaaaatc

SEQ ID NO: 15693 - DNA, 369 bp, synthetic construct; identical to SEQ ID NO: 1698
  source 1..369: mol_type = other DNA

SEQ ID NO: 15694 - DNA, 752 bp, synthetic construct; identical to SEQ ID NO: 215
  source 1..752: mol_type = other DNA

SEQ ID NO: 15695 - DNA, 1000 bp, synthetic construct; identical to SEQ ID NO: 2618
  source 1..1000: mol_type = other DNA

SEQ ID NO: 15696 - DNA, 500 bp, synthetic construct; identical to SEQ ID NO: 179
  source 1..500: mol_type = other DNA

SEQ ID NO: 15697 - DNA, 760 bp, synthetic construct; identical to SEQ ID NO: 2386
  source 1..760: mol_type = other DNA

SEQ ID NO: 15698 - DNA, 261 bp, synthetic construct
  source 1..261: mol_type = other DNA
tagccacacgaaaaagagcatatagcgtatacgttatatcagagcgacagttcctgttacggacggttctatttttctgcgtttcctgactcgaattaaaattgtcatttgtcctgactcgacgtaaaattgtcacttgtcctgactcgactataaattgtcaattcttttaatattttaaaccttcatttcttatattttaattttaaagtgtagatttgtttgttattgttatattttcttgtttctgtatttgttact

SEQ ID NO: 15699 - DNA, 263 bp, synthetic construct
  source 1..263: mol_type = other DNA
tagccacacgaaaaagagcatatagcgtatacgttatatcagaacgacagttcctgttacggacggttctatttttctgcgtttcctgactcgaattaaaattgtcttttgtcctgactcgactttaaattgtcatttgtcctgactcgacgtaaaattgtcaatccatttttattttaatccaaatcactctctttttattttatattttgtcagtgttttgttttattttgatttacatctgtttttctgtatctatgtaa

SEQ ID NO: 15700 - DNA, 1000 bp, synthetic construct
  source 1..1000: mol_type = other DNA
cacaaccaccattgtgctttagttttaagttctctttcaaagttctgtgtttgcttttaccattagtattggtattcacatcttctttattttctacagaactttccttcttaagtgtgaatgttgtttgtgtgtttgttatatgtgttttaatttcttccaattacataaaaatgtctgtatgcgtgagtgttagaacgttttataactttatttttccctcgttttgacggactgattacccagatcttcgttgtatcaatagtcacggaaggatagactcttcgcagtgtatttataaatccacgcaaaagtggtagcaagtagcgtgacaccacactagccagagtcggcgtagcgtttacttgttgtgttccctgatagtgaccgaaagcagcgtttctgcaaacgtcatatgtagattggtgaaggattttgccatgtactcattaggctgtagctttctgtaccttttattctaggtgtttagattgggattcataagaatttgataccccgatcgaagtacgaactgctagtgtatttaaacgtatgcacgcctggttagtcttcgcatcataagaataactgtagattttatcgtgtccatttagctccttttgatacatgtcatgcctgatctggttgagcataacatatactgagaagtccctgcgctccctagccagcttgctggtgaagttagtaaactctcgtatgtggtggcttttgtatgcaagactccttgtgtaagtcccagcacgttggatgagctaacaggcgtcgcacaccaggctggtgcgtctatgtcgcgggatgtgaattcgttctgcccgggccctgtgaaacgactagtgattagagaacgactcagtagtcctttatttaccattagtctcaaaattacctggcacaagtttcaaacgtgaacacttgtgctttcgttcagcctattttccttaataatttttaaatattttatattttgttttactttaat

SEQ ID NO: 15701 - DNA, 699 bp, synthetic construct; identical to SEQ ID NO: 2307
  source 1..699: mol_type = other DNA

SEQ ID NO: 15702 - DNA, 760 bp, synthetic construct; identical to SEQ ID NO: 216
  source 1..760: mol_type = other DNA

SEQ ID NO: 15703 - DNA, 619 bp, synthetic construct; identical to SEQ ID NO: 2198
  source 1..619: mol_type = other DNA

SEQ ID NO: 15704 - DNA, 290 bp, synthetic construct
  source 1..290: mol_type = other DNA
atgcttcgaatattgctcagtcatttgacaatggtaatcgtatccaagttaacagaaatgctaatgtcgttccaactcaaacgttgagatgtgccccgagcattcctcaagatcagactgttttggccgatggtcgggttgagaggcgtgtccgggatgcggctcaacaaattgctattgtcaataacgatgttcaatttgagacttcgtggaaatcgtttgtttatgtgctatgtcagaatgggtcacaacctataatcgatgcctccacttcaattgagactggtcgg

SEQ ID NO: 15705 - DNA, 1000 bp, synthetic construct; identical to SEQ ID NO: 262
  source 1..1000: mol_type = other DNA

SEQ ID NO: 15706 - DNA, 495 bp, synthetic construct; identical to SEQ ID NO: 2018
  source 1..495: mol_type = other DNA

SEQ ID NO: 15707 - DNA, 400 bp, synthetic construct; identical to SEQ ID NO: 1781
  source 1..400: mol_type = other DNA

SEQ ID NO: 15708 - DNA, 784 bp, synthetic construct
  source 1..784: mol_type = other DNA
ggaccccttaatgcgcgcgaattcaaccgcgcctagtcggctcaaataagaataaaaggaaacctcaaataggtgcctctcactcgtgagtggttggcccggaatggtcagccatgaactagtgtgcgattcccacagtgttggtcgaaagccccgcactgtctactcgcatatttgactccagtccttccgcagccagcggttaggttctggttaaagtgcattatgtgcacggcgccacgcagaactgccagaaatggtaagctgcgcccaacgccaacggtttgtgtatcccgttagtcacacgtttacagctgttcgttaacagtagggttttgtcgacccggaccccttaatgcgcgcgaattcaaccgcgcctagtcggcaatggtatcatttaatcccatgcactacgggagaaatttgagaccaaagaattcctgagggccactgcttgctctaagtgcaatgcctcgggagacttctgtcaggagcctagcggctttcaaccgcgacagctaactcctgcgggatgtttggtgtccatacttactggcgtcctcacaacgctaagtggatgttgtccacaggtaggcaaacaccgagccccacattcaggagacctgtatgaacgatcctatcagcattagagttggaattgggtgtgctaacgtccgcataagtgcaccccgtggtaacgctgggaaactatccagcgcaacgtactgtcctcaatgtctagggaaggaccgccctaagcgtacaaccgggccatgtgtcgagc

SEQ ID NO: 15709 - DNA, 871 bp, synthetic construct
  source 1..871: mol_type = other DNA
tgagaatttcctaattctcatatcataggttttgctggcgcattaccttgacttcgcctgcgcgatgttatattttgagtcaaagatggttgctggcgcgattgtctttgatagctgctggcgcggctttctcaatctcctcaaactccttattttgcattctggctgttcaagcggcccaaatcgcaagcgtctctcatttccttgcgtgcgtacccgaaaatttattgaatttggcttgaattataagcaatgcttcttatagcggacactttgagaatataatgcttgcatggattaatgtatactgtttcaaataacaaacctagacacgcagttgcgttgatggttgtatcaatcacatacgggtgttgaactcgtgttaatcctcgatcgctatatgtttgcctcctacttccaataaaatagattacatacgcgacatgcctttgtgggttacctattggcctctgtcaaaaacaaatcgtttgatttgtagtttcctagcctaaaaagctgggcgcggtctggctctcgtcggatggaaaggtccatcaatggctggttgagtgtaagctccggtgttctggttgtcgcaattccagacgtcgtaataacctatattgcatctgactctaattcttgtggctctactgtatctagttcttgttctactaactctaataatgctactgattctatgttcgaaaaactctcctatgtcaatatagaaaatgtccttgatcctgatatccctcacgtcactgaaattcatcgcaagcggatttcagatgatatcctcgaatctcaaggctgtacttgctctgaacctattattactcctcgtgtgttttcattctcaactcttggc

SEQ ID NO: 15710 - DNA, 868 bp, synthetic construct
  source 1..868: mol_type = other DNA
gaatttcctaattctcatatcataggttttgctggcgcattaccttgacttcgcctgcgcgatgttatattttgagtcaaagatggttgctggcgcgattgtctttgatagctgctggcgcggctttctcaatctcctcaaactccttattttgcattctggctgttcaagcggcccaaatcgcaagcgtctctcatttccttgcgtgcgtacccgaaaatttattgaatttggcttgaattataagcaatgcttcttatagcggacactttgagaatataatgcttgcatggattaatgtatactgtttcaaataacaaacctagacacgcagttgcgttgatggttgtatcaatcacatacgggtgttgaactcgtgttaatcctcgatcgctatatgtttgcctcctacttccaataaaatagattacatacgcgacatgcctttgtgggttacctattggcctctgtcaaaaacaaatcgtttgatttgtagtttcctagcctaaaaagctgggcgcggtctggctctcgtcggatggaaaggtccatcaatggctggttgagtgtaagctccggtgttctggttgtcgcaattccagacgtcgtaataacctatattgcatctgactctaattcttgtggctctactgtatctagttcttgttctactaactctaataatgctactgattctatgttcgaaaaactctcctatgtcaatatagaaaatgtccttgatcctgatatccctcacgtcactgaaattcatcgcaagcggatttcagatgatatcctcgaatctcaaggctgtacttgctctgaacctattattactcctcgtgtgttttcattctcaactcttggc

SEQ ID NO: 15711 - DNA, 829 bp, synthetic construct
  source 1..829: mol_type = other DNA
tcttgacatcatgaaaatggtgttatattttgagcttaggggtctccagaaatggtgattcctatgttgctgcgaaagtggctctctcttttatctccctaaactccttaatctgcatcctggctgttcaagcggcccaaatcgcaagcgtctaacatttccttgcgtgcgcacccgaaaatttattgaacttggcttgaatcataagtaatgcttcttatagcggacactttgagaatataatgcttgtatggattaatgtatactgttttaaataacaaacctagacacgcagttgcgttgatggttgtatcaatcacatataagtgttgaactcgtgttaatcctcgatcgctatatgtttgccgcctacttccaataaaatagattacatgcgcgtcatgcctttgtgggttacctattggcctctgacaaaaacaagtcgtaagatttgtagcttcccggtgtaaaaagctgggcgcggtctggctctcgtagggtggaaaggtccaccaatggctggttgagtgtaagctccggtgtcctggttgtcgcaattccaggcgtcgtaataacctatattgcatctgactctaactcttgtggctctactgtatctagttcttgttctactaactctaataatactactggctctaatactgaaaaacttacatatgttaatatagataatatccttgatcctgatatccctcacgtcactgaagttcgccgaaaacgaatttcagatcatatcattgaatctcaaggatgtacttgctctgaacctactataactcctcatgcgttttcattttctactcttggc

SEQ ID NO: 15712 - DNA, 853 bp, synthetic construct
  source 1..853: mol_type = other DNA
tcttgacatcatgaaaatggtgttatattttgagcgtaagggtttccagaaatggtaattcttatgttgctgcgaaagtggccttctcttttatctcctcaaactccttattttgcattctggctgatcaagcggcccaaatcgcaagcgtctatcacttccttgcgtgcgtacccgaaaatttattgaacttggcttgaattataagcaatgcttcttatagcggacactttgagaatataatgcttgcatggattaatgtatactgtttccaataacaaacctagacacgcagttgcgttgatggttgtatcaatcacatacttgtgttgaactcgtgttaatcctcgatcgctatatgtttgcctcctacttccaataaaatagattacatacgcgacatgcctttgtggtttacctattggcctctgtcaaaaacaaattgtttgatttgtagtttcctggcctaaaaagctgggcgcggtctggctctcgtcggatggaaaggtccatcaatggctggttgagtgtaagctccggtgctctggttgtcgcaattccagacgtcgtaataacctatattgcatctgactctaattcttgtggctctactgtatctagttcttgttctactaactctaataatgttactggttctaattctactattgctactgattctatgttcgaaaaactctcctatgtcaatatagataatgtccttgatcctgatatccctcacgtcactgaaattcatcgcaagcggatttcagatgatatcctcgaatctcaaggctgtacttgctctgaacctattctcactcctcgtgtattttcgttttctactcttggc

SEQ ID NO: 15713 - DNA, 868 bp, synthetic construct
  source 1..868: mol_type = other DNA
gaatttcctaattctcatatcataggttttgctggcgcattaccttgacttcgcttgcgcgttgttatattttgagtcaaagatggttgctggcgcgattgtctttgatagctgctgacgcggctttctcaatctcctcaaactccttattttgcattctggctgttcaagcggcccaaatcgcaagcgtctttcacttccttgcgtgcgtacccgaaaatttattgaatttggcttgaattataagcaatgcttcttatagcggacactttgagaatataatgcttgcatggattaatgtatactgtttcaaataacaaacctagacacgcagttgcgttgatggttgtatcaatcacatacgggtgttgaactcgtgttaatcctcgatcgctatatgtttgcctcctacttccaataaaatagattacatacgcgacatgcctttgtgggttacctattggcctctgtcaaaaacaaatcgtttgatttgtagtttcctagcctaaaaagctgggcgcggtctggctctcgtcggatggaaaggtccatcaatggctggttgagtgtaagctccggtgttctggttgtcgcaattccagacgtcgtaataacctatattgcatctgactctaattcttgtggctctactgtatctagttcttgttctactaactctaataatgcaactgattctatgttcgaaaaactctcctatgtcaatatagaaaatgtccttgatcctgatatccctcacgtcactgaaattcatcgcaagcggatttcagatgatatcctcgaatctcaaggctgtacttgctctgaacctattattactcctcgtgtgttttcattctcaactcttggc

SEQ ID NO: 15714 - DNA, 829 bp, synthetic construct
  source 1..829: mol_type = other DNA
tcttgacatcatgagaatgatgttatattttgagcttaggggtctccagaaatggtgattcctatgttgctgcgaaagcggctttctctttatctcctcaaactccttactctgcatcctggctgttcaagcggcctaaatcgcaagcgctgttcatttccttgcgtgcgtacccgaaaaacttttgaatttggcttgaactataagtaatgtttcctgtagcggacactttgagaatacaatgcttgtatggattaatgtgtactgttttggataacagacctagacacgcagatgcgttgatggttgtaccaatcacatataagtgttaaactcgtgttgatcctcgatcgctactcgtttaccgcctacttccaataaaatcgtttacatacgcgacatgcctttgtgggttacctattggcctctgtcaaaaacaaatcgtatgatttgtagttccccagtgtaaaaagctgggcgcggtctggctcctgtagggtggaaaggtccaccaatggctggttgggcgtgatgcctcggtgtcctggttgtcgcaattccaggcgtcgtaataacctatattgcttctgttaccaactcttgttgttctactgtatctagttcttgttctactaactctaataatgctactgattctatgttcgaaaaactctactctgttgatattaatacagttcttgatcctgatattcctcacatcactgaaactcgtggcaaacgaatttcagatcgtatcattgaatctcaaggctgtacttgttctgaacctactataactcctcgtgtgttttcattctctactcttggc

SEQ ID NO: 15715 - DNA, 380 bp, synthetic construct
  source 1..380: mol_type = other DNA
ttatatcaccaaaataatttatattgtttttgtgaatagtaacttgaattaaataataagtggaatttattaaaataaataataaactaaatcaatttatcattttataataataattcaaagtaatatttcagtttaaacaagattttaagattaaattttcaagtctttgagaggtaataattatttcaccaaagtaatttattttatttttgtgaataataacttgaatttatcttaaagttagattttatgaataataataacatttatactatcgttcaattggaagaacttgatcgagatacaacacctttagtagaagaaaattttggtcaaggttatacgttatcaggtaatactagtagtactctttcaga

SEQ ID NO: 15716 - DNA, 831 bp, synthetic construct
  source 1..831: mol_type = other DNA
tcttgacatcatgaaaatggtgttatattttgagtgtaagggtctccagaaatggtgattcttatattgctgcgaaagtggctctctctttttatctcctcaaactccttaatctgcatcctggctgttcaagcggcctaaatcgcaagcgtcttttatcttccttgcgtgcgtacccgaaaatttattgaacttggcttgaatcataagtaatgcttcttatagcggacactttgagaatataatgcctatatggattaatgtatactgtttttaataacaaacctagacacgcagttgcgttgatggttgtatcaatcacatatgggtgttgaactcgtgttaatcctcgatcgctatatgtttgccgcctacttccaataaaatagattacatacgcgacatgcctttgtgggttacctattggcctctgtcaaaaacaaatcgtttgatttgtagtttcccggtgtaaaaagctgggcgcggtctggctctcgttgggtggaaaggtccaccaatggctggttgagtgtaagctccggtgtcctggttgtcgcaattccaggcgtcgtaataacctatattgcatctgactctaactcttgtggctctactgtatctagttcttgttctactaattctaataatactactggctctaatattgaaaaacttacatatgttaatatagataatatccttgatcctgatattcctcacatcactgaagttcgcaaaaaacgaatttcagatcgtatcattgaatctcaaggatgtacttgctctgaacctactataactcctcatgcgttttcattttctactcttggt

SEQ ID NO: 15717 - DNA, 861 bp, synthetic construct
  source 1..861: mol_type = other DNA
agaatttccaattctcatatcataggttttgctaacgcattaccttgacttcgctcacgcgttgttatattttgagtcaaagatggttgctaacgcgattatctttgaagctgctaacgcggctttctcaatctccccaaactccttactctgcatcctggctgttcaagcggcctaaatcgcaagcgtccgacatttccttgcgtgcgtacccgaaaatttattgaatttggcttgaattataagcaatgcttcttatagcggacactttgagaatataatgcttgtatggattaatgtgtactgttttaaataactaacctagacacgcagttgcgttgatggttgtaccaatcacttacaagtattgaactcgtgttgatcctcgatcgctatatgtttgcctcctgcttccaataaaatagattacatacgcgacatgcctttgtgggttacctattggcctctgtcaaaaacaaatcgtttgatttgtagcttcccggtgtaaaaagctgggcgcggtctggctcccgtcgggtggaaaggtccaccaatggctggttgagtgtaagctccggtgctctggttgtcgcaattccagacgtcgtaataacctatattgcatctgactctaatatttgtggccctactgtatctagttcttcttctgctcaatctgactctaaaaaacaaaaactacaaaaaactgcttacaaccttgaagaattctttgatcatgatcttcctgatcctatggtctcttatcgttctaaaatttcaacaagaattcttgaaaatcaaggttgcattcactctgattctcatcttactcctcgtgtgttttcattctctactgttggc

SEQ ID NO: 15718 - DNA, 872 bp, synthetic construct; identical to SEQ ID NO: 2506
  source 1..872: mol_type = other DNA

SEQ ID NO: 15719 - DNA, 834 bp, synthetic construct
  source 1..834: mol_type = other DNA
cttgacttcgctcacgcgttgttatattttgagtcaaagatggttgctaacgcgattgtctttgagctgctaacgtggctttctcattctccccaaactccttactctgcatcctggctgttcaagcggcccaaatcgcaagcgttctccattccttgcgtgcgtacccgaaaaacttttgaatttggcttgaatcataagtaatgtttcctgtagcggacactttgagaatataatgcttgtatggattaatgtgtactgttttggataacagacctagacacgcagatgcgttgatggttgtaccaatcacatataagtgttgaactcgtgttgatcctcgatcgctactcgtttaccgcctacttccaataaaatcgtttatatacgcgacatgcctttgtgggttacctattggcctctgtcaaagacaaatcgtttgatttgtggtttcccagtgtaaaaagctgggcgcggtctggctcctgtagggtggaaaggtccaccaatggctggttgggcgtatgcctcggtgtcctggttgtcgcaattccaggcgtcgtaataacctatattgcttctgttaccaactcttgttgttctaacgctgataataatactactggctctaactctactgactctgtaaattgttctaaacctaattatgaaaaactatactctgttgatataagtactgttcttgatcccaatattcctcacatcactgaaactcgtggcaaacgaatttcagattatattgttgaatctcaaggctgtacatgttctgaacctactattactcctcgtgtgttttcattctctactgttggc

SEQ ID NO: 15720 - DNA, 533 bp, synthetic construct
  source 1..533: mol_type = other DNA
tcctaattctcatatcataggttttgctggcgcattaccttgacttcgcctgcgcgttgttatattttgagtcaaagatggttgctggcgcgattgtctttgatagctgctggcgcggctttctcaatctccttaaactccttattttgcattctggctgttcaagcggcccaaatcgcaagcgtacttcacttccttgcgtgcgtacccgaaaatttattgaacttggcttgaattataagcagtgcttcttatagcggacactttgagaacataatgcttgcatggattaatgtatactgtttcaaataacaaacctagacacgcagttgcgttgatggttgtatcaatcacatacttgtgttgacctcgtgttaatcctcgatcgttatatgtttgcctcctgcttccaataaaataaattacatacgcgacatgcctttgtggtttacctattggcctctgtcaaaaacaaatcatttgatttgtagtttcctggcctaaaaagctgggcgcggtctggctctcgttgg

SEQ ID NO: 15721 - DNA, 560 bp, synthetic construct; identical to SEQ ID NO: 187
  source 1..560: mol_type = other DNA

SEQ ID NO: 15722 - DNA, 607 bp, synthetic construct; identical to SEQ ID NO: 2184
  source 1..607: mol_type = other DNA

SEQ ID NO: 15723 - DNA, 828 bp, synthetic construct
  source 1..828: mol_type = other DNA
cttgacgtcgtgaaaatggcgttatattttgagtgtaagggtctcctgaaaaggtgattcttatattgctgtgaaaacggctctctcttttatctcctcaaactccttattttgcattctggctgttcaagcggcccaaatcgcaagcgtacttcatttccttgcgtgcgtacccgaaaatttattgaatttggcttgaattataagcaatgcttcttatagcggacactttgagaatataatgcttgcatggattaatgtatactgtttcaaataacaaacctagacacgcagttgcgttgatggttgtatcaatcacatacgggtgttgaactcgtgttaatcctcgatcgctatatgtttgcctcctacttccaataaaatagattacatacgcgacatgcctttgtggtttacctattggcctctgtcaaaaacaaatcgtttgatttgtagtttcctggcctaaaaagctgggcgcggtctggctctcgtcggatggaaaggtccatcaatggctggttgagtgtaagctccggtgttctggttgtcgcaattccagacgtcgtaataacctatattgcatctgactctaattcttgtggctctactgtatctagttcttgttctactaactctaataatgctactgattctatgttcgaaaaactctcttacgtcaatatagataatatccttgatcctgatatccctcacgtcactgaaattcatcgcaagcggatttcagatgatatcctcgaatctcaaggatgtacttgctctgaacctattctcactcctcgtgtatttactttttcaacccttggt

SEQ ID NO: 15724 - DNA, 829 bp, synthetic construct
  source 1..829: mol_type = other DNA
cttgacgtcgtgaaaatggcgttatattttgagtgtaagggtttcctgaaaaggtgattcttatattgctgtgaaaacggctttctctttttatctcctcaaactccttattttgcatcctggctgttcaagcggcccaaatcgcaagcgtacttcatttccttgcgtgcgtacccgaaaatttattgaatttggcttgaattataagcaatgcttcttatagcggacactttgagaatataatgcttgcttggattaatgtatactgtttcaaataacaaacctagacacgcagttgcgttgatggttgtatcaatcacttacaggtgttgaactcgtgttaatcctcgatcgctatatgtttgcctcctacttccaataaaatagattacatacgcgacatgcctttgtggtttacctattggcctctgtcaaaaacaaatcgtttgatttgtagtttcctggcctaaaaagctgggcgcggtctggctctcgtcggatggaaaggtccatcaatggctggttgagtgtaagctccggtgttctggttgtcgcaattccagacgtcgtaataacctatattgcatctgactctaattcttgtggctctactgtatctagttcttgttctactaactctaataatgctactgattctatgttcgaaaaactctcctatgtcaatatagataatatccttgatcctgatatccctcacatcactgaaactcatcgcaagcggatttcagatgatatcctcgaatctcaaggatgttcttgctctgaacctattctcactcctcgtgtattctcattttcaactcttggc

SEQ ID NO: 15725 - DNA, 494 bp, synthetic construct
  source 1..494: mol_type = other DNA
actctcctcttcgtcgtcagcgtcagacgtgtttatgagacaggctctgcagatatcttatgttgctgcgaaagtggctctctttttatctcctcaaactccttattttgcatcctggctgttcaagcggcccaaatcgcaagcgtctatcatttccttgcgtgcgtacccgaaaatttattgaacttggcttgaattataagcaatgcttcttatagcggacactttgagaatataatgcttgcatggattaatgtatactgtttccaataacaaacctagacacgcagttgcgttgatggttgtatcaatcacatacttgtgttgaactcgtgttaatcctcgatcgctatatgtttgcctcctacttccaataaaatagattacatacgcgacatgcctttgtggtttacctattggcctctgtcaaaaacaaatcgtttgatttgtagtttcctggcctaaaaagctgggcgcggtctggctctcgtcgg

SEQ ID NO: 15726 - DNA, 987 bp, synthetic construct
  source 1..987: mol_type = other DNA
aatacgtacgtaggggttcgccctacgcacgcattgtgtcgattttataaggcctctaaagattccatgtgagctcaaattgtattttgggctgggattagcagtcgaacggactaattatcctagtagcgagcaaaaccagttcataatgtagttccttgcatggtattcgatagactgtcccgaattttgcgatgcaaaatttaaatataagttaattgttaagttagtaaagagactacactgggtagcgctagtgtagatcttgattagtaacaaaagcataaaatactcgtttctgaacggggccaataagaaagtatgctgaaagatactaaaacggtggtgtcattcacaagaatggaaagtctatggatgggctaagggtagttaccccaagacccttaggtcccccattgttttagtattgattaggtgtattagtaattttggtgtataaatagtaagtgtttagtcccttagaagggcaaggcacagacctatattgatgttagtaagtaacgttctagttccaataagtaagtgtgttaaaatcgggacccctcgatccggcaaacaccggcgcctactgctcgttgggtatagctataatgcgaaagcaaccgctctgtataggaagtgtgtgacagaagagtagttccttcttaactcgtgttaaccttagtgttactcctcgacggcggatgtcgaccggcgatcgggaatatgcttgggtgtgaattaagtaaacctataagcatgcacgagctagacgaccctagagttgtgagtacgcttaggaagtggcgaactctctttttctttcccttttcaaatttatggtgacaatttaagattttattcaaagtgatatcgaaaatttatttcccttaaaacttcgttttgaaaataataatttattacttcttatttaatattttcaaatatttaaatttatttaaataaaattaattaaaattatttaaa

SEQ ID NO: 15727 - DNA, 361 bp, synthetic construct
  source 1..361: mol_type = other DNA
agttaaagaaaatataaaataatccagctcacactttaataaatttgtttaaaatttattaaagtaacctgtattatttgcaaacgattgaagcttgtaatatcgttcttggaaaatcaagtgaaatatttgttaatcttcggacaaatagcctacgggtaagctagaagaaaaattaaaatatttgttattcttcggacaaatagcctacgggtaagtgagaagaaaattcgaattgtgtttaaatattctttcatttgaagtacagcataaagtgtatgaatactattacattatttgaagaacaaagagttgaagaagttcaatcacgcccacgctttcaaatagatttggaacaaat

SEQ ID NO: 15728 - DNA, 556 bp, synthetic construct
  source 1..556: mol_type = other DNA
tttataacgtgagtcgatagttttaccaaattaaattgacgaccatagtgaggtttgtagcgttttataacgtgagtcgatagttttaccaaattaaattgacgaccatagtgaggtttgtagcgttttataacgtgagtcgatagttttaccaaattaaattgacgaccatagtgaggtttgtagcgtatttatacgtgagtcaatttaacagattgagaaaagaaataaaacaagaggaaaagcaagaacgtggaatttttggaattttagtggatccagcacctaggttgaaaaactgatcagacggtgtgtgctaataatttcaagacgatttgatattttgcgttgcattataaaaatattaaatgagttttactcttgtggaattacaagattctcaaattgagtattcccaaggaggatttagaactaataacaatttgcctttatactccaactttgggagtggatatcaattgagtgaaactgattgtaatcaattgaagaattttttgaagcgagtttggaggtttttgtcaaagaagaacaaaat

SEQ ID NO: 15729 - DNA, 423 bp, synthetic construct; identical to SEQ ID NO: 1840
  source 1..423: mol_type = other DNA

SEQ ID NO: 15730 - DNA, 636 bp, synthetic construct; identical to SEQ ID NO: 2223
  source 1..636: mol_type = other DNA

SEQ ID NO: 15731 - DNA, 647 bp, synthetic construct
  source 1..647: mol_type = other DNA
gggctcggagatgtgtctgtctcttatacacacacacacacacacacacacacacacacacacacacacacacacacacacacacacacacctctcagcctcagatgtgtataagagacaggtacgtgaacgtattcagtttgggggttatgccaagtggaagcgtagtcattttcatcataaacgcgatatctggtcaattcaacttgctctggtcgtcgtcggggaagttgtcgaaagagataacgcacaattgcgcgttcctcaagctgttcctgtcgtcgtcggtgatctctttgtcgtctcacaaaggcatcaggtgaaaacaatggtccttcaatcttaggatgtcgttttgcattccgggtctgtcgcacttcacgccgataagtttgaagatttattcggtcgtgttctgcttttgtcgcctttttcctatcccactttgatctttattgcccgaacactggtttttcataacgtgaagaaatggatcatatccgcttaggtaacgtagcttaggcaccagttgtattttcacagtagacataagacagtaatagaagtcttacccggtaaggaaccaaactttcggaacagttatggcctagtttcgatcgcaattcagccatttattcagaattgct

SEQ ID NO: 15732 - DNA, 862 bp, synthetic construct; identical to SEQ ID NO: 2497
  source 1..862: mol_type = other DNA

SEQ ID NO: 15733 - DNA, 447 bp, synthetic construct; identical to SEQ ID NO: 1912
  source 1..447: mol_type = other DNA

SEQ ID NO: 15734 - DNA, 682 bp, synthetic construct; identical to SEQ ID NO: 2288
  source 1..682: mol_type = other DNA

SEQ ID NO: 15735 - DNA, 427 bp, synthetic construct; identical to SEQ ID NO: 1853
  source 1..427: mol_type = other DNA

SEQ ID NO: 15736 - DNA, 611 bp, synthetic construct
  source 1..611: mol_type = other DNA
gatatcatgtcctggctgttcaagcggcctaaatcgcaagcgtttttcatttccttgcgtgcgtacccgaaaatttattgaacttggcttgaatcataagcaatgcttcttatagcggacactttgagaatataacacttgtatggattaatgtgtgctgttttaaataacaaacctagacacgcagttgcgttgatggttgtaccaatcacatataagtgttgaactcgtgttgatcctcgatcgctatatgtttgcctcctgcttccaataaaatagattacatacgcgacatgcctttgtgggttacctattggcctctgtcaaaaacaaatcgtatgatttgtagcttcccggtgtaaaaagctgggcgcggtctggctctcgttgggtggaaaggctggttgagtgtaagctccggtgctctggttgtcgcaattccagacgtcgtaataacctatattgcatctgactctaattcttgtggctctactgtatctagttcttcttcaactcaatctattaatgtttctaatcccgttaaaaaacaaaaattacaaaaaactgcttacaatcttgaagaattctttgatcatgatcttcctgatcct

SEQ ID NO: 15737 - DNA, 322 bp, synthetic construct
  source 1..322: mol_type = other DNA
aatgcatccctctgtccgtgtctgcaatggacattaagttgaatagtagtgtgagcaattatatactcagtgatgaaagttttctctttggcttgctatgagagaatgctgtgagttgtttgcaaggagtcccccccgtgggacactctatttagaggtgtgcggaaccggcaaagaaagtatggatatatccactctcaatagcaatagagaggaggatgaataaataaaatttgctactttgtgttttaatattttagatttaattaatttttgtaataatagtaaaaaagaaaaagaaaaagaaaaagaaagtgaaaat

SEQ ID NO: 15738 - DNA, 909 bp, synthetic construct; identical to SEQ ID NO: 2531
  source 1..909: mol_type = other DNA

SEQ ID NO: 15739 - DNA, 665 bp, synthetic construct
  source 1..665: mol_type = other DNA
gcgtgcgcacccgaaaatttattgaacttggcttgaatcataagtaatgcttcttatagcggacactttgagaatataatgcttatatggattaatgtatactgtttttaataacaaacctagacacgcagttgcgttgatggttgtatcaatcacatataagtgttgaactcgtgttaatcctcgatcgctatatgtttgccgcctacttccaataaaatagattacatgcgcgtcatgcctttgtgggttacctattggcctctgacaaaaacaagtcgtaagatttgtagcttcccggtgcaaaaagctgggcgcggtctggctctcgtagggtggaaaggtccaccaatggctggttgagtgtaagctccggtgtcctggttgtcgcaattccaggcgtcgtaataacctatattgcatctgactctaactcctgtggctctactgtatctagtttttgttctactaactctaataatactactggctctaatattgaaaaacttacatatgttaatatagataatatccttgatcctgatatccctcacatcactgaagttcgccgaaaacgaatttcagatcgtatcattgaatctcaaggatgtacttgctctgaacctactataactcctcatgtgttttcattttctactcttggt

SEQ ID NO: 15740 - DNA, 357 bp, synthetic construct; identical to SEQ ID NO: 1663
  source 1..357: mol_type = other DNA

SEQ ID NO: 15741 - DNA, 1000 bp, synthetic construct; identical to SEQ ID NO: 263
  source 1..1000: mol_type = other DNA

SEQ ID NO: 15742 - DNA, 461 bp, synthetic construct; identical to SEQ ID NO: 1942
  source 1..461: mol_type = other DNA

SEQ ID NO: 15743 - DNA, 678 bp, synthetic construct; identical to SEQ ID NO: 2284
  source 1..678: mol_type = other DNA

SEQ ID NO: 15744 - DNA, 261 bp, synthetic construct
  source 1..261: mol_type = other DNA
tataatgcttgcatggattaatgtatactgtttccaataacaaacctagacacgcagttgcgttgatggttgtatcaatcacatacttgtgttgaactcgtgttaatcctcgatcgctatatgtttgcctcctacttccaataaaatagattacatacgcgacatgcctttgtggtttacctattggcctctgtcaaaaacaaatcgtttgatttgtagtttcctggcctaaaaagctgggcgcggtctggctctcgtcgg

SEQ ID NO: 15745 - DNA, 538 bp, synthetic construct
  source 1..538: mol_type = other DNA
ttttcctgttataatttcttgtcgtttttgctggtttagcgaaacctccacctgctgtatccatatagtgtcaaggggtttttcccgtattcattatatcgttatcgcatattgaaaagtttataaggctttctttgcaaaaagctgacgtccgagtcatttttccgttaagtgacgttccgcctggttgcccgagtctctacacaacagtgtcaaggggtttttcccgtattcattgattgtggacatagcccaacccgtttttgtgtgcgttatcacataacccaattttattatattatattttattatttttgcaagattaatttttcctgtttttgtcgtaagtcctatttaggagctcgtgcagtatttatactgatttgcacaaatctacgaactttactaggattctttattcccaagtgtttattaattattttaactttgttattctttttaggtttacttaataagaaaatttatttgtctactatatttgttatatacgcgtttgataccgttcaaactattaata

SEQ ID NO: 15746 - DNA, 489 bp, synthetic construct; identical to SEQ ID NO: 2004
  source 1..489: mol_type = other DNA

SEQ ID NO: 15747 - DNA, 910 bp, synthetic construct; identical to SEQ ID NO: 2532
  source 1..910: mol_type = other DNA

SEQ ID NO: 15748 - DNA, 329 bp, synthetic construct; identical to SEQ ID NO: 1579
  source 1..329: mol_type = other DNA

SEQ ID NO: 15749 - DNA, 365 bp, synthetic construct; identical to SEQ ID NO: 1683
  source 1..365: mol_type = other DNA

SEQ ID NO: 15750 - DNA, 496 bp, synthetic construct; identical to SEQ ID NO: 2021
  source 1..496: mol_type = other DNA

SEQ ID NO: 15751 - DNA, 328 bp, synthetic construct; identical to SEQ ID NO: 1575
  source 1..328: mol_type = other DNA

SEQ ID NO: 15752 - DNA, 357 bp, synthetic construct; identical to SEQ ID NO: 1664
  source 1..357: mol_type = other DNA

SEQ ID NO: 15753 - DNA, 418 bp, synthetic construct; identical to SEQ ID NO: 1827
  source 1..418: mol_type = other DNA

SEQ ID NO: 15754 - DNA, 1000 bp, synthetic construct; identical to SEQ ID NO: 2619
  source 1..1000: mol_type = other DNA

SEQ ID NO: 15755 - DNA, 441 bp, synthetic construct; identical to SEQ ID NO: 1896
  source 1..441: mol_type = other DNA

SEQ ID NO: 15756 - DNA, 1000 bp, synthetic construct; identical to SEQ ID NO: 2620
  source 1..1000: mol_type = other DNA

SEQ ID NO: 15757 - DNA, 250 bp, synthetic construct
  source 1..250: mol_type = other DNA
cacacctaataaatcctctattgaggaacttgacgactttttacagcaaaatctctccagaagctctcaaaatagacttgaaggacagtctgaggacgcatctccatgcatttctacagggaattcaggtagggatgatttgcttaacccaaaacccccttcaccccaaaccaaccctttcgcaccttttcctctcccacaggagaggaattctcctccatcatcatcaggaggagattcatcatcatac

SEQ ID NO: 15758 - DNA, 789 bp, synthetic construct; identical to SEQ ID NO: 2421
  source 1..789: mol_type = other DNA

SEQ ID NO: 15759 - DNA, 621 bp, synthetic construct; identical to SEQ ID NO: 2200
  source 1..621: mol_type = other DNA

SEQ ID NO: 15760 - DNA, 631 bp, synthetic construct
  source 1..631: mol_type = other DNA
agtctaaaactaaaactgtaaatatgtaaatacttttaaaatacgcccgtaatggcgttaaactactctggaaacattatattataatgaatccaagccccaaaggcaaatttaatgtgtgatcttgctttcttataggctcatcattgtgagttagtaatgctgcattgaataatctcaggactatttagtcactacgcccaaactgagagttggcaatcccaacgaacaaaagttagatgaaccctgatttagtgttaattgaagctaaattaggttaattaaaccaattgctaacattaactcaaaccaaccagtcactagtgttactagtggaatcctcaataatggagattcaacccccacccccgtccaaggtactcccgaagacgctcacactgaagcagctgtcaatcaagtttttcagcacgctaccaccaaattcatcgatgataatgataccgttaacagagatgaatccacagtcgaacatatcaactctagttggttatcactcaacgacactcaatccaccgaacagactattattgattttctttcgaaacctattatactcacttcaggtactttttccactactgatacttatactttttttaactactttact

SEQ ID NO: 15761 - DNA, 625 bp, synthetic construct; identical to SEQ ID NO: 2208
  source 1..625: mol_type = other DNA

SEQ ID NO: 15762 - DNA, 505 bp, synthetic construct; identical to SEQ ID NO: 2034
  source 1..505: mol_type = other DNA

SEQ ID NO: 15763 - DNA, 736 bp, synthetic construct; identical to SEQ ID NO: 2357
  source 1..736: mol_type = other DNA

SEQ ID NO: 15764 - DNA, 913 bp, synthetic construct; identical to SEQ ID NO: 2534
  source 1..913: mol_type = other DNA

SEQ ID NO: 15765 - DNA, 737 bp, synthetic construct; identical to SEQ ID NO: 2359
  source 1..737: mol_type = other DNA

SEQ ID NO: 15766 - DNA, 426 bp, synthetic construct; identical to SEQ ID NO: 1850
  source 1..426: mol_type = other DNA

SEQ ID NO: 15767 - DNA, 684 bp, synthetic construct; identical to SEQ ID NO: 2290
  source 1..684: mol_type = other DNA

SEQ ID NO: 15768 - DNA, 365 bp, synthetic construct; identical to SEQ ID NO: 1684
  source 1..365: mol_type = other DNA

SEQ ID NO: 15769 - DNA, 776 bp, synthetic construct; identical to SEQ ID NO: 2401
  source 1..776: mol_type = other DNA

SEQ ID NO: 15770 - DNA, 359 bp, synthetic construct; identical to SEQ ID NO: 1671
  source 1..359: mol_type = other DNA

SEQ ID NO: 15771 - DNA, 846 bp, synthetic construct; identical to SEQ ID NO: 2475
  source 1..846: mol_type = other DNA

SEQ ID NO: 15772 - DNA, 351 bp, synthetic construct; identical to SEQ ID NO: 1650
  source 1..351: mol_type = other DNA

SEQ ID NO: 15773 - DNA, 352 bp, synthetic construct; identical to SEQ ID NO: 1652
  source 1..352: mol_type = other DNA

SEQ ID NO: 15774 - DNA, 307 bp, synthetic construct; identical to SEQ ID NO: 1504
  source 1..307: mol_type = other DNA

SEQ ID NO: 15775 - DNA, 282 bp, synthetic construct
  source 1..282: mol_type = other DNA
tctaacccctgtggattttccaatgagaatatgaggcccttgataagaatgttacataatatttttcgatttaatcgatgtgaccttgtatacattctttgataggagaccaggtttgacgttctttaatacgatgctaataagtctaaattttatttagatttaggaagccagattattgaattgttaaaacttggggctgaaaaaccctctcttccttggtggctacgcacatagcctgggaccttatccgaattagtgccatacgaaacagatacaact

SEQ ID NO: 15776 - DNA, 284 bp, synthetic construct
  source 1..284: mol_type = other DNA
aacccaaacccaacaaacaaaccaacccaaacacaacccaacaaaaccacccgacgccctgataacttgttatcttgaacgaaccagaatattatcatttgagccacgcgtaaagtgatcgtattctgcgatctgtatcatccaataggatcttacatgtcaacattttcgatagttgaattcgatagagaagaagatactgtgtaccaatcaaccacaggacccctcgtctttaccggaaccggatatcgattggaagctaggagagacgtattgcggcgagt

SEQ ID NO: 15777 - DNA, 664 bp, synthetic construct; identical to SEQ ID NO: 2263
  source 1..664: mol_type = other DNA

SEQ ID NO: 15778 - DNA, 297 bp, synthetic construct
  source 1..297: mol_type = other DNA
atagattgcatctatatatgattcaagtgctcagcaagattagtagttgtcgcagtgtttaattgtaattaaactaggagaaatccgaagcccagagtacggacactactatcaagtttcagattgtatctgttatttgctaagcaaccataattacttaaataataatatactattcttatatattatattcaatacaatagttttattctaatacttatatataataatttactttatttgaagtttgttaggatttcggttatattataatctaaatagctaagctagaataaa

SEQ ID NO: 15779 - DNA, 614 bp, synthetic construct; identical to SEQ ID NO: 2193
  source 1..614: mol_type = other DNA

SEQ ID NO: 15780 - DNA, 681 bp, synthetic construct; identical to SEQ ID NO: 2286
  source 1..681: mol_type = other DNA

SEQ ID NO: 15781 - DNA, 645 bp, synthetic construct; identical to SEQ ID NO: 2238
  source 1..645: mol_type = other DNA

SEQ ID NO: 15782 - DNA, 815 bp, synthetic construct; identical to SEQ ID NO: 2449
  source 1..815: mol_type = other DNA

SEQ ID NO: 15783 - DNA, 311 bp, synthetic construct; identical to SEQ ID NO: 1519
  source 1..311: mol_type = other DNA

SEQ ID NO: 15784 - DNA, 750 bp, synthetic construct; identical to SEQ ID NO: 2374
  source 1..750: mol_type = other DNA

SEQ ID NO: 15785 - DNA, 663 bp, synthetic construct; identical to SEQ ID NO: 2260
  source 1..663: mol_type = other DNA

SEQ ID NO: 15786 - DNA, 368 bp, synthetic construct; identical to SEQ ID NO: 1695
  source 1..368: mol_type = other DNA

SEQ ID NO: 15787 - DNA, 253 bp, synthetic construct
  source 1..253: mol_type = other DNA
cctctgtgactgtagttactctactaggtgttttatgctttatactactcctgcctcgacttgtcgtataagtcaggagtccccccattaagtttatttttggcccttggttaggcgtatatggtcacgctatgagaattatttgctgtaatgccgagaacttattttccgttcgttccgtcacgatgttcttgtagctataccggatctgagtcttttgacgaagctaacctatgggccgccttatgaaatc

SEQ ID NO: 15788 - DNA, 342 bp, synthetic construct; identical to SEQ ID NO: 1625
  source 1..342: mol_type = other DNA

SEQ ID NO: 15789 - DNA, 745 bp, synthetic construct; identical to SEQ ID NO: 2366
  source 1..745: mol_type = other DNA

SEQ ID NO: 15790 - DNA, 378 bp, synthetic construct; identical to SEQ ID NO: 1724
  source 1..378: mol_type = other DNA

SEQ ID NO: 15791 - DNA, 510 bp, synthetic construct; identical to SEQ ID NO: 2047
  source 1..510: mol_type = other DNA

SEQ ID NO: 15792 - DNA, 297 bp, synthetic construct
  source 1..297: mol_type = other DNA
tcgcatttaaacgactaaagggagtaaaagtatgtcaaatagctcatctggggtagcaacccgttagacctctacataatatgccctttagaagtttcttattgtttaggaatttttatgaagaacgcccaactcacagtggcgcctattctaagtttcgttagtaaacttgcctacagcaccccgtctataagactcggcttagttccgacgatggacaaaaatgttttatcttatcatatggggattgagtagctacttcctaacggaatggcgaacatttctccgacctaaatc

SEQ ID NO: 15793 - DNA, 563 bp, synthetic construct; identical to SEQ ID NO: 2129
  source 1..563: mol_type = other DNA

SEQ ID NO: 15794 - DNA, 764 bp, synthetic construct
  source 1..764: mol_type = other DNA
tgttctcttaattaatagctatgtatgcttatactacaaaacagtaacgtactactttacaggcctttaatgatgcgtattaacacgtcgctatcatttcatataaatatgtgttacacaggtttagtgtaaataaactttttatagtgtgttcagaattttcactactatatcatatcaaaattctaccagttgattggacgtaatttattttaacaatcctatttttagttttagttttaactatatattttattttaacatcttatatctcgtatataagtgtcgacacagttattctatggctgcgttttctttcagtttaagcatgtaataaagaagtgacagtgatttacatgatactttggaattcgttcccctctattttaacctagtcaaaacacgttttgcaactctgccgtgtaagcagatgccaattttaatttaagagttttattttattaaccatactcaaattttatattttaatgtcggttcgtgtgctttagcagacctacttactaacctctatgatcttgcatatatttctagcgtctatgaccacttaattgtgagcgatatatgtatttttgattatgttagtctttaaactataatagctgttgggctctgattttaattgagtatcccctaatgttctgaggattctttaacgtgaaggccgttcgccaaaagcgcgctatatgtggtagaaccaacttagtgtaaaataacggaggtccacatgggagaacaaacaatca

SEQ ID NO: 15795 - DNA, 456 bp, synthetic construct; identical to SEQ ID NO: 1931
  source 1..456: mol_type = other DNA

SEQ ID NO: 15796 - DNA, 588 bp, synthetic construct; identical to SEQ ID NO: 2157
  source 1..588: mol_type = other DNA

SEQ ID NO: 15797 - DNA, 512 bp, synthetic construct; identical to SEQ ID NO: 2053
  source 1..512: mol_type = other DNA

SEQ ID NO: 15798 - DNA, 673 bp, synthetic construct
  source 1..673: mol_type = other DNA
tacgggaattcccgtacgcagtgtaatttagattaattggcagtttttgccctagtagaccatagacgtcattttgggcatattatgcccattgtgacctctacgtctattagttgatttaacacaaccaatgttttattctaagtattgatcgtgctaaactagcgatccccattttctttgagttgagttttatttgactcgttactctattttatatagggtattttgctagcctgccagctagctatttgttactattgtaactatttgattcttcataatgaagatgtagaactatacctggttactgagttcaggcgatttaatgttctaattttctatagtctgtagtgaatacagcacactaatagaagttccgtcaatcttactattagctctatgaatatatttcatggatatcagattatttaaagttttaacaaataacgtacgaattctcggtaatgtatgtgtgtgtaggccggtaccgcatggataaatccgaaaacctgatcacatatgcgttattgcttgtagaacgctatatgaagcattgtgaagaatagggttaagcgcgaaccccgttcatcaaatttcaagaacaccactcctgtatgaaaaataagtttttagtattataatatcgttttagtggtgaaaaattgacaac

SEQ ID NO: 15799 - DNA, 475 bp, synthetic construct
  source 1..475: mol_type = other DNA
gcagggtcgttctgtatcattttgtatattagtagagtcacttcggagactataaatccgacccagtttcaaatctgatggttagcaaaattgatgtatgtatatggataccgcgtgtatatttatatttgtgtatttttatattttattcgtaggctttgcatatgttaacggtccctaaaggggaatcgagagatgggttctccgtgcccactgtaaatacacctagttatatgagttaatcgcctctataacttgtacataatagattggtaataattgtaaatgtaaattaaatatttttgaaaatgccagtgttggtgttggcgctggtaaccagcctagggttggtaaggacaacacagggtgcagtgaagacaattcgattgatagtgatacgagtgtgaaatctagtatatttcccaagcgtgtgcattttgatgacaatcgaaagactcatcgcaggggaattttg

SEQ ID NO: 15800 - DNA, 507 bp, synthetic construct; identical to SEQ ID NO: 2039
  source 1..507: mol_type = other DNA

SEQ ID NO: 15801 - DNA, 514 bp, synthetic construct
  source 1..514: mol_type = other DNA
ttgttatattatgggttcttggtcttgctctgttattatcatgtatccttactggtataataggttattattttttaagattagtacatagaacatataattatacatgcagaaaaatacaaaaacatacatttagcttaggtgatgaggagatggcgcctatttataagccaactactcatagtgttcttgttccagtgcccttgtcctgacccttagtaccttacccagcatgaacgatctaagactaaccgagtggggtgcgagattaaaacttggtaacaagttctctcactatgaagccggggtctgatttagtagtgtgacaagtgggaacctggtgttcagcgtgctggagtccataacctctcccaatgtaaattctgcgtgaggcattggcaaagttgtgggtggctctggtggtccagtccggagggctagaagtcttcgagtccggagggtatcgtcaccgcccaatcttgtgacgtctttcttttaaatttactctacaatc

SEQ ID NO: 15802 - DNA, 292 bp, synthetic construct
  source 1..292: mol_type = other DNA
acaacaacaacaacaacaacaacaacaacaacaacgatacaaccccaatctttggataaatatttcaaaaagaaataccaggggggagaacccacctggagtgggtaggagtgacatacataggagtgatgtgccccctacaattaggtctttgacctatcaatctccccctatcatcccatttatccaaaggaacaatgacaacccggaatctgccgatcaaaacaatatattagaacaagcattatctgcgatagctaaagcaattgagtcttttttaacgaaagataag

SEQ ID NO: 15803 - DNA, 614 bp, synthetic construct
  source 1..614: mol_type = other DNA
cgtatgtaacccatgcgcatgttttcatatagatatctttaaaacaatttgtagagaccctgcatattcttctttagaatcaggtatgagaccctgagtatttgctgttaagttttatttcgacgactattccgagaaatagggactctgtagccctggtattttgttctataactgtctggtttgtaatgaccttataaacatttcagttgttcataacatttgctataatttcagtataatatttctgtatgattataattttgcaaaaccccttttgttaatcacattttattcaaagcttcttaaatgaagttgcattagcattttatgcttttgctgtcagtctgatttattgttatatttacttattaatggtggcgagaattccactcgtcttgaaaacctttattttatatagaggtctgttttgttcacgctttaggtttcctatcgagcgactatgtgatgaaaaatgtggtagaaccaagtgtttcatcttatgcatacacctcaatgataggttgttaaaatctatatcacgctcgtgtcgtgaatgttgggtactctgatttaattgcagtaactttcctaaccgagttgtcatatcaacc

SEQ ID NO: 15804 - DNA, 375 bp, synthetic construct; identical to SEQ ID NO: 1718
  source 1..375: mol_type = other DNA

SEQ ID NO: 15805 - DNA, 1000 bp, synthetic construct; identical to SEQ ID NO: 2621
  source 1..1000: mol_type = other DNA

SEQ ID NO: 15806 - DNA, 425 bp, synthetic construct
  source 1..425: mol_type = other DNA
gtaaggtcagtcactttggagacgttaaatccaacccagtttcaatactgatggttagcaaaattgatatatgtatatggataccgtgtttgttttaatctttatatgttttgtagaaaattcataggctttgcatatattaacggtccctaccggggagttttgttcgagttcaccgtgctcacttgtaaatatgtcgtaccatatgagtcaatccactctatggtctgtaaataaataaatggattggtaatatttttcaatataaattatgccgggatgtacaagccaacataagttttggtcccggggaagcaaacgtacacaataaatctgtgtcggagacacagtcagcagtgactgaaaattctttattgaaaatagagaaatttaaaccacaatctggtccggaaggtactactgtt

SEQ ID NO: 15807 - DNA, 273 bp, synthetic construct
  source 1..273: mol_type = other DNA
agcaacaacagagaacgacaaaaccccaatctttggataaatatttcgaaaagaaataccaggggagagaacccacctggagtgggtaggagcgacatacacaggagtgatgtgccccctacaattaggtcttcgacctatcaatctctccctatcattccatttatccaaaggaacaatgacaacccggaacctgctgatcaaggcaatatcttagaacaagcactatctgcgatagctaaagcaattgaatcttttttaacaaaagataag

SEQ ID NO: 15808 - DNA, 530 bp, synthetic construct; identical to SEQ ID NO: 2085
  source 1..530: mol_type = other DNA

SEQ ID NO: 15809 - DNA, 622 bp, synthetic construct
  source 1..622: mol_type = other DNA
taaattattttaggttatcaaattattatttaatcaagaactcatttaatcaagaacattaaatcattataatcaagaatctcttcaatatcgttcactcatattctaatttagagtttattcaactgtctggaataagcttattataaagattgacaccctttgtaatattgtcttatctttggcaggaactctatcttagtcttatgattcaataacttgtttaacttagattttatagtctattttatttaattttgctttaacttcaaataatagtttacgcgcgtgacatataccataggaaagatatctattgatatcatggtgtccatgtgttaatcaaacctcagttggtctatttaaaatttgaattttcgcaaaattttgaatctcaaagcaagttgaatcaaagcctggaatggaataaagaattctcaaaacctggttttatcatatttataacctataaaataaatatggctgtgtgataacagtaaaatctaatctatgtactcacaagtatacatataaatatttgtggctagatcatcaactagtataataaatgttggatttttctatattttccaaaaattaaatatagagagcactaattaaa

SEQ ID NO: 15810 - DNA, 308 bp, synthetic construct; identical to SEQ ID NO: 1508
  source 1..308: mol_type = other DNA

SEQ ID NO: 15811 - DNA, 539 bp, synthetic construct; identical to SEQ ID NO: 2101
  source 1..539: mol_type = other DNA

SEQ ID NO: 15812 - DNA, 430 bp, synthetic construct; identical to SEQ ID NO: 1865
  source 1..430: mol_type = other DNA

SEQ ID NO: 15813 - DNA, 875 bp, synthetic construct; identical to SEQ ID NO: 2508
  source 1..875: mol_type = other DNA

SEQ ID NO: 15814 - DNA, 395 bp, synthetic construct; identical to SEQ ID NO: 1766
  source 1..395: mol_type = other DNA

SEQ ID NO: 15815 - DNA, 280 bp, synthetic construct
  source 1..280: mol_type = other DNA
tgaccataccaaattagcaaaatttatccacctattagtcatattatcaactttagtaatagtatcacttgaagtaaaatctaaccaatcaatagaatcaattactcgtatttctaaatgtagggaacgacgtcgtgatttgctattattacttaggaatcaaattgaacatttgaaattttttagaggcgctacatcgctttataattttacaaaatttaatagtaattatagattatatgctcgtttatataataataaatttaataatgtatgccag

SEQ ID NO: 15816 - DNA, 315 bp, synthetic construct; identical to SEQ ID NO: 1533
  source 1..315: mol_type = other DNA

SEQ ID NO: 15817 - DNA, 266 bp, synthetic construct
  source 1..266: mol_type = other DNA
ccccttcaaacgtgtatctgttgcctagttgaggaacttaatgttaccaatgatactagcagctacacaagtttgtttatcagcatttagtttcgtacaaatagcttatctggggtagcaacccgttagtatgcaacttgtctatagcgcctgtctctagtttggagctgatcttgatccctaagcgggagatgatagaagagatggatgaaatttcaatttttcttttgcttccaccttaagcggtgcatcttcaatgtaaccac

SEQ ID NO: 15818 - DNA, 513 bp, synthetic construct; identical to SEQ ID NO: 2057
  source 1..513: mol_type = other DNA

SEQ ID NO: 15819 - DNA, 586 bp, synthetic construct
  source 1..586: mol_type = other DNA
aaccttactaataccgtcattaaaactcaaagtagatttaatgaagctgttattggatgtatatttctattaattgatcagattttatctgttccgtacatggtttcaaaatttaaataaaataaaataaaataaaataaaacaatataaaattaagaaaatacaaaatattaccactttaataaaccactagaatgttttaaacatttctataccaccttatatttattatagagggctctatctacgagcacctaacgtttacagaagacgtaacttttgctttagcactctaaccttgtgaatggagtattggcggagggacctatgaggaagtacctactaacctcctttgttatcaaattttctgagtcgattttaatcgatgtttcatagttgtggcacactcccactgaatttagatactcaaaacccaatatgtggcattcctacgttgttagagagttccgcgcaggcggctattgcgtttatttaataatcaaggtttaataatgtaagtagccattcttacgtgaaatactaatcaccttttattatctaaaaccctgttgtttagctatatatc

SEQ ID NO: 15820 - DNA, 630 bp, synthetic construct
  source 1..630: mol_type = other DNA
agtccaaaactaaaactgtaaatatgtaaatacttttaaaatacgcccgtaatggcgttaaactattttggaaacattatatttaatggatccatgccccaaaggcaaatttgatgtgtgatcttgctcccttataggctcatcattataatctagtagtgctgcatcaaataatctcaggactttttagtcactacgcccaaactgagagttggcaatcccaatgaacaaaagttagatgaaccctgatttagtgttaattgaaactaaattgggttaaataaaccaattgctaacactaactcaaatcaaactaccactagtgttactagtggaatcctcaatattggagattcaacccccactcccgtccaaggtacacccgaggacgctcacactgaagctgctgttaatcaagtttttcagcatgctactaccaaattcatcgatgataatgataccgttaacagagatgaatccaccgtcgaacatatcaactctagttggttatcactcaacgacacacaatccactgagcaaactattattgattttctttcgaaacctatcattcttaattcaggtactttttccatttctgatacttattcttttcttaactactatact

SEQ ID NO: 15821 - DNA, 592 bp, synthetic construct; identical to SEQ ID NO: 2160
  source 1..592: mol_type = other DNA

SEQ ID NO: 15822 - DNA, 660 bp, synthetic construct; identical to SEQ ID NO: 2256
  source 1..660: mol_type = other DNA

SEQ ID NO: 15823 - DNA, 314 bp, synthetic construct; identical to SEQ ID NO: 1529
  source 1..314: mol_type = other DNA

SEQ ID NO: 15824 - DNA, 648 bp, synthetic construct; identical to SEQ ID NO: 2241
  source 1..648: mol_type = other DNA

SEQ ID NO: 15825 - DNA, 571 bp, synthetic construct; identical to SEQ ID NO: 2136
  source 1..571: mol_type = other DNA

SEQ ID NO: 15826 - DNA, 356 bp, synthetic construct; identical to SEQ ID NO: 1657
  source 1..356: mol_type = other DNA

SEQ ID NO: 15827 - DNA, 431 bp, synthetic construct; identical to SEQ ID NO: 1870
  source 1..431: mol_type = other DNA

SEQ ID NO: 15828 - DNA, 356 bp, synthetic construct; identical to SEQ ID NO: 1658
  source 1..356: mol_type = other DNA

SEQ ID NO: 15829 - DNA, 1000 bp, synthetic construct; identical to SEQ ID NO: 264
  source 1..1000: mol_type = other DNA

SEQ ID NO: 15830 - DNA, 653 bp, synthetic construct; identical to SEQ ID NO: 2247
  source 1..653: mol_type = other DNA

SEQ ID NO: 15831 - DNA, 528 bp, synthetic construct; identical to SEQ ID NO: 2083
  source 1..528: mol_type = other DNA

SEQ ID NO: 15832 - DNA, 334 bp, synthetic construct; identical to SEQ ID NO: 1597
  source 1..334: mol_type = other DNA

SEQ ID NO: 15833 - DNA, 786 bp, synthetic construct; identical to SEQ ID NO: 2419
  source 1..786: mol_type = other DNA

SEQ ID NO: 15834 - DNA, 669 bp, synthetic construct; identical to SEQ ID NO: 2270
  source 1..669: mol_type = other DNA

SEQ ID NO: 15835 - DNA, 779 bp, synthetic construct; identical to SEQ ID NO: 2406
  source 1..779: mol_type = other DNA

SEQ ID NO: 15836 - DNA, 731 bp, synthetic construct; identical to SEQ ID NO: 2347
  source 1..731: mol_type = other DNA

SEQ ID NO: 15837 - DNA, 469 bp, synthetic construct; identical to SEQ ID NO: 1961
  source 1..469: mol_type = other DNA

SEQ ID NO: 15838 - DNA, 308 bp, synthetic construct; identical to SEQ ID NO: 1509
  source 1..308: mol_type = other DNA

SEQ ID NO: 15839 - DNA, 732 bp, synthetic construct; identical to SEQ ID NO: 2350
  source 1..732: mol_type = other DNA

SEQ ID NO: 15840 - DNA, 595 bp, synthetic construct; identical to SEQ ID NO: 194
  source 1..595: mol_type = other DNA

SEQ ID NO: 15841 - DNA, 371 bp, synthetic construct; identical to SEQ ID NO: 1705
  source 1..371: mol_type = other DNA

SEQ ID NO: 15842 - DNA, 455 bp, synthetic construct; identical to SEQ ID NO: 1927
  source 1..455: mol_type = other DNA

SEQ ID NO: 15843 - DNA, 704 bp, synthetic construct; identical to SEQ ID NO: 2310
  source 1..704: mol_type = other DNA

SEQ ID NO: 15844 - DNA, 336 bp, synthetic construct; identical to SEQ ID NO: 1610
  source 1..336: mol_type = other DNA

SEQ ID NO: 15845 - DNA, 657 bp, synthetic construct; identical to SEQ ID NO: 2253
  source 1..657: mol_type = other DNA

SEQ ID NO: 15846 - DNA, 571 bp, synthetic construct; identical to SEQ ID NO: 2137
  source 1..571: mol_type = other DNA

SEQ ID NO: 15847 - DNA, 652 bp, synthetic construct; identical to SEQ ID NO: 2245
  source 1..652: mol_type = other DNA

SEQ ID NO: 15848 - DNA, 826 bp, synthetic construct; identical to SEQ ID NO: 2459
  source 1..826: mol_type = other DNA

SEQ ID NO: 15849 - DNA, 563 bp, synthetic construct; identical to SEQ ID NO: 2130
  source 1..563: mol_type = other DNA

SEQ ID NO: 15850 - DNA, 430 bp, synthetic construct; identical to SEQ ID NO: 1866
  source 1..430: mol_type = other DNA

SEQ ID NO: 15851 - DNA, 402 bp, synthetic construct; identical to SEQ ID NO: 1787
  source 1..402: mol_type = other DNA

SEQ ID NO: 15852 - DNA, 448 bp, synthetic construct; identical to SEQ ID NO: 1915
  source 1..448: mol_type = other DNA

SEQ ID NO: 15853 - DNA, 285 bp, synthetic construct
  source 1..285: mol_type = other DNA
acgtcgcaccttagggtgctggggctcatatacgcgtgtagaccaggcaaaaaagtcacgctaataatggtttgcatgagcggaagcccaaaaaacagaccttgtttttcaacattacggcccagggtggtctataaaaacccagggcaccgtgactcgggccaccacgtttgactgtacgtgggaactaggtctgccaacctagcgccttaaattgatacagttgctcaacaaaatgcaaattccagttcttcggtactgaaaaccgaagcttatggcgatgcc

SEQ ID NO: 15854 - DNA, 773 bp, synthetic construct; identical to SEQ ID NO: 2398
  source 1..773: mol_type = other DNA

SEQ ID NO: 15855 - DNA, 553 bp, synthetic construct
  source 1..553: mol_type = other DNA
gccgtttagggctgtttccacggctgaaggtgaaagaagtcgttacccgcctgcctacttcgggccgggctagtaacatggatactacctcaagcgtgtgatccgggtgaggtctcccccctccccagaaacttgtgatgagggtcaccgttccgcatacggcgacgtatgggtgtccctgcgttggcacaaggcctgctcctgaaagggacaggcacgcctgagatgttgaagtgtgaagacccggactgagctaggtatggagtcctccgccccctgaatgcggctaaccttaaccccggagctgttgcgggcaaaccagctcgtaggcagtcgtaatgcgtaagtctgggatgggaccgactactttggggtagcgtgtttcctttttattttataatggcgtgtatggtgacaacaatagggtattgttgttatcatacattcagcgccctcctagctcttttacagtggttcataaccgctgtctcattgatccccagtggaatttcttggatttttctcggcttgtttttaggaggatttgctcaca

SEQ ID NO: 15856 - DNA, 692 bp, synthetic construct; identical to SEQ ID NO: 2300
  source 1..692: mol_type = other DNA

SEQ ID NO: 15857 - DNA, 358 bp, synthetic construct; identical to SEQ ID NO: 1669
  source 1..358: mol_type = other DNA

SEQ ID NO: 15858 - DNA, 700 bp, synthetic construct
  source 1..700: mol_type = other DNA
ttttccccctctcttaaccacacgctttgctcagcgtaacttctccgggttacgtggagaccaaaaggctacggagactcgggctacggccctggagcacctaggtgctcctaaagacgttagaagttgtacaaactcgcccaatagggccccccaaccaggggggtagcgggcaagcacttctgtttccccggtatgatctcataggctgtacccacggctgaaagagagattatcgttacccgcctcactacttcgagaagcccagtaatggttcatgaagttgatctcgttgacccggtgtttcccccacaccagaaacctgtgatgggggtggtcatcccggtcatggcgacatgacggacctccccgcgccggcacagggcctcttcggaggacgagtgacatggattcaaccgtgaagagcctattgagctagtgttgattcctccgcccccgtgaatgcggctaatcccaactccggagcaggcgggcccaaaccagggtctggcctgtcgtaacgcgaaagtctggagcggaaccgactactttcgggaaggcgtgtttccttttgttccttttatcaagttttatggtgacaactcctggtagacgttttattgcgtttattgagagatttccaacaattgaacagactagaaccacttgttttatcaaaccctcacagaataagataaca

SEQ ID NO: 15859 - DNA, 686 bp, synthetic construct; identical to SEQ ID NO: 2293
  source 1..686: mol_type = other DNA

SEQ ID NO: 15860 - DNA, 582 bp, synthetic construct; identical to SEQ ID NO: 2149
  source 1..582: mol_type = other DNA

SEQ ID NO: 15861 - DNA, 466 bp, synthetic construct; identical to SEQ ID NO: 1953
  source 1..466: mol_type = other DNA

SEQ ID NO: 15862 - DNA, 555 bp, synthetic construct; identical to SEQ ID NO: 2119
  source 1..555: mol_type = other DNA

SEQ ID NO: 15863 - DNA, 665 bp, synthetic construct; identical to SEQ ID NO: 2264
  source 1..665: mol_type = other DNA

SEQ ID NO: 15864 - DNA, 254 bp, synthetic construct
  source 1..254: mol_type = other DNA
ttgtaaaaaccaaacaaaaccatgtgatcgggactattcgtagatgatggaatatcgagtagtgactgctgggtgcacttgttggcaacaatgagtgcggtgagagaattatttagttccattgcagactgtttgctcaccttaaaataataggataatctgcccatccgtcgatagctgacgttgagtgacgagctattaagacgttaacatattcacttgccgaaacaaacgaaacaaattcaaattttgcg

SEQ ID NO: 15865 - DNA, 313 bp, synthetic construct; identical to SEQ ID NO: 1527
  source 1..313: mol_type = other DNA

SEQ ID NO: 15866 - DNA, 369 bp, synthetic construct
  source 1..369: mol_type = other DNA
tgcggtttgctcgtttatgtttatcattttaaagtattaaacaacgtgatggcttcatcagcaaaaactaacgaacaagctttagggactacggtagcagcacatggcactagcggccaagtgttagccgaaccaagtccaattgatcaacaaattcatgataaccctggtacgattaaggcgtcgactgcaattgaaactcttttcaaccttttgttcaaagattacattttcaaaggattgtataccatctctactgatatggctcccggacaaatcatttggaaattacctattcacccagcagtttgcaatcaatataatgatcacgtaagaaaaatgtttaatgtttggacaggaggaatgaaa

SEQ ID NO: 15867 - DNA, 877 bp, synthetic construct; identical to SEQ ID NO: 2510
  source 1..877: mol_type = other DNA

SEQ ID NO: 15868 - DNA, 426 bp, synthetic construct; identical to SEQ ID NO: 1851
  source 1..426: mol_type = other DNA

SEQ ID NO: 15869 - DNA, 538 bp, synthetic construct; identical to SEQ ID NO: 2097
  source 1..538: mol_type = other DNA

SEQ ID NO: 15870 - DNA, 597 bp, synthetic construct; identical to SEQ ID NO: 2163
  source 1..597: mol_type = other DNA

SEQ ID NO: 15871 - DNA, 467 bp, synthetic construct; identical to SEQ ID NO: 1955
  source 1..467: mol_type = other DNA

SEQ ID NO: 15872 - DNA, 602 bp, synthetic construct; identical to SEQ ID NO: 2168
  source 1..602: mol_type = other DNA

SEQ ID NO: 15873 - DNA, 847 bp, synthetic construct; identical to SEQ ID NO: 2476
  source 1..847: mol_type = other DNA

SEQ ID NO: 15874 - DNA, 315 bp, synthetic construct; identical to SEQ ID NO: 1534
  source 1..315: mol_type = other DNA

SEQ ID NO: 15875 - DNA, 383 bp, synthetic construct; identical to SEQ ID NO: 1738
  source 1..383: mol_type = other DNA

SEQ ID NO: 15876 - DNA, 1000 bp, synthetic construct; identical to SEQ ID NO: 2622
  source 1..1000: mol_type = other DNA

SEQ ID NO: 15877 - DNA, 759 bp, synthetic construct; identical to SEQ ID NO: 2385
  source 1..759: mol_type = other DNA

SEQ ID NO: 15878 - DNA, 333 bp, synthetic construct; identical to SEQ ID NO: 1593
  source 1..333: mol_type = other DNA

SEQ ID NO: 15879 - DNA, 551 bp, synthetic construct; identical to SEQ ID NO: 2116
  source 1..551: mol_type = other DNA

SEQ ID NO: 15880 - DNA, 562 bp, synthetic construct; identical to SEQ ID NO: 2127
  source 1..562: mol_type = other DNA

SEQ ID NO: 15881 - DNA, 756 bp, synthetic construct; identical to SEQ ID NO: 2381
  source 1..756: mol_type = other DNA

SEQ ID NO: 15882 - DNA, 457 bp, synthetic construct; identical to SEQ ID NO: 1933
  source 1..457: mol_type = other DNA

SEQ ID NO: 15883 - DNA, 306 bp, synthetic construct; identical to SEQ ID NO: 1499
  source 1..306: mol_type = other DNA

SEQ ID NO: 15884 - DNA, 673 bp, synthetic construct; identical to SEQ ID NO: 2278
  source 1..673: mol_type = other DNA

SEQ ID NO: 15885 - DNA, 546 bp, synthetic construct; identical to SEQ ID NO: 2109
  source 1..546: mol_type = other DNA

SEQ ID NO: 15886 - DNA, 631 bp, synthetic construct
  source 1..631: mol_type = other DNA
agtctaaaactaaaactgtaaatatgtaaatacttttaaaatacgcccgtaatggcgttaaactactttggaaacattatattataatgaatccaagccccaaaggcaaatttaatgtgtgatcttgctttcttataggctcatcattgtgagttagtaatgctgcattgaataatctcaggactatttagtcactacgcccaaactgagagttggcaatcccaacgaacaaaagttagatgaaccctgatttagtgttaattgaagctaaattaggttaattaaaccaattgctaacattaactcaaaccaaccagtcactagtgttactagtggaatcctcaataatggagattcaacccccacccccgtccaaggtactcccgaagacgctcacactgaagcagctgtcaatcaagtttttcagcacgctaccaccaaattcatcgatgataatgataccgttaacagagatgaatccacagtcgaacatatcaactctagttggttatcactcaacgacacacaatccactgagcaaactattattgattttctttcgaaacctatcattcttaattcaggtactttttccatttctgatacttattcttttcttaactactatact

SEQ ID NO: 15887 - DNA, 547 bp, synthetic construct; identical to SEQ ID NO: 2111
  source 1..547: mol_type = other DNA

SEQ ID NO: 15888 - DNA, 250 bp, synthetic construct
  source 1..250: mol_type = other DNA
aagccttccccccaaaaaaggggggcatccaacccatgatcatccggcagcaatcccgctgcaagggtgtcgtaacgcgcaagtcgtgggcggaaccgactactttgggaagacgtgtttccttcattttatcattactgtgcttatggtgacaagttatagaattcgttctatagctattcttgagagatttccaacgattttccaaacgcgcacagtacttgtattcaaacccaatagaaccatcaaa

SEQ ID NO: 15889 - DNA, 512 bp, synthetic construct; identical to SEQ ID NO: 2054
  source 1..512: mol_type = other DNA

SEQ ID NO: 15890 - DNA, 464 bp, synthetic construct; identical to SEQ ID NO: 1949
  source 1..464: mol_type = other DNA

SEQ ID NO: 15891 - DNA, 473 bp, synthetic construct; identical to SEQ ID NO: 1971
  source 1..473: mol_type = other DNA

SEQ ID NO: 15892 - DNA, 519 bp, synthetic construct; identical to SEQ ID NO: 2066
  source 1..519: mol_type = other DNA

SEQ ID NO: 15893 - DNA, 416 bp, synthetic construct; identical to SEQ ID NO: 1821
  source 1..416: mol_type = other DNA

SEQ ID NO: 15894 - DNA, 451 bp, synthetic construct; identical to SEQ ID NO: 1918
  source 1..451: mol_type = other DNA

SEQ ID NO: 15895 - DNA, 667 bp, synthetic construct; identical to SEQ ID NO: 2269
  source 1..667: mol_type = other DNA

SEQ ID NO: 15896 - DNA, 454 bp, synthetic construct
  source 1..454: mol_type = other DNA
attttataaaataaaatagaaaaaaaattagaattagatttgatcttctttattcccattatgagaatttggtgctggatgtgattccgaccattaatgtgcactgggagcgcgatacgtcgtggttctatgtgaaccccaaatgcacagttttcataaccctattgttcagtgctgggaacgaatttgccgtttagtattaggaaaccggcgatttcgactcagaaagattgctagcattgggcaaatgcttagctccagtggtcgctgcagagagatgccgcccgtgagggagactctgcggtttgcagctgggttactatgtatggtttttctgattagaatgagtggttggccctagtgctatacgtcaaacgtgggaactgagccttcgactccccaagtccttgggagcgaagtgaaaaataggcaacaccccaactcaattttcaat

SEQ ID NO: 15897 - DNA, 392 bp, synthetic construct; identical to SEQ ID NO: 1759
  source 1..392: mol_type = other DNA

SEQ ID NO: 15898 - DNA, 359 bp, synthetic construct; identical to SEQ ID NO: 1672
  source 1..359: mol_type = other DNA

SEQ ID NO: 15899 - DNA, 855 bp, synthetic construct; identical to SEQ ID NO: 228
  source 1..855: mol_type = other DNA

SEQ ID NO: 15900 - DNA, 327 bp, synthetic construct; identical to SEQ ID NO: 1573
  source 1..327: mol_type = other DNA

SEQ ID NO: 15901 - DNA, 606 bp, synthetic construct; identical to SEQ ID NO: 2179
  source 1..606: mol_type = other DNA

SEQ ID NO: 15902 - DNA, 269 bp, synthetic construct
  source 1..269: mol_type = other DNA
atatgacatcgtctccggaggactttaaactcgtcgtaagtgcgacctctcatcgcattcatgctaaaaagagagaggtgagttatggataccgtttcacttttgggggaccaacacccatgtgtgagataggcttgctcattttaggctaattcctatttaggaaagtttttgccaaacaacaagttggcggtcctcgcagtgtaacacacctgtgagtcaaccgtgctgaacgtgttaacaattttactgactatttatcaatttat

SEQ ID NO: 15903 - DNA, 575 bp, synthetic construct; identical to SEQ ID NO: 2142
  source 1..575: mol_type = other DNA

SEQ ID NO: 15904 - DNA, 360 bp, synthetic construct
  source 1..360: mol_type = other DNA
tatattcagcgccccggagcatcagttccgaagaatcgataacgattatccagagcattagctacaaaacgccttacagagtaagaagacacgacacgataacgttgagtgtatgcgaacacaaagagatgaatacttgtggcacctaaagctgataacagctttacgtggcaagattccgcgtgaggagttgaaggagataattataaaatatcaagtacattttaaaataaccccatcaatatatagtagtcataatacaaatatagttagacctaagttagaagaatactataggatagcatattaggataagttagattataattagtggaactttccacctaatctacctccact

SEQ ID NO: 15905 - DNA, 490 bp, synthetic construct
  source 1..490: mol_type = other DNA
tgtgcaagtaatacacttgcacactctatgtttgcgtctgagctatttgggcctttgtaggtaactcctattctggtctgaaaacgcccgggctcacgcatagatgtgcagtcccttttatggatcattcttatttatagcaattcaattttacaattcacatttgtcgttaagtctatcacgacattttacaactacccgctttaattagtaggctcttggttgtagaattgaacaggcctcttttaatgaaagaataaatcattcgttatttataggaagcgaagaattttctatagataatcgtagtgtcattcctatttaggatacggttggacacattaataactaatcttcttcccagcactttggtctataccatctacccctttgtgttgtgtaaatttatggtggtcaaaataacaacaacaactcagaatctgatggttcccagtctacctctccatcacagattcataacccagataaa

SEQ ID NO: 15906 - DNA, 511 bp, synthetic construct; identical to SEQ ID NO: 2050
  source 1..511: mol_type = other DNA

SEQ ID NO: 15907 - DNA, 495 bp, synthetic construct; identical to SEQ ID NO: 2019
  source 1..495: mol_type = other DNA

SEQ ID NO: 15908 - DNA, 372 bp, synthetic construct; identical to SEQ ID NO: 1710
  source 1..372: mol_type = other DNA

SEQ ID NO: 15909 - DNA, 659 bp, synthetic construct; identical to SEQ ID NO: 2255
  source 1..659: mol_type = other DNA

SEQ ID NO: 15910 - DNA, 397 bp, synthetic construct; identical to SEQ ID NO: 1770
  source 1..397: mol_type = other DNA

SEQ ID NO: 15911 - DNA, 827 bp, synthetic construct; identical to SEQ ID NO: 226
  source 1..827: mol_type = other DNA

SEQ ID NO: 15912 - DNA, 959 bp, synthetic construct; identical to SEQ ID NO: 2556
  source 1..959: mol_type = other DNA

SEQ ID NO: 15913 - DNA, 616 bp, synthetic construct; identical to SEQ ID NO: 2195
  source 1..616: mol_type = other DNA

SEQ ID NO: 15914 - DNA, 756 bp, synthetic construct; identical to SEQ ID NO: 2382
  source 1..756: mol_type = other DNA

SEQ ID NO: 15915 - DNA, 699 bp, synthetic construct; identical to SEQ ID NO: 2308
  source 1..699: mol_type = other DNA

SEQ ID NO: 15916 - DNA, 424 bp, synthetic construct; identical to SEQ ID NO: 1843
  source 1..424: mol_type = other DNA

SEQ ID NO: 15917 - DNA, 650 bp, synthetic construct; identical to SEQ ID NO: 2243
  source 1..650: mol_type = other DNA

SEQ ID NO: 15918 - DNA, 384 bp, synthetic construct; identical to SEQ ID NO: 160
  source 1..384: mol_type = other DNA

SEQ ID NO: 15919 - DNA, 387 bp, synthetic construct; identical to SEQ ID NO: 1745
  source 1..387: mol_type = other DNA

SEQ ID NO: 15920 - DNA, 313 bp, synthetic construct
  source 1..313: mol_type = other DNA
tcttgctatatgtatacaaaattcatgatgtaaataaaacatttagtattgctattttaggaagccgtgtagatattaatctttatatcctaggaccacggaaagcagccctttattgtccaaggaaccatcattgcagcataacgattaagtagtcatatgcctaagaaatttacttactgaacaaaattttaatgcaaacccagatattttagccgtaacgacaccagattcaaatgataccataacccttcgtgatgatggaactagggtcaccgactcttttaccgcttgcgaaggcgatttacccccc

SEQ ID NO: 15921 - DNA, 578 bp, synthetic construct; identical to SEQ ID NO: 2145
  source 1..578: mol_type = other DNA

SEQ ID NO: 15922 - DNA, 548 bp, synthetic construct; identical to SEQ ID NO: 2112
  source 1..548: mol_type = other DNA

SEQ ID NO: 15923 - DNA, 331 bp, synthetic construct
  source 1..331: mol_type = other DNA
gtgttaaagagtcgttaagctgtatgctgttgttactcatttgttatttacccacgctgaggaagccgtcccattgtcccgaaaccaaaataaaaataataaaagaaataaaaaacaaaataaaaacagagaaaataacaaaaaacaaaataaaaatgagagaaaaaacaaaaatgaaaataaaaatgaagaaaataacagtggacaaaacaatgacgacgtaaactccgtcattactcaacgtactatcgcacagagtttgagatcacaaacttctaacaatactgccgtgtcaaataagaccgatcgcagttcatcacacgaagaatgg

SEQ ID NO: 15924 - DNA, 814 bp, synthetic construct; identical to SEQ ID NO: 225
  source 1..814: mol_type = other DNA

SEQ ID NO: 15925 - DNA, 331 bp, synthetic construct; identical to SEQ ID NO: 1583
  source 1..331: mol_type = other DNA

SEQ ID NO: 15926 - DNA, 325 bp, synthetic construct; identical to SEQ ID NO: 1567
  source 1..325: mol_type = other DNA

SEQ ID NO: 15927 - DNA, 467 bp, synthetic construct; identical to SEQ ID NO: 1956
  source 1..467: mol_type = other DNA

SEQ ID NO: 15928 - DNA, 299 bp, synthetic construct
  source 1..299: mol_type = other DNA
caacttcaattcaagatggagcccaaacgcaagacgttgggtctatactttcttctgacttatcggccttcgttctcacttctgagagtgacaaagttgtggttaccgctaaaacggcaatcaaatctggaatctctcttaagccagacgatgttttcacacggtgggcgttgatgggcacttctgtcccgtcttcgccggcagccagttcgtaccttacggctttcaatagtgcggggtatttttctttggcttcggtttcgactttcgtggcttcctcccaagggtttagggcggac

SEQ ID NO: 15929 - DNA, 273 bp, synthetic construct
  source 1..273: mol_type = other DNA
caaaatttttaatagaacacgatcaggaccagggtccgaccagttactttaaacagcaatcgttacgataaagaacgcaatcaacaagttacttgagaaagcaatcgttacgaaacaaagaacgagaactttaatattgaactctatatgtccgccagtactggggaggaatagagattgttcttgttcaaatcaagtaagttcaccaccatatataacatattttgtctcattaaaataatcttatgttatacacaggtgtgtggacttgat

SEQ ID NO: 15930 - DNA, 473 bp, synthetic construct
  source 1..473: mol_type = other DNA
tgcacactctatgtttgcgtctgagctatttgggcctttgtaggtaactcctattctggtctgaaaacgcccgggctcacgcatagatgtgcagtcccttttatggatcattcttatttatagcaattcaattttacaattcacaattgtcgttaagtctatcacgacattttacaactacccgctttaattagtaggctcttggttgtagaattgaacaggcctcttttaatgaaagaataaatcattcgttatttataggaagcgaagaattttctatagataatcgtagtgtcattcctatttaggatacggttggacacattaataactaatcttcttcccagcactttggtctataccatctacccctttgtgttgtgtaaatttatggtggtcaaaataacaacaacaactcagaatctgatggttcccagtctacctctccatcacagattcataacccagataaa

SEQ ID NO: 15931 - DNA, 377 bp, synthetic construct
  source 1..377: mol_type = other DNA
gctagtctctggactatccagaagctcttcgctcttctcagctagtctctggactatccagaagctcttcgctcttctcagctagtctctggactatccagaatttttctttgttgctcattgtcgtgctgcggtaatacagctttcccaattttagggaacttgagtcttaactcaagcgactccggttgattgtccgtgttaattttcccttggactctcggtcggccaccacgtttactttaagcaactccgcgtccccgatttgtcaagttaggggtttttgcttttctttttttgtttcacaaaccacttttgtttgttgtgtttttcttttgttgttgctgtacgttgtgttaccacccttggttgataca

SEQ ID NO: 15932 - DNA, 279 bp, synthetic construct
  source 1..279: mol_type = other DNA
tggcaaatcgtcctgggcacgactttaaaaggccaacccgtaagggggtaaactacctgtatagggcgggcttggtacacctgtgaacagaaagtacccgtgtaagacgtaaactgaaaagggccatccgattaatctctaggatcgcttgtttaagagattacaacaatgcacaaaaattcatccgagtcaggcagttctcaagaactaactgcccccgctcaaacagcggtgttcccgaccccaacgcttagcttcgcagaagtaggcgagaccgaa

SEQ ID NO: 15933 - DNA, 326 bp, synthetic construct; identical to SEQ ID NO: 1570
  source 1..326: mol_type = other DNA

SEQ ID NO: 15934 - DNA, 326 bp, synthetic construct
  source 1..326: mol_type = other DNA
ttgaaaagcaatctgcgaactttgttacgatttgttacttccaactagctattgggcttatccaatttctctcgtttccgcaatcactagcaccgggcttatccggatctctttttgttttctttgttacctctgttctgtgcgcgctttaattttcctttgcgttctttacagcagtcacaacgtttacattaagtaatctcgcttccccgatttgtcaagttaggggtttttgtttttcttttttcgtttcacagcaaacttttgctcttttccttttctttctgctcctctgctatatagttcttccccctttgatttctaac

SEQ ID NO: 15935 - DNA, 445 bp, synthetic construct; identical to SEQ ID NO: 1907
  source 1..445: mol_type = other DNA

SEQ ID NO: 15936 - DNA, 273 bp, synthetic construct
  source 1..273: mol_type = other DNA
aaataggaacacacagtgaagaagatgaagtgtttgaaaaatcaatgatcaaaaacaacccctggtatcatggtgaaaaggatttctacggtgaaattatcatcggaaaaactacacaaatgaacaaagtaatgcgtggaactaagtattcagcaacaccgctgaaagactgtttacctgcagaacctgattgtgtacctatcaacatgtacccacacatcaacaaagacggtgaattggttgaccctgttgccaaaaccttacgaaagaaaa

SEQ ID NO: 15937 - DNA, 753 bp, synthetic construct; identical to SEQ ID NO: 2379
  source 1..753: mol_type = other DNA

SEQ ID NO: 15938 - DNA, 452 bp, synthetic construct; identical to SEQ ID NO: 1921
  source 1..452: mol_type = other DNA

SEQ ID NO: 15939 - DNA, 466 bp, synthetic construct; identical to SEQ ID NO: 1954
  source 1..466: mol_type = other DNA

SEQ ID NO: 15940 - DNA, 357 bp, synthetic construct; identical to SEQ ID NO: 1665
  source 1..357: mol_type = other DNA

SEQ ID NO: 15941 - DNA, 292 bp, synthetic construct
  source 1..292: mol_type = other DNA
gcgctccaaacaattacatcctacacttctctttttgagattattttcaatttgaaaatcaaaccaacatttttgatcagcctttcgcttttgcgttatcagcttttcaaaaattttaaaacttaatattttattagcttttgctcatttaaaatattttaaactttttgttgaattagtatttattacgttttttaacaacttttaatcttatttaacaataacaactatcgctaaagcgattttgaattttttattttattattttatttgaatctcattactcttcgac

SEQ ID NO: 15942 - DNA, 302 bp, synthetic construct; identical to SEQ ID NO: 1489
  source 1..302: mol_type = other DNA

SEQ ID NO: 15943 - DNA, 326 bp, synthetic construct; identical to SEQ ID NO: 150
  source 1..326: mol_type = other DNA

SEQ ID NO: 15944 - DNA, 353 bp, synthetic construct
  source 1..353: mol_type = other DNA
ctcttccgatctcaggaagtttagttggcaacgcgcgaagagtgaaggtgaaagaaagagtgtacgaatttttcttttaaataactgttactttttaaattttatttattcattttatttattctttctgtaaaaaattttttgtttctaaatttaaaaaacaaattgtatataaaaatgttaaaaattttaatcatttatgtgttaatcgccatctgtgtaaaaatggctttgtaaatattcacttattgtttcattcctgcaagccattttgtccgatcatctgtaaaaatatcattgctagccattgggaagatgagcgccccaatgcgccaagggccactgccggatcg

SEQ ID NO: 15945 - DNA, 305 bp, synthetic construct; identical to SEQ ID NO: 1495
  source 1..305: mol_type = other DNA

SEQ ID NO: 15946 - DNA, 483 bp, synthetic construct; identical to SEQ ID NO: 1991
  source 1..483: mol_type = other DNA

SEQ ID NO: 15947 - DNA, 282 bp, synthetic construct
  source 1..282: mol_type = other DNA
aatgaattgagtttcaattttccacgtgtgaatcacactgctgatgctgatctgcctcatattgactatcgcgcctatcctgatctcgctactgagtcaaatggtgtcctgaattgccagtttttcactattcctggtttgttagaaaatttcttcatccagagtaaacgttttaaacgctggtactatcttggacctgctcaaggtgatggtgtgctctatgagaatgatttgcatgctagtggtgtttcttttaaggtctttctttctgagaattataac

SEQ ID NO: 15948 - DNA, 470 bp, synthetic construct; identical to SEQ ID NO: 1963
  source 1..470: mol_type = other DNA

SEQ ID NO: 15949 - DNA, 368 bp, synthetic construct
  source 1..368: mol_type = other DNA
aacgtctaaaagtattggctattaaagcccgattatatacacaaatttattaacggaactgaaattgaaacaacccgtatagcaagagaggtttttaaaaatttagattcaagcacttaagtgcattctttttgctatatagaccataccgataaaatacacccaatttcggggatttcccccattttgcaaagtatttatagctaaactaaaacagagtttcagatatctacttgacgctttgtagcagtggttatatttgcttatttttcgcccttaggccattttaaacatatttttatcgaagttcctaacttggaggtgtcacttaggaaaaattaacaactaaaaaaggtcacatacacaca

SEQ ID NO: 15950 - DNA, 250 bp, synthetic construct
  source 1..250: mol_type = other DNA
cgattgtttgccagcaacatgttcgtcccgccttcgggcatgtgattattgagagtctcttgtcggtggtgatctcctggctttgcttcttgcgtgacttaatcttgtgttccggccgtttttgctttgcacgcttgtctctttgtgcttgagcttgcggcttagtactacttttgctcccgccttttggcgggggcctcatcgctttaactcttgctgtgccacttttactcgattgtttgccagcaac

SEQ ID NO: 15951 - DNA, 263 bp, synthetic construct
  source 1..263: mol_type = other DNA
gactaaatatcttgatggacaatgtgggcttaactggatagttaatacaatacacggtagtatctgcttaacaatcatctatcactgtagtaatgcgggaacaaaatcaaacattatcaaataatattccattgaaccttaatttctaagaaaactagtaacaatgataataattattagttatacaatgaaaaaaataggtggttaacaccatatatagctttaagatcagtcactttctaataccttgttcatgtaaagaa

SEQ ID NO: 15952 - DNA, 299 bp, synthetic construct
  source 1..299: mol_type = other DNA
ctgcaccatgaagtactttggcacggccctcaaggtccaccgacctccagaaaagcattaataagccaatacacaacaacaaccaaaacactgaaagaaccaacaaaagacaccacaaacacaacaacaagcttgagacccacactgaaaaaaataggcggtgaacactgtcaattaagagaaacagttgtagttattcgaaacccaaccaactctccgacaaaaaatctctacccagcactatctaacaaaaccaacagtgatagtcaatttcttcgacaattgtgtttataacagat

SEQ ID NO: 15953 - DNA, 1000 bp, synthetic construct
  source 1..1000: mol_type = other DNA
accattaccattttaaaaactacactgttatcgtaaactaaatctgatttaaactacggttactgtgttttcttttgcttggtaatattttaatcctgtgtttttcttatttcaaagatttgtcatgggtttcttgtttataacttgtataattgtttatattgttgtttgcattacggttgtatgttgtgaagctataatctgtctttagacttgttattagtttcatcatatactgacgttttagttagatttaaactttagttaaacattttatttaatttaattttaattgtttcgtttgaaaattttataatatcatcataaaaatttattgttatgtttatgttgactagttcgttagtatttcttatcaccgttatttgtattacagtctcttgtttattatcaatatttacttcttaattataaatttgaatactggttttaattactgtttgttttaatcatgttttcattaatgtcattagtttgttcctgcggcatagttttaactgttgtttgtattgtttatgtaattgtagaagttatattttgtgcttgttaaattgctcattttattgattttagttttgtagtgtatattggtttcggttttgtttgttttgtttgggttacatacatttgtttatattatatcttaatcaattatattatattggattattggttttaagttagttagtaattaaagtttaattatacattggttattgggtcggtttttcattttaatcattattatcaattttatatattactctttgaattttctttatttagtgtaaggtgactgggttttgttacaaattttacagtttattcacttattatcatcaatgttgtttgttttgacttgtattactattatttggttcataactttaattcgtgtttttgattattaatcaatctgggtgtcatattaatctttgttttgttcttaattatattcttattgtttacatttgttatcacg

SEQ ID NO: 15954 - DNA, 1000 bp, synthetic construct
  source 1..1000: mol_type = other DNA
ttttcttcaattttgtttatcataatgttttctttggttctattagcttgtacttttgttgctgtcgttagtgctattagtatttgtgtcataggcttagagattatttggtgtatgtaaatagtttgttttaatcgtatatataatttaagtatttgtttaatagttttagtgatcttattatactagtatatattattcaattttattaatcattaaatttattattgtcaatatgttatttagtgctatatgtcttcttgctttgagttcagtcatttcaattgtgtttacttatttaacttttggtgattgtttattctaattttaaataaaattttaaatttgtattttaggttttaatattacgtattttggtcttgattgtattagtttaaattttgttttattatattttctttgttgattttgtaacatgtttcttgagtgtagtattattttttgtgtattgtgtgttgctactttagtatatgcttgtttgattgctgacgaattgtaaataaattctaaatttcttttattattttattttatttctttaggtgttggttgttataattcgatactagctattctatttttcataattatctattttattgacatgtttttgaatctagtattatattttctatattgtgtgttattacattggtgtatgcttgtttaatctgtaacgagttttaattttaatttttgtatatttgcttaattttgaaatttattagtatactatttaaggttataagggtttaatcaattttcttcattttgtttattttgatttattaggttttggttctgggttttgtttctttaattttattttaatatttccgattgttttattttttttaaattatttcacttgatatatcttaggttagttttctaaattatttattattaatcctattgaattttactataatatcattctttgttttatacgttaatattagttatcttaatatttaaa

SEQ ID NO: 15955 - DNA, 258 bp, synthetic construct
  source 1..258: mol_type = other DNA
ctgggctccaccgattaccgcaaagtaaaacaatttaaaaaaacaaacaaccttggcccggcaataacaaagctgggcctttttaataataataaagttaatgaccaccttaaagaccttggttgggccggcgaaggggtcattaactataaaacacacgccaaccaaccaacacaaaatacaaataaactatggaatagtcataaaaaatggctgagtaaagaccgtagaacattaaattgcatacctgcaaagcga

SEQ ID NO: 15956 - DNA, 434 bp, synthetic construct
  source 1..434: mol_type = other DNA
aagtttttgattatagatatttcgtgcgttggtgatacctttttttagtatctgttaccttattgtgatcttctgagtcttgaagtgcataagtttaacataccatcattgataccagatccaaagaattatcatttacaattcattgtactttttctctcctctcttttgagggagtcttagtcgaatcctcttttgaggggacaaccgctacgtaaggtttggtgtgagggcaggtgtaagcaattgagctaggcatcgaagcattttcctttcggctgagtgtaaagaaccactgtggaggttctacacgcttgtcttgtacaacgcaacgaaatattatcaaaactacgaaaaacagatattgtcaattaaaattttaaaaacgacataacattttttgtaataaaaaatttacatcaaataatttcaac

SEQ ID NO: 15957 - DNA, 296 bp, synthetic construct
  source 1..296: mol_type = other DNA
gaagcagatgagagacttagaccttgatcatgtgccatgactaaaccttataatcatttatcattttttattctttattaagtaatcacttgaaaattgtttgtttttgtatttttataattaattttgtaatctttatttgattagtattgggatcatgttaatgaagggtgaattgaaaagttaaaatatcttgtatttttgtagaatttgcatgctgttttaaaactgcaaagaaaatagaagaaaggaaaacttgaagaacacaataacaaattaaaatatcaagtcgatct

SEQ ID NO: 15958 - DNA, 280 bp, synthetic construct
  source 1..280: mol_type = other DNA
ggaaaaaccccatccgatcgtatttctacgaccgggtgattattcttttcaggtacaatacttacaagtttacaactacggtcatctttcggtgatcctccttttcaggaatttgtaaccttgttccacacgtacgtctacaatcatctctcggtgattctccttttcaggagttcgtgctatcaaccttgaattaataaagtgatatatcaccttataattccgcgcaatattacattttcatataatatttgcaaaagaattataatcttccattatc

SEQ ID NO: 15959 - DNA, 340 bp, synthetic construct; identical to SEQ ID NO: 1622
  source 1..340: mol_type = other DNA

SEQ ID NO: 15960 - DNA, 315 bp, synthetic construct; identical to SEQ ID NO: 1535
  source 1..315: mol_type = other DNA

SEQ ID NO: 15961 - DNA, 301 bp, synthetic construct; identical to SEQ ID NO: 1488
  source 1..301: mol_type = other DNA

SEQ ID NO: 15962 - DNA, 300 bp, synthetic construct; identical to SEQ ID NO: 1484
  source 1..300: mol_type = other DNA

SEQ ID NO: 15963 - DNA, 672 bp, synthetic construct; identical to SEQ ID NO: 2275
  source 1..672: mol_type = other DNA

SEQ ID NO: 15964 - DNA, 530 bp, synthetic construct; identical to SEQ ID NO: 2086
  source 1..530: mol_type = other DNA

SEQ ID NO: 15965 - DNA, 419 bp, synthetic construct; identical to SEQ ID NO: 1829
  source 1..419: mol_type = other DNA

SEQ ID NO: 15966 - DNA, 383 bp, synthetic construct; identical to SEQ ID NO: 1739
  source 1..383: mol_type = other DNA

SEQ ID NO: 15967 - DNA, 857 bp, synthetic construct
  source 1..857: mol_type = other DNA
ctttacattaagtaaagtttatataatagtatgggggtataggttatacaaccgtcttcggatttccccaaaggagtactaacccaactattatatatactttaattaaaatttaaatataatctattattatattaatgtaaattaaatttaattttagttcacgggatgaattgtagtagcgtgcaatcactccctattagtaacaaaatgctcttaaaaatataaaaatatcttaaaataaaaacgtagttattgaaattatgaagctataagaagtagtaatttattgaagcttatggaagtagtaataattttcataattaccccaaaaataatatttagtttttaaaagttatactagatccattgatttagaatagtaaagaaatttatgctcatttacttgcctcttgaatgtccaattacgtagtcgtaagaccgcttcaacgcgtattgaatcgaataagtgtggctcgcggtgcagttgttttatacaagtgcggtacacgggtgtattctgccgaaagattgaatatataacaaattgttatgagactaatgagtttatttatcttgagcctctaatctcaatgtatttagtatagattccacggtgtagttatggcatgctacttactgttatgtggaagtaaacagccctggtaattactgacggagcactaccagttaattcacgcgttatgttagataagctgcgaccctaacgggatctaaccggatcgtcggactagtcatccgagatgagaaaccggctaacttatgacataatttgcgatgaatagtgttgacgacaaaaattctttttatcttgacttggcttgaaatcattaatc

SEQ ID NO: 15968 - DNA, 414 bp, synthetic construct; identical to SEQ ID NO: 170
  source 1..414: mol_type = other DNA

SEQ ID NO: 15969 - DNA, 406 bp, synthetic construct; identical to SEQ ID NO: 1797
  source 1..406: mol_type = other DNA

SEQ ID NO: 15970 - DNA, 867 bp, synthetic construct; identical to SEQ ID NO: 2504
  source 1..867: mol_type = other DNA

SEQ ID NO: 15971 - DNA, 663 bp, synthetic construct; identical to SEQ ID NO: 2261
  source 1..663: mol_type = other DNA

SEQ ID NO: 15972 - DNA, 935 bp, synthetic construct; identical to SEQ ID NO: 2545
  source 1..935: mol_type = other DNA

SEQ ID NO: 15973 - DNA, 535 bp, synthetic construct; identical to SEQ ID NO: 186
  source 1..535: mol_type = other DNA

SEQ ID NO: 15974 - DNA, 508 bp, synthetic construct; identical to SEQ ID NO: 181
  source 1..508: mol_type = other DNA

SEQ ID NO: 15975 - DNA, 258 bp, synthetic construct
  source 1..258: mol_type = other DNA
ataatgaaagtatcaattatggatcgtgctacaagaaaatgcgttgtttgcaaagcttttaggaagcataaagacctcctgaagtttgttatgggtgccaataatcgatgcttgatttgctgcgcaaatttgcacagacgtatggctattcaaatgatccttgggggacacagagcaatctttatagatgagtccttggatcgcagatatagcatctagtcattgcgaataaatactagttaagatcagtattgcaag

SEQ ID NO: 15976 - DNA, 942 bp, synthetic construct; identical to SEQ ID NO: 2547
  source 1..942: mol_type = other DNA

SEQ ID NO: 15977 - DNA, 271 bp, synthetic construct
  source 1..271: mol_type = other DNA
gttggcgattcaaactcaaaaacccatagaaatgaagatgactccccttggcgaggcccataacgttaattggacggttaaaataacttatgatgagagggaatcagaagccacacattctaaagttagaaaagctcaagaagcagcagccaccggtattctaaacaacggggtcgatcttgaagccaaaattagacaactggaagagcaacttagaatgttaaaatcttagatctttgtaataaatatatttcaagcgaaaatttcaatc

SEQ ID NO: 15978 - DNA, 478 bp, synthetic construct; identical to SEQ ID NO: 1981
  source 1..478: mol_type = other DNA

SEQ ID NO: 15979 - DNA, 478 bp, synthetic construct
  source 1..478: mol_type = other DNA
gcaaaaaggcccctgggggggggttaatgagtactggaaaaagaagcgcgagataccacttcgctgattatgctgattctggtattaaggattagtagagtatcggaagtgccgaagggaataatgctggtccgttgtaaacaggatacttatgagacctcttaacagaaactttgagcaaacaacaaataaacgaacaaaaagagttatacattgaacttgaaaaatcaatgtcttttatttagactgatttatattggtctttataatcgtaaggaataattctcatctaatgatatcgatgtaaaatgtatcattctagctattcaattatattaattgagcttagcatctgattaaattattattataaaataatatttaatccccatctttgcaagatggaaactctcaataaatcaggagtataatagatttaaaccctcacactgaatcacgagtataaacagattcaaat

SEQ ID NO: 15980 - DNA, 465 bp, synthetic construct
  source 1..465: mol_type = other DNA
tgggggggggttaatgagtactggaaaaagaagcgcgagataccactttgctgattatgctgattctggtattaaggattagtagagtatcgaaagtgccgaagggaataatgctggtccgttgtaaacaggatacttatgagacctcttaacagaaactttgagcaaacaataaacagacgaacaaaaagagttatacattgaacttgaaaaatcaatgtcttttatttagattgatttatattaatctttataatcgtaaggaataattctcatctaatgatatcgatgtaaaatgtatcattttagctattcaattatattaattgagcttagcacctgattaaattattattataaaataatatttaatccccatctttgcaagatggaaactcttaataaatcaggagtataatggatttaaaccctcgtaccgaatcatgagtataaatagattcaaat

SEQ ID NO: 15981 - DNA, 502 bp, synthetic construct
  source 1..502: mol_type = other DNA
ccctgggcgggggttaatgagcactggaaataagaaacgcgagacaacgctttgctgattacgtataagtggagtatcggggagtaaaatcctgctgattacggttatatggagtatcggaagtggcaattgctataaactgggtccggagtaaacaggctgtttattaattttacgttcaaacctattgcaacaattccttacaacaacaaaaagttaaataggaaacttgaaaaattcctatcttaataaagtatattttgttttgttatcactacccgttttaactaataggctctgtaacattcataatagaaatatttcgtaatgataattctcatcaaaagatatcgatgtaaaatgtatctatagctattcaattatattaattgagcttagcaatcgttaaattattataatttaaataataatttaatctcaatctagcagattgaaaaacacaaaagcataagtgtataaatatgcaaacgatggaagaaga

SEQ ID NO: 15982 - DNA, 512 bp, synthetic construct
  source 1..512: mol_type = other DNA
cctgggggggggttagtatgtactggaacaagaaacgcgagacagcgctatgctgattacgtatttacggagtatcggatatgtcaatattgctgattacgtttatatggagtatcggtagtgacaattgttataaatcgggtccggagtaaacaggatatatattaatcaatttccaaacctattgcaaccaaacaaacagacgacaaacaaagttaaatattatactgcaaataatatcttttttgtaattcctttctatatcactacccgtatatgatataggttcattgtgtgctctgtatattaaagaattaacgatcttgtggttggtaatgaataattctcttcaaatgatatcgaagtaaaatgtatcaatagttaatcaattatattaattgagcttaacaatcgttttatatatctatattttgatatataaaaccttactcttgcagagtaacaacacttaaagaaacaggtgtataatggtttcaaaaacaacagacaca

SEQ ID NO: 15983 - DNA, 508 bp, synthetic construct; identical to SEQ ID NO: 2041
  source 1..508: mol_type = other DNA

SEQ ID NO: 15984 - DNA, 334 bp, synthetic construct; identical to SEQ ID NO: 1598
  source 1..334: mol_type = other DNA

SEQ ID NO: 15985 - DNA, 312 bp, synthetic construct; identical to SEQ ID NO: 1525
  source 1..312: mol_type = other DNA

SEQ ID NO: 15986 - DNA, 616 bp, synthetic construct; identical to SEQ ID NO: 2196
  source 1..616: mol_type = other DNA

SEQ ID NO: 15987 - DNA, 281 bp, synthetic construct
  source 1..281: mol_type = other DNA
ggccgtaggtgcggctgtatgttgtataagatgatcggagacgtgaaatcccctagtggatgtctggtttatcttcgtgacactaagactgctaggtgggcaaatccgggtagagtgactcgaactacttcagaatgttaatcttacatctccttttttgcccctgtgagagcagggttaccaatatctaaacctttggaaataggttataaattccacaaccaaacactagtgacaccccgtgtataaacgttgtgtcaacctcccgataaaggaaatat

SEQ ID NO: 15988 - DNA, 332 bp, synthetic construct; identical to SEQ ID NO: 1587
  source 1..332: mol_type = other DNA

SEQ ID NO: 15989 - DNA, 366 bp, synthetic construct
  source 1..366: mol_type = other DNA
cgaagggaataatgctggtccgttgtaaacaggatacttatgagacctcttaacagaaactttgagcaaacaataaacagacgaacaaaaagagttatacattgaacttgaaaaatcaatgtcttttatttagattgatttatattaatctttataatcgtaaggaataattctcatctaatgatatcgatgtaaaatgtatcattttagctattcaattatattaattgagcttagcatctgattaaattattattataaaataatatttaatccccatctttgcaagatggaaactctcaataaatcaggagtataatggatttaaaccctcacaccgaatcatgagtataaaaagattcaaac

SEQ ID NO: 15990 - DNA, 366 bp, synthetic construct
  source 1..366: mol_type = other DNA
cgaagggaataatgctggtccgttgtaaacaggatacttttgagacctcttaacagaaacttggagcaaacaataaacaaatgaacaaaaagagttatacattgaacttgaaaaatcaatgtcttttatttagattgatttatattaatctttataatcgtaaggaataattctcatctaatgatatcgatgtaaaatgtatcattttagctattcaattatattaattgagtttagcaactggttaaattattattataaaataatatttaatccccatcttcgcaagatggaaactcttaagaaatcaggagtataatggatttaaaccctcataccgaatcatgagtataaagagattcaaac

SEQ ID NO: 15991 - DNA, 366 bp, synthetic construct
  source 1..366: mol_type = other DNA
cgaagggaataatgctggtccgttgtaaacaggatacttatgagacctcttaacagaaactttgagcaaacaacaaataaacgaacaaaaagagttatacattgaacttgaaaaatcaatgtcttttatttagactgatttatattggtctttataatcgtaaggaataattctcatctaatgatatcgatgtaaaatgtatcattttagctattcaattatattaattgagcttagcatctgattaaattattattataaaataatatttaatccccatctttgcaagatggaaactcttaataaatcaggagtataatggatttaaaccctcacaccgaatcatgagtataaacagattcaaat

SEQ ID NO: 15992 - DNA, 366 bp, synthetic construct
  source 1..366: mol_type = other DNA
cgaagggaataatgctggtccgttgtaaacaggatacttatgagacctcttaacagaaactttgagcaaacaacaaataaacgaacaaaaagagttatacattgaacttgaaaaatcaatgtcttttatttagactggtttatattggtctttataatcgtaaggaataattctcatctaatgatatcgatgtaaaatgtatcattttagctattcaattatattaattgagcttagcatctgattaaattattattataaaataatatttaatctccatctttgcaagatggaaactcttaataaatcaggagtataatggatttaaaccctcataccgaatcatgagtataaacagattcaaac

SEQ ID NO: 15993 - DNA, 366 bp, synthetic construct
  source 1..366: mol_type = other DNA
cgaagggaataatgctggtccgttgtaaacaggatacttatgagacctcttaacagaaactttgagcaaacaataaacagacgaacaaaaagagttatacattgaacttgaaaaatcaatgtcttttatttagattgatttatattaatctttataatcgtaaggaataattctcatctaatgatatcgatgtaaaatgtatcattttagctattcaattatattaattgagcttagcatctgattaaattattattataaaataatatttaatccccatctttgcaagatggaaactcttaataaatcaggagtataatggatttaaaccctcacaccgaatcatgagtataaaaagattcaaat

SEQ ID NO: 15994 - DNA, 366 bp, synthetic construct
  source 1..366: mol_type = other DNA
cgaagggaataatgctggtccgttgtaaacaggatacttatgagacctcttaacagaaactttgagcaaacaataaacagacgaacaaaaagagttatacattgaacttgaaaaatcaatgtcttttatttagattgatttatattaatctttataatcgtaaggaataattctcatctaatgatatcgatgtaaaatgtatcattttagctattcaattatattaattgagcttagcatctgattaaattattattataaaataatatttaatccccgtctttgcaagatggaaactcttaataaatcaggagtataatggatttaaaccctcgtaccgaatcatgagtataaaaagattcaaat

SEQ ID NO: 15995 - DNA, 293 bp, synthetic construct
  source 1..293: mol_type = other DNA
cgaagggaataatgctggtccgttgtaaacaggatacttatgagacctcttaacagaaactttgagcgaacaacagataaacgaacaaaaagagttattctcatctaatgatatcgatgtaaaatgtatcattttagctattcaattatattaattgagtttagcatctgattaaattattattataaaataatatttaatcctcatctttgcaagatggaaactcttaataaatcaggagtataatggatttaaaccctcacatcgaatcatgagtataaacagattcaaat

SEQ ID NO: 15996 - DNA, 289 bp, synthetic construct
  source 1..289: mol_type = other DNA
ggcttagtttgtacgtgttctaataacgttcggcttagtttgtacgtgttctaataacgttcagtgtagtttggtagtatctaataactatctttcgtggttttcaaggttatccctgtaatcctcgattagtttgtcagtatctgataactgtctaagtttggtagtgtcctgataactatctttcgacgtttttaagaccagctcctagcttcgtcgattagttcgtgagcacctgatagctctcaaaatttttagttggttagaactataaaatctaacagggaaa

SEQ ID NO: 15997 - DNA, 251 bp, synthetic construct
  source 1..251: mol_type = other DNA
gactgtcgcccctacagagtaagaagacaccgtctttgtctagtgtaccagactgcttgaggaaggcttaaactcagcagaaccgtgccactagaacgacattaaacaacgataggttcgcgcagcctccggcagccccggttaaatgcgtggccgcttcaccactaaatggtaatctacatggtggagtaaatctcaaaattaccgctatctcaaattctaatgctactatttctactcttactcagcgt

SEQ ID NO: 15998 - DNA, 1000 bp, synthetic construct; identical to SEQ ID NO: 2623
  source 1..1000: mol_type = other DNA

SEQ ID NO: 15999 - DNA, 1000 bp, synthetic construct; identical to SEQ ID NO: 2624
  source 1..1000: mol_type = other DNA

SEQ ID NO: 16000 - DNA, 687 bp, synthetic construct; identical to SEQ ID NO: 2294
  source 1..687: mol_type = other DNA

SEQ ID NO: 16001 - DNA, 736 bp, synthetic construct; identical to SEQ ID NO: 2358
  source 1..736: mol_type = other DNA

SEQ ID NO: 16002 - DNA, 600 bp, synthetic construct; identical to SEQ ID NO: 195
  source 1..600: mol_type = other DNA

SEQ ID NO: 16003 - DNA, 913 bp, synthetic construct
  source 1..913: mol_type = other DNA
ccctaagtaataaattgaggattttgttttataaagtgttaagtatgcgtaatataattttggtgttggttataattttaataactgttcaagctaagaaaaatatggagcgacgttttgtatatgctacacttcaaaaacaattagaaatagctaggaatgttcgggatgttcagaatgcggatcgtatactttttgatcaatcattcgtgactaaaactatcagaatggtaaatcaataccgagttgaagttgacgctgagggtagagaagcaatactatcctacggtgctcaggtttcctttaatactgataagtatatgagtttcatggttgggcaagcggatgttactcgtgatggttctgttgtgaagttaggcaagaaatagttatagccgttaaatttataaaggaaaagaatataatattaaaatggtaaatttttcaagagtttttactacagcattgaataatatattgagtagacctattctactcattttaatgagtttttttataatagtagtgattgccgaattggaatatattgatgataaacctacagctttgcttgttaaaagtataaatgaaacaaaatttggaggaaagtttttaaaaaaaattgtagttaaaatagaagaaaatttgtatttcttaacattaacatatggtctattggtgttgggtatattcattactggtataaggtatcttttttttatacatatattagtagtcacagttctagcaggtatagatataactaaagaaacttttatcacagtagctattcttataataatagaatatttatatttcgttattaaaatttttatgattagagttgttttattagtagcatttttagcatcattttatatagaattggaatttaaaaccaaagagaggaaaa

SEQ ID NO: 16004 - DNA, 642 bp, synthetic construct; identical to SEQ ID NO: 2233
  source 1..642: mol_type = other DNA

SEQ ID NO: 16005 - DNA, 343 bp, synthetic construct; identical to SEQ ID NO: 1630
  source 1..343: mol_type = other DNA

SEQ ID NO: 16006 - DNA, 378 bp, synthetic construct; identical to SEQ ID NO: 1725
  source 1..378: mol_type = other DNA

SEQ ID NO: 16007 - DNA, 877 bp, synthetic construct; identical to SEQ ID NO: 2511
  source 1..877: mol_type = other DNA

SEQ ID NO: 16008 - DNA, 517 bp, synthetic construct
  source 1..517: mol_type = other DNA
taaaaatatacaactatttttataattgaagctaataacttcattgcaccttgccaactaaggaatttaattcctgttacttggatgcaacactcgaggttttacaacctcaatccgtaccttgccaacgcctgggcactaaaccccccacgatacttggacggaaaatcaacgcaaagttagtcgaaagacaaacactgcacgcaaagttagtcgaaagacaaacactgcacaacgcaaaagtagcccaaagctattattgcaaacttcaacaaagttagcgaaagcaaacactgttgattaaagagtaccttgccaacgcctgggcctacgtaccccacgatacctggactcaaatcctcacagaggtctccgagaggacgcaaaatcgagtcggctcatcagtgccgcaaaccccttgagaaaaggataaatcgaaacgaatataattatattcgtcagagagtgtggacgcaatctctggtacttcaaagtacaggtctaacaagccttaaat

SEQ ID NO: 16009 - DNA, 257 bp, synthetic construct
  source 1..257: mol_type = other DNA
attagttactaacaattgtttttcaaaattttaacttgactatggaaagaccacaacgttgtaatagttgtttcagagtcattgtgtacacagatgtttatgttagaagactagcttctgagtattgcgaacgttccataatagaccacttcgaaactgagtgtttacatttggttgatcaaggtgaagaagaagatctttattggaacggtgatcccatttttgttcttgatcctcgcgctttaggataatacatt

SEQ ID NO: 16010 - DNA, 754 bp, synthetic construct; identical to SEQ ID NO: 2380
  source 1..754: mol_type = other DNA

SEQ ID NO: 16011 - DNA, 272 bp, synthetic construct
  source 1..272: mol_type = other DNA
tttcgataccctcttgttttgcgaattgtaccctcttctaccgcgtgcgattgtagaaagcaacacctctccctagtacgtatcggaacgggaagtcaagctgctctgcgtataaaggtgctttgctttattttgtgcttttacccaaaaacccccctcccccccttcgtgggggcattgatgtgactggttatccggtcttttccagtgctcttcacaaactgactagggaccgccgtaaatcgctaccgttggccgcagccctagcagcc

SEQ ID NO: 16012 - DNA, 530 bp, synthetic construct; identical to SEQ ID NO: 2087
  source 1..530: mol_type = other DNA

SEQ ID NO: 16013 - DNA, 644 bp, synthetic construct; identical to SEQ ID NO: 2236
  source 1..644: mol_type = other DNA

SEQ ID NO: 16014 - DNA, 256 bp, synthetic construct
  source 1..256: mol_type = other DNA
tatgcacatgtgtactaaccatacacataccaccgatttcacgtcgatctttatccgtgatttcaccccctacgaactcgattgttctattgaaacacactgatcatcgcgacaccgtgtttctacacacatagatctcagttcacctcaccattacaccatacacttttacacactacatacattttacatacattacacacattacacatattacacaatttacactacaatacatacacaacacacctacacc

SEQ ID NO: 16015 - DNA, 706 bp, synthetic construct
  source 1..706: mol_type = other DNA
cgcatgagtattttatatactcatgtattacttgacaacaccctgggtttatgtgtttgacctttgctaaacacttagtgcgtaactttttattgcaccgggtttatctgtttgacctttgctaaacagttaatgcgtgatttttcattgcacagggtttatatgtttgacctttgctaaacatttagtgagacacttttgtttcaaacggtttgtatatttcacgtatgaaatattcaatggattcatccatttctcttttcttatgcacacttgcaaagaaatgaattcgggattggttgacgctatatgcgctagcctggtcttttagaacgacgagtagtaaatacgagatgatgtggcccactagctaacccattagtggacagaaccattgatcgtacgcagctcgaggaaactgtgtcaagggcaccttgcggttgttcgaaaaagatctttcaaagtctcgccctgaggggttgtgtgatggagaaagtaacaggaacgtactaggatatgagcggacccaatactgaattgtggttttttgtatgtgtgacggttattctcttcctttaaaaagagatactttggtgttctgtataaacacctataatggtgaataattaactcacctttactcgcgactcgagtataactagtcattttatggacagtacaccaaataatatataaaccttttacc

SEQ ID NO: 16016 - DNA, 284 bp, synthetic construct
  source 1..284: mol_type = other DNA
ggataccgggggtttcgataccctcttgttttgcgaattgtaccctcttctaccgcgtgcgattgtagaaagcaacacctctccctagtacgtatcggaacgggaagtcaagctgctctgcgtataaaggtgctttgctttattttgtgcttttacccaaaaacccccctcccccccttcgtgggggcattgatgtgactggttatccggtcttctctagtgctcttcacaaactgactagggaccgccgtaaatcgctaccgttggccgcagccctagcagcc

SEQ ID NO: 16017 - DNA, 1000 bp, synthetic construct; identical to SEQ ID NO: 2625
  source 1..1000: mol_type = other DNA

SEQ ID NO: 16018 - DNA, 848 bp, synthetic construct; identical to SEQ ID NO: 2479
  source 1..848: mol_type = other DNA

SEQ ID NO: 16019 - DNA, 710 bp, synthetic construct
  source 1..710: mol_type = other DNA
gcgtgcattatatatgcacgcacacatttgtccgtcggtaataagcaaccgtcagactagcgataatctgagaacctcttagctcgttcgaggcgatcgtaatcgagttgatttggtgggtgaaagaataaccctatttgattatcttggattggagaggataatcatcttagagactccaaacatagttgtatcttatgatacgtggttaatagttattgagttcttagaaaaactctctcttttctttaatttagtgtttattatatttattcgttaattaaataattataaaagtcataggaatgtataattatattaatatatgtgttattttgtataaaaataaaaaccaaaaatattgtgaatgttttctggcgtgtcaatgcccagtataaagaaaagttgacacttaataagattcatcttgtaacaacctgttgaaagcttaccttccgccaagtgtagtgtgtaccggttactggaacaacaaggggtgacccttgcctatgaccgcggatagcgaactaggaattacaagtttttaaaataggacatcaagaagaagattattattaaaagagacaactacaactctataaaagcgtcggctggaaggcgtgagttcccagcgtattctaatctattggggatacaagaagcaatagacgttcgactacggagtgtcgttttaccaccccccaacgatc

SEQ ID NO: 16020 - DNA, 675 bp, synthetic construct; identical to SEQ ID NO: 2281
  source 1..675: mol_type = other DNA

SEQ ID NO: 16021 - DNA, 538 bp, synthetic construct; identical to SEQ ID NO: 2098
  source 1..538: mol_type = other DNA

SEQ ID NO: 16022 - DNA, 340 bp, synthetic construct; identical to SEQ ID NO: 1623
  source 1..340: mol_type = other DNA

SEQ ID NO: 16023 - DNA, 490 bp, synthetic construct; identical to SEQ ID NO: 2007
  source 1..490: mol_type = other DNA

SEQ ID NO: 16024 - DNA, 641 bp, synthetic construct; identical to SEQ ID NO: 2231
  source 1..641: mol_type = other DNA

SEQ ID NO: 16025 - DNA, 1000 bp, synthetic construct; identical to SEQ ID NO: 2626
  source 1..1000: mol_type = other DNA

SEQ ID NO: 16026 - DNA, 302 bp, synthetic construct; identical to SEQ ID NO: 1490
  source 1..302: mol_type = other DNA

SEQ ID NO: 16027 - DNA, 692 bp, synthetic construct; identical to SEQ ID NO: 2301
  source 1..692: mol_type = other DNA

SEQ ID NO: 16028 - DNA, 707 bp, synthetic construct
  source 1..707: mol_type = other DNA
cccgcgtgtcgaagctgggcccatcacgcttgcgaaagcagccatcttcgcagccactgtcggcgccgctttgaccacgataatagccatggacgccgatgtttttgatttactacaacccatgcagagcatgctctccagcattaacaacgttatcaaagacactgcctacggcaacgtcataaccaatgacacctatgacgctgtcgtcgatatcgccatagacactgagagtataaagcgatcttcagctgacactgctacacgcatctctgctgtcgtgaccaacacccagaatacggtcgctaaactcactgctgttgaagctctactggcgactatcgaagcgaacgtcgcgacgatgaccggcgtacaagctttgatgcacacccaaaacgctaatctcatggctatgcttactactaagttagacgccatcttgagagctatagaagccgttaatgcgcccggctctttcctgaagcgcatgaatgccgcggcaaacggcttgagtgcgacgtctctcgtttccctcgattttactggggatgtttgtgaatacgaccccctaggcttcggcccgattgagtgcgagggaacagaaatactgaagaccgatatgcagggcataaaattcaccttcgtttgatttagaataaataatcacttaataaaattagattctaaatcaattgaaagcattcaac

SEQ ID NO: 16029 - DNA, 1000 bp, synthetic construct; identical to SEQ ID NO: 265
  source 1..1000: mol_type = other DNA

SEQ ID NO: 16030 - DNA, 266 bp, synthetic construct
  source 1..266: mol_type = other DNA
gttgtagggatacattctaccgacgcgtcctttcctttgtaaattcacagcttgatgatgtatgtcatcaagttcttgttgccattctttcgaatactcattataaaaatgagcatttatctgtgaatttactcaatcatttgaaacaccagttaatccctactagctggtcttcacttgatgtttcatgtatatatgttaatttccatttacttacaagtattcattcgcttaatgatactcctacatcatcttttactgcttac

SEQ ID NO: 16031 - DNA, 471 bp, synthetic construct; identical to SEQ ID NO: 1964
  source 1..471: mol_type = other DNA

SEQ ID NO: 16032 - DNA, 260 bp, synthetic construct
  source 1..260: mol_type = other DNA
agtacgtattgttgaacaaacaatacatcccctataccaagcgcactctttaccccctagaaatagggatccacggaaagagcctatagcaatataggagccaacgctgcacaagcgaatagctgcaaaagctgcccgctgcaaagcgacgagctgaataagctacccgctgtaccaagcgaagagctgtataagctacccgctgcacaagcgaagagctgcaaagctttacgctgcacaagcgtcattcctgaacaagg

SEQ ID NO: 16033 - DNA, 527 bp, synthetic construct
  source 1..527: mol_type = other DNA
ccaagttcgcaaatagaccaaaacgggtggttaaccatgtccaccgtcctcttagagggaacgaacttggaatcacgtactaccaagttcgcaaatagaccaaaacgggtggttaaccatgtccaccgtcctcattgagggaacacctagggagtctcggctgcaaactgccggacacttcagaccaccagactagaaagtagtaccttggaaaaggggtcattgatcggtattccgttccgaacacggatatctttgtattaactctcctaaagcagactgtggagagctaactcacctcacattgtttgacgctgtgtgttgtggggatatgataacgagagatgataggacccatccatcctatttgtgagaaaactaagcctgactttcttcggaagggacgcccacgcggatgggataaaaggttgaagatcaaactgatatgatgtgtcgagagaaagattttagaaaagtggtcagaagtgagaccataaaaatagactataaacaccccaacaatcaag

SEQ ID NO: 16034 - DNA, 410 bp, synthetic construct; identical to SEQ ID NO: 1801
  source 1..410: mol_type = other DNA

SEQ ID NO: 16035 - DNA, 418 bp, synthetic construct
  source 1..418: mol_type = other DNA
tggttaaccatgtccaccgtcctcattgagggaacacctagggagtctcggctgcaaactgccggacacttcagaccaccagactagaaagtagtaccttggaaaaggggtcattgatcggtattccgttccgaacacggatatctttgtattaactctcctaaagcagactgtggagagctaactcacctcacattgtttgacgctgtgtgttgtggggatatgataacgagagatgataggacccatccatcctatttgtgagaaaactaagcctgactttcttcggaagggacgcccacgcggatgggataaaaggttgaagatcaaactgatatgatgtgtcgagagaaagattttagaaaagtggtcagaagtgagaccataaaaatagactataaacaccccaacaatcaag

SEQ ID NO: 16036 - DNA, 252 bp, synthetic construct
  source 1..252: mol_type = other DNA
gtcatttgaccgtgtgtgggtttccctctaccttgactaacttgttcggaaaacagaggtaaatattttactataactataacaaaacactactatcctagcagagggtaaactggtcaaaacccggccacccgcaatcctaaaagcggccccgggctaaaaaccagccatgctggataaaccacacggagggatataggcgtgtaaatctctagtgcccaattctacccgaaaggcaccgagagatacacc

SEQ ID NO: 16037 - DNA, 769 bp, synthetic construct; identical to SEQ ID NO: 2396
  source 1..769: mol_type = other DNA

SEQ ID NO: 16038 - DNA, 810 bp, synthetic construct
  source 1..810: mol_type = other DNA
gatatgcaagttttaacttgcatatcatctgacagactcactgtataactgaagtcctgattagggaatgtactaatcacagactcactgtataactgaaatcctggttagggagctgtactaactcgttgccaactcgtaaagttgaagacagcctcactgtataactgaaatcctggttagggagctgtactaactcgttgccaactcgtaaagttgaagacagcctcactgtataactgaaatcctggttagggagtgtactaactcgccttattccgtagcgttgtgtcggataactttcctcacttattttacttctaagttttaatacttactatcaaatttgtgtgttttaaaatgttatatatatttatatttcatttcttttaacttgatctcccaaggcttgccttgtgttatcaagctattgtgtatctaccactatcattacattataatcgcttttagccctatagattataatgtaaaatctttcttttcaaatgtgctatttgtcccttgcgtgtatggtactaatgtactccccgcctgggttatccaattcttagaactcaacactctaagaaggcatgtttcaagtcctgcgtaagaccatatctcttttaggtgtctagcgcgtttttatgtattgtgtgaagaactaagcaaaggaaatacttctgtataaatacctccttagttcggcttgatccggaatcagcacccggcgcataagaagtatcaacgtatgcagccctatgtgagacccacgtggattcaatatggctataaggacgaccatacagt

SEQ ID NO: 16039 - DNA, 757 bp, synthetic construct; identical to SEQ ID NO: 2384
  source 1..757: mol_type = other DNA

SEQ ID NO: 16040 - DNA, 257 bp, synthetic construct
  source 1..257: mol_type = other DNA
ttatacgattgatcatttgatccgaagttgattcgagtcatttgtgtttcgtgtagtgatcttttgaagcgccagaagaattttcagagcactcatacgcaatacccttgtctgttgaagcaggatttgcccgcgtttttgagtactaggtattccgtagcattttcgaattctacaaacttacgacgatttatttcgttcaacgtgcgcagcgttgattaaagtcaagcaccttgttaaggtaaatttgacgcgaa

SEQ ID NO: 16041 - DNA, 292 bp, synthetic construct
  source 1..292: mol_type = other DNA
atttaaatataatttttcaaactcataatcaaaatgcatatcaaaatttatctatgtctatttttaatgtcacttgttaatttcattccgttgcactcccgatcgttggaaaatggtcatcttagggttaacgttacttattctccgttgtcctttggttctactaaatttcccatcgatcaatacactcctcctccgtttgtagttgtcaatgatggttcggtaattgatcgttctcgtcgccgatttccgaattaagattaaaatttaatttttcaaatttataatcaaa

SEQ ID NO: 16042 - DNA, 458 bp, synthetic construct; identical to SEQ ID NO: 1936
  source 1..458: mol_type = other DNA

SEQ ID NO: 16043 - DNA, 292 bp, synthetic construct
  source 1..292: mol_type = other DNA
atttaaatataatttttcaaactcataaccaaaatgcatatcaaaatttatctatgtctatttttaatgtcacttgttaatttcattccgttgcactcccgatcgttggaaaatggtcatcttagggttaacgttacttattctccgttgtcctttggttccactaaatttcccatcgatcaatacactcctcctccgtttgtagttgtcaatgatggttcggtaattgatcgttctcgtcgccgatttccgaattaagattaaaatttaatttttcaaatttataatcaaa

SEQ ID NO: 16044 - DNA, 458 bp, synthetic construct
  source 1..458: mol_type = other DNA
cttccggttgccgacgcttccctcagttataaagattatcttaacgaaaaaatttttctcgctcctcctcaacctcctataagaaatcaaacctcggtctctccgaccttaagtactactactgccgttagtgtcccgactacaacacccgagatcgtcactacgtctcgtccgataccatctactactagaaagtcgagaccagtccctccatcttccattcctccatacatcgattgcggatgtctcgaaccacatcagtgcggtcctcctttaggcctccctcagaatgaccctcgtatgtctcgtgattaccctagggtttattcacctaactgcaattggtctgatggaaaacctcaggacacctatataagacctcctgacactcgcaatcgtcatcaaaatcaacgatcccgcaatatttaatttgaatataatttatcaattctataaaa

SEQ ID NO: 16045 - DNA, 649 bp, synthetic construct; identical to SEQ ID NO: 2242
  source 1..649: mol_type = other DNA

SEQ ID NO: 16046 - DNA, 1000 bp, synthetic construct
  source 1..1000: mol_type = other DNA
tcctcgctagaatgaaatttgctttcgtttgttttgagcgtttgtacctaattctctagtttaaatatcacaaaaaccccaccccttttagttttaagttaggttaagtagaaattttaaatttcgatgtaaatgtagattttccttatttgaatttaataataaatgtcgtaaatatatgttcttttgaattaatatatatttatgtagatattttaaattatagtttagactaaattaaaaccttacgttcgtagggtagaagaatattaaaagtactggagcagcgcctgatggtttaatatttttctaatgaatcatgcttcttatagtagccggtaaaatgcgttaaatagatcgtgtaatatggtgaaagtcttatttaagatactattttgttggaaagtaagattaagaggagcattgcaggcaaccacaagaagttaattatcattataaaggtttaatgatattagcgccatcgcctggttagatatggtatactggcaaggatagctgaacctataccttttaagccatgtcgaactgctagatgatcttggagctgttgtaatctttgttcatttctggttttgttagtacatataggtgtctaaaatttgttatttctgaattgtataagtacgtcaaagcctattgtaaaggtgcgggttataacaccatcactcttagtccccattttgggtatggacagtgaaaaaagtcttatatgaatttacacgcttcttctggatgatgtttctttagcatcttaaggaagacatgagtcacggcaagccgttccctgacgatgattgcacgtagcgacatgtgacgagctatttgaagccccattgacctggggaagcgcggtagctgtatcgcgaatgggtcagggtgaaaatccctagctgttatttccaactgtgattcatacagttaaaaacaggcacatcttttaaatttttgattatattgattttctttgaatttatccatt

SEQ ID NO: 16047 - DNA, 306 bp, synthetic construct; identical to SEQ ID NO: 1500
  source 1..306: mol_type = other DNA

SEQ ID NO: 16048 - DNA, 353 bp, synthetic construct; identical to SEQ ID NO: 1653
  source 1..353: mol_type = other DNA

SEQ ID NO: 16049 - DNA, 1000 bp, synthetic construct; identical to SEQ ID NO: 2627
  source 1..1000: mol_type = other DNA

SEQ ID NO: 16050 - DNA, 416 bp, synthetic construct; identical to SEQ ID NO: 1822
  source 1..416: mol_type = other DNA

SEQ ID NO: 16051 - DNA, 570 bp, synthetic construct
  source 1..570: mol_type = other DNA
gtacatagaacttacagttttatctcactgacgacagctcctaacgtatgctcgtaacgccttgctgcggaaacaatgcatgtgctgtggtttgcgagtggtcaagctagcgatggaaagatatttatgtgaatgccgggcattcgcattcatttctcattgacgacagctcctatcgtacgctcctaacgccttgctgcggaaacaatgcatgtgctgtggtgtgcgtgtggtcaagctagcgatgagaataaatattctgactatttttagtcaatacccctgaactctacatactggatacccatctaaactaactacgctccagacgactaaatttagtaaggcttatgtagagtggtttgttatttaacgtgcgtgtaccctaggcagccccaaaaacacgcgtcaggagacagtctcagtcactttgggcagagttggcagccacgcttgcgtggtgagacttatctattgcctgctatttctaatgactctaataatgatagttcttcttcttctgctggtcttctacctgagagttcagttacgaattctgagggtaggaca

SEQ ID NO: 16052 - DNA, 290 bp, synthetic construct
  source 1..290: mol_type = other DNA
gtggtccccgtttggtggaacgtaaaaccagcccgggtgcgaatcccgctaaaagcgccccattgacctcgacactcagtgggttctttctcttcatgtaagtttctgcctcagttttgcaaaactgctgcggggctaatgttataaatgtgtgcgacaaagtagctttgaataactctcgctcacagaggcgcttaccggagttcgcctcccggataacagtcccccccgcagtaagatgctcttctactgcttaatttcaaactgtgacacatgactctctatatacc

SEQ ID NO: 16053 - DNA, 694 bp, synthetic construct
  source 1..694: mol_type = other DNA
cttttgagtgattaacccgcctttataaagttttgccgattaaatactcatgttcttgtgtgtttattttggacgtggaaactagtttcaaaaagacattgaagagcgcaataacgtcgaacttggaaaaagtttgtatacccgaaagctctgggaaccgtcgttgacgggaaattgagaccgttgtgtatgctttgtgatcttcaccgtctcacccacctaatcggacgcttattgtccttggatttgagcctttgaaaaaggaagcccgcgacttatagaggtacattagtgcgttgtctgccaaaacaggtacgtacggattacaccttaaggcccctagagttgttcaatttgcccccttaatcggatccggcgaacactctatttatttaaacccacccatttacagttaaagctttacaacttaaaagtaagccggacggaaacgttaatccgtaattattttatttattttacattattatatagattatcactatagatatatttagatatttaagaccagtatttagttgccttaagcaacttttatacttattttttgtaatactaaagtttttaggtgcaaaggtagctcttctagctatcgcgctcctttttattttaggaatattatcccctaggaattatttgctgattacattgtgcttgtcattatataacgtgtacg

SEQ ID NO: 16054 - DNA, 390 bp, synthetic construct
  source 1..390: mol_type = other DNA
gtttttacttagcatcaagcttcctcccaaactgtattcatacattggtattaaaacgtatttatacgtaattttgcaaacggttcaccggttattattggcgatttatcgttctcgtatattttattttcatatattcattttattcctcatttttaaaatattaatcattatactaacaatttcattaaatcactatatatcactaaaaatttttataattattatattaacaatttcattaatattattattaattatattatataactacaaatttgtggttttaaattactatattaattcgcacaattctattaattttcgaacatattcagtatacatatattctacctttttaatcttcacctttcatctaataacctaaaa

SEQ ID NO: 16055 - DNA, 420 bp, synthetic construct; identical to SEQ ID NO: 1831
  source 1..420: mol_type = other DNA

SEQ ID NO: 16056 - DNA, 494 bp, synthetic construct
  source 1..494: mol_type = other DNA
attttcttagaaaagaacaaaaatttcttttgttcaatgtaagaatatatgtctggggaagcaccaagcgaactaactcggttactagtggggtgttctttgctttgaataatattcaggcctcatgttagttatatatatatataacaatgtgatgttgggcatatattctttctattgttaaatatatttattttgacgttttaaatgacgaaatatttaaattattttatttatttattttgaatttctttgtcactttctttattctttaaagaaatgtgattctaaccgtcctgaattttctttaagatcgcagtacctgaattgggagccgtacttaactaaaattcttggtagttgccttaactgtgttagcagtgtttaagggtgaaaacattcaactttacttatgtagtttaacggtaaaatgtctatataggtaagggtttctgtgtcggagcagccttattcaagggtttcagggttttatt

SEQ ID NO: 16057 - DNA, 829 bp, synthetic construct; identical to SEQ ID NO: 2462
  source 1..829: mol_type = other DNA

SEQ ID NO: 16058 - DNA, 810 bp, synthetic construct; identical to SEQ ID NO: 2445
  source 1..810: mol_type = other DNA

SEQ ID NO: 16059 - DNA, 809 bp, synthetic construct
  source 1..809: mol_type = other DNA
catggggacgatatccccatgcgatcggcctgtgttaatcagactctgttatacctagtgtcttatttggcttccagtaagacacaatttggtatcagacaataattaacaaaacaaattaattttaaggtataattttaagtaacttagttcaaagggctattaaacccctgattagtaacaaaattataaaatactcggttctgaccggggtaattcttttaacaataatatatgataattttatcgaagataacagttagcacctaccagatggcgctgttgcgtagagtataacccccaactctacttcccaactttgataatttttaattatatttttggagaattatgtataaaaattgaggaaacccctcaggtttaactacgacggcgaattaagatgagcgaaagtaaagtgcttaccaaggaggcgtaataatagggacccctctaaccagcaaacactggacgttacttaaggtaagaattacattttattagtagccggcttatagtaggcgtttaaggttaagcgacaaccctagtggtttacagtattctagcctatgtgctaatcctcgacggcagtagatcgctggcgatcgggaatatacctggatgtgaattaagtaaatctataggtatggatactcttctgaccctccagttttacactgtactaatcagctgaggaagagcagattatttcctttttttttcttcttatggtgacaattttatgatttatttataaagttgttatttaatttgaattttattgtattgacttatatattttatttaaa

SEQ ID NO: 16060 - DNA, 819 bp, synthetic construct
  source 1..819: mol_type = other DNA
gtgaggttgagagcttttgctctcaacctcaccagttttcccaagatgtcttgatatcacactcgactaacatcgaggttcttacaccaaacaatgttatcagaagcattggagaacagtgatagttctaatcttcggcaccgatgtgctaccaacggcggttctgtacgccacggagttggtactagcatcaaaataaatttaccttgttattttaatgagtactttgtacttagtacgattgttatttattattatggtttagataattttattatttcttatctttatgtatatatattgagcagtattattattttaattgtaaatattagttataaatgtaaatattagcttaattgtataataaccctgaaatatcttaaaggatttgcctgtccccccattgcaagttatacacttagtagacttgtgaaaggtccgtccctgtattatatggatagtggggtctctgcagtcccacttgaagtatatgtcagacggctgccttggcaagggcgacgtgaaaaccgatgaaacttaacgcttatcccgatgaggcttcaattcgattcaacccctctggagttatcatgtacgttgaatcactatggatggtgaatgctgaccggagtagaccgttatgtagaagttgagtagcgacccccaagtgtagtacgcacctaaactgtaggcgtttctagtccctttttgatatccctaatgtcccgattgcttttatgatcaaatggcccggaatttatcggagcgtgagaacctcctgtatcttaagtctgtctcaacccactgctttatgaa

SEQ ID NO: 16061 - DNA, 397 bp, synthetic construct; identical to SEQ ID NO: 1771
  source 1..397: mol_type = other DNA

SEQ ID NO: 16062 - DNA, 311 bp, synthetic construct; identical to SEQ ID NO: 1520
  source 1..311: mol_type = other DNA

SEQ ID NO: 16063 - DNA, 973 bp, synthetic construct; identical to SEQ ID NO: 2561
  source 1..973: mol_type = other DNA

SEQ ID NO: 16064 - DNA, 250 bp, synthetic construct
  source 1..250: mol_type = other DNA
tgattggcgccacgacctgccgtatgtcattaaaagacgggacctgacctgccgtatgtctttaaaagacgggcccagtacagtctgggtgtttagattaaacaaaactgcgctgtgtgtttggttaccaggagtcacgttgaacagtggcttcctaggcttcgcatggtggttctacacgttgacgagagtaggcaattttgtcgatgtttgcatatttatatattttattttatagcctagtacaaca

SEQ ID NO: 16065 - DNA, 471 bp, synthetic construct
  source 1..471: mol_type = other DNA
gcgatatacatgattttcttgcttatttcttgggccttgttataataaatagtgtgtgctattttatataacaagttctggcgtttgcttatcgcatcaaataagcttcttcttgtagacccgtctagtatagtctttaaactgctagatccggatttttgcagatccacaactattgcaccctgattgtttgggttaaaacaatatctagtttggagtaatccaatttaatctccggttccaaaccgctaacaaaagaagaagcttgcttctagtgcacaagaactaattgcacttccgagttttaacactctgacctactttagctcaagagtaaaattgagccactgcgttctagctctcgaaccaaattgagcaactgcgttctagctctcgaaccaaattgagcacatattattttagtttaatatttatccatattatatttatttatttatttatattattagt

SEQ ID NO: 16066 - DNA, 572 bp, synthetic construct; identical to SEQ ID NO: 2138
  source 1..572: mol_type = other DNA

SEQ ID NO: 16067 - DNA, 1000 bp, synthetic construct; identical to SEQ ID NO: 2628
  source 1..1000: mol_type = other DNA

SEQ ID NO: 16068 - DNA, 252 bp, synthetic construct
  source 1..252: mol_type = other DNA
taagtcgcagtataatagccatctacaggtgtttcgagtagggctaagaggcttttgaaaaccctcgcatctgttattttgttttgtaatataagttttattatgatataatctattgggatttttccctctcctgaccggtcctttgtaaagcaactcgcggttgggttgtattgtatctttagtcatgctagccatgttggcctgcacgttcgcagagtcggacattttctagtctgtagtaaagatata

SEQ ID NO: 16069 - DNA, 655 bp, synthetic construct; identical to SEQ ID NO: 202
  source 1..655: mol_type = other DNA

SEQ ID NO: 16070 - DNA, 983 bp, synthetic construct; identical to SEQ ID NO: 2565
  source 1..983: mol_type = other DNA

SEQ ID NO: 16071 - DNA, 1000 bp, synthetic construct; identical to SEQ ID NO: 2629
  source 1..1000: mol_type = other DNA

SEQ ID NO: 16072 - DNA, 877 bp, synthetic construct; identical to SEQ ID NO: 2512
  source 1..877: mol_type = other DNA

SEQ ID NO: 16073 - DNA, 566 bp, synthetic construct; identical to SEQ ID NO: 2134
  source 1..566: mol_type = other DNA

SEQ ID NO: 16074 - DNA, 252 bp, synthetic construct
  source 1..252: mol_type = other DNA
agaggctaaacaggggctattcgctataaacgcgactcctaaaataaaagtaaaaaagatgtatttttaatatacatacgtagttagtaaaaacaaaggggctattcgctataaacgcgactcctaaaataaataaataaaaaagatgtatttttaatatacatacgtagttagtaaaaacaaaggggctattcgctataaacgcgactcctaaaataaataaatataacaagtctattacacgactctaaa

SEQ ID NO: 16075 - DNA, 393 bp, synthetic construct; identical to SEQ ID NO: 1762
  source 1..393: mol_type = other DNA

SEQ ID NO: 16076 - DNA, 974 bp, synthetic construct
  source 1..974: mol_type = other DNA
acataaagtgactcttatgaactatttgagtcacgtattggaatttatttgatgaagatacatcatacacaagactttgagcttgatgtatatgtatgctttgttggattgatttctttacaactttatgcactattagtactacccttcaacactacataataggtagatgaatgttggagtactagaatcacaacgacggtggtgaatccgtgtctcattttcaagttatttaaagaaaatgaggatcaggtgctacgttttataacgtagcacttttatttgtacatatttagtgtgatatcttgtagccattatggcgaagatacgagttgtagattatttatttgtcagcaaccttggtggcttttcccaaaaagtgggaatgactttaatcttagcatgaaataaaaaatataaaattataaaactattacaaaaatatttacatgttatttacataaattaatcttcatctgaaaaatttatgctaagagattggttttgattgatattatagcccagaataaaacatctaacatacctggcacttttcgctttgcgattggtataagacccagacagagtgtgtctaatttgttatttgtgtataaaaggagctccagcgcctgagtaatggctggaaggcacttctggacttgaagtgtttgctatagatcgttgaaatcagatcaaaaatttcgtttttgttgaagcgaaattctggataagtcccagtttagttttactcaacactcagcgcggggagctacccgcgtgacgccgagggtcggacaggaaccctctccccatagctttatcaattaaagctccctacgtattcaattctgaatagctgtactttcttttcttcttttcaatgcaatttattatattattttctttcaccgacttgataaaacattatatagatctttaattttagatctttttacgatattacgaattttaaa

SEQ ID NO: 16077 - DNA, 716 bp, synthetic construct; identical to SEQ ID NO: 2329
  source 1..716: mol_type = other DNA

SEQ ID NO: 16078 - DNA, 258 bp, synthetic construct
  source 1..258: mol_type = other DNA
gaacaaaagcataaagccccataattcatcaatactactttttgcgtgtgattacaccgttccaagtgtttgatgaattccggaattcgctgattattgcgtgtgattacaccgttctaatctcgtttttcggctcgctttcgccaacgccttatttcaactagcttgtttcaactagattgatcttactcgccaacgctcacttaacactgtgtgattacaccattgttaatcctactcgccatcgttgcagtcaag

SEQ ID NO: 16079 - DNA, 332 bp, synthetic construct; identical to SEQ ID NO: 1588
  source 1..332: mol_type = other DNA

SEQ ID NO: 16080 - DNA, 969 bp, synthetic construct; identical to SEQ ID NO: 2557
  source 1..969: mol_type = other DNA

SEQ ID NO: 16081 - DNA, 976 bp, synthetic construct
  source 1..976: mol_type = other DNA
gtcgggttttaatcccgacgcgcgtcttttgacctcaatgtaagtagcttatttacttagcaagagtattgtttgaagtaataagttcgattgttgcataggttttaagtaaagtttctgtaagtggctagtaaagaatgaaatgtccaggaatctagtgttaagttattttaaggttataatttactatcacctttaatttcatgttcatactagagttgctagttagcattgctagcttttgtaaacctttgttcatttatattttgagtcactcggttgtaggagatgagaacctacgactgtttcactttccaggatgtgcttttgttgcctgaagattttagtgtcagagccacgagccagtccagacaagtgtagtacgacactaagatgaagttcaccaatagcgaccggagacggtgcgttagcgaagttcatttctttagtatctatacaagcctatcaagtgggaaagttgatactttacttgaatcattaagcctttcggaaatggccctcaggatctaactaaagtatggtagtaccctgacttgtgtgcggttagctaaattatttagcggactattaacaagcgtttcgcccagaaagtaatatgaggatagtataattttgataagtacctttaggaagctttgatgagaacttaaccatgatatataatttcgggcagagccgtgactcgggagtaattttactcgaatataagctttaacacggtatcatgggttatgaattgagtttactcgcagtacaggctcccgcaattggcctgattacattactgtagctaatgacatttgactgagagcgatttggtttttaaaaattcgtttttctcttcaaaattatactgggcaagaaactcaaaaagagaacttcttgcttaaataaaattgcaaacaattaattttatatttctttgaattttaattttgtttaatttttatttgaa

SEQ ID NO: 16082 - DNA, 729 bp, synthetic construct
  source 1..729: mol_type = other DNA
cataaaactatactaacgtattggcttatcaggtttgtattcaggtacagatcatagtcggttcctatccaggtaggaactgtataccggcggctcgtaaggcgagttgctgtaaactggtacgtagccagactacgtactgtaataactggagtcccgaattacgcgactctgtaaatcccggtgttccgctagacggatcactgtataattgctgctcatctaggtgaggagtgtaaactgaataacgttaagcgctattctcaaacaccacgacgttctttcgggagcgttgtttaactgctgactttctaggaagtcagtgtaaaaattccgcaagttcgcttgtggatctaaaataggagaaactttcgaggtttttcccgtctgtctcgtgcttagctcgcttttgacggacagtgtcgcacacgcgttgtcacggaagaccgaattttgctcttctacgcttcgcctacgcttcacatctctgtctctcgcagccgcactgtctttgtgctttgcgatttgattgaacaattgcacttccatcatttggaactgctgaggaccggacttgctcctcacgcacccaactcgttgtcggtgcatcgttcttctttcgggaagcactttcttactgtctccggaattattttcggggtctgtctagcgctccattgagcccttctaccatcgtctcttggccaaggacgattacacactttcatc

SEQ ID NO: 16083 - DNA, 728 bp, synthetic construct
  source 1..728: mol_type = other DNA
cataaaactatactaacgtattggcttatcaggtttgtattcaggtacagatcatagtcggttcctattcaggtaggaactgtataccggcggctcgtaaggcgagttgctgtaaactggtacgtagccagactacgtactgtaataactggagtcccgaattacgcgactctgtaaatcccggtgttccgctagacggatcactgtataattgctgctcatctaggtgaggagtgtaaactgaataacgttaagcgctattctcaaacaccacgacgttctttcgggagcgttgtttaactgctgactttctaggaagtcagtgtaaaaattccgcaagttcgcttgtggatctaaaataggagaaactttcgaggtttttcccgtctgtctcgtgcttagctcgcttttgacggacagtgtcgcacacgcgttgtcacggaagaccgaattttgctcttctacgcttcgcctacgcttcacatctctgtctctcgcagccgcactgtctttgtgcttgcgatttgattgaacaattgcacttccatcatttggaactgctgaggaccggacttgctcctcacgcacccaactcgttgtcggtgcatcgttcttctttcgggaagcactttcttactgtctccggaattattttcggggtctgtctagcgctctattgagcccttctaccatcgtctcttggccaaggacgattacacactttcatc

SEQ ID NO: 16084 - DNA, 730 bp, synthetic construct
  source 1..730: mol_type = other DNA
aaaaaactatactatcgtattggcttatcaggtttgtatccaggtacagatcatagtcggttcctatccaggtaggaactgtataccggtagctcgtaaggcgagttgctgtaaactggtgcgtagccagactacgtactgtaataactggagtcccgaattacgcgactctgtaaaccccggtgttccgctagacggatcactgtataactgctgctcatctaggtgaggagtgtaaactgaataacgtcaagcgctattctcaaacaccacgacgttctttcgggagcgtcgtttaactgctgactttctagggagtcagtgtaaaaattccgcaagttcgcttgtggatctaaaataggagaaactttcgaggtttctcccgtctgtctcgtgcttagctcgcttttgacggacagtgttgcacacgcgttgttacggaagaccgaattttgctcttctacgcctcgcctacgcttcacatctctgtctctcgcagccgcactgtctctgtgttttgcgacttgatagaacaactgcacttccatcatttggaactgctgaggaccggacttgctcctcacgcacccaactcgtcgtcggtgcatcgttcttctttcgggaagcactgtctttttgtctccggattttactttccggggtctgtctagcgctctactgagcccttctaccatcgtctcttggccaaggacgatcatacactttcatc

SEQ ID NO: 16085 - DNA, 730 bp, synthetic construct
  source 1..730: mol_type = other DNA
tgataaaactatactaacgtattggcttatcaggtttgtattcaggtacagatcatagtcggttcctattcaggtaggaactgtataccggcggctcgtaaggcgagttgctgtaaactggtacgtagccagactacgtactgtaataactggagtcccgaattacgcgactctgtaaatcccggtgttccgctagacggatcactgtataattgctgctcatctaggtgaggagtgtaaactgaataacgttaagcgctattctcaaacaccacgacgttctttcgggagcgttgtttaactgctgactttctaggaagtcagtgtaaaaattccgcaagttcgcttgtggatctaaaataggagaaactttcgaggtttttcccgtctgtctcgtgcttagctcgcttttgacggacagtgtcgcacacgcgttgtcacggaagaccgaattttgctcttctacgcttcgcctacgcttcacatctctgtctctcgcagccgcactgtctttgtgctttgcgatttgattgaacaattgcacttccatcatttggaactgctgaggaccggacttgctcctcacgcacccaactcgttgtcggtgcatcgttcttctttcgggaagcactttcttactgtctccggaattattttcggggtctgtctagcgctctattgagcccttctaccatcgtctcttggccaaggacgattacacactttcatc

SEQ ID NO: 16086 - DNA, 724 bp, synthetic construct
  source 1..724: mol_type = other DNA
aactatactaacgtattggcttatcaggtttgtattcaggtacagatcatagtcggttcctatccaggtaggaactgtataccggcggctcgtaaggcgagttgctgtaaactggtacgtagccagactacgtactgtaataactggagtcccgaattacgcgactctgtaaatcccggtgttccgctagacggatcactgtataattgctgctcatctaggtgaggagtgtaaactgaataacgttaagcgctattctcaaacaccacgacgttctttcgggagcgttgtttaattgctgactttctaggaagtcagtgtaaaaattccgcaagttcgcttgtggatctaaaataggagaaactttcgaggtttttcccgtctgtctcgtgcttagctcgcttttgacggacagtgtcgcacacgcgttgtcacggaagaccgaattttgctcttctacgcttcgcctacgcttcacatctctgtctctcgcagctgcactgtctttgtgctttgcgatttgattgaacaattgcacttccatcatttggaactgctgaggaccggacttgctcctcacgcacccaactcgttgtcggtgcatcgttcttctttcgggaagcactttcttactgtctccggaattattttcggggtctgtctagcgctccattgagcccttctaccatcgtctcttggccaaggacgattacacactttcatc

SEQ ID NO: 16087 - DNA, 726 bp, synthetic construct
  source 1..726: mol_type = other DNA
aaaactatactaacgtattggcttatcaggtttgtattcaggtacagatcatagtcggttcctattcaggtaggaactgtataccggcggctcgtaaggcgagttgctgtaaactggtacgtagccagactacgtactgtaataactggagtcccgaattacgcgactctgtaaatcccggtgttccgctagacggatcactgtataattgctgctcatctaggtgaggagtgtaaactgaataacgttaagcgctattctcaaacaccacgacgttctttcgggagcgttgtttaactgctgactttctaggaagtcagtgtaaaaattccgcaagttcgcttgtggatctaaaataggagaaactttcgaggtttttcccgtctgtctcgtgcttagctcgcttttgacggacagtgtcgcacacgcgttgtcacggaagaccgaattttgctcttctacgcttcgcctacgcttcacatctctgtctctcgcagccgcactgtctttgtgctttgcgatttgattgaacaattgcacttccatcatttggaactgctgaggaccggacttgctcctcacgcacccaactcgttgtcggtgcatcgttcttctttcgggaagcactttcttactgtctccggaattattttcggggtctgtctagcgctctattgagcccttctaccatcgtctcttggccaaggacgattacacactttcatc

SEQ ID NO: 16088 - DNA, 728 bp, synthetic construct
  source 1..728: mol_type = other DNA
ataaaactatactaacgtattggcttatcaggtttgtattcaggtacagatcatagtcggttcctattcaggtaggaactgtataccggcggctcgtaaggcgagttgctgtaaactggtacgtagccagactacgtactgtaataactggagtcccgaattacgcgactctgtaaatcccggtgttccgctagacggatcactgtataattgctgctcatctaggtgaggagtgtaaactgaataacgttaagcgctattctcaaacaccacgacgttctttcgggagcgttgtttaactgctgactttctaggaagtcagtgtaaaaattccgcaagttcgcttgtggatctaaaataggagaaactttcgaggtttttcccgtctgtctcgtgcttagctcgcttttgacggacagtgtcgcacacgcgttgtcacggaagaccgaattttgctcttctacgcttcgcctacgcttcacatctctgtctctcgcagccgcactgtctttgtgctttgcgatttgattgaacaattgcacttccatcatttggaactgctgaggaccggacttgctcctcacgcacccagctcgttgtcggtgcatcgttcttctttcgggaagcactttcttattgtctccggaattattttcggggtctgtctagcgctctattgagcccttctaccatcgtctcttggccaaggacgattacacactttcatc

SEQ ID NO: 16089 - DNA, 726 bp, synthetic construct
  source 1..726: mol_type = other DNA
aaaactatactaacgtattggcttatcaggtttgtattcaggtacagatcatagtcggttcctattcaggtaggaactgtataccggtggctcgtaaggcgagttgctgtaaactggtacgtagccagactacgtactgtaataactggagtcccgaattacgcgactctgtaaatcccggtgttccgctagacggatcactgtataattgctgctcatctaggtgaggagtgtaaactgaataacgttaagcgctattctcaaacaccacgacgttctttcgggagcgttgtttaactgctgactttctaggaagtcagtgtaaaaattccgcaagttcgcttgtggatctaaaataggagaaactttcgaggtttttcccgtctgtctcgtgcttagctcgcttttgacggacagtgtcgcacacgcgttgtcacggaagaccgaattttgctcttctacgcttcgcctacgcttcacatctctgtctctcgcagccgcactgtctttgtgctttgcgatttgattgaacaattgcacttccatcatttggaactgctgaggaccggacttgctcctcacgcacccaactcgttgtcggtgcatcgttcttctttcgggaagcactttcttactgtctccggaattattttcggggtctgtctagcgctctattgagcccttctaccatcgtctcttggccaaggacgattacacactttcatc

SEQ ID NO: 16090 - DNA, 727 bp, synthetic construct
  source 1..727: mol_type = other DNA
aaactatactatcgtattggcttatcaggtttgtatccaggtacagatcatagtcggttcctatccaggtaggaactgtataccggtagctcgtaaggcgagttgctgtaaactggtgcgtagccagactacgtactgtaataactggagtcccgaattacgcgactctgtaaaccccggtgttccgctagacggatcactgtataactgctgctcatctaggtgaggagtgtaaactgaataacgtcaagcgctattctcaaacaccacgacgttctttcgggagcgtcgtttaactgctgactttctagggagtcagtgtaaaaattccgcaagttcgcttgtggatctaaaataggagaaactttcgaggtttctcccgtctgtctcgtgcttagctcgcttttgacggacagtgttgcacacgcgttgttacggaagaccgaattttgctcttctacgcctcgcctacgcttcacatctctgtctctcgcagccgcactgtctctgtgttttgcgacttgatagaacaactgcacttccatcatttggaactgctgaggaccggacttgctcctcacgcacccaactcgtcgtcggtgcatcgttcttctttcgggaagcactgtctttttgtctccggattttactttccggggtctgtctagcgctctactgagcccttctaccatcgtctcttggccaaggacgatcatacactttcatc

SEQ ID NO: 16091 - DNA, 726 bp, synthetic construct
  source 1..726: mol_type = other DNA
aaaactatactaacgtattggcttatcaggtttgtattcaggtacagatcatagtcggttcctattcaggtaggaactgtataccggcggctcgtaaggcgagttgctgtaaactggtacgtagccagactacgtactgtaataactggagtcccgaattacgcgactctgtaaatcccggtgttccgctagacggatcactgtataattgctgctcatctaggtgaggagtgtaaactgaataacgttaagcgctattctcaaacaccacgacgttctttcgggagcgttgtttaactgctgactttctaggaagtcagtgtaaaaattccgcaagttcgcttgtggatctaaaataggagaaactttcgaggtttttcccgtctgtctcgtgcttagctcgcttttgacggacagtgtcgcacacgcgttgtcacggaagaccgaattttgctcttctacgcttcgcctacgcttcacatctctgtctctcgcagccgcactgtctttgtgctttgcgatttgattgaacaattgcacttccatcatttggaactgctgaggaccggacttgctcctcacgcacccaactcgttgtcggtgcatcgttcttctttcgggaagcactttcttactgtctccggaattattttcggggtctgtctagcgctctattgagcccttctaccatcgtctcttggccaaggacgattacgcactttcatc

SEQ ID NO: 16092 - DNA, 729 bp, synthetic construct
  source 1..729: mol_type = other DNA
ataaaactatactaacgtattggcttatcaggtttgtattcaggtacagatcatagtcggttcctatccaggtaggaactgtataccggtggctcgtaaggcgagttgctgtaaactggtacgtagccagactacgtactgtaataactggagtcccgaattacgcgactctgtaaatcccggtgttccgctagacggatcactgtataattgctgctcatctaggtgaggagtgtaaactgaataacgttaagcgctattctcaaacaccacgacgttctttcgggagcgttgtttaactgctgactttctaggaagtcagtgtaaaaattccgcaagttcgcttgtggatctaaaataggagaaactttcgaggtttttcccgtctgtctcgtgtttagctcgcttttgacggacagtgtcgcacacgcgttgtcacggaagaccgaattttgctcttctacgcttcgcctgcgcttcacatctctgtctctcgcagccgcactgtctttgtgctttgcgatttgattgaacaattgcacttccatcatttggaattgctgaggaccggacttgctcctcacgcacccagctcgttgtcggtgcatcgttcttctttcgggaagcactttcttactgtctccggaattatttttcggggtctgtctagcgctccactgagcccttctaccatcgtctcttggccaaggacgattacacactttcatc

SEQ ID NO: 16093 - DNA, 729 bp, synthetic construct
  source 1..729: mol_type = other DNA
aaaaaaactatactaacgtattggcttatcaggtttgtattcaggtacagatcatagtcggttcctattcaggtaggaactgtataccggcggctcgtaaggcgagttgctgtaaactggtacgtagccagactacgtactgtaataactggagtcccgaattacgcgactctgtaaatcccggtgttccgctagacggatcactgtataattgctgctcatctaggtgaggagtgtaaactgaataacgttaagcgctattctcaaacaccacgacgttctttcgggagcgttgtttaactgctgactttctaggaagtcagtgtaaaaattccgcaagttcacttgtggatctaaaataggagaaactttcgaggtttttcccgtctgtctcgtgcttagctcgcttttgacggacagtgtcgcacacgcgttgtcacggaagaccgaattttgctcttctacgcttcgcctacgcttcacatctctgtctctcgcagccgcactgtctttgtgctttgcgatttgattgaacaattgcacttccatcatttggaactgctgaggaccggacttgctcctcacgcacccaactcgttgtcggtgcatcgttcttctttcgggaagcactttcttactgtctccggaattattttcggggtctgtctagcgctctattgagcccttctaccatcgtctcttggccagggacgattacacactttcatc

SEQ ID NO: 16094 - DNA, 728 bp, synthetic construct
  source 1..728: mol_type = other DNA
aaaaaactatactaacgtattggcttatcaggtttgtattcaggtacagatcatagtcggttcctattcaggtaggaactgtataccggcggctcgtaaggcgagttgctgtaaactggtacgtagccagactacgtactgtaataactggagtcccgaattacgcgactctgtaaatcccggtgttccgctagacggatcactgtataattgctgctcatctaggtgaggagtgtaaactgaataacgttaagcgctattctcaaacaccacgacgttctttcgggagcgttgtttaactgctgactttctaggaagtcagtgtaaaaattccgcaagttcgcttgtggatctaaaataggagaaactttcgaggtttttcccgtctgtctcgtgcttagctcgcttttgacggacagtgtcgcacacgcgttgtcacggaagaccgaattttgctcttctacgcttcgcctacgcttcacatctctgtctctcgcagccgcactgtctttgtgctttgcgatttgattgaacaattgcacttccatcatttggaattgctgaggaccggacttgctcctcacgcacccaactcgttgtcggtgcatcgttcttctttcgggaagcactttcttactgtctccggaattattttcggggtctgtctagcgctctattgagcccttctaccatcgtctcttggccaaggacgattacacactttcatc

SEQ ID NO: 16095 - DNA, 726 bp, synthetic construct
  source 1..726: mol_type = other DNA
aaaactatactaacgtattggcttatcaggtttgtattcaggtacagatcatagtcggttcctattcaggtaggaactgtataccggcggctcgtaaggcgagttgctgtaaactggtacgtagccagactacgtactgtaataactggagtcccgaattacgcgactctgtaaatcccggtgttccgctagacggatcactgtataattgctgctcatctaggtgaggagtgtaaactgaataacgttaagcgctattctcaaacaccacgacgttctttcgggagcgttgtttaactgctgactttttaggaagtcagtgtaaaaattccgcaagttcgcttgtggatctaaaataggagaaactttcgaggtttttcccgtctgtctcgtgcttagctcgcttttgacggacagtgttgcacacgcgttgtcacggaagaccgaattttgctcttccacgcttcacctacgcttcacatctctgtctctcgcagccgcactgtctttgtgctttgcgatttgattgaacaattgcacttccatcatttggaactgctgaggaccggacttgctcctcacgcacccaactcgttgtcggtgcatcgttcttctttcgggaagcactttcttactgtctccggaattattttcggggtctgtctagcgctctattgagcccttctaccatcgtctcttggccaaggacgattacacactttcatc

SEQ ID NO: 16096 - DNA, 728 bp, synthetic construct
  source 1..728: mol_type = other DNA
ataaaactatactaacgtattggcttatcaggtttgtattcaggtacagatcatagtcggttcctattcaggtaggaactgtataccggcggctcgtaaggcgagttgctgtaaactggtacgtagccagactacgtactgtaataactggagtcccgaattacgcgactctgtaaatcccggtgttccgctagacggatcactgtataattgctgctcatctaggtgaggagtgtaaactgaataacgttaagcgctattctcaaacaccacgacgttctttcgggagcgttgtttaactgctgactttctaggaagtcagtgtaaaaattccgcaagttcgcttgtggatctaaaataggagaaactttcgaggtttttcccgtctgtctcgtgcttagctcgcttttgacggacagtgtcgcacacgcgttgtcacggaagaccgaattttgctcttctacgcttcgcctacgcttcacatctctgtctctcgcagccgcactgtctttgtgctttgcgatttgattgaacaattgcacttccatcatttggaactgctgaggaccggacttgctcctcacgcacccaactcgttgtcggtgcatcgttcttctttcgggaagcactttcttactgtctccggaattattttcggggtctgtctagcgctctattgagcccttctaccatcgtctcttggccaaggacgattacacactttcatc

SEQ ID NO: 16097 - DNA, 727 bp, synthetic construct
  source 1..727: mol_type = other DNA
aaaaactatactaacgtattggcttatcaggtttgtattcaggtacagatcatagtcggttcctattcaggtaggaactgtataccggcggctcgtaaggcgagttgctgtaaactggtacgtagccagactacgtactgtaataactggagtcccgaattacgcgactctgtaaatcccggtgttccgctagacggatcactgtataattgctgctcatctaggtgaggagtgtaaactgaataacgttaagcgctattctcaaacaccacgacgttctttcgggagcgttgtttaactgctgactttttaggaagtcagtgtaaaaattccgcaagttcgcttgtggatctaaaataggagaaactttcgaggtttttcccgtctgtctcgtgcttagctcgcttttgacggacagtgttgcacacgcgttgtcacggaagaccgaattttgctcttccacgcttcacctacgcttcacatctctgtctctcgcagccgcactgtctttgtgctttgcgatttgattgaacaattgcacttccatcatttggaactgctgaggaccggacttgctcctcacgcacccaactcgttgtcggtgcatcgttcttctttcgggaagcactttcttactgtctccggaattattttcggggtctgtctagcgctctattgagcccttctaccatcgtctcttggccaaggacgattacacactttcatc

SEQ ID NO: 16098 - DNA, 863 bp, synthetic construct; identical to SEQ ID NO: 2498
  source 1..863: mol_type = other DNA

SEQ ID NO: 16099 - DNA, 727 bp, synthetic construct
  source 1..727: mol_type = other DNA
aaaactatactaacgtattggcttatcaggtttgtattcaggtacagatcatagtcggttcctatccaggtaggaactgtataccggcggctcgtaaggcgagttgctgtaaactggtacgtagccagactacgtactgtaataactggagtcccgaattacgcgactctgtaaatcccggtgttccgctagacggatcactgtataattgctgctcatctaggtgaggagtgtaaactgaataacgttaagcgctattctcaaacaccacgacgttctttcgggagcgttgtttaactgctgactttctaggaagtcagtgtaaaaattccgcaagttcgcttgtggatctaaaataggagaaactttcgaggtttttcccgtctgtctcgtgcttagctcgcttttgacggacagtgtcgcacacgcgttgtcacggaagaccgaattttgctcttctacgcttcgcctacgcttcacatctctgtctctcgcagccgcactgtctttgtgctttgcgatttgattgaacaattgcacttccatcatttggaactgctgaggaccggacttgctcctcacgcacccaactcgttgtcggtgcatcgttcttctttcgggaagcactttcttactgtctccggaattatttttcggggtctgtctagcgctccactgagcccttctaccatcgtctcttggccaaggacgattacacactttcatc

SEQ ID NO: 16100 - DNA, 724 bp, synthetic construct
  source 1..724: mol_type = other DNA
aactatactaacgtattggcttatcaggtttgtattcaggtacagatcatagtcggttcctattcaggtaggaactgtataccggcggctcgtaaggcgagttgctgtaaactggtacgtagccagactacgtactgtaataactggagtcccgaattacgcgactctgtaaatcccggtgttccgctagacggatcactgtataattgctgctcatctaggtgaggagtgtaaactgaataacgttaagcgctattctcaaacaccacgacgttctttcgggagcgttgtttaactgctgactttctaggaagtcagtgtaaaaattccgcaagttcgcttgtggatctaaaataggagaaactttcgaggtttttcccgtctgtctcgtgcttagctcgcttttgacggacagtgtcgcacacgcgttgtcacggaagaccgaattttgctcttctacgcttcgcctacgcttcacatctctgtctctcgcagccgcactgtctttgtgctttgcgatttgattgaacaattgcacttccatcatttggaactgctgaggaccggacttgctcctcacgcacccaactcgttgtcggtgcatcgttcttctttcgggaagcactttcttactgtctccggaattattttcggggtctgtctagcgctctattgagcccttctaccatcgtctcttggccaaggacgattacacactttcatc

SEQ ID NO: 16101 - DNA, 724 bp, synthetic construct
  source 1..724: mol_type = other DNA
aactatactaacgtattggcttatcaggtttgtattcaggtacagatcatagtcggttcctattcaggtaggaactgtataccggcggctcgtaaggcgagttgctgtaaactggtacgtagccagactacgtactgtaataactggagtcccgaattacgcgactctgtaaatcccggtgttccgctagacggatcactgtataattgctgctcatctaggtgaggagtgtaaactgaataacgttaagcgctattctcaaacaccacgacgttctttcgggagcgttgtttaactgctgactttctaggaagtcagtgtaaaaattccgcaagttcgcttgtggatctaaaataggagaaactttcgaggtttttcccgtctgtctcgtgcttagctcgcttttgacggacagtgtcgcacacgcgttgtcacggaagaccgaattttgctcttctacgcttcgcctacgcttcacatctctgtctctcgcagccgcactgtctttgtgctttgcgatttgattgaacaattgcacttccatcatttggaactgctgaggaccggacttgctcctcacgcacccaactcgttatcggtgcatcgttcttctttcgggaagcactttcttactgtctccggaattattttcggggtctgtctagcgctctattgagcccttctaccatcgtctcttggccaaggacgattacacactttcatc

SEQ ID NO: 16102 - DNA, 730 bp, synthetic construct
  source 1..730: mol_type = other DNA
ataaaactatactatcgtattggcttatcaggtttgtatccaggtacagatcatagtcggttcctatccaggtaggaactgtataccggtagctcgtaaggcgagttgctgtaaactggtgcgtagccagactacgtactgtaataactggagtcccgaattacgcgactctgtaaaccccggtgttccgctagacggatcactgtataactgctgctcatctaggtgaggagtgtaaactgaataacgtcaagcgctattctcaaacaccacgacgttctttcgggagcgtcgtttaactgctgactttctagggagtcagtgtaaaaattccgcaagttcgcttgtggatctaaaataggagaaactttcgaggtttctcccgtctgtctcgtgcttagctcgcttttgacggacagtgttgcacacgcgttgttacggaagaccgaattttgctcttctacgcctcgcctacgcttcacatctctgtctctcgcagccgcactgtctctgtgttttgcgacttgatagaacaactgcacttccatcatttggaactgctgaggaccggacttgctcctcacgcacccaactcgtcgtcggtgcatcgttcttctttcgggaagcactgtctttttgtctccggattttactttccggggtctgtctagcgctctactgagcccttctaccatcgtctcttggccaaggacgatcatacactttcatc

SEQ ID NO: 16103 - DNA, 726 bp, synthetic construct
  source 1..726: mol_type = other DNA
aaaactatactaacgtattggcttatcaggtttgtattcaggtacagatcatagtcggttcctatccaggtaggaactgtataccggcggctcgtaaggcgagttgctgtaaactggtacgtagccagactacgtactgtaataactggagtcccgaattacgcgactctgtaaatcccggtgttccgctagacggatcactgtataattgctgctcatctaggtgaggagtgtaaactgaataacgttaagcgctattctcaaacaccacgacgttctttcgggagcgttgtttaactgctgactttctaggaagtcagtgtaaaaattccgcaagttcgcttgtggatctaaaataggagaaactttcgaggtttttcccgtctgtctcgtgcttagctcgcttttgacggacagtgtcgcacacgcgttgtcacggaagaccgaattttgctcttctacgcttcgcctacgcttcacatctctgtctctcgcagccgcactgtctttgtgctttgcgatttgattgaacaattgcacttccatcatttggaactgctgaggaccggacttgctcctcacgcacccaactcgttgtcggtgcatcgttcttctttcgggaagcactttcttactgtctccggaattattttcggggtctgtctagcgctccattgagcccttctaccatcgtctcttggccaaggacgattacacactttcatc

SEQ ID NO: 16104 - DNA, 728 bp, synthetic construct
  source 1..728: mol_type = other DNA
aaaaactatactaacgtattggcttatcaggtttgtattcaggtacagatcatagtcggttcctatccaggtaggaactgtataccggtggctcgtaaggcgagttgctgtaaactggtacgtagccagactacgtactgtaataactggagtcccgaattacgcgactctgtaaatcccggtgttccgctagacggatcactgtataattgctgctcatctaggtgaggagtgtaaactgaataacgttaagcgctattctcaaacaccacgacgttctttcgggagcgttgtttaactgctgactttctaggaagtcagtgtaaaaattccgcaagttcgcttgtggatctaaaataggagaaactttcgaggtttttcccgtctgtctcgtgtttagctcgcttttgacggacagtgtcgcacacgcgttgtcacggaagaccgaattttgctcttctacgcttcgcctgcgcttcacatctctgtctctcgcagccgcactgtctttgtgctttgcgatttgattgaacaattgcacttccatcatttggaattgctgaggaccggacttgctcctcacgcacccagctcgttgtcggtgcatcgttcttctttcgggaagcactttcttactgtctccggaattatttttcggggtctgtctagcgctccactgagcccttctaccatcgtctcttggccaaggacgattacacactttcatc

SEQ ID NO: 16105 - DNA, 728 bp, synthetic construct
  source 1..728: mol_type = other DNA
ataaaactatactaacgtattggcttatcaggtttgtattcaggtacagatcatagtcggttcctattcaggtaggaactgtataccggcggctcgtaaggcgagttgctgtaaactggtacgtagccagactacgtactgtaataactggagtcccgaattacgcgactctgtaaatcccggtgttccgctagacggatcactgtataattgctgctcatctaggtgaggagtgtaaactgaataacgttaagcgctattctcaaacaccacgacgttctttcgggagcgttgtttaactgctgactttttaggaagtcagtgtaaaaattccgcaagttcgcttgtggatctaaaataggagaaactttcgaggtttttcccgtctgtctcgtgcttagctcgcttttgacggacagtgttgcacacgcgttgtcacggaagaccgaattttgctcttccacgcttcacctacgcttcacatctctgtctctcgcagccgcactgtctttgtgctttgcgatttgattgaacaattgcacttccatcatttggaactgctgaggaccggacttgctcctcacgcacccaactcgttgtcggtgcatcgttcttctttcgggaagcactttcttactgtctccggaattattttcggggtctgtctagcgctctattgagcccttctaccatcgtctcttggccaaggacgattacacactttcatc

SEQ ID NO: 16106 - DNA, 727 bp, synthetic construct
  source 1..727: mol_type = other DNA
aaaactatactaacgtattggcttatcaggtttgtattcaggtacagatcatagtcggttcctattcaggtaggaactgtataccggcggctcgtaaggcgagttgctgtaaactggtacgtagccagactacgtactgtaataactggagtcccgaattacgcgactctgtaaatcccggtgttccgctagacggatcactgtataattgctgctcatctaggtgaggagtgtaaactgaataacgttaagcgctattctcaaacaccacgacgttctttcgggagcgttgtttaactgctgactttctaggaagtcagtgtaaaaattccgcaagttcgcttgtggatctaaaaataggagaaactttcgaggtttttcccgtctgtctcgtgcttagctcgcttttgacggacagtgtcgcacacgcgttgtcacggaagaccgaattttgctcttctacgcttcgcctacgcctcacatctctgtctctcgcagccgcactgtctttgtgctttgcgatttgattgaacaattgcacttccatcatttggaactgctgaggaccggacttgctcctcacgcacccaactcgttgtcggtgcatcgttcttctttcgggaagcactttcttactgtctccggaattattttcggggtctgtctagcgctctattgagcccttctaccatcgtctcttggccaaggacgattacacactttcatc

SEQ ID NO: 16107 - DNA, 727 bp, synthetic construct
  source 1..727: mol_type = other DNA
aaaaactatactaacgtattggcttatcaggtttgtattcaggtacagatcatagtcggttcctattcaggtaggaactgtataccggcggctcgtaaggcgagttgctgtaaactggtacgtagccagactacgtactgtaataactggagtcccgaattacgcgactctgtaaatcccggtgttccgctagacggatcactgtataattgctgctcatctaggtgaggagtgtaaactgaataacgttaagcgctattctcaaacaccacgacgttctttcgggagcgttgtttaactgctgactttctaggaagtcagtgtaaaaattccgcaagttcgcttgtggatctaaaataggagaaactttcgaggtttttcccgtctgtctcgtgcttagctcgcttttgacggacagtgtcgcacacgcgttgtcacggaagaccgaattttgctcttctacgcttcgcctacgcttcacatctctgtctctcgcagccgcactgtctttgtgctttgcgatttgattgaacaattgcacttccatcatttggaactgctgaggaccggacttgctcctcacgcacccaactcgttgtcggtgcatcgttcttctttcgggaagcactttcttactgtctccggaattattttcggggtctgtctagcgctctattgagcccttctaccatcgtctcttggccagggacgattacacactttcatc

SEQ ID NO: 16108 - DNA, 726 bp, synthetic construct
  source 1..726: mol_type = other DNA
aaaactatactaacgtattggcttatcaggtttgtattcaggtacagatcatagtcggttcctattcaggtaggaactgtataccggcggctcgtaaggcgagttgctgtaaactggtacgtagccagactacgtactgtaataactggagtcccgaattacgcgactctgtaaatcccggtgttccgctagacggatcactgtataattgctgctcatctaggtgaggagtgtaaactgaataacgttaagcgctattctcaaacaccacgacgttctttcgggagcgttgtttaactgctgactttctaggaagtcagtgtaaaaattccgcaagttcgcttgtggatctaaaataggagaaactttcgaggtttttcccgtctgtctcgtgcttagctcgcttttgacggacagtgtcgcacacgcgttgtcacggaagaccgaattttgctcttctacgcttcgcctacgcttcacatctctgtctctcgcagccgcactgtctttgtgctttgcgatttgattgaacaattgcacttccatcatttggaactgctgaggaccggacttgctcctcacgcacccaactcgttgtcggtgcatcgttcttctttcgggaagcattttcttactgtctccggaattattttcggggtctgtctagcgctctattgagcccttctaccatcgtctcttggccaaggacgattacacactttcatc

SEQ ID NO: 16109 - DNA, 727 bp, synthetic construct
  source 1..727: mol_type = other DNA
taaaactatactaacgtattggcttatcaggtttgtattcaggtacagatcatagtcggttcctattcaggtaggaactgtataccggcggctcgtaaggcgagttgctgtaaactggtacgtagccagactacgtactgtaataattggagtcccgaattacgcgactctgtaaatcccggtgttccgctagacggatcactgtataattgctgctcatctaggtgaggagtgtaaactgaataacgttaagcgctattctcaaacaccacgacgttctttcgggagcgttgtttaactgctgactttctaggaagtcagtgtaaaaattccgcaagttcgcttgtggatctaaaataggagaaactttcgaggtttttcccgtctgtctcgtgcttagctcgcttttgacggacagtgtcgcacacgcgttgtcacggaagaccgaattttgctcttctacgcttcgcctacgcttcacatctctgtctctcgcagccgcactgtctttgtgctttgcgatttgattgaacaattgcacttccattatttggaactgctgaggaccggacttgctcctcacgcacccaactcgttgtcggtgcatcgttcttctttcgggaagcactttcttactgtctccggaattattttcggggtctgtctagcgctctattgagcccttctaccatcgtctcttggccaaggacgattacacactttcatc

SEQ ID NO: 16110 - DNA, 724 bp, synthetic construct
  source 1..724: mol_type = other DNA
aaactatactaacgtattggcttatcaggtttgtattcaggtacagatcatagtcggttcctattcaggtaggaactgtataccggcggctcgtaaggcgagttgctgtaaattggtacgtagccagactacgtactgtaataactggagtcccgaattacgcgactctgtaaatcccgtgttccgctagacggatcactgtataattgctgctcatctaggtgaggagtgtaaactgaataacgttaagcgctattctcaaacaccacgacgttctttcgggagcgttgtttaactgctgactttctaggaagtcagtgtaaaaattccgcaagttcgcttgtggatctaaaataggagaaactttcgaggtttttcccgtctgtctcgtgcttagctcgcttttgacggacagtgtcgcacacgcgttgtcacggaagaccgaattttgctcttctacgcttcgcctacgcttcacatctctgtctctcgcagccgcactgtctttgtgctttgcgatttgattgaacaattgcacttccatcatttggaactgctgaggaccggacttgctcctcacgcacccaactcgttgtcggtgcatcgttcttctttcgggaagcactttcttactgtctccggaattattttcggggtctgtctagcgctctattgagcccttctaccatcgtctcttggccaaggacgattacacactttcatc

SEQ ID NO: 16111 - DNA, 729 bp, synthetic construct
  source 1..729: mol_type = other DNA
aataaaactatactaacgtattggcttatcaggtttgtattcaggtacagatcatagtcggttcctattcaggtaggaactgtataccggcggctcgtaaggcgagttgctgtaaactggtacgtagccagactacgtactgtaataactggagtcccgaattacgcgactctgtaaatcccggtgttccgctagacggatcactgtataattgctgctcatctaggtgaggagtgtaaactgaataacgttaagcgctattctcaaacaccacgacgttctttcgggagcgttgtttaactgctgactttctaggaagtcagtgtaaaaattccgcaagttcgcttgtggatctaaaataggagaaactctcgaggtttttcccgtctgtctcgtgcttagctcgcttttgacggacagtgtcgcacacgcgttgtcacggaagaccgaattttgctcttctacgcttcgcctacgcttcacatctctgtctctcgcagccgcactgtctttgtgctttgcgatttgattgaacaattgcacttccatcatttggaactgctgaggaccggacttgctcctcacgcacccaactcgttgtcggtgcatcgttcttctttcgggaagcactttcttactgtctccggaattattttcggggtctgtctagcgctctattgagcccttctaccatcgtctcttggccaaggacgattacacactttcatc

SEQ ID NO: 16112 - DNA, 728 bp, synthetic construct
  source 1..728: mol_type = other DNA
aataaactatactaacgtattggcttatcaggtttgtattcaggtacagatcatagtcggttcctattcaggtaggaactgtataccggcggctcgtaaggcgagttgctgtaaactggtacgtagccagactacgtactgtaataactggagtcccgaattacgcgactctgtaaatcccggtgttccgctagacggatcactgtataattgctgctcatctaggtgaggagtgtaaactgaataacgttaagcgctattctcaaacaccacgacgttctttcgggagcgttgtttaactgctgactttctaggaagtcagtgtaaaaattccgcaagttcgcttgtggatctaaaataggagaaactttcgaggtttttcccgtctgtctcgtgcttagctcgcttttgacggacagtgtcgcacacgcgttgtcacggaagaccgaattttgctcttctacgcttcgcctacgcttcacatctctgtctctcgcagccgcactgtctttgtgctttgcgatttgattgaacaattgcactaccatcatttggaactgctgaggaccggacttgctcctcacgcacccaactcgttgtcggtgcatcgttcttctttcgggaagcactttcttactgtctccggaattattttcggggtctgtctagcgctctattgagcccttctaccatcgtctcttggccaaggacgattacacactttcatc

SEQ ID NO: 16113 - DNA, 267 bp, synthetic construct
  source 1..267: mol_type = other DNA
cgaaaataagtatatattgcttctatttcgatattgttcaagcgttgaccgttgcaggcgcttgtcctattatatgtgcggggttaggatttctcagaatttataagaaaggtattttctctcttgtcttatagaaatttccacattatttacttaattggttgatttgaacttttatcgttcgtattttgttattttgcttttagcaagaattgttttatttcacccataggtgagttttaaatttataatcgttataaaatcacg

SEQ ID NO: 16114 - DNA, 723 bp, synthetic construct
  source 1..723: mol_type = other DNA
actatactaacgtattggcttatcaggtttgtattcaggtacagatcatagtcggttcctatccaggtaggaactgtataccggcggctcgtaaggcgagttgctgtaaactggtacgtagccagactacgtactgtaataactggagtcccgaattacgcgactctgtaaatcccggtgttccgctagacggatcactgtataattgctgctcatctaggtgaggagtgtaaactgaataacgttaagcgctattctcaaacaccacgacgttctttcgggagcgttgtttaattgctgactttctaggaagtcagtgtaaaaattccgcaagttcgcttgtggatctaaaataggagaaactttcgaggtttttcccgtctgtctcgtgcttagctcgcttttgacggacagtgtcgcacacgcgttgtcacggaagaccgaattttgctcttctacgcttcgcctacgcttcacatctctgtctctcgcagctgcactgtctttgtgctttgcgatttgattgaacaattgcacttccatcatttggaactgctgaggaccggacttgctcctcacgcacccaactcgttgtcggtgcatcgttcttctttcgggaagcactttcttactgtctccggaattattttcggggtctgtctagcgctccattgagcccttctaccatcgtctcttggccaaggacgattacacactttcatc

SEQ ID NO: 16115 - DNA, 624 bp, synthetic construct; identical to SEQ ID NO: 2206
  source 1..624: mol_type = other DNA

SEQ ID NO: 16116 - DNA, 726 bp, synthetic construct
  source 1..726: mol_type = other DNA
aaaaactatactaacgtattggcttatcaggtctgtatccaggtacagatcatagtcggttcctattcaggtaggaactgtataccggcggctcgtaaggcgagttgctgtaaactggtacgtagccagactacgtactgtaataactggagtcccgaattacgcgactctgtaaatcccggtgttccgctagacggatcactgtataattgctgctcatctaggtgaggagtgtaaactgaataacgttaagcgctattctcaaacaccacgacgttctttcgggagcgttgtttaactgctgactttctaggaagtcagtgtaaaaattccgcaagttcgcttgtggatctaaaataggagaaactttcgaggtttttcccgtctgtctcgtgcttagctcgcttttgacggacagtgtcgcacacgcgttgtcacggaagaccgaattttgctcttctacgcttcgcctacgcttcacatctctgtctctcgcagccgcactgtctttgtgcttgcgatttgattgaacaattgcacttccatcatttggaactgctgaggaccggacttgctcctcacgcacccaactcgttgtcggtgcatcgttcttctttcgggaagcactttcttactgtctccggaattattttcggggtctgtctagcgctctattgagcccttctaccatcgtctcttggccaaggacgattacacactttcatc

SEQ ID NO: 16117 - DNA, 715 bp, synthetic construct
  source 1..715: mol_type = other DNA
aacgtattggcttatcaggtttgtattcaggtacagatcatagtcggttcctattcaggtaggaactgtataccggcggctcgtaaggcgagttgctgtaaactggtacgtagccagactacgtactgtaataactggagtcccgaattacgcgactctgtaaatcccggtgttccgctagacggatcactgtataattgctgctcatctaggtgaggagtgtaaactgaataacgttaagcgctattctcaaacaccacgacgttctttcgggagcgttgtttaactgctgactttctaggaagtcagtgtaaaaattccgcaagttcgcttgtggatctaaaataggagaaactttcgaggtttttcccgtctgtctcgtgcttagctcgcttttgacggacagtgtcgcacacgcgttgtcacggaagaccgaattttgctcttctacgcttcgcctacgcttcacatctctgtctctcgcagccgcactgtctttgtgctttgcgatttgattgaacaattgcacttccatcatttggaactgctgaggaccggacttgctcctcacgcacccaactcgttgttggtgcatcgttcttctttcgggaagcactttcttactgtctccggaattattttcggggtctgtctagcgctctattgagcccttctaccatcgtctcttggccaaggacgattacacactttcatc

SEQ ID NO: 16118 - DNA, 719 bp, synthetic construct
  source 1..719: mol_type = other DNA
ataaaactatactaacgtattggcttatcaggtttgtattcaggtacagattgtagtcggttcctatccaggtaggaactatataccggcggttcgtaaggcgaattgctgtaaattggtgcgtagccagactacgcgctgtaataactggagtcccgaattacgcgactctgtaaaccccggtgttccgccagacggttcactgtataactgctgctcatctaggtgaggagtgtaaactgaacagcgttaaacgttgttctcaaacactacgacgctctcccgggagtgttgtctaactgctgactttcaaggaaatcagtgtaaaacttccgtaagttcgcttgcggatctaactcaggaaaaactttcgaggtttttcccgtctgtcttgctagctcgctattgacagacactgtcgcgcacgcgttgctactgaggaccgaattttgctcctctacgcctcgcctacgcttcacacctctgtctctcgcagctgcgtctctttgtgcttcgcgataggacaaccgcatttccatcatttggaattgccgaggaccggacttgctcctcgcgcacccaatttgctgttggtgcatcgttcttctttcgggaagtactgtctattcgcctccggatttcgatcccgaggttcttcaagtgctcactgagcccttctaccgtcgtcccccggccaaggacgattgcgcacttccatc

SEQ ID NO: 16119 - DNA, 1000 bp, synthetic construct; identical to SEQ ID NO: 266
  source 1..1000: mol_type = other DNA

SEQ ID NO: 16120 - DNA, 716 bp, synthetic construct
  source 1..716: mol_type = other DNA
taacgtattggcttatcaggtttgtattcaggtacagatcatagtcggttcctatccaggtaggaactgtataccggcggctcgtaaggcgagttgctgtaaactggtacgcagccagactgcgtactgtaataactggagtcccgaattacgcgactctgtaaatcccggtgttccgctagacggatcactgtataattgctgctcatctaggtgaggagtgtaaactgaataacgttaagcgctattctcaaacaccacgacgttctttcgggagcgttgtttaactgctgactttctaggacgtcagtgtaatttttccgcaagttcgcttgtggatctaaaataggagaaactttcgaggtttctcccgtctgtcttgtgcttagctcgcttttgacggacagtgttgcacacgcgttgttatagaagaccgaattttgctcttctgcgcttcgcctacgcttcacatctctgtctctcgcagctgcactgtcttcgtgctttgcgattcgatagaacaaccgcacttccatcatttggaattgctgaggaccggacttgctcctcacgcacccaactcgttgtcggtgcatcgttcttctttcgggaagcactgtcttactgtctccggaattattttcggggtctgtctagcgctctgctgagcccttctaccatcgtctctcggccaaggacgattacacactttcaac

SEQ ID NO: 16121 - DNA, 524 bp, synthetic construct; identical to SEQ ID NO: 2076
  source 1..524: mol_type = other DNA

SEQ ID NO: 16122 - DNA, 277 bp, synthetic construct
  source 1..277: mol_type = other DNA
atccaaaaacttaggcttagggcatagtagtgatggttgtaacaattattatgcagcaaatcccggacctaagtaggttaatagattcgttcttccttaacttagtggagagttatttagctctagtaataagtgtttgccacttaaaatataggatacttattcaacccgtccggtattggattaagttgcccaatactatcagacgtaaaacaattgacttgctgacacaaaaattataaaattcccctctgacttaaaacttagtaaaaagacc

SEQ ID NO: 16123 - DNA, 706 bp, synthetic construct
  source 1..706: mol_type = other DNA
aacgtattggcttatcaggtttgtattcaggtacagattgtagtcggttcctatccaggtaggaactatataccggcggttcgtaaggcgaattgctgtaaattggtgcgtagccagactacgcgctgtaataactggagtcccgaattacgcgactctgtaaaccccggtgttccgccagacggttcactgtataactgctgctcatctaggtgaggagtgtaaactgaacagcgttaaacgttgttctcaaacactacgacgctctcccgggagtgttgtctaactgctgactttcaaggaaatcagtgtaaaacttccgtaagttcgcttgcggatctaactcaggaaaaactttcgaggtttttcccgtctgtcttgctagctcgctattgacagacactgtcgcgcacgcgttgctactgaggaccgaattttgctcctctacgcctcgcctacgcttcacacctctgtctctcgcagctgcgtctctttgtgcttcgcgataggacaaccgcatttccatcatttggaattgccgaggaccggacttgctcctcgcgcacccaatttgctgttggtgcatcgttcttctttcgggaagtactgtctattcgcctccggatttcgatcccgaggttcttcaagtgctcactgagcccttctaccgtcgtcccccggccaaggacgattgcgcacttccatc

SEQ ID NO: 16124 - DNA, 1000 bp, synthetic construct
  source 1..1000: mol_type = other DNA
agttccggagaaggagcattgtcggaacattatataataccacgcttcacgtggtcttgtataccggcattgtgaataccgtaaacctcttcaaggtacctcagtgtttgaattatttagctgaggataaattttcttaaatgagttgtcactgtacacaatactcttcaagtagtacatacctcacgtaatttagaaaaggtgtttgaattctttaaccttttcaccttgaatttggtttaatcaatcatgtggatcttatgagcacggatcctgatgctgaaaagtgagcctagacgtggaggaacctgcaaggcgggtgttctttaaggctgtcgtaccctagctgagacagggggggtcccaatactgtcgaagccagacttttagaacatgtgccgctatcgaagggtagcacgcgggcgcgccctcctagagcgaagttcagccagtaagtatcgattgattaatcgacggtggacatgagcacccatcagtcaataaacaccccgttgggagagagaaacgaacgaggaatggcacacctcacaataaaaagccgttgtattctctttccggcctgggagtctcaaacctttgaaccaattggttccgccacatatactggggacagttatgtggtgctacatccctcggacctaaggtagatcgtgtttatctacttgatagaacctcctgcacctcagagtgcggtccgtagtagaggcaagagaatagtatagcggtcagaaacaaactggattcttcaaaggtacgatttctcagactgagcagactgggtaaacctgctcctaaaaagcataaggggaaacccactgcaggcgtgaggcatttttcaaatgcctttttcgctaaatgggccatcgacccaaccaagtccctcctagaggagctcctcggaacgcccgtaaccgaggaggtattccggactttcgagcggggtttgtggaggcggccagtgattgtgccggcgcggtgt

SEQ ID NO: 16125 - DNA, 716 bp, synthetic construct; identical to SEQ ID NO: 2330
  source 1..716: mol_type = other DNA

SEQ ID NO: 16126 - DNA, 414 bp, synthetic construct
  source 1..414: mol_type = other DNA
aaggtttgcatcccttgcacgattcactatgagtcctctttgtggcacactagtataccctactttgaccctagcttttagctacgctcatgtacgctgtactactctgtcatttttggttagtagtgttttgagttttcctcataatttgcatctttattcggagagacgtcccgctcttcgtcttatttcaactcacggactcaacatccatgggtggacatttcttaactcccgctgtaagagctttgtgccccgcgctacatttctcatacttacaggtttgcaggttctgtttaaaacgtatttagacggccagtatactgcaaatgcgtagccaggattccgaccctgggtaagtccctcagtatgtagatgcaccgccgatatagccgatagggagtacgatacatc

SEQ ID NO: 16127 - DNA, 264 bp, synthetic construct
  source 1..264: mol_type = other DNA
ctcagcctcgtgattggttacccatcactgcaaattactctccagacggctgtgcagtgtaaggctttcacgaggtggcttgcttttcagcgtacgtgtgccacaggcagccccgaaaacacgcgtcaggagacctttcctgctttcttgggcgagaacagcagctgcgcttcttcgtgcagtggaaagtttaaactgcctgctccaactcaaactcaaacttctacttctcttacatctgatgtctccagctctggaggtgtc

SEQ ID NO: 16128 - DNA, 416 bp, synthetic construct; identical to SEQ ID NO: 1823
  source 1..416: mol_type = other DNA

SEQ ID NO: 16129 - DNA, 264 bp, synthetic construct
  source 1..264: mol_type = other DNA
ctcagcctcgtgattggttacccatcactgcaaattactctccagacggctgtgcagtgtaaggctttcacgaggtggcttgcttttcagcgtacgtgtgccacaggcagccccgaaaacacgcgtcaggagacctttcctgctttcttgggcgagaacagcagctgcgcttcttcgtgcagtggaaagtttaaactgcctgctccaactcaaactcaaacttctacttctcttacatctgatgtctccagttctggaggtgtc

SEQ ID NO: 16130 - DNA, 275 bp, synthetic construct
  source 1..275: mol_type = other DNA
cgaaaataagtatatattgcttttatttcgattttgttcaagcatcgaccgtttgcaggtgcttgtcctattagatgcgcgggtcttttgttcatttttgaattttaagaaagagttgtatttttgcgctttcttttgaaatttccacattatttacttaattggttgtattgaacttttaattagttcgaaaaataacgtttacaccgtcggtaaaaatcggtgcaatctttgcctgttggtaaattttgttttataactattgttatagaaag

SEQ ID NO: 16131 - DNA, 863 bp, synthetic construct; identical to SEQ ID NO: 2499
  source 1..863: mol_type = other DNA

SEQ ID NO: 16132 - DNA, 658 bp, synthetic construct; identical to SEQ ID NO: 2254
  source 1..658: mol_type = other DNA

SEQ ID NO: 16133 - DNA, 252 bp, synthetic construct
  source 1..252: mol_type = other DNA
attgcttctatttcgattttgttcaagcgttgaccgttgcaggcgcttgtcctattatatgtgcggggttaggatttctcagaatttataagaaagatatttttcctcttgtcttatagaaatttccacattatttacttaattggttgaattgaacttttactgttcgtattttgttattttgctctttgcaagaattgttttatttcacctgtaggtgagttttaaatttataatcgttataaaatcacg

SEQ ID NO: 16134 - DNA, 858 bp, synthetic construct
  source 1..858: mol_type = other DNA
ccacacggtcctttcgaccgtgtggagattcagttaatttcttttgtcaaatagtttattctcagaagtgcatactatatgcttctgagactttatgtgtagtaagtcatactttagagttgagttattacactctactctactttatgatatatgtatgctatacttaaagtctatcagaattgtacttctgttagtgagatatttgatttataagaattacagtaatcgaaaccccgtcatttatcgactttctgtgtttgaaatgtcgcacagatcgtagttcctaaagttagacataacataatttaaggattgtcaaggctaatgattaagttgttaactttcttcttatgatttagttgtactttttaacttgatatagcgcacagcaccgtgcgcttccaatccgacctcttaggtttaatttgttagttcagtaaccgtcaattattgaatgtttacaaattaacccatttgtttattaacactatttaaacatcttatttataatatttttgatttagacataggacttatataacctgttgtatccccctactatatttcatacttgttttaacggaaaaccgcgtaaagagacgtataggattcccagagaatttgtcttatagtagaagaatcggccaatggagtatatttaacgaaacgtacatcgagatccaatgattgtcggaatatattaccaagatatgtatagtttaaggcatcgtacaccgcgatgttaaggtcgtcttacctgatttttaattacctctacttggaattgacccattaatagagtaaataattagtgtttatatattgtgatttacaataaagtattttgacgttttt

SEQ ID NO: 16135 - DNA, 860 bp, synthetic construct
  source 1..860: mol_type = other DNA
ctccacacggtcctttcgaccgtgtggagattcagttaatttcttttgtcaaatagtttattctcagaagtgcatactatatgcttctgagactttatgtgtagtaagtcatactttagagttgagttattacactctactctactttatgatatatgtatgctatacttaaagtctatcagaattgtacttctgttagtgagatatttgatttataagaattacagtaatcgaaaccccgtcatttatcgactttctgtgtttgaaatgtcgcacagatcgtagttcctaaagttagacataacataatttaaggattgtcaaggctaatgattaagttgttaactttcttcttatgatttagttgtactttttaacttgatatagcgcacagcaccgtgcgcttccaatccgacctcttaggtttaatttgttagttcagtaaccgtcaattattgaatgtttacaaattaacccatttgtttattaacactatttaaacatcttatttataatatttttgatttagacataggacttatataacctgttgtatccccctactatatttcatacttgttttaacggaaaaccgcgtaaagagacgtataggattcccagagaatttgtcttatagtagaagaatcggccaatggagtatatttaacgaaacgtacatcgagatccaatgattgtcggaatatattaccaagatatgtatagtttaaggcatcgtacaccgcgatgttaaggtcgtcttacctgatttttaattacctctacttggaattgacccattaatagagtaaataattagtgtttatatattgtgatttacaataaagtattttgacgttttt

SEQ ID NO: 16136 - DNA, 860 bp, synthetic construct
  source 1..860: mol_type = other DNA
atccacacggtcctttcgaccgtgtggagattcagttaatttcttttgtcaaatagtttattctcagaagtgcatactatatgcttctgagactttatgtgtagtaagtcatactttagagttgagttattacactctactctactttatgatatatgtatgctatacttaaagtctatcagaattgtacttctgttagtgagatatttgatttataagaattacagtaatcgaaaccccgtcatttatcgactttctgtgtttgaaatgtcgcacagatcgtagttcctaaagttagacataacataatttaaggattgtcaaggctaatgattaagttgttaactttcttcttatgatttagttgtactttttaacttgatatagcgcacagcaccgtgcgcttccaatccgacctcttaggtttaatttgttagttcagtaaccgtcaattattgaatgtttacaaattaacccatttgtttattaacactatttaaacatcttatttataatatttttgatttagacataggacttatataacctgttgtatccccctactatatttcatacttgttttaacggaaaaccgcgtaaagagacgtataggattcccagagaatttgtcttatagtagaagaatcggccaatggagtatatttaacgaaacgtacatcgagatccaatgattgtcggaatatattaccaagatatgtatagtttaaggcatcgtacaccgcgatgttaaggtcgtcttacctgatttttaattacctctacttggaattgacccattaatagagtaaataattagtgtttatatattgtgatttacaataaagtattttgacgttttt

SEQ ID NO: 16137 - DNA, 859 bp, synthetic construct
  source 1..859: mol_type = other DNA
tccacacggtcctttcgaccgtgtggagattcagttaatttcttttgtcaaatagtttattctcagaagtgcatactatatgcttctgagactttatgtgtagtaagtcatactttagagttgagttattacactctactctactttatgatatatgtatgctatacttaaagtctatcagaattgtacttctgttagtgagatatttgatttataagaattacagtaatcgaaaccccgtcatttatcgactttctgtgtttgaaatgtcgcacagatcgtagttcctaaagttagacataacataatttaaggattgtcaaggctaatgattaagttgttaactttcttcttatgatttagttgtactttttaacttgatatagcgcacagcaccgtgcgcttccaatccgacctcttaggtttaatttgttagttcagtaaccgtcaattattgaatgtttacaaattaacccatttgtttattaacactatttaaacatcttatttataatatttttgatttagacataggacttatataacctgttgtatccccctactatatttcatacttgttttaacggaaaaccgcgtaaagagacgtataggattcccagagaatttgtcttatagtagaagaatcggccaatggagtatatttaacgaaacgtacatcgagatccaatgattgtcggaatatattaccaagatatgtatagtttaaggcatcgtacaccgcgatgttaaggtcgtcttacctgatttttaattacctctacttggaattgacccattaatagagtaaataattagtgtttatatattgtgatttacaataaagtattttgacgttttt

SEQ ID NO: 16138 - DNA, 857 bp, synthetic construct
  source 1..857: mol_type = other DNA
cacacggtcctttcgaccgtgtggagattcagttaatttcttttgtcaaatagtttattctcagaagtgcatactatatgcttctgagactttatgtgtagtaagtcatactttagagttgagttattacactctactctactttatgatatatgtatgctatacttaaagtctatcagaattgtacttctgttagtgagatatttgatttataagaattacagtaatcgaaaccccgtcatttatcgactttctgtgtttgaaatgtcgcacagatcgtagttcctaaagttagacataacataatttaaggattgtcaaggctaatgattaagttgttaactttcttcttatgatttagttgtactttttaacttgatatagcgcacagcaccgtgcgcttccaatccgacctcttaggtttaatttgttagttcagtaaccgtcaattattgaatgtttacaaattaacccatttgtttattaacactatttaaacatcttatttataatatttttgatttagacataggacttatataacctgttgtatccccctactatatttcatacttgttttaacggaaaaccgcgtaaagagacgtataggattcccagagaatttgtcttatagtagaagaatcggccaatggagtatatttaacgaaacgtacatcgagatccaatgattgtcggaatatattaccaagatatgtatagtttaaggcatcgtacaccgcgatgttaaggtcgtcttacctgatttttaattacctctacttggaattgacccattaatagagtaaataattagtgtttatatattgtgatttacaataaagtattttgacgttttt

SEQ ID NO: 16139 - DNA, 855 bp, synthetic construct
  source 1..855: mol_type = other DNA
cacggtcctttcgaccgtgtggagattcagttaatttcttttgtcaaatagtttattctcagaagtgcatactatatgcttctgagactttatgtgtagtaagtcatactttagagttgagttattacactctactctactttatgatatatgtatgctatacttaaagtctatcagaattgtacttctgttagtgagatatttgatttataagaattacagtaatcgaaaccccgtcatttatcgactttctgtgtttgaaatgtcgcacagatcgtagttcctaaagttagacataacataatttaaggattgtcaaggctaatgattaagttgttaactttcttcttatgatttagttgtactttttaacttgatatagcgcacagcaccgtgcgcttccaatccgacctcttaggtttaatttgttagttcagtaaccgtcaattattgaatgtttacaaattaacccatttgtttattaacactatttaaacatcttatttataatatttttgatttagacataggacttatataacctgttgtatccccctactatatttcatacttgttttaacggaaaaccgcgtaaagagacgtataggattcccagagaatttgtcttatagtagaagaatcggccaatggagtatatttaacgaaacgtacatcgagatccaatgattgtcggaatatattaccaagatatgtatagtttaaggcatcgtacaccgcgatgttaaggtcgtcttacctgatttttaattacctctacttggaattgacccattaatagagtaaataattagtgtttatatattgtgatttacaataaagtattttgacgttttt

SEQ ID NO: 16140 - DNA, 752 bp, synthetic construct
  source 1..752: mol_type = other DNA
atgcgctgggaagcgctttataaatatccaaatgtttgccagagttctaataactggctatgcgctgggaagcgctttataaatatccaaatgtttgccagagttctaataactggctgtgcgctgagaagcgcattataaatatctaactttctttttatgcgctgagaagcgctttataaatatctaacccctttgtgattgagattaaaagaaaattctataaaaataaatttaatcctatgtgatgtgtttttgtcggtctgtagccgacactatatgtttatttgttcacaaagctattaactaatccacatggaagctatatgtccatgagatttgaagctataatcaatagcatgcatcgtattaagcttgctttgcgatgtgattaatagaggattcacgtatccgttgtataccaaacgtgaactttgccggcgatttgagcaccggccaattcgggtaacgtcttcggatagggacccaaccccagacgagactcagtagcaagcgaagtatgacttgttgatcaggcactcgctcataagatatttgagtttagagacctggttgcaatagtatttctaacttgtaaacggaggacggccgttagtgtccacggaataacgtccaatgatgtttgtgattaaacccttttattagggcgaaagctgctgtgtcgactgttcaagatttattcttagcaggacacctgcacggaataatcttgggctcgtcgattgttaaac

SEQ ID NO: 16141 - DNA, 708 bp, synthetic construct; identical to SEQ ID NO: 2319
  source 1..708: mol_type = other DNA

SEQ ID NO: 16142 - DNA, 853 bp, synthetic construct
  source 1..853: mol_type = other DNA
cggtcctttcgaccgtgtggagattcagttaatttcttttgtcaaatagtttattctcagaagtgcatactatatgcttctgagactttatgtgtagtaagtcatactttagagttgagttattacactctactctactttatgatatatgtatgctatacttaaagtctatcagaattgtacttctgttagtgagatatttgatttataagaattacagtaatcgaaaccccgtcatttatcgactttctgtgtttgaaatgtcgcacagatcgtagttcctaaagttagacataacataatttaaggattgtcaaggctaatgattaagttgttaactttcttcttatgatttagttgtactttttaacttgatatagcgcacagcaccgtgcgcttccaatccgacctcttaggtttaatttgttagttcagtaaccgtcaattattgaatgtttacaaattaacccatttgtttattaacactatttaaacatcttatttataatatttttgatttagacataggacttatataacctgttgtatccccctactatatttcatacttgttttaacggaaaaccgcgtaaagagacgtataggattcccagagaatttgtcttatagtagaagaatcggccaatggagtatatttaacgaaacgtacatcgagatccaatgattgtcggaatatattaccaagatatgtatagtttaaggcatcgtacaccgcgatgttaaggtcgtcttacctgatttttaattacctctacttggaattgacccattaatagagtaaataattagtgtttatatattgtgatttacaataaagtattttgacgttttt

SEQ ID NO: 16143 - DNA, 250 bp, synthetic construct
  source 1..250: mol_type = other DNA
tgcttctatttcgattttgttcaagcgttgaccgttgcaggcgcttgtcctattatatgtgcggggttaggatttctcagaatttataagaaagatattttccctcttgtcttatagaaatttccacattatttacttaattggttgaattgaacttttactgttcgtattttgttattttgctctttgcaagaattgttttatttcacctgtaggtgagttttaaatttataatcgttataaaatcacg

SEQ ID NO: 16144 - DNA, 734 bp, synthetic construct; identical to SEQ ID NO: 2354
  source 1..734: mol_type = other DNA

SEQ ID NO: 16145 - DNA, 611 bp, synthetic construct; identical to SEQ ID NO: 2190
  source 1..611: mol_type = other DNA

SEQ ID NO: 16146 - DNA, 1000 bp, synthetic construct; identical to SEQ ID NO: 267
  source 1..1000: mol_type = other DNA

SEQ ID NO: 16147 - DNA, 722 bp, synthetic construct
  source 1..722: mol_type = other DNA
ctatactaacgtattggcttatcaggtttgtattcaggtacagatcatagtcggttcctattcaggtaggaactgtataccggcggctcgtaaggcgagttgctgtaaactggtacgtagccagactacgtactgtaataactggagtcccgaattacgcgactctgtaaatcccggtgttccgctagacggatcactgtataattgctgctcatctaggtgaggagtgtaaactgaataacgttaagcgctattctcaaacaccacgacgttctttcgggagcgttgtttaactgctgactttctaggaagtcagtgtaaaaattccgcaagttcgcttgtggatctaaaataggagaaactttcgaggtttttcccgtctgtctcgtgcttagctcgcttttgacggacagtgtcgcacacgcgttgtcacggaagaccgaattttgctcttctacgcttcgcctacgcttcacatctctgtctctcgcagccgcactgtctttgtgctttgcgatttgattgaacaattgcacttccatcatttggaactgctgaggaccggacttgctcctcacgcacccaactcgttgtcggtgcatcgttcttctttcgggaagcactttcttactgtctccggaattattttcggggtctgtctagcgctctattgagcccttctaccatcgtctcttggccaaggacgattacacactttcatc

SEQ ID NO: 16148 - DNA, 637 bp, synthetic construct; identical to SEQ ID NO: 2225
  source 1..637: mol_type = other DNA

SEQ ID NO: 16149 - DNA, 256 bp, synthetic construct
  source 1..256: mol_type = other DNA
tatatatttaacaagccaaaagctccccaaccgccgtaaaaggaagtactcttgtgaaaactcgagcgcgcccccccaaacccaaccaaatatacgttttatacaatttgaagtttttgaactttaaagtgacagctgtgtctgcaaattgttataagttttgaatactgttttgactcaagtctacgcgaaagtagtgaaaagtggatattgacaatttattagttgtgaaaagattttgtgaatttatattgaa

SEQ ID NO: 16150 - DNA, 620 bp, synthetic construct
  source 1..620: mol_type = other DNA
ctgtaaactggtacgtagccagactacgtactgtaataactggagtcccgaattacgcgactctgtaaatcccggtgttccgctagacggatcactgtataattgctgctcatctaggtgaggagtgtaaactgaataacgttaagcgctattctcaaacaccacgacgttctttcgggagcgttgtttaactgctgactttctaggaagtcagtgtaaaaattccgcaagttcgcttgtggatctaaaataggagaaactctcgaggtttttcccgtctgtctcgtgcttagctcgcttttgacggacagtgtcgcacacgcgttgtcacggaagaccgaattttgctcttctacgcttcgcctacgcttcacatctctgtctctcgcagccgcactgtctttgtgctttgcgatttgattgaacaattgcacttccatcatttggaactgctgaggaccggacttgctcctcacgcacccaactcgttgtcggtgcatcgttcttctttcgggaagcactttcttactgtctccggaattattttcggggtctgtctagcgctctattgagcccttctaccatcgtctcttggccaaggacgattacacactttcatc

SEQ ID NO: 16151 - DNA, 357 bp, synthetic construct; identical to SEQ ID NO: 1666
  source 1..357: mol_type = other DNA

SEQ ID NO: 16152 - DNA, 922 bp, synthetic construct; identical to SEQ ID NO: 2541
  source 1..922: mol_type = other DNA

SEQ ID NO: 16153 - DNA, 615 bp, synthetic construct
  source 1..615: mol_type = other DNA
tatataaagcgacaattttatatacttcttgcgtttttaaggaggaatcctcaaaccttagacccgtaagatactaaggaagaaaaaggaaagattcttctcttacccactcgtgcagctcaccacgataaaaaattcagcattaatcccggccagctcacgccgtgacaatatttcagcccgagcagctcacctcggttatcaaatttagcattaatcccggccagctcacgccgtgacaatatttcagcccgagcagctcacctcggttatcaaatttagcattaatcccggccagctcacgccgtgaaaatatttcagcccgtgcagctcaccacggttatcaaattcagcaaactttccaaaacccacaattttagtagtttaagaattttataattgattacaaacgtttactgcgtacgtccttagtcggagctcgtacaatatttatattggtttgcacaaatcttcgcagtttattaggctttttcttgccaaaaattttattattgatatttactcttttcttcttttgcggactcgtaaataagaaaagttatctatcttgtttatttttgatttacgcttttgacacttatagaacaatacaaa

SEQ ID NO: 16154 - DNA, 385 bp, synthetic construct
  source 1..385: mol_type = other DNA
agctattgtgtatctaccactatcattacattataatcgcttttagccctatagattataatgtaaaatctttcttttcaaatgtgctatttgtcccttgcgtgtatggtactaatgtactccccgcctgggttatccaattcttagaactcaacactctaagaaggcatgtttcaagtcctgcgtaagaccatatctcttttaggtgtctagcgcgtttttatgtattatgtgaagaactaagcaaaggaaatacttctgtataaatacctccttagttcggcttgatccggaatcagcacccggcgcataagaagtatcaacgtatgcagccctatgtgagacccacgtggatttaatatggctataaggacgaccatacagt

SEQ ID NO: 16155 - DNA, 1000 bp, synthetic construct; identical to SEQ ID NO: 268
  source 1..1000: mol_type = other DNA

SEQ ID NO: 16156 - DNA, 488 bp, synthetic construct; identical to SEQ ID NO: 2002
  source 1..488: mol_type = other DNA

SEQ ID NO: 16157 - DNA, 1000 bp, synthetic construct; identical to SEQ ID NO: 2630
  source 1..1000: mol_type = other DNA

SEQ ID NO: 16158 - DNA, 351 bp, synthetic construct; identical to SEQ ID NO: 1651
  source 1..351: mol_type = other DNA

SEQ ID NO: 16159 - DNA, 1000 bp, synthetic construct
  source 1..1000: mol_type = other DNA
aaagggcaacaacaatgtttatgcttatcacaaaagcaattaaggaacgtgtgttatagttcccactttatgtgacctaatgacggtgagcttccgtaagcaagtccgtacatactgaagaatactttgaaagaatctgcaacatggttctctctcgatagtatatatcaggtgacaaacacacactcaacccgattatttcgcgagttctcgataagagaccgcaccaggtcgagctggaggggtgtaccaatccccgcctaacgttgaacttataacgtctgttagtattgttgtaacaaaacaatcctagatgattttggatcctcaatgtatagattgatcacaagagtagtatggtattgattgaaattgaggctatatttaattcgaagattgtagagttcaatatgaaagcattccaagcaggggaccctgtgttagtacgttagaaattggaatcccccgttcagaggtttctgacaaataggatggttgacacatatgtgaatgttattcagttagagtagatttaattttggtacgtgagcagccaactcatgtacaaactgggtcagttaattggaaaacgcaaggagagttttcactgcaatgcagtctagctttagcaggaccaaaattaagttgtagaagactgaatatttacataggaggacgtacactgatggatttaactcgacctctgtgtcgagacggtgaggattaggaaagttccctactacttctcctaggacgccggtgcgactgtgtacgagtcgtacggaaagtgtgatctttagagagcacgaagtttaagtggggcctgacatggtaaagagtctgaaacagttcactgtaaaggtgaaccttggcaagctcgtgatcgatacgagattataaagcaagttcgatgtttccagatttcccccccccgcgccccaccccagaacactcacactttagtcttgtaaattttgaacaagactaaagattattgaaa

SEQ ID NO: 16160 - DNA, 597 bp, synthetic construct; identical to SEQ ID NO: 2164
  source 1..597: mol_type = other DNA

SEQ ID NO: 16161 - DNA, 643 bp, synthetic construct
  source 1..643: mol_type = other DNA
tttctttttatgcgctgagaagcgcattataaatatctaactttctttttatgcgctgagaagcgctttataaatatctaacccctttgtgattgagattaaaagaaaattctataaaaataaatttaatcctatgtgatgtgtttttgtcggtctgtagccgacactatatgtttatttgttcacaaagctattaactaatccacatggaagctatatgtccatgagatttgaagctataatcaatagcatgcatcgtattaagcttgctttgcgatgtgattaatagaggattcacgtatccgttgtataccaaacgtgaactttgccggcgatttgagcaccggccaattcgggtaacgtcttcggatagggacccaaccccagacgagactcagtagcaagcgaagtatgacttgttgatcaggcactcgctcataagatatttgagtttagagacctggttgcaatagtatttctaacttgtaaacggaggacggccgttagtgtccacggaataacgtccaatgatgtttgtgattaaacccttttattagggcgaaagctgctgtgtcgactgttcaagatttattcttagcaggacacctgcacggaataatcttgggctcgtcgattgttaaac

SEQ ID NO: 16162 - DNA, 1000 bp, synthetic construct
  source 1..1000: mol_type = other DNA
gcacatttttctgattgccctttctttgggcgtaactcgttggcgccatcgtgaacaaacttcgaccgacgtctgcctgctacgctttgaagagaaggtggcctcaattcaatgcttatattgcttcagcccgaaacgacatactcaggataagccctgtttattagtgggtcgttgtaatttgagatattgagttgtggtgtttaattgtctcaattaaactgtaaatatttttgttttcttttgttttgttcattttattagtacaatagttttatttttcttttgtttcatgccggtacctatccgcgtccgatgtgggaaagcacttcactagttgatcttagctttataaatctatcaagcggtattctagtgggctaggtacgtcttggtagtctcacttttgtgagcacagtattaagcccggacctcgctcaggtgttgtcagtaaggggattcgtccttctgaaacttcgtaaggcgaaaagggaagtacggtttttgcaatagataggagaaatagcagtgtgcctttaaagtgctgcaaataaaataaaataaaaattttggtttaatacttcccgggactcatttagataaggcggtgtgcaggggtgacctcctatcggatcgaattatctccgactggaaagagagctgtaattgtaaacttcccgagggaacaggattatcgtgatcctggtgtgtaggcccattaacgttcgactgtcccaatttagcggcaggaaataagaaaaattcggcgttagtaaaacctatgatctttgtcccattcgagccaaagcatgtttatgttaggcttgacggttattgttgctataagaacctactgaagagatccccttccatcttttaaataaccagtaggtcgcagtatttcccctgggtgctctttggacttgtctgggggtttgggaaggcaactcatgcgcctccctcactctacgagcatactaataagcatggggccctcttc

SEQ ID NO: 16163 - DNA, 553 bp, synthetic construct; identical to SEQ ID NO: 2118
  source 1..553: mol_type = other DNA

SEQ ID NO: 16164 - DNA, 551 bp, synthetic construct
  source 1..551: mol_type = other DNA
cggttttaaaaccgtacgcaatatttgccatctagctcctgatgtaaaattgagcattaatcaagtttagctctctactataaattgagtaattgttcgtgatgaaatattcatgggcgactctagctctctagtataaattgagcaatcttttatttagtgcttattgttttattgaagacgactgatggcatacggaattgtacttttaattaagggttagtatcctaatagtaaccatgataccgaataaagtaggtccaaagcaaagtgaaatttgtggaggccgtcatggcaatgctattagaactgaggatttaatgcttgacaagcgcaatatctgagcagatagtgtaaaaaatagcaacaatagttaaattattttacgatatgttatgaatatgttagacatgtattatgattcataacctctattcttaatttaactatatccaagtctcggtggatattggattctgttcgcagttaaccgtatttttacattgcccgagtcggagcggtgatattgtatccggactacttaatacaaa

SEQ ID NO: 16165 - DNA, 370 bp, synthetic construct; identical to SEQ ID NO: 1701
  source 1..370: mol_type = other DNA

SEQ ID NO: 16166 - DNA, 251 bp, synthetic construct
  source 1..251: mol_type = other DNA
ccccgcgtctttcacaaagattgcggggagcaagcctcggaaatgttttaggtttaactttttgtgactatatattcattcatttggaaggggataaattaacagatctaaattatattaaaactttagaaccgatagacaccattaaaaatagaacttttgtacctaatgatgtaagtactgaaataagtggtcacttcaagtatactttttgtgatcagggctatttggcatattttcaacacgatggt

SEQ ID NO: 16167 - DNA, 328 bp, synthetic construct; identical to SEQ ID NO: 1576
  source 1..328: mol_type = other DNA

SEQ ID NO: 16168 - DNA, 452 bp, synthetic construct; identical to SEQ ID NO: 1922
  source 1..452: mol_type = other DNA

SEQ ID NO: 16169 - DNA, 561 bp, synthetic construct
  source 1..561: mol_type = other DNA
aaaccagtattacgaccaagtagtgcacgttggccaattttagaatacagtattttacagtatccaagattatgcttctccctaaagagaagcggacaagactttacggtagtatagtcttgtccgcttctctttagggagaagcataatcttggatactgtaaaatactgtattctaaattggccaacgtgcactactttggtcgtaatactggtttcagttcatctgaagctatactaattgggttgttaaaagcaacccgtaatacttacgagtttcatcgctcgtttaatatttctactctttctgagcagaataccacccctacaactcttaatcggagttagtaaacttttcacaccttatcgtgtgaatacattgttttccagttagctgtgaaaactgtctttctgcttcctgttattcaggaagctcttctttgagactagttgtctctcttctattctctcgtaatcgagagaatcctgtcttcggtcctcgcaagagaaccactactgtcttgaaggtttcttttgaagccgtcttatcttgatcttcaa

SEQ ID NO: 16170 - DNA, 547 bp, synthetic construct
  source 1..547: mol_type = other DNA
cgaccaaagtagtgcacgttggccaatttagaatacagtattttacagtatccaagattatgcttctccctaaagagaagcggacaagactttacggtagtatagtcttgtccgcttctctttagggagaagcataatcttggatactgtaaaatactgtattctaaattggccaacgtgcactactttggtcgtaataccggtttcagttcatctgaagctatactaattgggttgttaaagcaacccgtaatgcttacgagtttcatcgctcgtttaatatttctactctttctgagcagaataccacccctacaactcttaattggagttagtaaacttttcacaccttatcgtgtgaatacattgttttccagttagctgtgaaaactgtcttttcgcttcctattattcaggaagctcttctttgagactattgtctctcttctattctctcgtaatcgagagaatcctgtcttcggtcctcgcaagagaaccactactgtcttgaaggtttcttttgaagccgtcttatcttgatcttcaa

SEQ ID NO: 16171 - DNA, 1000 bp, synthetic construct
  source 1..1000: mol_type = other DNA
tgcacatttttctgattgccctttcttcgggcgtatctcgttggcgccatcgtgaacaaacttcgaccgacgtctgcctgctacgctttgaagagaaggtggcctcaattcaatgcttatattgcttcagcccgaacgacatactcaggataagccctgtttattagtgggtcgttgtaatttgagatattgagttgtggtgtttaattgtcccaattaaactgtaaatatttttgttctcttttgttttgtttatttcattagtacaatagttctatttttcttttgtttcatgccggtacctatccgcgtccgatgtgggaaagcacttcactagttgatcttagctttataaatctatcaagcggtattctagtgggctaggtacgtcttggtagtctcgcttctgtgagcacagtattaagcccggacctcgctcaggtgttgtcagtaaggggattcgtccttctgaaacttcgtaaggcgaaaagggaagtacggtttttgcaatagataggagaaatagcagtgtgcctttaaagtgctgcaaataaaataaaataaaaattttggtttaatacttcccgggactcatttagataaggcggtgtgcaggggtgacctcctatcggatcgaattatctccgactggaaagagagctgtaattgtaaacttcccgagggaacaggattatcgtgatcctggtgtgtaggcccattaacgttcgactgtcccaacttagcggcaggaaataagaaaaattcggcgttagtaaaacctatgatctttgtcccattcgagccaaagcatgtttatgttaggcttgacggttattgttgctataagaacctactgaagagatccccctccatcttttaaataaccagtaggtcgcagtatttcccctgggtgctctttggacttgtctgggggtttaggaaggcaactcatgcgcctccttcactctacgagcatactaataagcatggggccctcttc

SEQ ID NO: 16172 - DNA, 777 bp, synthetic construct; identical to SEQ ID NO: 2403
  source 1..777: mol_type = other DNA

SEQ ID NO: 16173 - DNA, 562 bp, synthetic construct
  source 1..562: mol_type = other DNA
aaaccggtattacgaccaaagtagtgcacgttggccaattttagaatacagtattttacagtatccaagattatgcttctccctaaagagaagcggacaagactttacggtagtatagtcttgtccgcttctctttagggagaagcataatcttggatactgtaaaatactgtattctaaattggccaacgtgcactactttggtcgtaataccggtttcagttcatctgaagctatactaattgggttgttaaaagcaacccgtaatacttacgagtttcatcgctcgtttaatatttctactctttctgagcagaataccacccctacaactcttaatcggagttagtaaacttttcacaccttatcgtgtgaatacattgttttccagttagctgtgaaaactgtctttctgcttcctgttattcaggaagctctcctttgagactagttgtctctcttctattctctcgtaatcgagagaatcctgtcttcggtcctcgcaagagaaccactactgtcttgaaggtttcttttgaagccgtcttatcttgatcttcaa

SEQ ID NO: 16174 - DNA, 877 bp, synthetic construct; identical to SEQ ID NO: 2513
  source 1..877: mol_type = other DNA

SEQ ID NO: 16175 - DNA, 1000 bp, synthetic construct; identical to SEQ ID NO: 2631
  source 1..1000: mol_type = other DNA

SEQ ID NO: 16176 - DNA, 520 bp, synthetic construct
  source 1..520: mol_type = other DNA
agaatacagtattttacagtatccaagattatgcttctccctaaagagaagcggacaagactttacggtagtatagtcttgtccgcttctctttagggagaagcataatcttggatactgtaaaatactgtattctaaattggccaacgtgcactactttggtcgtaataccggtttcagttcatctgaagctatactaattgggttgttaaaagcaacccgtaatacttacgagtttcatcgctcgtttaatatttctactctttctgagcagaataccacccctacaactcttaatcggagttagtaaacttttcacaccttatcgtgtgaatacattgttttccagttagctgtgaaaactgtctttctgcttcctgttattcaggaagctcttctttgagactatttgtctctcttctattctctcgtaatcgagagaatcctgtcttcggtcctcgcaagagaaccactactgtcttgaaggtttcttttgaagccgtcttatcttgatcttcaa

SEQ ID NO: 16177 - DNA, 884 bp, synthetic construct
  source 1..884: mol_type = other DNA
gtattaacctaattttaaacactgtatacacacctaaaagcgtaaggtacaagaaccatacaccacctaaaagcggactgtatgtttaaaacaaaccccaaaatccaattcaaacaaaaacctagtcagttaatatttatctgattaaattcaagagatgtgggaagtctcgataatattaaccctttagttttaagttagaagaagagtataacacctaagctctgacctcttagccgagccgtgaaccgccaaagaaagcgcagtaggcgacgagggtaaacgttcaccttgagaaacgatgaaggtgcgtaatcgaaaacttaattaatagattcatcatttgacaccaagttaagtgggaaaatttgttggtttagaactcaaattgtaataaaaattttgaaccgaaacgataagatttctatgattgaataccttatcaagggtgcgccaagctagttagattaaattcgaaacgaaatactagtgcccattcaaaatcataaaagcagttgaaactttaaatcaataaaaatgtacctttgtaaatcttgctctcttgaatgatggatactataacacataattgcttgctagcgggtagtaactagccaatttattgaaggatgaaagccacatcccattatgtgattaagttagcctttgggcgtagtgcaggaaccgtgtaagccctgataaaccactatagattatgacattgaattcagatcaacataggtattcattttcggaaacccattctaaattactttggcaggacttcaaaattgaacgttctgctttcaaataattacacacaaaacaaaacattaactttcatttcaacttcgtacaatttaaacttgaaataataatcaatt

SEQ ID NO: 16178 - DNA, 539 bp, synthetic construct
  source 1..539: mol_type = other DNA
gtgcacgttggccaattttagaatacagtattttacagtatccaagattatgcttctccctaaagagaagcggacaagactttacggtagtatagttttgtccgcttctctttagggagaagcataatcttggatactgtaaaatactgtattctaaattggccaacgtgcactactttggtcgtaataccggtttcagttcatctgaagctatactaattgggttgttaaaagcatcccgtaatacttacgagtttcatcgctcgtttaatatttctactctttctgagcagaataccacccctacaactcttaattggagttagtaaacttttcacaccttatcgtgtgaatacattgttttccagttagctgtgaaaactgtctttctgcttcctgttattcaggaagctcttctttgagactagctgtctctcttctattctctcgtaatcgagagaatcctgtctttggtcctcgcaagagaaccactactgtcttgaaggtttcttttgaagccgtcttatcttgatcttcaa

SEQ ID NO: 16179 - DNA, 611 bp, synthetic construct
  source 1..611: mol_type = other DNA
gtgaggtttatacctcacacacagttttgacccatctatgggtaaaatagacgtccagagttttttagcatgcattctttgagagacgttaagcacatgaaagagcatgaagttgtcgatgtacagagaatttattctccaaggcagggcacatcttagtatatataacaaaacgattccgattatttacgacgaaaccatttaagtattaatcctgacccgattttgatatacaacaaacagctgaataactgttaaaactattcaaacccaatggaccagtaatcttaaattacctgtgacagccgaagtttagtaggttcccaatatagccgtgaaacgcttgagggccgttacagctctagtttaagacctacgtttttaaagcttggtaagcgctttacttgagcaacatatataaaactagtaccaaatcttagtagaatttaagtatgatatttgaatgttagacatgtattatgtcaaatatcctctacatttctacataaaggttatgcaacgctcagtggttgttgcattatggtcgcagttaacttgtagttttatattgcctgtgtcggagcagtagtaaagtaaacagacgatttcac

SEQ ID NO: 16180 - DNA, 946 bp, synthetic construct; identical to SEQ ID NO: 2551
  source 1..946: mol_type = other DNA

SEQ ID NO: 16181 - DNA, 872 bp, synthetic construct; identical to SEQ ID NO: 2507
  source 1..872: mol_type = other DNA

SEQ ID NO: 16182 - DNA, 251 bp, synthetic construct
  source 1..251: mol_type = other DNA
ccccgcgtctttcacaaagattgcggggagcaagcctcggaaatgttttaggtttaactttttgtgactatatattcattcatttggaaggggataaactgacagatctgaattatattaaaactttagaaccgatagataccattaaaaatagaacttttacacctaatgatgtaagtactgaaataaatggtcacttcaagtatactttttgtgatcagggctatttggcatattttcaacacgatagt

SEQ ID NO: 16183 - DNA, 870 bp, synthetic construct
  source 1..870: mol_type = other DNA
taggaggcactcttttgaacactgtagatcggtcgggtaacagcgcagcgatacaagattcttccacagcccttcaggctgactggaagcctttcaaaattttaaaaccacaatactttaaatgtgatcactgctttccactataagactgcctgaacaacagtacgtggttagttagatttaattttaaggaaagaagagtaaaacatcaaagctctgacactgaagccgagcctgtgagtaagccagacaagcagcattaggcagaagtggtaaacgttcaccttgagaaacgtggacggcgcgtcaacgaagtttactttacaaaccatttacaatcgcgtcgtgtgggaaattggaacattctctattatctaaaattctggagtataaacaacccgaaaaggccgtagaaaccatgaagattacggacgagggggcgacaggctagttataactaagttatagcgaaatattagtgcccagttgtttaatatgaaagaatcgcagatttgagagaaggaaccatcgtacctgcgtaaatcgtataagaagattgaaatgagtttaagcaccaagcatacctagcgggttgcgactaggcaagtttaacttgacgggaaatttaaagcctcccatggtgtaagtaaatagcgaaagcgagggtctgacagtgtgcaagctcagatgctaacccttagttgttcttatttagcaaataagattaccctaaccaggtagcgacgtcgaaagccaatcaacataggtacaatcttttaggccgttcatcaaaattaccctggcaggactttcaaaaagaacgttctgctttcaaataattgcacaataataaaacaagtaaataagaaa

SEQ ID NO: 16184 - DNA, 611 bp, synthetic construct
  source 1..611: mol_type = other DNA
gtgaggtttatacctcacacacaattttgacccatctatgggtaaaatagacgtccagagttttttagcatgcattctttgagagacgttaagcacatgaaagagcatgaagttgtcgatgtacagagaaattattctccaaggcagggcacatcttagtatataaaacaaaacgattccgattatttacgacgaaaccatttaagtattaatcttgacccgattttgatatacgacaaacagctgaataactgttaaaactattcaaacccaacggaccagtaatcttagattacctgtgacagccgaagtttagtaggttcccaatatagccgtgaaacgcttgagggccgttacagctctagtttaagacctacgtttttaaagcttggtaagcgctttacttgagcaacatatataaaactagtaccaaatcttagtagaatttaagtatgatatttgaatgttagacatgtattatgtcaaatatcctctacatttctacataaaggttatgcaatgctcagtggttattgcataatggtcgcagttaacttgcagttttatattgcctgtgtcggagcagtagtaaagtaaacagacgatttcac

SEQ ID NO: 16185 - DNA, 429 bp, synthetic construct; identical to SEQ ID NO: 171
  source 1..429: mol_type = other DNA

SEQ ID NO: 16186 - DNA, 890 bp, synthetic construct; identical to SEQ ID NO: 2521
  source 1..890: mol_type = other DNA

SEQ ID NO: 16187 - DNA, 459 bp, synthetic construct
  source 1..459: mol_type = other DNA
caaccgtaaagtcttgtccgcttctctttagggagaagcaaaatactggatactgtaaaataccgtattctaacttggccaacgtgcactactttggtcgtaatactggtttcagtcaatctgaaactatactaattgggttgtttgaaacaatccgtaaaactcacgagtttaaccactcgtttaaactttctgttcgttctcgagcagaatacaactcagacaactctatcttggagttagtcaaaatctttcacactttactgtgtgagtatattgttttccagttaactgcgaaaactgtcttcctgtttcctgttcaccaggaaactcttctttgagattaaccatctctcttctgttctctcgttatcaagagaactttgtctttgatcctcgcaagagaatcactactgtcttgagggtttcttttgaaatcgtcttcttcttgatcttcaa

SEQ ID NO: 16188 - DNA, 475 bp, synthetic construct
  source 1..475: mol_type = other DNA
gagaagcggacaagactttacggtagtatagtcttgtccgcttctctttagggagaagcataatcttggatactgtaaaatactgtattctaaattggccaacgtgcactactttggtcgtaataccggtttcagttcatctgaagctatactaattgggttgttaaaagcatcccgtaatacttacgagtttcatcgctcgtttaatatttctactctttctgagcagaataccacccctacaactcttaattggagttagtaaacttttcgcaccttatcgtgtgaatacattgttttccagttagctgtgaaaactgtcttcttgcttcctgttattcaggaagctcttctttgagactagctgtctctcttctattctctcgtaatcgagagaatcctgtctttggtcctcgcaagagaaccactactgtcttgaaggtttcttttgaaaccgtcttatcttgatcttcaa

SEQ ID NO: 16189 - DNA, 274 bp, synthetic construct
  source 1..274: mol_type = other DNA
cgataaacaaataaatatatgtgtttatattgaaaccataaccgcgtattcacaactggactgtacagcggtagtgtcttattatactggcaggttaaggttttaatataaacacatatatttatttgtttatcgatattatcaatttattattcactactggtttcatcagcggtattgtcttattaaactgaagaagttttaaacgttttattataaaacgcatatttaattgtttattgagaatattgcattaataactctttgggttata

SEQ ID NO: 16190 - DNA, 498 bp, synthetic construct; identical to SEQ ID NO: 2023
  source 1..498: mol_type = other DNA

SEQ ID NO: 16191 - DNA, 288 bp, synthetic construct
  source 1..288: mol_type = other DNA
cgactagtcgtcggcagcgtcagaacaatatatgtgtttatatggaaactttatacctgccagtataataagacactaccgctgtacaggccagtagtgaatacgcagaaaacaagtgaaatatatgcacatatattgtttattgatactatcaatttattattcattactggtctgttcagcagtattgtcttattaaactgacagatttttgttttaaaggttttaatataaaacgtctacttgtctgtgtatcgggtgtctaatattataaccctccgggttacg

SEQ ID NO: 16192 - DNA, 747 bp, synthetic construct; identical to SEQ ID NO: 2370
  source 1..747: mol_type = other DNA

SEQ ID NO: 16193 - DNA, 334 bp, synthetic construct; identical to SEQ ID NO: 1599
  source 1..334: mol_type = other DNA

SEQ ID NO: 16194 - DNA, 744 bp, synthetic construct
  source 1..744: mol_type = other DNA
gcgtaggcaaaacctacgcagtttcttttgactcctctcagaggagagggatcaagtaagtcgatgtatcgcattgataaagggtgggctgacatgtaagtcgatgctgtcattacatgtccatcgctttgtttattagttttaagattttcttcgtctccaatttatttttcgaaatatcttcaacaagaaaaattattgttttaattgactgagttcttataagactatgagtttattgtgtatttctctcttatttgaaccctcgtattttatatagatgcattatgtgtatttggattgtctttcttgacgcttttgaaagggtacaggatatttactttctccagttctcgttggaaaggctctttgaatgattgatatatgctgtttcacattgtttcttgcatagtattgtagacataggctcggcacgcattggcacttccgtacagcaactactctacaacgaatatgtatagcgacaatgtaacgttaaccttggtgatgagttggtgataccctcttggttatgtttcagtatatgtttttctttttaaagatgtgtcccgaggccattctttggtttgatggattgatgaaaagaatacagacattttgttgacatttattatatgagcatattatacacacgacgatgtgaaagaacattgacaatatgaaagcatattgactacaggaaagactgttgacaataggaaagactatacatatgactttaca

SEQ ID NO: 16195 - DNA, 455 bp, synthetic construct
  source 1..455: mol_type = other DNA
cgtaaagtcttgtccgcttctctttagggagaagcaaaatactggatactgtaaaataccgtattctaacttggccaacgtgcactactttggtcgtaatactggtttcagtcaatctgaaactatactaattgggttgtttgaaacaatccgtaaaactcacgagtttaaccactcgtttaaactttctgttcgttctcgagcagaatacaactcagacaactctatcttggagttagtcaaaatctttcacactttactgtgtgagtatattgttttccagttaactgcgaaaactgtcttcctgtttcctgttcaccaggaaactcttctttgagattaaccatctctcttctgttctctcgttatcaagagaactttgtctttgatcctcgcaagagaatcactactgtcttgagggtttcttttgaaatcgtcttcttcttgatcttcaa

SEQ ID NO: 16196 - DNA, 572 bp, synthetic construct
  source 1..572: mol_type = other DNA
attttttacattttattttttatttatttattatttatttttatttaattaaaattttaatttccattttgatttatgaccttttattttaaaaaaatagagtgatagactatatgtcgagggtacactctccagaatcaacataagaagatataatgatttgaatgtttattgtctggtaattgagctaaagcttaggttgaatctgagacggttaccaagttggggctcttaaataattcctagtcatgtcttagggttatttaatccctgtgcaaaacattgctttggtgataaaagctatttgatttatattttcttatgcccctttttattaatacgctgaattggggattctgaaggtatatgcggtgtgtatatagtatatcgccagcggctgggtgaactggcgtgagtgtctgcttcggatgtgactatactcattgtcaggtgaccagtaccgttgtcggcttcatatgtggaggttgagtccgtgatctgaagagttgaactacttatgttggaattcctcttcgggccgatcatatgagtgaatcaatttttattttatt

SEQ ID NO: 16197 - DNA, 286 bp, synthetic construct
  source 1..286: mol_type = other DNA
actacgcaataaaagacctatatagtatatcctactatatatttctgtaagaccgttatactacgtgatacaagtaaacccgttatacctcgcgataaaggtaccccgttctactacgtgacacaagtatccgttatactacgcgataaaagtaaaccgttttactacgtgacaaaagtattccgttataccacgcgataaaggtaacccgttatactacgtgacaaaagtaccccgttataccacgcgataaaagtaacccgttctactacgtgataaagtaaac

SEQ ID NO: 16198 - DNA, 856 bp, synthetic construct; identical to SEQ ID NO: 2489
  source 1..856: mol_type = other DNA

SEQ ID NO: 16199 - DNA, 756 bp, synthetic construct; identical to SEQ ID NO: 2383
  source 1..756: mol_type = other DNA

SEQ ID NO: 16200 - DNA, 877 bp, synthetic construct
  source 1..877: mol_type = other DNA
accttcttttaaacactgtatacacacctaaaagcgtaaggtacaagaatcatacaccacctaaaagcggactgtatgtttaaaacaaaccccaaaatccaattaaaacaaaagcctagtcagttaatattaatctgatttaattcaagagatgtgggaagtctcgataatattaaccttttagttttaagttcaaagaagagtaaaacaactaagctctgacctcttagccgagccgtgaaccgccaaagaaaacgcagtaggcgacgagggtaaacgttcaccttgagaaacgatgaaggtgcgtaatcgaaaacttaattaataaattcatctcttgacaccaagttgagtgggaaaatttattagtttgaaactcagattgtaataaaattttgaaccgaaacgataagatttctatgaatgaataccttatcaagggtgcgccaagctagttagattaaattcgaaacgaaatactagtgcccattcaaaactataaaaacaattgaaactttaaactaataaaaatgtaccttcgtaaaccttgctcttttgagagatggatattataacacataattgcttgctagcgggtagtaactagccaatttattgaaggatgaaagccacatcccattatgtgattaagttagccttttggcgtagtgcaggaaccgtgtaagccctgataaaccactatagattatgacattgaattcagatcaataaaggtatgcactttcggaaacccattctaaattactttggcaggacttcaaaattgaacgttctgctttcaaataattacacacaaaataaaactttaattttcatttcaacttcgtttaatttgactttgaattaataatcaatt

SEQ ID NO: 16201 - DNA, 593 bp, synthetic construct
  source 1..593: mol_type = other DNA
gcacaatcatccctcctggcaacaagtacctctcacacttttattaatagaatgattgatagtgtataaataataattttaaggcaaggttcagattgtaaataatgtttataagtacatcttatactcctagtaagagtccttaatatatatagacggtatactgggcgtaataatggggacccctccaacctgcaaacacaggacgtaaccagtgacgctagattatgagtataagacgaaagtgaccgcttatttatagtcgtggatgacagaaattctattagatagattttcttaaacgcgttctgatcgtgagaatactttcgcgagttactcacggcggagatcgtaagcagatccagactggttacggtacaatacctaaatgatcttacagtgataggtattacgtgtcttacaggcatcgagttcgactgttacgcggatgaagcagcgtagctgaatttttcattttctttcttttatggtgacaagcgatatttaaacattttcgatattttccaagtgattaattgcatttcttatttcattttcaattgtgacttatattatttcaacaataatcaaca

SEQ ID NO: 16202 - DNA, 254 bp, synthetic construct
  source 1..254: mol_type = other DNA
ccccgcgtctctcccagagattgcggggtgttagcctcggaaacgtgttgggacttggtttttgtgactacgtctttgcgcatatagaaggagataaacttaccaatttagactatgaagacacacttgtgtctttaccaccaataactaatcaagaattcatacctagtcaagttagttgtagtgatgaaacgtattttggctttacattttgtccccaaggctacttggcttatcataagaaagaagaatat

SEQ ID NO: 16203 - DNA, 1000 bp, synthetic construct
  source 1..1000: mol_type = other DNA
ccgaaaccgaacttgactgtggatgcaaccaaaagttacctggcgttgcagaccattgtttatcacgaaaaacccatcaatgctatgttttgttccattttccgtgagataaaaactcgggtcacattgtccctaaagaaacatgttaagatcttttgtgatatgtcagctgaagattttgagaatgtgttgaacagagacgtacgaccgagatcgttgtccccttttctcgagaagttggaaatagacattagcaagtatgacaaaagtcagagagaattggcgctcgaatttgagtgtaaattgatgtcgtattttggtgtcgacgcggatatcgttgaattgtggttcaatgctcacgtgttaaccgaagtgtatgacaaaaccacgaagatgagagctcttattccgtatcagaggaaatcgggtgacgcatcgacattcattggaaacaccttgttcttgatggctgtcgtgtgtgatctggtgcctgtatctgaacttgagcttgcattgttttcgggagacgattctctcttatatggtcacaacatggatgtctatcgtgattcgcaacatttcggtttgaagtttaatctcgaaattaagtttttctcttttgaaatgtcgtatttttgttcgaagtttctgttagttgtcaatgataaatggacgtttacgcccgacccagtcaaattcatgactaagctcggtcgacacgatctggttaatcctctacatgttgaggagtaccgtatctcattcgttgacactgttagaaattatcgcgattaccatgtgtgcagaaacgtggcgaaggctttaattgagcgttatggaattgtgactgatcacacatcttttttgatgtctctggacgatatgacttcaagagaaaatttttctctgttgttttattcgttgtcaggtgataaaatcgactactctattactttcaataaagacttctaatctacgagattcgttcatataagttaaa

SEQ ID NO: 16204 - DNA, 341 bp, synthetic construct
  source 1..341: mol_type = other DNA
ccgatcttatgtataaatatctaacttgaaccaaccccaaccaaccccaaccaaccccaactgtctctttcgtgtttcaaccaaccccaaccaaccggaactaactgagattaactggaactaactggaaccaactagagacaaccttattaaggtttggcaacacttgtgttggcttttattcaagcgattttaaaactctattttatatcagtaactgctagctttagtaggccgtacgcgggagccctacaagaacagtgaaagtatcaaacaaaatacaccaaagaaaattaattaaattcaaattttataataaaaatttcaaaataaacttcaat

SEQ ID NO: 16205 - DNA, 692 bp, synthetic construct
  source 1..692: mol_type = other DNA
aatttaaaataagtataggatagttaattttaattaaatttaaaataagtataggatagttaattttaattatttttaataactttatttttaagacaactttatatataagttatgtttaagttattttaagtttttaatcccttttcttttactatactttcttaggagttattttgacaacttggtttgacgatgtttaacatcttttggggtggttccctaactgattgttatttcattattcattctgggtttattaatttctcctttggttagttttaagtggcccttttctccctgggaatgcagcgaagtagtcttgtgctttaagatgcgccttacgattcccttttctctttcttaaattgggatagtttggtatttgggggctagaaacaattctgactggagcgcttaaggttgatactacagtattttcaaactccaaataatactcctggattttttttataggtcattaggggatgtctccgcggtctttctttgtttgaagggggttgcctgatggggtttcggcacccggagtaatttactgtagtttttactttttgcatttagccaaggtcggggttagtttccaagtaggataatacgtcggtctttatggcaagtatttcctatagtgttagtctcaggctgtttgtggaggattgggttgttcatgatca

SEQ ID NO: 16206 - DNA, 800 bp, synthetic construct; identical to SEQ ID NO: 2432
  source 1..800: mol_type = other DNA

SEQ ID NO: 16207 - DNA, 563 bp, synthetic construct; identical to SEQ ID NO: 2131
  source 1..563: mol_type = other DNA

SEQ ID NO: 16208 - DNA, 362 bp, synthetic construct
  source 1..362: mol_type = other DNA
ttggtcgtaataccggtttcagttcatctgaagctatactaattgggttgttaaaagcaacccgtaatacttacgagtttcatcgctcgtttaatatttctactctttctgagcagaataccacccctacaactcttaatcggagttagtaaacttttcacaccttatcgtgtgaatacattgttttccagttagctgtgaaaactgtctttctgcttcctgttattcaggaagctcttctttgagactatttgtctctcttctattctctcgtaatcgagagaatcctgtcttcggtcctcgcaagagaaccactactgtcttgaaggtttcttttgaagccgtcttatcttgatcttcaa

SEQ ID NO: 16209 - DNA, 428 bp, synthetic construct; identical to SEQ ID NO: 1856
  source 1..428: mol_type = other DNA

SEQ ID NO: 16210 - DNA, 780 bp, synthetic construct; identical to SEQ ID NO: 2408
  source 1..780: mol_type = other DNA

SEQ ID NO: 16211 - DNA, 837 bp, synthetic construct; identical to SEQ ID NO: 2470
  source 1..837: mol_type = other DNA

SEQ ID NO: 16212 - DNA, 359 bp, synthetic construct; identical to SEQ ID NO: 1673
  source 1..359: mol_type = other DNA

SEQ ID NO: 16213 - DNA, 286 bp, synthetic construct
  source 1..286: mol_type = other DNA
attagttttctttcgtacgcacgcactttacttatctgttcgttacccccatttgggatccacggaacgatcgtcgacgcatttacgcactcgcactcgcactcgcaactcaaattcgcactcgtattaatactcgttcgcgccaatcgcattcgtaatcgtatcaacgcacctgcactcgcactcgtaaatcgcattcgcactcgcattcgcactcacattcgcaaatcgcacttacaacagtaaattgcacgcaagtattatttcagttacaacaagtaataca

SEQ ID NO: 16214 - DNA, 488 bp, synthetic construct; identical to SEQ ID NO: 2003
  source 1..488: mol_type = other DNA

SEQ ID NO: 16215 - DNA, 897 bp, synthetic construct; identical to SEQ ID NO: 2523
  source 1..897: mol_type = other DNA

SEQ ID NO: 16216 - DNA, 662 bp, synthetic construct; identical to SEQ ID NO: 2258
  source 1..662: mol_type = other DNA

SEQ ID NO: 16217 - DNA, 682 bp, synthetic construct; identical to SEQ ID NO: 2289
  source 1..682: mol_type = other DNA

SEQ ID NO: 16218 - DNA, 775 bp, synthetic construct; identical to SEQ ID NO: 2400
  source 1..775: mol_type = other DNA

SEQ ID NO: 16219 - DNA, 412 bp, synthetic construct; identical to SEQ ID NO: 1808
  source 1..412: mol_type = other DNA

SEQ ID NO: 16220 - DNA, 987 bp, synthetic construct; identical to SEQ ID NO: 2568
  source 1..987: mol_type = other DNA

SEQ ID NO: 16221 - DNA, 301 bp, synthetic construct
  source 1..301: mol_type = other DNA
gtgagtccctccgtcttgggcagacgttaaatgcatccattccggacctattcgggattgtattactagtgttgaaaataggtttgtacaattggattactgcatgtttttatattttatatgtttacataatacatgaacagctttgtacatttagacatgtccctcgtggcataccagtgttcactggagagctcgtcactcaacaaaacatcattgcctttatgtgtgttaagcagcaccatttaggtattcgttaaataagcttaccgattctaataataataataataataatagc

SEQ ID NO: 16222 - DNA, 987 bp, synthetic construct
  source 1..987: mol_type = other DNA
catggacgtaatgtccatgcagagaattataatacttttatcagatatatctatgatattgtttcaagagttcatcttgaaactttcgtatgttagagcttgtatattgttgtcaatgtatgggttcttcccatacaacttcatatacaagatatttttcatacgctaagtttcgtaattgatagaatctcttgttgctttaagtagaatatttgatgaggtgttattattcgccccagttttctatctgtttacagctacgacttaaccattagtcgataacgcaggctgtatcctagttcagtaaagtacatagaatgcaaagatatttagactacttaagctactgataaagtttatactttcgcttttgatgtagatgttcatttacttaagtatagcgctctgaaccgagcgcttttgtttatgaaagaatttaatcaactctttcacccggccacacatctttagagatgtttatgacagtattaatttgtttaatactcgaggccaaatttcggtgtttttactaattgcaagatgtctacggactgccaaaatcttgtgtatttagtataaattcctctcccattttagttttaactatgaaattcttttattagtcgactatttaggtttaggactttaacactgctcgaggaatccccctttatatgtgaaaattatgatttaacacatactcgccccaaagaagggtttagagatgttagtaaaagagtaacattttagagaagaatcggtccttggaggtgttttaatggaacgtaccccaagatcttattataaccggaatatacaaaggatgtatgtataatttaaggtatagttaccgctatgctagggccgacatgcccgatttttaattacctctacccgatgttgaccagtcaatatttttaaactaatgaattagttttattctaactttggaggaaagttatttggcacgccctttctattttaatc

SEQ ID NO: 16223 - DNA, 301 bp, synthetic construct
  source 1..301: mol_type = other DNA
gtgagtccctccgtcttgggcagacgttaaatgcatccattccggacctattcgggattgtattactagtgttgaaaataggtttgtacaattggattactgcatgtttttatattttatatgtttacataatacatgaacagctttgtacatttagacatgtccctcgtggcataccagtattcactggagagctcgtcactcaacaaaacatcattgcctttatgtgtgttaagcagcaccatttaggtattcgttaaataagcttaccgattctaataataataataataataatagc

SEQ ID NO: 16224 - DNA, 987 bp, synthetic construct
  source 1..987: mol_type = other DNA
catggacgtaatgtccatgcagagaattataatacttttatcagatatatctatgatattgtttcaagagttcatcttgaaactttcgtatgttagagcttgtatattgttgtcaatgtatgggttcttcccatacaacttcatatacaagatatttttcatacgctaagtttcgtaattgatagaatctcttgttgctttaagtagaatatttgatgaggtgttattattcgccccagttttctatctgtttacagctacgacttaaccattagtcgataacgcaggctgtatcctagttcagtaaagtacatagaatgcaaagatatttagactacttaagctactgataaagtttatactttcgcttttgatgtagatgttcatttacttaagtatagcgctctgaaccgagcgcttttgtttatgaaagaatttaatcaactctttcacccggctacacatctttagagatgtttatgacagtattaatttgtttaatactcgaggccaaatttcggtgtttttactaattgcaagatgtctacggactgccaaaatcttgtgtatttagtataaattcctctcccattttagttttaactatgaaattcttttattagttgactatttaggtttaggactttaacactgctcgaggaatccccctttatatgtgaaaattgcgatttaacacatactcgccccaaagaagggtttagagatgttagtaaaagaataacattttagagaagaatcggtccttggaggtgttttaatggaacgtaccccaagatcttattataaccggaatatacaaaggatgtatgtataatttaaggtatagttaccgctatgctagggccgacatgcccgatttttaattacctctacccgatgttgaccagtcaatatttttaaactaatgaattagttttattctaactttggaggaaagttatttggcacgccctttctattttaatc

SEQ ID NO: 16225 - DNA, 301 bp, synthetic construct
  source 1..301: mol_type = other DNA
gtgagtccctccgtcttgggcagacgttaaatgcatccgttccggacctattcgggattgtattactagtgttgaaaataggtttgtacaattggattactgcatgtttttatattttatatgtttacataatacatgaacagctttgtacatttagacatgtccctcgtggcataccagtattcactggagagctcgtcactcaacaaaacatcattgcctttatgtgtgttaagcagcaccatttaggtattcgttaaataagcttaccgattctaataataataataataataatagc

SEQ ID NO: 16226 - DNA, 471 bp, synthetic construct; identical to SEQ ID NO: 1965
  source 1..471: mol_type = other DNA

SEQ ID NO: 16227 - DNA, 328 bp, synthetic construct; identical to SEQ ID NO: 1577
  source 1..328: mol_type = other DNA

SEQ ID NO: 16228 - DNA, 365 bp, synthetic construct; identical to SEQ ID NO: 1685
  source 1..365: mol_type = other DNA

SEQ ID NO: 16229 - DNA, 279 bp, synthetic construct
  source 1..279: mol_type = other DNA
tctttctgttacattagtagcaaggcactcatcttcattatacatactacatattcataagtttttacacttatcaagttctagtatcatataagaaaatgaaacccccacgcatgagcaaattataggtaaagatctcgtgttttttaagacaaatacacataaaagaacttgtccagtgaaagtttcaaaaatctcacccgatttcggagtatttcgtcaatatatgtcacccatccacagaggattcaggtcagcataattgatgtcactatcagc

SEQ ID NO: 16230 - DNA, 1000 bp, synthetic construct; identical to SEQ ID NO: 2632
  source 1..1000: mol_type = other DNA

SEQ ID NO: 16231 - DNA, 528 bp, synthetic construct; identical to SEQ ID NO: 184
  source 1..528: mol_type = other DNA

SEQ ID NO: 16232 - DNA, 707 bp, synthetic construct; identical to SEQ ID NO: 2317
  source 1..707: mol_type = other DNA

SEQ ID NO: 16233 - DNA, 253 bp, synthetic construct
  source 1..253: mol_type = other DNA
gtaacatcagaactccgccttgaacctctaaaggtttggttttcggcgtggatacctagagccttatgacatttgtcctatgagtttgtatggttcctcaccgagcttgacgacctcgtgttgacatggaacgtagtctttttcttgatcctttccgaacgtatcataggagcgctggtagtcttgttgagtaatccaagacaattagctctgagtgtgagtttggatgtaggtgatctgtacatatttattt

SEQ ID NO: 16234 - DNA, 303 bp, synthetic construct
  source 1..303: mol_type = other DNA
gtacttgtggactaagtctaacccgtttttgtgtgcgttatcacataacccatttgtattttattatattttattattttagcaagattaatttttccgctgttttccgtaagtcctacataggagctcgtgcagtatttatactgatttgcacaaatctacgggcactcctcggattctttattcccaagtgtttattaattgttttaaccctgttgttctttttaggtcttcttaataagaaaatttatttgtcaactatatttgtaatttacgcttttgatactgttcaaactattaaca

SEQ ID NO: 16235 - DNA, 390 bp, synthetic construct
  source 1..390: mol_type = other DNA
taaagtttaagatttaaactcactacaaaacaaatacatgggcgcagcgtatgcgcccatgtatttgttttgttgtgagtttaaatcttaaactttaaaaatacttaagttcaagctttatgtttttattttatcatttttgtatttcattccttttatattttctttaggtgtagtgaaatttgttatttgctcctgtttaatttctttaggggtatactttctgtcagcatacaaatgatatagaacttgacggtttgattgatagtgatttgggctttatgttaaaaatcgtttctccggagtcgagattttcgccggttaaacggggtcgagtccctggtaaagtctaatgatcttgatagataactttaaggtgttggagtttgt

SEQ ID NO: 16236 - DNA, 783 bp, synthetic construct; identical to SEQ ID NO: 2416
  source 1..783: mol_type = other DNA

SEQ ID NO: 16237 - DNA, 576 bp, synthetic construct
  source 1..576: mol_type = other DNA
tcgtacggacgttaaccgtccgtacgagatatagtctagttggcagcttaaacccgctgcccaggttctacctgtattttaggtactgttctggtttgctctggaatgggatcgcatcgtacatggaagaaccatgacgatgtcccactgtagagtgtaccacactgttactgctacgattgacagctatataaaagtttttaatggagggggagttaacctctgtaaaaaatcataaacccttataaagtgtttttcatactgattcaaaggcttgcacttgataaagcctcaagatctaaccccataatcaatgggattactgtgcatacggaagtaccggagccagttcttatgatggtattcgcttatatgccgaaaataaagcccccgtcctaacaaaacaaggtgggcaccctacacgggtggacaccgagccgtagagtcacgggaagtgtagatttgaaagagcttgctcttagtctgcttctatacgcttgacagagatttgagttttgcacttgtgtatatagcgtctcatttgtcttgttaaaacgtgtctcgatttgttgtcga

SEQ ID NO: 16238 - DNA, 404 bp, synthetic construct; identical to SEQ ID NO: 1789
  source 1..404: mol_type = other DNA

SEQ ID NO: 16239 - DNA, 943 bp, synthetic construct; identical to SEQ ID NO: 241
  source 1..943: mol_type = other DNA

SEQ ID NO: 16240 - DNA, 583 bp, synthetic construct; identical to SEQ ID NO: 2151
  source 1..583: mol_type = other DNA

SEQ ID NO: 16241 - DNA, 578 bp, synthetic construct; identical to SEQ ID NO: 2146
  source 1..578: mol_type = other DNA

SEQ ID NO: 16242 - DNA, 648 bp, synthetic construct
  source 1..648: mol_type = other DNA
tattatgatcttgtatcagaaccacgccgataagctcggataatattatccctggctctgcaatttattatgacgactattgagatgaacactattggactatgacttgacttattatttgttatttgtacgttagaatcaggcaagcttgcctatcctgtttacttgtcgattaatctaggactgaacgttaatacgaactacttatcgagtaggtaacccactaccgaaattgtggctaacccgaaacattaagtagaatttttgtatcgattattaagaactttgattatgaaaccgcactcagtgacgcaagtaatactatgaaagaagaaacggcttttatagtgattaggacgtgaacgcaaaatcgtaatgtttgcctatacattgacgatttgttctgtctgagtagttattacgttatagaattcctaaagtatcttggaaccctcgtattactctcacacttgaggaggtgtgttagtattaaggtaatccattgatatgtgaagaattcgactaacggtgttggtatgttaccggtaaggtttgtactatgatgtacttaagggaccagttaggttaactcttggtgccacggccaagacccgctcaacgcgcataccgcatgaatggaaatatttt

SEQ ID NO: 16243 - DNA, 919 bp, synthetic construct
  source 1..919: mol_type = other DNA
ggtataggccaccctctctcttagtaatactcagcattatataactgttagctcgtttaatcgtctgcacgctctgaaccagtattttcagttatggtgttgtgtacctaagttcccgtgtctcaagtatgatattctcgattaatcgtctgcacgctctgttcgagaaggattgtacacccaataccacccaaccgaaccttattatgattttgaagacccttctgacagtatcaggctactacccgcatttatgtaggctctagtgttactgaaagaagcttaatcttctacccgccacctgatttatattgaatgttaacggaatatcctagtttaagcaattagttaagtgattagtttaacttaagtttaagaacacaataaaaaaacaaaaacaaaatacaaaatctagtataaggccgtaccgagacgaatttgtgagttagtaattattcgcggcactctcccaaaaggacttgatgcttggataatgaacgcaatatcttaggatcctaccagcagcagctggacctgttttacaggtgggcaaggcatgttattggggagaccatagcagttttactgtaccctaccacacctcctcgtggataaattggagcaagttttggcgaatatttcttgtataaaatgtcactaggacggtatcgccgaataaaggatacccggaaccagccccgtcatcagcggtgaggacactaatgtgttaaaaaccactttttcaatccacatatgcgtacaacctaaagaattcaacacaagtgcttccccaagcgattatacaaagcgattacacaaagcaaatattcaaagcgaatacccaaagcgattacacaaagcgaataaatcaagaagaagatatctgaggagaatatatagacaagcagttacttgtact

SEQ ID NO: 16244 - DNA, 695 bp, synthetic construct
  source 1..695: mol_type = other DNA
cgtagcatgacccttatgggtcttgcactgaggggcatgttggtgaactagcgaatcaccagggtgttccaataaccggcctaatcagccaaccccttgggttggggtctttctcttttgatgatagggtgtcttttgacaactttttggacctttatgtcatcaactgatgagagacgaaatccaccagtggtttaccattggaatttgttttgattgttttgtcttcattcgtttattttttatagttttatttttctatatatttattatatatatgtgtctgtttattgcatttttatatacatgttaggtgtttttcatttgtgttctatgatacatttataatatgattttcgtttgataccaaacataaagccgtgggtttatccccaaacagcctaacgatccgctacggcggggaaggccttaactgagtcctcctgctttctacgtgagtgggagccctgttcctgggttgtgaccagataaaactcgtagggacctggtgtgggttggcgagttctggacattcatgatgaggagtacatcaagctctatattctgcattgtctttgttctcgttatagctaatacatccggtttgcacgtatgttcggctaactttgccttggagatgtgcgaatgtgactccccgaaaggtaaccaagtgagttgcgagccaaaaagggtaa

SEQ ID NO: 16245 - DNA, 692 bp, synthetic construct; identical to SEQ ID NO: 2302
  source 1..692: mol_type = other DNA

SEQ ID NO: 16246 - DNA, 666 bp, synthetic construct; identical to SEQ ID NO: 2267
  source 1..666: mol_type = other DNA

SEQ ID NO: 16247 - DNA, 724 bp, synthetic construct; identical to SEQ ID NO: 2341
  source 1..724: mol_type = other DNA

SEQ ID NO: 16248 - DNA, 916 bp, synthetic construct; identical to SEQ ID NO: 2537
  source 1..916: mol_type = other DNA

SEQ ID NO: 16249 - DNA, 451 bp, synthetic construct; identical to SEQ ID NO: 1919
  source 1..451: mol_type = other DNA

SEQ ID NO: 16250 - DNA, 716 bp, synthetic construct
  source 1..716: mol_type = other DNA
gggtaaaaccctcctctccttttggcacaaacagagattcctccttgttaggttaagtcctggtggtagatcactctgccattaggttaagtcctgactttgactgcccctctgtgttatgtcgagattccttgtgattaagtagtaagtcctgaccttgggttaccccactgttaggttgtaagtcttggtctcaactaaccctcggcgtagctgtgtcgaattgagaacctttatttgcttagattaggacaagcgattttctttgtcgctataagttcgtcaggcattgcttattgcctgtccctttctatctgtcccagagtcctgtgactactcttgtcccaaaacattgtagctgctagtaccatcgtgtgttgattattacaggtaacagcgtagatcttcactggcaacagtaaagcacgacagcggaacgcagagcactatggtgtattaaggcacttgtagtttctaactctatctttttcgacaaccggatgcgcatgacgggattccttctttaggaatgaaagggtaattattgcgtagtcgggtttaccggctattgtctactcgttgtgcgttaatgttcgcttccagaacagtccgaaagtgcactctatctctctcttcagtgtgtactgccacgtgttgtcttcttagtggcatatctttaacccgctagggatcttttaattttgcaatttcattat

SEQ ID NO: 16251 - DNA, 606 bp, synthetic construct; identical to SEQ ID NO: 2180
  source 1..606: mol_type = other DNA

SEQ ID NO: 16252 - DNA, 573 bp, synthetic construct; identical to SEQ ID NO: 2139
  source 1..573: mol_type = other DNA

SEQ ID NO: 16253 - DNA, 479 bp, synthetic construct; identical to SEQ ID NO: 1983
  source 1..479: mol_type = other DNA

SEQ ID NO: 16254 - DNA, 305 bp, synthetic construct; identical to SEQ ID NO: 1496
  source 1..305: mol_type = other DNA

SEQ ID NO: 16255 - DNA, 869 bp, synthetic construct
  source 1..869: mol_type = other DNA
aggaggcactcttttgaacactgtagatcggtcgggtaacagcgcagcgatacaagattcttccacagcccttcaggctgactggaagcctttcaaaattttaaaaccacaatactttaaatgtgatcactgctttccactataagactgcctgaacaacagtacgtggttagttagatttaattttaaggaaagaagagtaaaacatcaaagctctgacactgaagccgagcctgtgagtaagccagacaagcagcattaggcagaagtggtaaacgttcaccttgagaaacgtggacggcgcgtcaacgaagtttactttacaaaccatttacaatcgcgtcgtgtgggaaattggaacattctctattatctaaaattctggagtataaacaacccgaaaaggccgtagaaaccatgaagattacggacgagggggcgacaggctagttataactaagttatagcgaaatattagtgcccagttgtttaatatgaaagaatcgcagatttgagagaaggaaccatcgtacctgcgtaaatcgtataagaagattgaaatgagtttaagcaccaagcatacctagcgggttgcgactaggcaagtttaacttgacgggaaatttaaagcctcccatggtgtaagtaaatagcgaaagcgagggtctgacagtgtgcaagctcagatgctaacccttagttgttcttatttagcaaataagattaccctaaccaggtagcgacgtcgaaagccaatcaacataggtacaatcttttaggccgttcatcaaaattaccctggcaggactttcaaaaagaacgttctgctttcaaataattgcacaataataaaacaagtaaataagaaa

SEQ ID NO: 16256 - DNA, 815 bp, synthetic construct
  source 1..815: mol_type = other DNA
agcactgatcttagaaggatcttattatagattattactttgtagcatgggtccttcttagggccccatgttagattgtttaattttgtatattaggatgtggacatttcagttagctattgaattacgatttatgtaatcttggtgctccagactggtaatctggagcctccattgtaactttgaattaattaaatatctaaatttaccactttgagtgtttattctgtgaatatgcactcgttgctctccaccttgcgtggagagcttttgctccccatatatcggggagcttttgctccacactattgtgtggagcttttccctgcttttgcaggggttcttgatgttttatctgagttgactacggtcatgtgtttacgctcagacttatcatcacctatagaaatctcaagaattttattagttgaatttctatggttcgttaccttttataagaatggttatgtatgttcgaggaatcccctcggcactatttagtaatttcgtttattaaatctccgaagataggagagcttaccagaaacagaactttagtgccgaaacaatcggtcctcggctgcgttttgagcaacgtatcgctacatttacattatgttaggtattcgcaatatcatttagggattatgtatcgtttaagcatcagtcaccgctgatgtagggtgttggcactcccgacttttaaatacctctatctcttttgtgagccgatatcattagattttcgtaaactactattacgattgtttttaatatagttttatttaaacacaacccccctctccacttttatc

SEQ ID NO: 16257 - DNA, 414 bp, synthetic construct; identical to SEQ ID NO: 1811
  source 1..414: mol_type = other DNA

SEQ ID NO: 16258 - DNA, 1000 bp, synthetic construct; identical to SEQ ID NO: 269
  source 1..1000: mol_type = other DNA

SEQ ID NO: 16259 - DNA, 424 bp, synthetic construct; identical to SEQ ID NO: 1844
  source 1..424: mol_type = other DNA

SEQ ID NO: 16260 - DNA, 860 bp, synthetic construct; identical to SEQ ID NO: 2493
  source 1..860: mol_type = other DNA

SEQ ID NO: 16261 - DNA, 768 bp, synthetic construct; identical to SEQ ID NO: 2394
  source 1..768: mol_type = other DNA

SEQ ID NO: 16262 - DNA, 950 bp, synthetic construct; identical to SEQ ID NO: 2552
  source 1..950: mol_type = other DNA

SEQ ID NO: 16263 - DNA, 993 bp, synthetic construct; identical to SEQ ID NO: 246
  source 1..993: mol_type = other DNA

SEQ ID NO: 16264 - DNA, 983 bp, synthetic construct
  source 1..983: mol_type = other DNA
ctccacgcgggtattacccgcgtggagatcaatgaacttttatcagtagtaacaatttgttactcaagtctatcgaatgacttttattaggtattcgaaactctttataaacaaccatgtctattaggggttttacccctatagttatttgtttgtatttgagtttcaatgaattgttagtaaaagtaatttaagcatatacttgtttaatgtattgaaaattctgctgatttagtttatgatcgaacccaagttttctatctgtagtcgtttcattattcttttttgaattttgttctagctggcgattatgttgctctttcgagcgccaagctaaatatcgaaccgatttggattgcaattggattatatggcattagtctcagttgtagttgttctttaacatttcgattccggtgaaccccggaatttgttcaggccttttggccactaaaacgctattaactcatacacacagaagcgttttaaatatatgtctgtgagatgtaatttcgtaatttacggactttattgaatgaggtagtacctgtatcaatatcgtatttccactctacggagtgaagagcccccctgtttatttggctcataatagaatagacctagtttatcatcacgctatgatcctgtgatgttcttaggttacctatcttatgatatggggaccaaaccctagacaagactcattagtcggcgtattgtctgaaacctatagtgggaagtaatgacccccaagttcacttgagaattcttgttggacagctatttggttgaagccttaccaaccgatgtacttagtgtaccgcttctgcctgcggcgaataatacatgtttaaagtacgtaagtaagttcatcctcttaattgagtggtgaagcaaagcttttgtgtcgaagcacaattggattaccaattttgcgggcctctcgcgaattggttcctctgtgcttgtcgctttcaatttta

SEQ ID NO: 16265 - DNA, 622 bp, synthetic construct; identical to SEQ ID NO: 2202
  source 1..622: mol_type = other DNA

SEQ ID NO: 16266 - DNA, 437 bp, synthetic construct
  source 1..437: mol_type = other DNA
gttatatgtctatgtgtttagtgttgtacgttcaattatttgaacgtgccgctctcgatacatatgtcattataggtattgattgttcaatttaaactcgtttttcgtacttttgtcgtaaaaaagttcactttttcagtctactatcaagactttaaaaggatagttggagttttcgcacgtctccgtaatttacacttcgtgtagtgcaatctccggtactttggtaatcagccggattataaatttttggatttactgagctaacagtctcctcatactgtacgtcgtgcccatagatggtacgcaaattgtaggtattcctactcatggggtttaatggtagtactgatctggtaccccggctattatagcctaaacaactcagtttttgccaggacgctgttatttataacagtagtcctggcgtatatatt

SEQ ID NO: 16267 - DNA, 665 bp, synthetic construct; identical to SEQ ID NO: 2265
  source 1..665: mol_type = other DNA

SEQ ID NO: 16268 - DNA, 278 bp, synthetic construct
  source 1..278: mol_type = other DNA
tcttgtatgcatataatgtagtctagtaaattgcatacactgctatccagcttttaggtcccctatttagggagagcgtcctgcgagcagccctccaaaagctcaatagacttcggagcagccatcctgggttagatcggcagccatgtttacatggtgctcttaaaaattaacctgctaatcaaacttcaactaacaacagcagcacaattgctgcatcaactcccgccaattttggcgatcaggtagtacaatcttccactcaagtatcaactact

SEQ ID NO: 16269 - DNA, 911 bp, synthetic construct; identical to SEQ ID NO: 2533
  source 1..911: mol_type = other DNA

SEQ ID NO: 16270 - DNA, 692 bp, synthetic construct
  source 1..692: mol_type = other DNA
catgacccttatgggtcttgcactgaggggcatgttggtgaactagcgaatcaccagggtgttccaataaccggcctaatcagccaaccccttgggttggggtctttctcttttgatgatagggtgtcttttgacaactttttggacctttatgtcatcaactgatgagagacgaaatccaccagtggtttaccattggaatttgttttgattgttttgtcttcattcgtttattttttttatagttttatttttctatatatttattatatatatgtgtctgtttattgcatttttatatacatgttaggtgtttttcatttgtgttctatgatacatttataatatgattttcgtttgataccaaacataaagccgtgggtttatccccaaacagcctaacgatccgctacggcggggaaggccttaactgagtcctcctgctttctacgtgagtgggagccctgttcctgggttgtgaccagataaaactcgtagggacctggtgtgggttggcgagttctggacattcatgatgaggagtacatcaagctctatattctgcattgtctttgttctcgttatagctaatacatccggtttgcacgtatgttcggctaactttgccttggagatgtgcgaatgtgactccccgaaaggtaaccaagtgagttgcgagccaaaaagggtaa

SEQ ID NO: 16271 - DNA, 289 bp, synthetic construct
  source 1..289: mol_type = other DNA
gaaacgaccatgatttctcctctactatgttgtcaatcgctagtagaacattagtcttagaccatgattagttaatactcatttacgagtcccttgctatgtttgtatctttgacgagtcgattgaattatgagcgtttgacgaacgttcagcactttaagtgtaagttagtcttaggttttagcctaaagcactcttccctttaattaggttagtaattggagtgtagtaagctttctgccaatatggcaccccatgggtttggacttaccttagtaccacgaacgtt

SEQ ID NO: 16272 - DNA, 801 bp, synthetic construct; identical to SEQ ID NO: 2436
  source 1..801: mol_type = other DNA

SEQ ID NO: 16273 - DNA, 303 bp, synthetic construct; identical to SEQ ID NO: 1493
  source 1..303: mol_type = other DNA

SEQ ID NO: 16274 - DNA, 465 bp, synthetic construct
  source 1..465: mol_type = other DNA
ctttaattaatttaatttgaatgcgcatacacccttcgtatgcgtattcaaattaaattaattaaagattactattgattttaatcggcttatttgatcaaacacttaattcttcctaaaattggtattaagactttaattataatacctcatattggtcttccatctttgggttatagcaaaactataattcttcctgatattggcttatatggcgtttaattttcttctgatacccatcatccaatttattctttccttatacttttatctattactttatccttttctatactttcgttatatatcacttatataacataaaatataaaaatccaaaaagtttaattaaattactcattttattctttaaaataacttcatattcacacatcaattattctacggaatttcatatctttgtaaggtaagcataaagatccttactccttgaacaaggcataa

SEQ ID NO: 16275 - DNA, 381 bp, synthetic construct
  source 1..381: mol_type = other DNA
gtatgcaacaacatacacactcagtttgacggacctatccgtaaaatagtccacccacttttagtggtcgctttttaccaggactcgatcctgtcgcacataaataacatactaatattattttatgatgctgatttggtattgtgttttagttagacctacgttgttcattagtactgccttgcgaggacgactatagacactggaacgtgaactgcaagtcggaccttttattaaccgctgcatgcaagttatagatcctattacacaatatgcgagaatgaccatggctttggattatggctttgaacagaacgctggaacacgtttcaggctctcgaaaagttacagtacggagctagtgaaataagtctttgtgga

SEQ ID NO: 16276 - DNA, 331 bp, synthetic construct
  source 1..331: mol_type = other DNA
atccagagctaggggctctctctaatcgccgcaaggagggagcagcaaagtccggtctctggtcttcgttttagaagggcggagagcttcggctctactggctggtgtgtgccgcctaaaatccaggctaccagctcggcgcttttgaccagatccgttgaatcgagcgactgggagttagctaactcaatcgattgctacatcacaaaatcaagatttgtcccatattgggccgcaagaagatgttcagcagatcacgacattcgtcgacgattctaacatccagtcgtacgaaaagccacatatatcatctgtgactgcatggacaaaa

SEQ ID NO: 16277 - DNA, 654 bp, synthetic construct; identical to SEQ ID NO: 2251
  source 1..654: mol_type = other DNA

SEQ ID NO: 16278 - DNA, 439 bp, synthetic construct; identical to SEQ ID NO: 1886
  source 1..439: mol_type = other DNA

SEQ ID NO: 16279 - DNA, 453 bp, synthetic construct; identical to SEQ ID NO: 1924
  source 1..453: mol_type = other DNA

SEQ ID NO: 16280 - DNA, 321 bp, synthetic construct; identical to SEQ ID NO: 1551
  source 1..321: mol_type = other DNA

SEQ ID NO: 16281 - DNA, 784 bp, synthetic construct; identical to SEQ ID NO: 2417
  source 1..784: mol_type = other DNA

SEQ ID NO: 16282 - DNA, 291 bp, synthetic construct
  source 1..291: mol_type = other DNA
aatcctctatttctcctaggtttgattgggcggtcaaatctctgtacggtagtctatcacttaattctatgtgatctccaaggttggagcgatagatttaattttaaaatattttaaataatattaaaagtacctttaataatagtattaatataaatttatttaccaaagcttatcaagtgtaaatttacttatttatgagagagtatttgattacttttgtttcatatttattaggttatttaattggttattcaatttcttatttttattttaatattataagaggag

SEQ ID NO: 16283 - DNA, 283 bp, synthetic construct
  source 1..283: mol_type = other DNA
attcaaaagaaggcatcgtcgttaggtgacgttaaaacctacccagtttcaaatctgatggtgagcaaaattgaacatgtatatggataccatgtattttatatgttttctagtttttgtatattgtatataggctttgcatgtgaagggcccgtactgcgggatcgagagatgggtacaccctgcccaactgtaaattagacgcaatgagttataatcctaagctcatatgtgtacatagtggattactaaaacaaataaacaaacaaacaaaaataaaaac

SEQ ID NO: 16284 - DNA, 778 bp, synthetic construct
  source 1..778: mol_type = other DNA
ccgatctggggaaacccccctgttctcttttgaaagctgaagtattggattttgcgtgatttattgagttaccgcagtttcatctgaatttattccggattttgcaaaatgttcttttgtttaattgataccagcgggattttatctaacgaatctagccacacttttaatcattagcactctttagtacaacggcaccaaccaacccccccttttatcattttaatattcttctgtgacaggcgccttagcgcagtcagtgtttgaggattctttatccatttcggaccgcgttatctatttatagatcctttttacgatttcacactgattgtttttaacaaccatcacccttatatttacgtgtacaaaaaattataaaaacgtcgcaagacaccaaaaacaactgtcttttcatacattagatgcaataataacactgatgaattagactatgaatcagatttacctatatgatactaaaacgtcgccgaggcataaagagcggacccaaaaggaaaacctacgtcaagtattatatctgctgatcagccatcttttttattttgtgcgctgtttttgcggacactttgtaaatgctatgtcgttgctgggctcacttttcgagcaataattactagaacccaaaaaatgaataaaggtcttacgggtattcttaggcagcaactttcattgtcaatccaaacatgtttcggtgtttggttctagcaattaatccttcccacgattcctattttaactctttttaacattcacg

SEQ ID NO: 16285 - DNA, 1000 bp, synthetic construct
  source 1..1000: mol_type = other DNA
tcaaccaacccctaggttttgtacactttagccacaatcaaatgtactttttgggttagacctagttctaacccacatgctttgtaatagcatgttaatcaaaatacaaccctttttagttaatcacactggtattatttcattaactaacctgtagagtgtgtaatacttaaaatttaatttttataagagatttattaagatttttaatattataattataaataccccctagcgtgcgcaatgcgttttggggatttattatttgaatttgcgtctaatgtaattcttaccttccgccattatttaattttttatcaccgcgaggagtcctattagagtgatacaattttatttataaggttttgaaagagaagatagtttttaggtccaaattgcaagccttcacagggtattagaatcgattccctggtgtttaagactgaagtttgctgctaattattatgtttttgattaattaatttatttattatttaaatcaaaattttttgtattcaaggtactaactttttatttctttattgtcattataagtcaaccaattgttcgacgacacgaaagcgaaaattgcaccaatacaattgattcaatcaataatcaattaactactacaaattcattttgctcactttttaatggtgagcatgtgattgatgagactttaccaattaaagtcgtcgttctctctgatactgaacgatttgtgttcaagatttttaatatctatgatatttatcggaaattacgaacacgttttactaaacgaaattatgatttgaagcattactataatcctttagatttgcctcaattttatttatcgtttaacaacaaaccattacgagatttacctattccctattgggaatatggtcttaaaaatttttctattatagaaattacttacattggtttaaatggaggtacaccatcaattcctggcttgcttaatgtagaccaatatttgttatgtgtccaa

SEQ ID NO: 16286 - DNA, 417 bp, synthetic construct; identical to SEQ ID NO: 1826
  source 1..417: mol_type = other DNA

SEQ ID NO: 16287 - DNA, 321 bp, synthetic construct; identical to SEQ ID NO: 1552
  source 1..321: mol_type = other DNA

SEQ ID NO: 16288 - DNA, 777 bp, synthetic construct
  source 1..777: mol_type = other DNA
ggggcaggggaaacccccctgttctcttttgaaagctgaagtattggattttgcgtgatttattgagttaccgcagtttcatctgaatttattccggattttgcaaaatgttcttttgtttaattgataccagcgggattttatctaacgaatctagccacacttttaatcattagcactctttagtacaacggcaccaaccaacccccccttttatcattttaatattcttctgtgacaggcgccttagcgcagtcagtgtttgaggattctttatccatttcggaccgcgttatctatttatagatcctttttacgatttcacactgattgtttttaacaaccatcacccttatatttacgtgtacaaaaaattataaaaacgtcgcaagacaccaaaaacaactgtcttttcatacattagatgcaataataacactgatgaattagactatgaatcagatttacctatatgatactaaaacgtcgccgaggcataaagagcggacccaaaaggaaaacctacgtcaagtattatatctgctgatcagccatcttttttattttgtgcgctgtttttgcggacactttgtaaatgctatgtcgttgctgggctcacttttcgagcaataattactagaacccaaaaaatgaataaaggtcttacgggtattcttaggcagcaactttcattgtcaatccaaacatgtttcggtgtttggttctagcaattaatccttcccacgattcctattttaactctttttaacattcacg

SEQ ID NO: 16289 - DNA, 754 bp, synthetic construct
  source 1..754: mol_type = other DNA
agtggttctgccactgcagctttttaccggcacttgtacggtgtcgtagtgtatcatgactggttaccttttttgggctagcttgatactcccgtgctccggaggtgcattaatgatggttacgttaattcggctgtccttaatgcgtttatccagctcagtaaagagtctaaaatcttgtttgttttgaatcgcgtactacataaagatttattaatgaccttgattttatcagggatactttggagcgtccgatacgtcacaattttttgcgacactcttatgagaaccgtggaatggatgtgttgttgtcgcttgtgagaacacattccgatgcgctatgcgctggttgccttccggtatgaattgtggacgtatctggagtatcaagacccctcaggtagggattgtcaaatagttagcccaacgtctattgtgatgctgctgaaatattaaacgattgtcaaatagttagcccaacgtctattgtgatgctgctgaaatattaaacgattgtctctgaaaaccatcgcactggaagctttgggcatcgttcgccatgttgaggaacattcgtttgctattaatgatgcgtgccggtaagcggtaagctttttatttgacggatgtgtggcaatattgattgcgcactaatgtggatgcttagttggccggcgtaaaggcgaattctcggaggaggctaaactcaccccaacccacgaaccagatacaaccattataaacaacgtttaaa

SEQ ID NO: 16290 - DNA, 508 bp, synthetic construct; identical to SEQ ID NO: 2042
  source 1..508: mol_type = other DNA

SEQ ID NO: 16291 - DNA, 615 bp, synthetic construct; identical to SEQ ID NO: 2194
  source 1..615: mol_type = other DNA

SEQ ID NO: 16292 - DNA, 284 bp, synthetic construct
  source 1..284: mol_type = other DNA
tggttaaattctccaccccgaagtccatcggggttcctgtgtatagttaaaacggactgtgtatatatggtttaccaattgtgtttatgttttgtgttgtgtacatttatggaattaggctttgtacatattggtatggtgctcggccatacccctatttaggggagtagttagccactacaaaatcatcgcaccgttctacagtttgagtcaactgtagatattgtttatattgactcagtaacaattttgattatttatttataaatttatgttgtgaaaag

SEQ ID NO: 16293 - DNA, 806 bp, synthetic construct; identical to SEQ ID NO: 2441
  source 1..806: mol_type = other DNA

SEQ ID NO: 16294 - DNA, 342 bp, synthetic construct; identical to SEQ ID NO: 1626
  source 1..342: mol_type = other DNA

SEQ ID NO: 16295 - DNA, 331 bp, synthetic construct; identical to SEQ ID NO: 1584
  source 1..331: mol_type = other DNA

SEQ ID NO: 16296 - DNA, 354 bp, synthetic construct; identical to SEQ ID NO: 1654
  source 1..354: mol_type = other DNA

SEQ ID NO: 16297 - DNA, 484 bp, synthetic construct; identical to SEQ ID NO: 1993
  source 1..484: mol_type = other DNA

SEQ ID NO: 16298 - DNA, 688 bp, synthetic construct
  source 1..688: mol_type = other DNA
ggcggggaaaaaccccgcctcttttccaaatggcaggcctgtataccgcccagctaataactaagttcctcgagatccaatttttattagtatggtagatatggaaccgacaaaccttaggactagaggatgagatttttaacccctacttttgagcacccaatttttacaaacaaacaaaactttattaaatataaaatatttattttacgttacccaaaatataaaatgtataaaaacaaaccagtggtaaccttttattttcttattattttcagttgttgattgtaagatcactttatctattcacacgtacttaccttgatttagatactctggaccccgaggggttttaaaagcatgagagactagtaacccaaattgcctagagcctatttctctgacgtggaagacaatgaggttttcgaacaatacgtaaatgctatgatgcgtgggcaatgtctatattgcaataatggtcgattgacctgtcgtccctcatacctattatgaggccctaagacacgtattcattgtgaactaattctttaatccgtggaattagcgctggcaacaaactcttcaaaggattctttaaatttttaattttacacatatggtcacatcataagaattttcaataaagcgattttaagattttcacaaattacaaaacaaacaaaacaaa

SEQ ID NO: 16299 - DNA, 748 bp, synthetic construct
  source 1..748: mol_type = other DNA
tgaaagctgaagtattggattttgcgtgatttatcgagttaccgcagtttcatctgaatttattccggattttgcaaaatgttcttttgtttaattgataccagcgggattttatctaacgaatctagccacacttttaatcattagcactctttagtacaacggcaccaaccaacccccccttttatcattttaatattcttctgtgacaggcgccttagcgcagtcagtgtttgaggattctttatccatttcggaccgcgttatctatttatagatcctttttacgatttcacactgattgtttttaacaaccatcacccttatatttacgtgtacaaaaaattataaaaacgtcgcaagacaccaaaaacaactgtcttttcatacattagatgcaataataacactgatgaattagactatgaatcagatttacctatatgatactaaaacgtcgccgaggcataaagagcggacccaaaaggaaaacctacgtcaagtattatatctgctgatcagccatcttttttattttgtgcgctgtttttgcggacactttgtaaatgctatgtcgttgctgggctcacttttcgagcaataattactagaacccaaaaaatgaataaaggtcttacgggtattcttaggcagcaactttcattgtcaatccaaacatgtttcggtgtttggttctagcaattaatccttcccacgattcctattttaactctttttaacattcacg

SEQ ID NO: 16300 - DNA, 508 bp, synthetic construct; identical to SEQ ID NO: 2043
  source 1..508: mol_type = other DNA

SEQ ID NO: 16301 - DNA, 331 bp, synthetic construct
  source 1..331: mol_type = other DNA
atccagagctaggagctctctctaatcgccgcaaggagggagcagcaaagtccggtctctggtcttcgttttagaagggcggagagtttcggctctactggctggtgtgtgccgcctaaaatccaggctaccagctcggcgcttttgaccagatccgtttaatcgagcgactgggagttagctaactcaatcgattgctacatcacaaaatcaagatttgtcccatattgggccgcaagaagacgttcagcagatcacgacattcgtcgacgattctaacatccagtcgtacgaaaagccacatatatcatctgtgactgcatggacaaaa

SEQ ID NO: 16302 - DNA, 714 bp, synthetic construct; identical to SEQ ID NO: 2326
  source 1..714: mol_type = other DNA

SEQ ID NO: 16303 - DNA, 350 bp, synthetic construct; identical to SEQ ID NO: 1645
  source 1..350: mol_type = other DNA

SEQ ID NO: 16304 - DNA, 847 bp, synthetic construct; identical to SEQ ID NO: 2477
  source 1..847: mol_type = other DNA

SEQ ID NO: 16305 - DNA, 294 bp, synthetic construct
  source 1..294: mol_type = other DNA
caaacaacaaacaacaaacaacaaacaacaaacaacaaattggcttaaacagcgctcgagtccgatataattggagagtaattcaaggattgtttaagtctaaaaatctattgctaaactagtactttggtttccatcataaaagtgccagtttggcaattatatgagtgatactttttcacttgtacaattgagtgatcttagtgttgaaacacctgaacctcaagatccgcttttggagttttctggaagaggatatacactaagagcaccacgtgccgaattacaagcaat

SEQ ID NO: 16306 - DNA, 693 bp, synthetic construct; identical to SEQ ID NO: 2303
  source 1..693: mol_type = other DNA

SEQ ID NO: 16307 - DNA, 1000 bp, synthetic construct; identical to SEQ ID NO: 2633
  source 1..1000: mol_type = other DNA

SEQ ID NO: 16308 - DNA, 382 bp, synthetic construct; identical to SEQ ID NO: 1735
  source 1..382: mol_type = other DNA

SEQ ID NO: 16309 - DNA, 365 bp, synthetic construct; identical to SEQ ID NO: 1686
  source 1..365: mol_type = other DNA

SEQ ID NO: 16310 - DNA, 269 bp, synthetic construct
  source 1..269: mol_type = other DNA
aaaccccactaacgccttttgtccataatgaagatgaatactgtgtctgttattgtggttatcctactactcgccggcacagttgtgtcgccgccgccgtattgtcgtaacctttgcgacgtgctgctctccaaaaaccgcagcattagcaacgtgttcgccaacggccgctgcgcacctggggctaacataccgctccagcaggtgtaccgctctctggtgcgccgcagctcgaacgcggttcgttgccctccctgttggtaactgcc

SEQ ID NO: 16311 - DNA, 691 bp, synthetic construct; identical to SEQ ID NO: 2299
  source 1..691: mol_type = other DNA

SEQ ID NO: 16312 - DNA, 463 bp, synthetic construct; identical to SEQ ID NO: 1947
  source 1..463: mol_type = other DNA

SEQ ID NO: 16313 - DNA, 768 bp, synthetic construct; identical to SEQ ID NO: 2395
  source 1..768: mol_type = other DNA

SEQ ID NO: 16314 - DNA, 807 bp, synthetic construct; identical to SEQ ID NO: 2444
  source 1..807: mol_type = other DNA

SEQ ID NO: 16315 - DNA, 438 bp, synthetic construct; identical to SEQ ID NO: 1880
  source 1..438: mol_type = other DNA

SEQ ID NO: 16316 - DNA, 1000 bp, synthetic construct; identical to SEQ ID NO: 2634
  source 1..1000: mol_type = other DNA

SEQ ID NO: 16317 - DNA, 574 bp, synthetic construct
  source 1..574: mol_type = other DNA
atcccttccgccttggagaggcgtaaaatctatccactccggaactattcgtagtataagtttaaaatagttgtgtatatatggatactacatattttttaatttatatgtttatataatatatggaagctttgtacatatagacatcctacttttaggataccggtttttactgggggtttcgtcagccaacaaaacatgttgcacacatgagcagaaggtactgccgtgatgtgtatgtgaataaaatttgcctacctcaaacaataattacaataaaaatagtcttggaactgactcaaatagttcttctatcggtgcttatagtgtctcaaaagcacctgatagcatatcaacgcaaaatgtacattttgtcgatggagacacaccatggtcttacgacatttcatcatcaccagatgtcacaactaagctctcaggattctctgacgcagagctcggttccttcctcagtcgtcctcttaaaatcaaagaatacacttggactccggagagtactcgcctgtatgagacatttaatccgtggactgagttttttaccaatatagatgtt

SEQ ID NO: 16318 - DNA, 471 bp, synthetic construct
  source 1..471: mol_type = other DNA
gataaaactatacaaccgtaaagtcttgtccgcttctctttagggaggagcaaaattctggatactgtaaaataccgtattctaacttggccaacgtgcactactttggtcgtaatactggtttcagtcaatctgaaactatactaattgggttgtttaaaacaacccgtaatactcacgagtttaattactcgtttaatctttctgttcgatctcgagcagaatacaattcagacaactcttacttggagttagtcaaaatctttcacactttactgtgtgaatatattgttttccagttaactgtgaaaactgtctttctgtttcctgtttaccaggaaacacttctttgagattaaccatctctcttctgttctctcgttaccgagagagccttgtctttggttctcgcaagagaatcactactgtcttgagggtttcttttgaaatcgtcttcttcttgatcttcaa

SEQ ID NO: 16319 - DNA, 450 bp, synthetic construct; identical to SEQ ID NO: 1917
  source 1..450: mol_type = other DNA

SEQ ID NO: 16320 - DNA, 504 bp, synthetic construct
  source 1..504: mol_type = other DNA
gtatgtaatcacatacacactcagtttgacggacctatccgataaatagcttacccacttattagtggtcgctcttttaccaggacttgatcctgtcgcaagtacaaaatattattacctacgtcttacgatgatgatttggtattgtgttttagttagacctatatgatttgttagtactgccttgcgaggagctggaacgcttatcattagtcggaccttttattaaccgctgcaagcaagttatagatcctattgcacaatatgcgagaatgaccaatgattttggaatatgacgctgataagattgctatggccccgttctaggcccccgaaaagttacagtacggggctaatggaacaagtctttgtggagtgaaattacctctctctgaaattagcgacttcagctgcgtgagttctcttcacattgtacgtatatctaggaataagggctttataggccctgacgtagtactagacgaaaaactttacattgctacc

SEQ ID NO: 16321 - DNA, 331 bp, synthetic construct
  source 1..331: mol_type = other DNA
atccgaagctaggggctctttccaatcgccgcaaggaaagagcagcaaagcccggtcttcggtcttcgttagaagggcggagagtttagagactctactggctggtgtgtgccgcctaaaatccaggctaccagctcggcgcttttgatcagatccgtttaatcgagcggctgagagttagctaactcaatcgattgctacatcacaagatcaagatttgacccatatcgggccgcaagaaaatgttcagcagattacaacattcgtggacgactctaacatccagtcctacgagaagccacatatatcatctgtgactgcatggaccaaa

SEQ ID NO: 16322 - DNA, 502 bp, synthetic construct
  source 1..502: mol_type = other DNA
atgtaatcacatacacactcagtttgacggacctatccgataaatagcttacccacttattagtggtcgctcttttaccaggacttgatcctgtcgcaagtacaaaatattattacccacgtcttacgatgatgatttggtattgtgttttagttagacctatatgatttgttagtactgccttgcgaggagctggaacgcttatcattagtcggaccttttattaaccgctgcaagcaagttatagatcctattgcacaatatgcgagaatgaccaatgattttggaatatgacgctgataagattgctatggccccgttctaggcccccgaaaagttacagtacggggctaatggaacaagtctttgtggagtgaaattacctctctctgaaattagcgacttcagctgcgtgagttctcttcacattgtacgtatatctaggaataagggctttataggccctgacgtagtactagacgaaaaactttacattgctacc

SEQ ID NO: 16323 - DNA, 425 bp, synthetic construct
  source 1..425: mol_type = other DNA
atgcaatcacatacacactcagtttgacggacctatccgataaatagcttacccacttattagtggtcgcccttttaccaggacttgatcctgtcgcaagtacaaaatgttatctacgttttacgatgatgatttggtattgtgttgtagttagacctatatgatttgttagtactgccttgcgaggaactggaatacttatcattagtcggaccttttattaaccgctgcaagcaagttatagatcctactgcacaatatgcgagaatgaccaacgactttggaatatgattttgataagattgctacggccccgttctaggccccggaaaagttgcagtacggggttaatggaacaagtctttgtggagtgaaattatctctcactgaaattagcaacttcagaagcgtgagttctcttcaca

SEQ ID NO: 16324 - DNA, 331 bp, synthetic construct
  source 1..331: mol_type = other DNA
atccgaagctaggggctctttccaatcgccgcaaggagagagcagcaaagcccggtcttcggtcttcgttagaagggcggagagtttagagactctactggctggtgtgtgccgcctaaaatccaggctaccagctcggcgcttttgatcagatccgtttaatcgagcggctgagagttagctaactcaatcgattgctacatcacaagatcaagatttgacccatatcgggccgcaagaaaatgttcagcagattacaacattcgtggacgactctaacatccagtcctacgagaagccacatatatcatctgtgactgcatggaccaaa

SEQ ID NO: 16325 - DNA, 800 bp, synthetic construct; identical to SEQ ID NO: 2433
  source 1..800: mol_type = other DNA

SEQ ID NO: 16326 - DNA, 413 bp, synthetic construct; identical to SEQ ID NO: 1810
  source 1..413: mol_type = other DNA

SEQ ID NO: 16327 - DNA, 746 bp, synthetic construct; identical to SEQ ID NO: 2368
  source 1..746: mol_type = other DNA

SEQ ID NO: 16328 - DNA, 503 bp, synthetic construct
  source 1..503: mol_type = other DNA
tatgtaatcacatacacactcagtttgacggacctatccgataaatagcttacccacttattagtggtcgctcttttaccaggacttgatcctgtcgcaagtacaaaatattattacccacgtcttacgatgatgatttggtattgtgttttagttagacctatatgatttgttagtactgccttgcgaggagctggaacgcttatcattagtcggaccttttattaaccgctgcaagcaagttatagatcctattgcacaatatgcgagaatgaccaatgattttggaatatgacgctgataagattgctatggccccgttctaggcccccgaaaagttacagtacggggctaatggaacaagtctttgtggagtgaaattacctctctctgaaattagcgacttcagctgcgtgagttctcttcacattgtacgtatatctaggaataagggctttataggccctgacgtagtactagacgaaaaactttacattgctacc

SEQ ID NO: 16329 - DNA, 331 bp, synthetic construct
  source 1..331: mol_type = other DNA
atccgaagctaggggctctttccgatcgccgcaaggaaagagcagcaaagcccggtcttcggtcttcgttagaagggcggagagtttagagactctactggctggtgtgtgccgcctaaaatccaggctaccagctcggcgcttttgatcagatccgtttaatcgagcggctgagagttagctaactcaatcgattgctatatcacaagatcaagatttgacccatatcgggccgcaagaaaatgttcagcagattacaacattcgtggacgactctaacatccagtcctacgagaagccacatatatcatctgtgactgcatggaccaaa

SEQ ID NO: 16330 - DNA, 513 bp, synthetic construct; identical to SEQ ID NO: 2058
  source 1..513: mol_type = other DNA

SEQ ID NO: 16331 - DNA, 516 bp, synthetic construct
  source 1..516: mol_type = other DNA
tatgtatttacatatttttattttaatcaaacgaattttaaagctatattgactcattttaattaaatgaactaaataaaacaaagtgatttgaatatttgatctactttaacaaaatattgaatatcgcaaaaacaatttaaagatttttaaaacaattttaatatttaatagaacgaccataggaggtttgtagcgcttagcgtgagttctattaagaaattcaagagagcaaccataggaggtttgtagcacatagtgtgagttctctttaaacattaaaaagaaaatattttaaattaatttaaatacaacaaccataggaggtttgtagcgcttagcgtgagttctattaagaaattcaagagagcaaccataggaggtttgtagcacatagtgtgagttcttttattttaataggtatatgacaacagttgtatatcagactttggaagagttacagatagaagaaattcaatctttaagaaattccgattttgaattttttaaccaatt

SEQ ID NO: 16332 - DNA, 455 bp, synthetic construct
  source 1..455: mol_type = other DNA
aatgaataccttatcaagggtgcgccaagctagttagattaaattcgaaacgaaatactagtgcccattcaaaactataaaaacaattgaaactttaaactaataaaaatgtaccttcgtaaaccttgctcttttgagagatggatattataacacataattgcttgctagcgggtagtaactagccaatttattgaaggatgaaagccacatcccattatgtgattaagttagccttttggcgtagtgcaggaaccgtgtaagccctgataaaccactatagattatgacattgaattcagatcaacaaaggtatgcactttcggaaacccattctaaattactttggcaggacttcaaaattgaacgttctgctttcaaataattacacacaaaataaaactttaattttcatttcaacttcgtttaatttgactttgaattaataaccaatt

SEQ ID NO: 16333 - DNA, 258 bp, synthetic construct
  source 1..258: mol_type = other DNA
gaagaagagtaagaatctttaagtgactttgtgaactaaacaacgtcggcccgtttttaaacggtcaaccacgtttgatgttctggaattcagtggtctggattgcacagtttgcctttggatactgtgttacccgagctttgttgaatagtgaatcttatcttcgatttattgaggataatattgaggtcgttcttactcttttgtttggttattttcttgtgagaggaactttctttattgctactggtttttaat

SEQ ID NO: 16334 - DNA, 932 bp, synthetic construct
  source 1..932: mol_type = other DNA
tgcttaattcattttggtaaccgtgctaaactagcggttaatacttagaataaaacactgcacgcgggaatccgcgtgcagtgtaagttagattagttggcagttattgccttaatagaccataaacgtcatattaggcatactatgcctatttgtgacctttacgtctattatttttctaacacaaccaatgttttattctaagtattaaccgtgctaaactagcggttaccaaaatgaattaagcagcaattgtttagattatatggcagttattgccccagtagaccatagacgtcatagtgggcatataatgcctattatgacctttacgtctatttgatattttaatacaatcaatgctttattctaagtattgaccgtgctaaactagcggtcaccagactatttatatagtcgataaccataacgacggtaatgtcaccacaagggtgaccaagtccgtgtcctagtatctacttgggaatattttcggaccagcctgccagctgggccttgcctctacatttgaggccatttgattcttcatgttgaagatgtagaactacacctggatactgttttcaggcgatttaatgttttgattttaattgattcgtagcgtatacagcgcactagttgaggtttccgtcaattcctcactagcctctcattgagagcatcggttcaattcgaatcttggcaaataacgtacgaaaactcagtattgtgtgtgtgtgtaggccggtaccgtatgggtaaaaccgaaatcctgatcacacatgcattattgcttgtggaaagctacgtgacgcaacgtgaaggatagggttgaccaagaaccccgttcatcaaatttcaagaatccaccctgtatgaatttaaagttgttataagattaaaacgtttttaggtggataaatattgacaaa

SEQ ID NO: 16335 - DNA, 598 bp, synthetic construct
  source 1..598: mol_type = other DNA
tcatttggagactttaaatccaatccagtttcgaatctgggttaacaaaatcggccatgtcactttggagactttaaatccaatccagtttcgaatctgggttaacaaaatcggccatgtcactttggagacattaaatccaacccagtttcaaatctgatggtaagcaaaattggcacgtgtgcatggttaccgtgtgtgtgtctatctttacgcattttgtagatcacatataggcttcgcacgtggaagggtccctgaggggaatcgagagatgagttcaccctgctcaaacgtaaatgcctcactctgcatgagctaacccgctcagcagtttgtacataaatgggttaataacatatgtattaataaaaatatatacaatgatggtcgtgttgaggttggcactaccagtccactattggtggatctttacaaccataccacaagtgtcggtgtatcattaccgatattttgtggaccgcagtcaggtcttgaatcatatgcagatgggacaacaaatgacaattcaattgtaaaggttgacggaaattcacaagttgaaaatgtgaaattttctgatcaaattgatccctat

SEQ ID NO: 16336 - DNA, 265 bp, synthetic construct
  source 1..265: mol_type = other DNA
gttattatttacagcgcaaggatttgaaatctaaacaaatttatttccaacttatattttatagtataattggacctgggcaaacgtaacaggtaaaaccgagtttaaacaaaatattaacgagttataataattattaaactattatatttcatttattgagtgttttgattagcagatttaagtatttaggcaattaaattaaaggttattgtattagctattatatttgtaatcactgttaaggtattattaagaatacggt

SEQ ID NO: 16337 - DNA, 1000 bp, synthetic construct; identical to SEQ ID NO: 270
  source 1..1000: mol_type = other DNA

SEQ ID NO: 16338 - DNA, 305 bp, synthetic construct; identical to SEQ ID NO: 1497
  source 1..305: mol_type = other DNA

SEQ ID NO: 16339 - DNA, 779 bp, synthetic construct; identical to SEQ ID NO: 2407
  source 1..779: mol_type = other DNA

SEQ ID NO: 16340 - DNA, 259 bp, synthetic construct
  source 1..259: mol_type = other DNA
gtgccttaaacctactcgcccagttttgagtctgggttctacggaaaagcaaaacttcatgtgtatatatggataccagtcctttcgcaattttgtgtatttttgtgtgttgggattaggctttgtacatattgacatcctgcctgcggggtacttctatttagaagagagactcgtctactcaatgtaaattacaccactctgtgcactgagcaatgcatggagattgtaaataccgcttactaaaaatgtaaataat

SEQ ID NO: 16341 - DNA, 1000 bp, synthetic construct; identical to SEQ ID NO: 2635
  source 1..1000: mol_type = other DNA

SEQ ID NO: 16342 - DNA, 291 bp, synthetic construct
  source 1..291: mol_type = other DNA
atggttaaattctccaccccgaaatccatcggggttccagtgtaaagttgaaacggattgtgtatatatggattaccgatttcatgtttgttttgtgtcatgtgcatttatgaaattaggctttgtacatattggcatggtgctcggccatacccctatttaggggagtagttagccactacaacaacatcgcaccactttacagtttgagtcaactgtagagattgtttatattgacttactaatgataattatttggaaaatgtttgtatatgtttatattgtaaaaga

SEQ ID NO: 16343 - DNA, 906 bp, synthetic construct; identical to SEQ ID NO: 2529
  source 1..906: mol_type = other DNA

SEQ ID NO: 16344 - DNA, 629 bp, synthetic construct; identical to SEQ ID NO: 2214
  source 1..629: mol_type = other DNA

SEQ ID NO: 16345 - DNA, 792 bp, synthetic construct; identical to SEQ ID NO: 2425
  source 1..792: mol_type = other DNA

SEQ ID NO: 16346 - DNA, 627 bp, synthetic construct
  source 1..627: mol_type = other DNA
cacacgggtttttgcccgtgtggagatcatcaagcttttatcagtagtaatttgcagttactcgagtcctctgtttggactctatttaggaatgttaatttaaactcaattcagtcgtcgatgtctctattgggtttattccctttagagttatacaattgtcttgagttttaaaaaattgcatcactatttagagtctcgcattttgcgcatgactcggataattttactttattaccgattttagtttgtgatctgacccagttttctatctattcagtgtttttgctaaccatgcaataatatgtcgcactgtctacgccataaagcaagactatttataggtgcaaatttaactttgagaattctaggctttgaacttcttattagttgtccgataatttgttatcgccccggaccgggcgatttccttctcatttatgagagaaacttttcaatgtgctgagtactgatcacgtggaagcacactaatatgtccacatgaactatagtcataatcaatgaccctaaaagtccttgtccggaaaacacgcacaaggcattatccgcaggttttgtcgcgaatccaaaataggccggattgtagacctatcgaatcgcgataac

SEQ ID NO: 16347 - DNA, 909 bp, synthetic construct; identical to SEQ ID NO: 236
  source 1..909: mol_type = other DNA

SEQ ID NO: 16348 - DNA, 395 bp, synthetic construct; identical to SEQ ID NO: 1767
  source 1..395: mol_type = other DNA

SEQ ID NO: 16349 - DNA, 624 bp, synthetic construct
  source 1..624: mol_type = other DNA
cacgggtttttgcccgtgtggagatcatcaagcttttatcagtagtaatttgcagttactcgagtcctctgtttggactctatttaggaatgttaatttaaactcaattcagtcgtcgatgtctctattgggtttattccctttagagttatacaattgtcttgagttttaaaaattgcatcactatttagagtctcgcattttgcgcatgactcggataattttactttattaccgattttagtttgtgatctgacccagttttctatctattcagtgtttttgctaaccatgcaataatatgtcgcactgtctacgccataaagcaagactatttataggtgcaaatttaactttgagaattctaggctttgaacttcttattagttgtccgataatttgttatcgccccggaccgggcgatttccttctcatttatgagagaaacttttcaatgtgctgagtactgatcacgtggaagcacactaatatgtccacatgaactatagtcataatcaatgaccctaaaagtccttgtccggaaaacacgcacaaggcattatccgcaggttttgtcgcgaatccaaaataggccggattgtagacctatcgaatcgcgataac

SEQ ID NO: 16350 - DNA, 480 bp, synthetic construct
  source 1..480: mol_type = other DNA
tggctcgcattgtctttactgatcacggtagacgttaaataaagagatcccggtgttatccaatgctggaggtgttaagccaaaatcaaaatggattgctaagtaagatatacgcacagcgattaggttctgcattacctattcaatgtggtcaggctgcttagtggacttgtacatacccctttttaggggagggtttggtcacccaacaaaatagcactgttatgttgtcgattgatgtgccgcacataatatttattaaattacattactaatctttatactatttgtgagccagaatcagctcaaaatgattcacacatatcgtgcgatcctcgcacaattcatactgtcgcgtctttcgatgaagatgatgaagtctcgcaacttcgtgctcgggtcagggagctacgacaaaaacttgaccgaaagtaccgccatgttaagcagctcactaaacgaattgagcagctagaaggt

SEQ ID NO: 16351 - DNA, 623 bp, synthetic construct
  source 1..623: mol_type = other DNA
acgggtttttgcccgtgtggagatcatcaagcttttatcagtagtaatttgcagttactcgagtcctctgtttggactctatttaggaatgttaatttaaactcaattcagtcgtcgatgtctctattgggtttattccctttagagttatacaattgtcttgagttttaaaaattgcatcactatttagagtctcgcattttgcgcatgactcggataattttactttattaccgattttagtttgtgatctgacccagttttctatctattcagtgtttttgctaaccatgcaataatatgtcgcactgtctacgccataaagcaagactatttataggtgcaaatttaactttgagaattctaggctttgaacttcttattagttgtccgataatttgttatcgccccggaccgggcgatttccttctcatttatgagagaaacttttcaatgtgctgagtactgatcacgtggaagcacactaatatgtccacatgaactatagtcataatcaatgaccctaaaagtccttgtccggaaaacacgcacaaggcattatccgcaggttttgtcgcgaatccaaaataggccggattgtagacctatcgaatcgcgataac

SEQ ID NO: 16352 - DNA, 329 bp, synthetic construct
  source 1..329: mol_type = other DNA
taaatatctaacttgaaccaaccccaaccaaccccaaccaaccccaactgtctctttcgtgtttcaaccaaccccaaccaaccggaactaactgagattaactggaactaactggaactaactagagacaaccttattaaggtttggcaacacttgtgttggcttttattcaagcgattttaaaaactctattttatatcagtaactgctagctttagtaggccgtacgcgggagccctacaagaacagtgaaagtatcaaacaaaatataccaaagaaaattaattaaattcaaattttataacaaaaatttcaaaataaacttcaat

SEQ ID NO: 16353 - DNA, 366 bp, synthetic construct; identical to SEQ ID NO: 1689
  source 1..366: mol_type = other DNA

SEQ ID NO: 16354 - DNA, 884 bp, synthetic construct
  source 1..884: mol_type = other DNA
ataaaacactgcacgcgggaatccgcgtgcagtgtaagttagattagttggcagttattgccttaatagaccataaacgtcatattaggcatactatgcctatttgtgacctttacgtctattatttttctaacacaaccaatgttttattctaagtattaaccgtgctaaactagcggttaccaaaatgaattaagcagcaattgtttagattatatggcagttattgccctagtagaccatagacgtcacagtgggcatataatgcctattatgacctttacgtctatttgatattttaatacaatcaatgctttattctaagtattgaccgtgctaaactagcggtcacgaaactatttatatagtttcataaccataacgacggtaatgtcaccacaagggtgaccaagtccgtgtcctagtatctacttgggaatattttcggaccagcctgccagctgggccttgcctctataattgaggccatttgattctttatgttgaagatgtagaactacacctggatactgttttcaggcgatttaatgtcctgattctaattgattcgtagcgtatacagcgcactagttgaggtttccgtcaattcctcactagcctctcattgagagtatcgattcaattcgaatcttgacaaataacgtacgaaaactcagtattgtgtgtgtgtgtaggccggtaccgtatgggtaaaaccgaaatcctgatcacacatgcattattgcttgtggaaagctacgtgacgcaacgtgaaggatagggttgaccaagaaccccgttcatcaaatttcaagaatccaccctgtatgaatttaaagttgttataagattaaaacgtttttaggtggataaatattgacaaa

SEQ ID NO: 16355 - DNA, 598 bp, synthetic construct
  source 1..598: mol_type = other DNA
tcatttggagactttaaatccaatccagtttcgaatctgggttaacaaaatcggccatgtcactttggagactttaaatccaatccagtttcgaatctgggttaacaaaatcggccatgtcactttggagacattaaatccaacccagtttcaaatctgatggtaagcaaaattggcacgtgtgcatggttaccgtgtgtgtatcgatctttacgcattttgtagatcacatataggcttcgcacgtggaagggtccctgaggggaatcgagagatgagttcaccctgctcaaacgtaaatgcctcactctgcatgagctaacccgctcagcagtttgtacataaatgggttaataacatatgtattaataaaaatatatacaatgatggtcgtgttgaggttggcactaccagtccactattggtggatctttacaaccataccacaagtgtcggtgtatcattaccgatattttgtggaccgcagtcaggtcttgaatcatatgcagatgggacaacaaatgacaactcaattgttaaggtcagcggaaattcacaaattgaaaatgtgaaattttccgatcaagttgatccctat

SEQ ID NO: 16356 - DNA, 867 bp, synthetic construct; identical to SEQ ID NO: 2505
  source 1..867: mol_type = other DNA

SEQ ID NO: 16357 - DNA, 349 bp, synthetic construct; identical to SEQ ID NO: 1642
  source 1..349: mol_type = other DNA

SEQ ID NO: 16358 - DNA, 603 bp, synthetic construct; identical to SEQ ID NO: 2172
  source 1..603: mol_type = other DNA

SEQ ID NO: 16359 - DNA, 780 bp, synthetic construct; identical to SEQ ID NO: 2409
  source 1..780: mol_type = other DNA

SEQ ID NO: 16360 - DNA, 262 bp, synthetic construct
  source 1..262: mol_type = other DNA
atgccggttgactcagcgctcgtcagcgcttaaataaatagacgactgcgtaggtttcatgcaggataaaccaaagaacccgttatgtgtagttacttgcttttccgtatagtgttaccaaatccgctaaggaggagtagagaaaagcataacgttgggtgtgccctcgtgcacagtgttttttagcatagtcgagttcccgctcgcacaattttggctctggctaggggctgtgcggccagcttctagtgtatgtacataa

SEQ ID NO: 16361 - DNA, 846 bp, synthetic construct
  source 1..846: mol_type = other DNA
ctccacgtgcgcgtttcgcgcacgtggagttattgttgtatttggcgtttgactacgcccagtgtacttgttatgtagtgagttggggcgttacgacgccccctcttcctgcattagcagctacattgacttcaatttcatctttatcatacccgttccctgggatagtgggaccccctctgtcatgaggatagtcatttctgacgtaagacagacgtatgaagaatgacatattgaatataggtaacattgacgaactatgcctctaagttcgaatgatatgtttaccgaattgatgtgtaccttcttttgaaggcacgtctactttcttgatgagaccgaccgaaaggcggcacttgattgtagattcacattttatgtttctcgtgagagaacacaattcggtacaggtaagactgacctgtctggcaatcggtcagagattgataatctcgactcgatttgttgtgattttgtattgatcactttagcgccgagaaggcgtttgcaccgagagtaagcggtacgagacatgccctactagcatgggccgacgtaatggtcaagtgaaacttgttttaggctatctgttccggtagtcacgcagaattaagtgtactgaggggtggcacccgatgaaggcacttttgctactttgtgtaaacaaattctaggacatcattttgatattttgtcaataattttatcgctatgtttggggtatttacagaaactctggcttttgccgtaagacgatttatgagacattatttgagacttgatgtaagtgattgatcttttgatcagtaattcgagggactacgttccttttatcttgaacacagc

SEQ ID NO: 16362 - DNA, 258 bp, synthetic construct
  source 1..258: mol_type = other DNA
gcggctaagtcttgggcagacattaaatgcatccctctgggcgtatcccaccacgtctaattaaaccaaaagggggctctctgtattggatgaccgtgctcgtccaactagtcgatcataggactgagcataggcttgcagagagaggcactttcctcgcaaagtacccctatttaggggagtattcgccatacgcaagattgacacacgctctgtggattgagtcttccatagaagcgttaatgatgacttgctaac

SEQ ID NO: 16363 - DNA, 847 bp, synthetic construct
  source 1..847: mol_type = other DNA
actccacgtgcgcgtttcgcgcacgtggagttattgttgtatttggcgtttgactacgcccagtgtacttgttatgtagtgagttggggcgttacgacgccccctcttcctgcattagcagctacattgacttcaatttcatctttatcatacccgttccctgggatagtgggaccccctctgtcatgaggatagtcatttctgacgtaagacagacgtatgaagaatgacatattgaatataggtaacattgacgaactatgcctctaagttcgaatgatatgtttaccgaattgatgtgtaccttcttttgaaggcacgtctactttcttgatgagaccgaccgaaaggcggcacttgattgtagattcacattttatgtttctcgtgagagaacacaattcggtacaggtaagactgacctgtctggcaatcggtcagagattgataatctcgactcgatttgttgtgattttgtattgatcactttagcgccgagaaggcgtttgcaccgagagtaagcggtacgagacatgccctactagcatgggccgacgtaatggtcaagtgaaacttgttttaggctatctgttccggtagtcacgcagaattaagtgtactgaggggtggcacccgatgaaggcacttttgctactttgtgtaaacaaattctaggacatcattttgatattttgtcaataattttatcgctatgtttggggtatttacagaaactctggcttttgccgtaagacgatttatgagacattatttgagacttgatgtaagtgattgatcttttgatcagtaattcgagggactacgttccttttatcttgaacacagc

SEQ ID NO: 16364 - DNA, 859 bp, synthetic construct; identical to SEQ ID NO: 2492
  source 1..859: mol_type = other DNA

SEQ ID NO: 16365 - DNA, 845 bp, synthetic construct
  source 1..845: mol_type = other DNA
taatggagtccttatatagaacaccagttgggtttaaagtcgtttgtaacagccccaactaaatgatagtattctatcaacacctttatttcgttgtttcatcattgagacaggcgtgaaagaatgccattaatggagtccttatatagaacaccagttgggtttaaagtcgtttgtaacagccccaactaaatgatagtattctatcaacacctttatttcgttgtttcatcattgagacaggcgtgaaagaatgccatccgtggagtcgctttatacatactgcgctattctgaccaatattcgacatactagaaagagaatattgcttattgtagaccagccatatgagtgtaatcttggtgcagtccttgttacactatgatttcaactgccacgtaagtgatcgcgtcactatagaattccaaaaacattgttttgttctaccgtgtcaatttatcatcaggatacaatttttgcttaggcattcgatggttgtcgtcccttccatcgaacccgcacctcggagaaaggtgtgctcccacattacgtcaagttaaggtaaagctgctgttataacataatgagaatcaggagatcatttcctatggattagatattacgatttctgtagtatcctcatcatctgtatggatttgtaccaaatgtagttgtgtttattaagtggagcccgatacacttgggtcgtgtgatgagtaaacaagaaggtttggtcaccatttcttgttgggattatcgaggtccgagattttgcgacatttgaacaaatagtttgagagaattcccacttccatttattctagtgaattatagtgctttgcatt

SEQ ID NO: 16366 - DNA, 349 bp, synthetic construct
  source 1..349: mol_type = other DNA
gctatatacggggctaacatgtaaaaatgctaaacggcatgttagcttacacggataaaccgaaagcgggttatttaaccttactactcagagcttatcagagagatttagcaacttgtatgaattgggcgattcatgcatgtacatatagtctgctacaataacaaaagaaacaaattgtaatgaaatagaagggatttctaatcctactttcactgatttaacaggcactttggtctcggcaggtgttgcaccagtttgtgctgagattccttacacagtgccatcatcttttatttctacttctgaggtgtctcaggatttgagagactatttttccagaccaagg

SEQ ID NO: 16367 - DNA, 798 bp, synthetic construct; identical to SEQ ID NO: 2430
  source 1..798: mol_type = other DNA

SEQ ID NO: 16368 - DNA, 442 bp, synthetic construct; identical to SEQ ID NO: 1899
  source 1..442: mol_type = other DNA

SEQ ID NO: 16369 - DNA, 267 bp, synthetic construct
  source 1..267: mol_type = other DNA
cgtagttacaataacatgagtggacgcccctatattttgatacatatttcatgttgatgtgtattgcatagtttcatacttctataaaaagtgtacataaaatttcctgtaaatacaaggcgttttccctcttcgcgaagtcttaaagaggcccaagacatagaggatgtctataattttccttcagcgctggatggcgcgatcgaacacattgcgagtggactatcagttttattagtggtagttgtcgcctataccctgtatgat

SEQ ID NO: 16370 - DNA, 373 bp, synthetic construct; identical to SEQ ID NO: 1713
  source 1..373: mol_type = other DNA

SEQ ID NO: 16371 - DNA, 743 bp, synthetic construct; identical to SEQ ID NO: 2364
  source 1..743: mol_type = other DNA

SEQ ID NO: 16372 - DNA, 844 bp, synthetic construct
  source 1..844: mol_type = other DNA
ccacgtgcgcgtttcgcgcacgtggagttattgttgtatttggcgtttgactacgcccagtgtacttgttatgtagtgagttggggcgttacgacgccccctcttcctgcattagcagctacattgacttcaatttcatctttatcatacccgttccctgggatagtgggaccccctctgtcatgaggatagtcatttctgacgtaagacagacgtatgaagaatgacatattgaatataggtaacattgacgaactatgcctctaagttcgaatgatatgtttaccgaattgatgtgtaccttcttttgaaggcacgtctactttcttgatgagaccgaccgaaaggcggcacttgattgtagattcacattttatgtttctcgtgagagaacacaattcggtacaggtaagactgacctgtctggcaatcggtcagagattgataatctcgactcgatttgttgtgattttgtattgatcactttagcgccgagaaggcgtttgcaccgagagtaagcggtacgagacatgccctactagcatgggccgacgtaatggtcaagtgaaacttgttttaggctatctgttccggtagtcacgcagaattaagtgtactgaggggtggcacccgatgaaggcacttttgctactttgtgtaaacaaattctaggacatcattttgatattttgtcaataattttatcgctatgtttggggtatttacagaaactctggcttttgccgtaagacgatttatgagacattatttgagacttgatgtaagtgattgatcttttgatcagtaattcgagggactacgttccttttatcttgaacacagc

SEQ ID NO: 16373 - DNA, 323 bp, synthetic construct; identical to SEQ ID NO: 1561
  source 1..323: mol_type = other DNA

SEQ ID NO: 16374 - DNA, 837 bp, synthetic construct
  source 1..837: mol_type = other DNA
cgcgtttcgcgcacgtggagttattgttgtatttggcgtttgactacgcccagtgtacttgttatgtagtgagttggggcgttacgacgccccctcttcctgcattagcagctacattgacttcaatttcatctttatcatacccgttccctgggatagtgggaccccctctgtcatgaggatagtcatttctgacgtaagacagacgtatgaagaatgacatattgaatataggtaacattgacgaactatgcctctaagttcgaatgatatgtttaccgaattgatgtgtaccttcttttgaaggcacgtctactttcttgatgagaccgaccgaaaggcggcacttgattgtagattcacattttatgtttctcgtgagagaacacaattcggtacaggtaagactgacctgtctggcaatcggtcagagattgataatctcgactcgatttgttgtgattttgtattgatcactttagcgccgagaaggcgtttgcaccgagagtaagcggtacgagacatgccctactagcatgggccgacgtaatggtcaagtgaaacttgttttaggctatctgttccggtagtcacgcagaattaagtgtactgaggggtggcacccgatgaaggcacttttgctactttgtgtaaacaaattctaggacatcattttgatattttgtcaataattttatcgctatgtttggggtatttacagaaactctggcttttgccgtaagacgatttatgagacattatttgagacttgatgtaagtgattgatcttttgatcagtaattcgagggactacgttccttttatcttgaacacagc

SEQ ID NO: 16375 - DNA, 838 bp, synthetic construct
  source 1..838: mol_type = other DNA
gcgcgtttcgcgcacgtggagttattgttgtatttggcgtttgactacgcccagtgtacttgttatgtagtgagttggggcgttacgacgccccctcttcctgcattagcagctacattgacttcaatttcatctttatcatacccgttccctgggatagtgggaccccctctgtcatgaggatagtcatttctgacgtaagacagacgtatgaagaatgacatattgaatataggtaacattgacgaactatgcctctaagttcgaatgatatgtttaccgaattgatgtgtaccttcttttgaaggcacgtctactttcttgatgagaccgaccgaaaggcggcacttgattgtagattcacattttatgtttctcgtgagagaacacaattcggtacaggtaagactgacctgtctggcaatcggtcagagattgataatctcgactcgatttgttgtgattttgtattgatcactttagcgccgagaaggcgtttgcaccgagagtaagcggtacgagacatgccctactagcatgggccgacgtaatggtcaagtgaaacttgttttaggctatctgttccggtagtcacgcagaattaagtgtactgaggggtggcacccgatgaaggcacttttgctactttgtgtaaacaaattctaggacatcattttgatattttgtcaataattttatcgctatgtttggggtatttacagaaactctggcttttgccgtaagacgatttatgagacattatttgagacttgatgtaagtgattgatcttttgatcagtaattcgagggactacgttccttttatcttgaacacagc

SEQ ID NO: 16376 - DNA, 724 bp, synthetic construct; identical to SEQ ID NO: 2342
  source 1..724: mol_type = other DNA

SEQ ID NO: 16377 - DNA, 950 bp, synthetic construct; identical to SEQ ID NO: 2553
  source 1..950: mol_type = other DNA

SEQ ID NO: 16378 - DNA, 826 bp, synthetic construct
  source 1..826: mol_type = other DNA
cacgtggagttattgttgtatttggcgtttgactacgcccagtgtacttgttatgtagtgagttggggcgttacgacgccccctcttcctgcattagcagctacattgacttcaatttcatctttatcatacccgttccctgggatagtgggaccccctctgtcatgaggatagtcatttctgacgtaagacagacgtatgaagaatgacatattgaatataggtaacattgacgaactatgcctctaagttcgaatgatatgtttaccgaattgatgtgtaccttcttttgaaggcacgtctactttcttgatgagaccgaccgaaaggcggcacttgattgtagattcacattttatgtttctcgtgagagaacacaattcggtacaggtaagactgacctgtctggcaatcggtcagagattgataatctcgactcgatttgttgtgattttgtattgatcactttagcgccgagaaggcgtttgcaccgagagtaagcggtacgagacatgccctactagcatgggccgacgtaatggtcaagtgaaacttgttttaggctatctgttccggtagtcacgcagaattaagtgtactgaggggtggcacccgatgaaggcacttttgctactttgtgtaaacaaattctaggacatcattttgatattttgtcaataattttatcgctatgtttggggtatttacagaaactctggcttttgccgtaagacgatttatgagacattatttgagacttgatgtaagtgattgatcttttgatcagtaattcgagggactacgttccttttatcttgaacacagc

SEQ ID NO: 16379 - DNA, 485 bp, synthetic construct; identical to SEQ ID NO: 1994
  source 1..485: mol_type = other DNA

SEQ ID NO: 16380 - DNA, 843 bp, synthetic construct
  source 1..843: mol_type = other DNA
cacgtgcgcgtttcgcgcacgtggagttattgttgtatttggcgtttgactacgcccagtgtacttgttatgtagtgagttggggcgttacgacgccccctcttcctgcattagcagctacattgacttcaatttcatctttatcatacccgttccctgggatagtgggaccccctctgtcatgaggatagtcatttctgacgtaagacagacgtatgaagaatgacatattgaatataggtaacattgacgaactatgcctctaagttcgaatgatatgtttaccgaattgatgtgtaccttcttttgaaggcacgtctactttcttgatgagaccgaccgaaaggcggcacttgattgtagattcacattttatgtttctcgtgagagaacacaattcggtacaggtaagactgacctgtctggcaatcggtcagagattgataatctcgactcgatttgttgtgattttgtattgatcactttagcgccgagaaggcgtttgcaccgagagtaagcggtacgagacatgccctactagcatgggccgacgtaatggtcaagtgaaacttgttttaggctatctgttccggtagtcacgcagaattaagtgtactgaggggtggcacccgatgaaggcacttttgctactttgtgtaaacaaattctaggacatcattttgatattttgtcaataattttatcgctatgtttggggtatttacagaaactctggcttttgccgtaagacgatttatgagacattatttgagacttgatgtaagtgattgatcttttgatcagtaattcgagggactacgttccttttatcttgaacacagc

SEQ ID NO: 16381 - DNA, 405 bp, synthetic construct; identical to SEQ ID NO: 1794
  source 1..405: mol_type = other DNA

SEQ ID NO: 16382 - DNA, 834 bp, synthetic construct
  source 1..834: mol_type = other DNA
gtttcgcgcacgtggagttattgttgtatttggcgtttgactacgcccagtgtacttgttatgtagtgagttggggcgttacgacgccccctcttcctgcattagcagctacattgacttcaatttcatctttatcatacccgttccctgggatagtgggaccccctctgtcatgaggatagtcatttctgacgtaagacagacgtatgaagaatgacatattgaatataggtaacattgacgaactatgcctctaagttcgaatgatatgtttaccgaattgatgtgtaccttcttttgaaggcacgtctactttcttgatgagaccgaccgaaaggcggcacttgattgtagattcacattttatgtttctcgtgagagaacacaattcggtacaggtaagactgacctgtctggcaatcggtcagagattgataatctcgactcgatttgttgtgattttgtattgatcactttagcgccgagaaggcgtttgcaccgagagtaagcggtacgagacatgccctactagcatgggccgacgtaatggtcaagtgaaacttgttttaggctatctgttccggtagtcacgcagaattaagtgtactgaggggtggcacccgatgaaggcacttttgctactttgtgtaaacaaattctaggacatcattttgatattttgtcaataattttatcgctatgtttggggtatttacagaaactctggcttttgccgtaagacgatttatgagacattatttgagacttgatgtaagtgattgatcttttgatcagtaattcgagggactacgttccttttatcttgaacacagc

SEQ ID NO: 16383 - DNA, 484 bp, synthetic construct
  source 1..484: mol_type = other DNA
tacaaaaatccttaaaagtcagagaacttttaaaaccccggttagcacaaactagccacaaatagtctgagtactaccaaacgcacgtattgtccgagcacaattacgtaaaccaacgctacaatcgcacgtattgtccgagtacaattacgtaaaccaacgctacgaacaacaaagcccataattttggatttatttccacaatttacgctatttagacttatcgctgccctccactatagtggttgtatcatttctcccggacaactgaatacttccaaggtttagcgtcgcagtcagagcacagcgcctaaattttggtataaacgaacgtacgcctacagaagcaacctatgagttacacttatactgctctcagctcgagcattaccgaacgagaaaacatcaacgatatcgacgacacaactgttgacccttcagcctcgttcctagtgcccgtcagcgaacaagtgtataggccaac

SEQ ID NO: 16384 - DNA, 882 bp, synthetic construct
  source 1..882: mol_type = other DNA
acactgcacgcgggaatccgcgtgcagtgtaagttagattagttggcagttattgccttaatagaccataaacgtcatattaggcatactatgcctatttgtgacttttacgtctattatttttctaacacaaccaatgttttattctaagtattaaccgtgctaaactagcggttaccaaaatgaattaagcagcaattgtttagattatatggcagttattgccctagtagaccatagacgtcacagtgggcatataatgcctattatgacctttacgtctatttgatattttaatacaatcaatgttttattctaagtattgaccgtgctaaactagcggtcacgaaactatttatatagtttcataaccataacgacggtaatgtcaccacaagggtgaccaagtccgtgtcctagtatctacttgggaatatcttcggaccagcctgccagctgggccttgcctctataattgaggccatttgattctttatgttgaagatgtagaactacacctggatactgttttcaggcgatttaatgtcctgattctaattgattcgtagcgtatacagcgcactagttgaggtttctgtcaattcctcactagcctctcattgagagtatcgattcaattcgaatcttgacaaataacgtacgaaaactcagtattgtgtgtgtgtgtaggccggtaccgtatgggtaaaaccgaaatcctgatcacacatgcattattgcttgtggaaagctacatgacgcatcatgaaggatagggttgaccaagaaccccgttcatcaaattttcacgaaaaccaccctgtatgaattttaaagttgttataagattaaaacgtttttaggtggttaaatattgacaaa

SEQ ID NO: 16385 - DNA, 317 bp, synthetic construct
  source 1..317: mol_type = other DNA
tcatttggagactttaaatccaatccagtttcgaatctgggtcaacaaaatcggcaattagtcatttggagacattaaatccaacccagtttcaaatctgatggtaagcaaaattggcacgtgtgcatggttaccgtgtgtgtatcgatctttacgcattttgtagatcacacataggcttcgcacgtggaagggtccctgaggggaatcgagagatgagtccaccctgctcaaacgtaaatgcctcgctctgcatgagttaacccgctcagcagtttgtacataaatgggttactaatatatgtattaataaaaac

SEQ ID NO: 16386 - DNA, 818 bp, synthetic construct; identical to SEQ ID NO: 2453
  source 1..818: mol_type = other DNA

SEQ ID NO: 16387 - DNA, 360 bp, synthetic construct; identical to SEQ ID NO: 1675
  source 1..360: mol_type = other DNA

SEQ ID NO: 16388 - DNA, 772 bp, synthetic construct
  source 1..772: mol_type = other DNA
tgtcgtttagccgcgacacccggcaatcatacatattcattgcagttcttgttctgctcttatttatgtcgtacagacgtgttgaataggggtagaaccctaatcacactttctgtattgatttaagagacctatagaataggcgaaagcttaatctgtagattataagaatgtatattaatatgatatttagtcaccaccccggaaaataaccaattcctaagtgatgaccgtatgaatgacgtagttgtggctactatgtcgtacgtttatgccgtcaccccagagagtcaactctgttgtaaatcaaccccttctgtaggaggtattagcagcctgtaaggacgagctgtttttgtacctgcctgcatagaccattgaattttatgatgagaaattcaacaactggtaattaacattcgtaaggttttgttgtcagtggaatcccactcgcatttattcatttcgttgatcaatctccacccgcagtagggtagaagagagattgtagatctaagaaatttgcgagaagaattggtccattggtttcaatttgacaaacgtaactgtacttactatgaatgaacaatatagatttgcttatgcacgtttacctcatgacaacctgagtgaggaggtttggtcacctaaatttttcgtgcctctgagtattttcttgaggttatcaatagttgttttatcgatcggattgagatgatttagtcttagtttgtttagccctttgaggttagtccctattcccactaaaatt

SEQ ID NO: 16389 - DNA, 320 bp, synthetic construct; identical to SEQ ID NO: 1549
  source 1..320: mol_type = other DNA

SEQ ID NO: 16390 - DNA, 903 bp, synthetic construct; identical to SEQ ID NO: 2527
  source 1..903: mol_type = other DNA

SEQ ID NO: 16391 - DNA, 273 bp, synthetic construct
  source 1..273: mol_type = other DNA
ggtaaattttcgcgaatgtgatatcgcgttggacacatgcgattaaaaccaaagaacccaagtgaggtagttacgaatttgcatatagtatcttccaaactaaatgtatgttgcgaaaactcatttgtcttgaacctccctcgtggggtaccactatttagtggagtagtttgaaactacaaacaagagaagctctgattcaggtatattgatgcgtatacttgttttaattacgtaaatagcattactagtattacacaatatccaagtgca

SEQ ID NO: 16392 - DNA, 900 bp, synthetic construct
  source 1..900: mol_type = other DNA
ctctatataggtttcacaacctatatagagttccatttgattagatattgtccgcttagcaccggaccatgcttttcttaattttattgaatacttacattctgaataagtatagtagtctcctctcaggttattactataccctgtttggagtgtctactttattcctaataagtttcaccccttattagttatgtttaagttttagtgtctataagcaccttggtattaggttctttgaccctattaccaatgagtagcttacctaagtatacgtttttcgaaccgtataaattgcttaatgtattcattattatttattttatctcgttgataaagaattatcaaaaataagagagtttgctaaacttcttaaatcgtctacaaggcgcagtttattttatttctctgttaaaaatattaaccaattttattattgcttcaacggtaaatttgtacttgattaaaatcaggagtacattacccgtgtttagcttacgatttacgaatttaattaaattggaaatttgattgtaatgatttagatttgacatttcaattgcttagagaaatcccactttattaataagtttcatttacgataaatgcactcgcaaaggacgagtaaagcgcattttagatgtataactgttattgaagaacaattggttctctggattttgattaatgcgacgtacagcatgttataaatcccaatactctttaaagtacccttagcttcagcacgtaccagcgtgtagggagttgcttcccgtgattcatataaggctatgctttgagatgaggcatttagattgatagtttcaactttttatttatttttgtgattgttatttgttagcttttatagttactgatattaaccctttctttttaatc

SEQ ID NO: 16393 - DNA, 522 bp, synthetic construct; identical to SEQ ID NO: 2075
  source 1..522: mol_type = other DNA

SEQ ID NO: 16394 - DNA, 337 bp, synthetic construct; identical to SEQ ID NO: 1614
  source 1..337: mol_type = other DNA

SEQ ID NO: 16395 - DNA, 893 bp, synthetic construct
  source 1..893: mol_type = other DNA
actctatataggtttcacaacctatatagagttccattgactagttattgtccgtttagcaccggaccatgcttttctttattttattgtatactttacattctgaataagtacagtagtctcctctcaggttacaactgtaccctgtttggagtgtctactttattcctaataagtttcaccccttattagttatgtataagttttagtgtcgattagcagcctggttttaggttctttgaccctaattccagtgagtagcttacctaatttcacgtttctttgaaccgtgattttcttatgtatacactaaaatgtattttatctcgttaatagagaactattacaaagagagagttgctaaactcttaaatcgtctatatggcgcagtttgagtcatttatctgtgaaaaatgaagccaaattttattgctttgacggtaaatttatacttgattaaaatcaggagtatattacccgtgcttagcttacaatttacgaatttaattaaaatgggaatttgattgtaatgatttagatttgacaatttgattgctcaaaagaatcccactttaataataagctccgttgattataaatacactcgcaaaggacgagtcaagcgtattttagacgtagagcaattattagagaacaattggtcttttggatttcgattaatgcgacgtaccgcatgttatagatcccaatatttttaaaagtacccttagtttcagcacgtaccggcgtgtagggagttgcttcccgtgattcatataaggctatgctttgagatgaggcatttagattgatagtttcaactttttatttatttttgtgattgttatttgttagcttttatagttactgatattaaccctttctttttaatc

SEQ ID NO: 16396 - DNA, 602 bp, synthetic construct; identical to SEQ ID NO: 2169
  source 1..602: mol_type = other DNA

SEQ ID NO: 16397 - DNA, 517 bp, synthetic construct; identical to SEQ ID NO: 2065
  source 1..517: mol_type = other DNA

SEQ ID NO: 16398 - DNA, 883 bp, synthetic construct
  source 1..883: mol_type = other DNA
aacctatatagagttccatttgattagatattgtccgcttagcaccggaccatgcttttcttaattttattgaatacttacattctgaataagtatagtagtctcctctcaggttattactataccctgtttggagtgtctactttattcctaataagtttcaccccttattagttatgtttaagttttagtgtctataagcaccttggtattaggttctttgaccctattaccaatgagtagcttacctaagtatacgtttttcgaaccgtataaattgcttaatgtattcattattatttattttatctcgttgataaagaattatcaaaaataagagagtttgctaaacttcttaaatcgtctacaaggcgcagtttattttatttctctgttaaaaatattaaccaattttattattgcttcaacggtaaatttgtacttgattaaaatcaggagtacattacccgtgtttagcttacgatttacgaatttaattaaattggaaatttgattgtaatgatttagatttgacatttcaattgcttagagaaatcccactttattaataagtttcatttacgataaatgcactcgcaaaggacgagtaaagcgcattttagatgtataactgttattgaagaacaattggttctctggattttgattaatgcgacgtacagcatgttataaatcccaatactctttaaagtacccttagcttcagcacgtaccagcgtgtagggagttgcttcccgtgattcatataaggctatgctttgagatgaggcatttagattgatagtttcaactttttatttatttttgtgattgttatttgttagcttttatagttactgatattaaccctttctttttaatc

SEQ ID NO: 16399 - DNA, 350 bp, synthetic construct; identical to SEQ ID NO: 1646
  source 1..350: mol_type = other DNA

SEQ ID NO: 16400 - DNA, 631 bp, synthetic construct; identical to SEQ ID NO: 2216
  source 1..631: mol_type = other DNA

SEQ ID NO: 16401 - DNA, 473 bp, synthetic construct
  source 1..473: mol_type = other DNA
aaaagtaataactctaataagtgtacagtgtacaatctgggtgttttattcttttcattaaggatactgcattcggatgtcttagtcgactactgtatatggcgtgcacttctgctgcctaaggaattattgcgaaacccccccttctcacaaacacacaaactcacaaatactctcgaactcatcacaactcgagttcagtttttatataaagctggtgtctgagaaacagctagtcgcgagctagtgtactatatgtcatgtctatgtagtacagtttcaacacgtatctttgccttatatgaattccccacacaaaaatttccttctgagtacgcctcccggtttcataccttactgaaacacgcgaggacaaacggccgtggcctctcagtcgtagctatcaaaactttatagccgaacaccgctatggcaaccccatggttattaggcaattctgaaaatcttaaact

SEQ ID NO: 16402 - DNA, 455 bp, synthetic construct
  source 1..455: mol_type = other DNA
aagtgtacagtgtacaatctgggtgttttattcttttcattaaggatactgcattcggatgtcttagtcgactactgtatatggcgtgcacttctgctgcctaaggaattattgcgaaacccccccttctcacaaacacacaaactcacaaatactctcgaactcatcacaactcgagttcagtttttatataaagctggtgtctgagaaacagctagtcgcgagctagtgtactatatgtcatgtctatgtagtacagtttcaacacgtatctttgccttatatgaattccccacacaaaaatttccttctgagtacgcctcccggtttcataccttactgaaacacgcgaggacaaacggccgtggcctctcagtcgtagctatcaaaactttatagccgaacaccgctatggcaaccccatggttattaggcaattctgaaaatcttaaact

SEQ ID NO: 16403 - DNA, 828 bp, synthetic construct; identical to SEQ ID NO: 2461
  source 1..828: mol_type = other DNA

SEQ ID NO: 16404 - DNA, 468 bp, synthetic construct
  source 1..468: mol_type = other DNA
gtcagcttctcgaaagcccgccctgggggcttctaataccgggggccaccgcaactatgcgttggataagctaaaaatagttgtctatgtttgattaacgcacaatgttttaggttctgcattacctagaatttgtggtcagctacatagatagtcattgtatatatccattatttagtggagggttgacaacccaagaaaatagcactgttatgttgtcgattgatgtgccgcacataatatttattaaattacattactaatctttatactacttatgagcctgaatcagctcaaaatgattcacacatatcgtgcgatcctcgcacaattcgcactgtcgcatcttttgatgaagatgatgaagtcttgcaacttcgtgctcgggtcagggagctacgacaaaaacttgaccgaaagtaccgccatgttaagcagctcactaaacgagttgagcagctagaaggt

SEQ ID NO: 16405 - DNA, 672 bp, synthetic construct; identical to SEQ ID NO: 2276
  source 1..672: mol_type = other DNA

SEQ ID NO: 16406 - DNA, 349 bp, synthetic construct; identical to SEQ ID NO: 1643
  source 1..349: mol_type = other DNA

SEQ ID NO: 16407 - DNA, 1000 bp, synthetic construct; identical to SEQ ID NO: 2636
  source 1..1000: mol_type = other DNA

SEQ ID NO: 16408 - DNA, 389 bp, synthetic construct; identical to SEQ ID NO: 1751
  source 1..389: mol_type = other DNA

SEQ ID NO: 16409 - DNA, 490 bp, synthetic construct; identical to SEQ ID NO: 2008
  source 1..490: mol_type = other DNA

SEQ ID NO: 16410 - DNA, 826 bp, synthetic construct
  source 1..826: mol_type = other DNA
gagagaaccatggattaacatccatggttctctccctacatatgattgtgtgtcgtttcaccgcgacacccggcaatcatacatattcattgcagatctcgttctgctcttattttacgtagatatagacgtgttgaataggggtagaacccctaatcgcatttgctgtatttgctttaagagacctatagaataggcaatagcttaatctatagattatgagaatgtatattaatatgatatttagtcaccactccggaaattaaccacttctaagtgatgaccgtatgaatgaaacagttgtggctactgttttgtacgtttatgccgtcaccccagagagtcaactctgagaataaatcacccacttctgcgagaagttgtagcagcctgtaaggacgagctgtgtttcgacttgttcgcatagattattgaatctcatgaactgaagtttaatgactgataattaacgcttgtaaggttttttaatcgttggaatcccacctattagtttcgatttcgcttaactgatctccacccgcagtagggttgaagagagatcatagatctaacgaacttttaggaagaattggtccaccggttttaatttgactgacgtactagtacttactataagtgaacaatatagatttatatatgcacgtttacctcatgacaacctgagtgaggaggtttggtcacctaaatttaccgtgtctctgtatgaattttgaggttatcgatagttgttctactgatgtgattgagatgatatcgtcttggtttgtttagcccgttgaggttagtccctattcccactaaaatt

SEQ ID NO: 16411 - DNA, 465 bp, synthetic construct
  source 1..465: mol_type = other DNA
gttcgacttctatagcccgccttgggggctttgtaccttgggccaccgtaactatacgttggataagctaaaaatagttgtctatgtttgattaacgcacaatgttttaggttctgcattacctagaatttgtggtcagctacatagatagtcattgtatatatccattatttagtggagggttgacaacccaagaaaatagcactgttatgttgtcgattgatgtgccgcacataatatttattaaattacattactaatctttatactacttatgagcctgaatcagctcaaaatgattcacacatatcgtgcgatcctcgcacaattcgcactgtcgcatcttttgatgaagatgatgaagtcttgcaacttcgtgctcgggtcagggagctacgacaaaaacttgaccgaaagtaccgccatgttaagcagctcactaaacgagttgagcagctagaaggt

SEQ ID NO: 16412 - DNA, 315 bp, synthetic construct; identical to SEQ ID NO: 1536
  source 1..315: mol_type = other DNA

SEQ ID NO: 16413 - DNA, 899 bp, synthetic construct
  source 1..899: mol_type = other DNA
ataatatgtgtagtttttactacacatgttattgctagcgcccttaacccttggcgtaggacgagtttttaacttgtctgtttcgataatgattgtatagtaatcgttatcgatactatacattcatttttcatgttccatagaacatgatatcgaaggaaattaaataaagggtaaggctatagcaaattatagtaacggagttttataactcccatcattgctttgatgataaggagtgatggtgaaacgctttgtgcagtttgtgcgataacaaactcttttaggaatattaatttgctaatattcctaaggttcgtctaaccttaatagatcgcccagcacagggcgtaaattttttgtgcactagacagtcagtcttatgtgtttcttgtcaaatacgtccactctgacgtatcgtttttaaatagagtttgcgtgtaattgaggggtgcgattccccgactggcttttcatgaccaactttttatattatgccagttttgtgtgtgtctagtattttatcagtattttaggtcaatactgtaagttattacaaaacaaaataaaaaatagaaaattttgctcaaataaaaagattatattttcatttatgttttaatgttgagtagcaaaccttttgaaatgattattaggaaatagttttcactggttgttgttttgtacatctcgaataataaatttcgtatttttcgaggccgccattgtgacttttcacgtggtatgtatccaggctttattgtcttaacaacatgcctaatcttgattttcaaaagtattcctattaggtaaaagtccaaataggcttttcccagttgaactgggatatcccttgaccgggagaaataatacgtcctaacacaccagatacgaccatt

SEQ ID NO: 16414 - DNA, 824 bp, synthetic construct
  source 1..824: mol_type = other DNA
gagaaccatggattaacatccatggttctctccctacatatgattgtgtgtcgtttcaccgcgacacccggcaatcatacatattcattgcagatctcgttctgctcttattttacgtagatatagacgtgttgaataggggtagaacccctaatcgcatttgctgtatttgctttaagagacctatagaataggcaatagcttaatctatagattatgagaatgtatattaatatgatatttagtcaccactccggaaattaaccacttctaagtgatgaccgtatgaatgaaacagttgtggctactgttttgtacgtttatgccgtcaccccagagagtcaactctgagaataaatcacccacttctgcgagaagttgtagcagcctgtaaggacgagctgtgtttcgacttgttcgcatagattattgaatctcatgaactgaagtttaatgactgataattaacgcttgtaaggttttttaatcgttggaatcccacctattagtttcgatttcgcttaactgatctccacccgcagtagggttgaagagagatcatagatctaacgaacttttaggaagaattggtccaccggttttaatttgactgacgtactagtacttactataagtgaacaatatagatttatatatgcacgtttacctcatgacaacctgagtgaggaggtttggtcacctaaatttaccgtgtctctgtatgaattttgaggttatcgatagttgttctactgatgtgattgagatgatatcgtcttggtttgtttagcccgttgaggttagtccctattcccactaaaatt

SEQ ID NO: 16415 - DNA, 819 bp, synthetic construct
  source 1..819: mol_type = other DNA
catggattaacatccatggttctctccctacatatgattgtgtgtcgtttcaccgcgacacccggcaatcatacatattcattgcagatctcgttctgctcttattttacgtagatatagacgtgttgaataggggtagaacccctaatcgcatttgctgtatttgctttaagagacctatagaataggcaatagcttaatctatagattatgagaatgtatattaatatgatatttagtcaccactccggaaattaaccacttctaagtgatgaccgtatgaatgaaacagttgtggctactgttttgtacgtttatgccgtcaccccagagagtcaactctgagaataaatcacccacttctgcgagaagttgtagcagcctgtaaggacgagctgtgtttcgacttgttcgcatagattattgaatctcatgaactgaagtttaatgactgataattaacgcttgtaaggtttttttaatcgttggaatcccacctattagtttcgatttcgcttaactgatctccacccgcagtagggttgaagagagatcatagatctaacgaacttttaggaagaattggtccaccggttttaatttgactgacgtactagtacttactataagtgaacaatatagatttatatatgcacgtttacctcatgacaacctgagtgaggaggtttggtcacctaaatttaccgtgtctctgtatgaattttgaggttatcgatagttgttctactgatgtgattgagatgatatcgtcttggtttgtttagcccgttgaggttagtccctattcccactaaaatt

SEQ ID NO: 16416 - DNA, 410 bp, synthetic construct
  source 1..410: mol_type = other DNA
ctataattgatattatagataatttcttaaataaaatatattttaataaagtacaaattaacaaatataatcaatattataataggttatctaggagtatattaaagttatgttctattcataaggacattatagctatagagcgccatttacgtgcgcatcatttatttagaaagcatcaaaaattagttaatttagttattaaggaattatctaacttaattaaagagaattatttgaaacaagaaaaaattagaatagaacataatagattattagctgaatataatattaataaatttaattattatttgttacctgttgaagagtgtccctacactcaatcagatgtagatgaggatttggaatataatcctcgacccgttaaaattattaaacccaaacgccgt

SEQ ID NO: 16417 - DNA, 818 bp, synthetic construct
  source 1..818: mol_type = other DNA
catggattaacatccatggttctctccctacatatgattgtgtgtcgtttcaccgcgacacccggcaatcatacatattcattgcagatctcgttctgctcttattttacgtagatatagacgtgttgaataggggtagaacccctaatcgcatttgctgtatttgctttaagagacctatagaataggcaatagcttaatctatagattatgagaatgtatattaatatgatatttagtcaccactccggaaattaaccacttctaagtgatgaccgtatgaatgaaacagttgtggctactgttttgtacgtttatgccgtcaccccagagagtcaactctgagaataaatcacccacttctgcgagaagttgtagcagcctgtaaggacgagctgtgtttcgacttgttcgcatagattattgaatctcatgaactgaagtttaatgactgataattaacgcttgtaaggttttttaatcgttggaatcccacctattagtttcgatttcgcttaactgatctccacccgcagtagggttgaagagagatcatagatctaacgaacttttaggaagaattggtccaccggttttaatttgactgacgtactagtacttactataagtgaacaatatagatttatatatgcacgtttacctcatgacaacctgagtgaggaggtttggtcacctaaatttaccgtgtctctgtatgaattttgaggttatcgatagttgttctactgatgtgattgagatgatatcgtcttggtttgtttagcccgttgaggttagtccctattcccactaaaatt

SEQ ID NO: 16418 - DNA, 828 bp, synthetic construct
  source 1..828: mol_type = other DNA
gggagagaaccatggattaacatccatggttctctccctacatatgattgtgtgtcgtttcaccgcgacacccggcaatcatacatattcattgcagatctcgttctgctcttattttacgtagatatagacgtgttgaataggggtagaacccctaatcgcatttgctttttatgctttaagagacctatagaataggcaatagcttaatctatagattatgagaatgtatattaatatgatatttagtcaccactccggaaattaaccacttctaagtgatgaccgtatgaatgaaacagttgtggctactgttttgtacgtttatgccgtcaccccagagagtcaactctgagaataaatcacccacttctgcgagaagttgtagcagcctgtaaggacgagctgtgtttcgacttgttcgcatagattattgaatctcatgaactgaagtttaatgactgataattaacgcttgtaaggttttttaatcgttggaatcccacctattagtttcgatttcgcttaactgatctccacccgcagtagggttgaagagagatcatagatctaacgaacttttaggaagaattggtccaccggttttaatttgactgacgtactagtacttactataagtgaacaatatagatttatatatgcacgtttacctcatgacaacctgagtgaggaggtttggtcacctaaatttaccgtgtctctgtatgaattttgaggttatcgatagttgttctactgatgtgattgagatgatatcgtcttggtttgtttagcccgttgaggttagtccctattcccactaaaatt

SEQ ID NO: 16419 - DNA, 1000 bp, synthetic construct; identical to SEQ ID NO: 2637
  source 1..1000: mol_type = other DNA

SEQ ID NO: 16420 - DNA, 321 bp, synthetic construct; identical to SEQ ID NO: 1553
  source 1..321: mol_type = other DNA

SEQ ID NO: 16421 - DNA, 842 bp, synthetic construct; identical to SEQ ID NO: 2473
  source 1..842: mol_type = other DNA

SEQ ID NO: 16422 - DNA, 717 bp, synthetic construct; identical to SEQ ID NO: 2332
  source 1..717: mol_type = other DNA

SEQ ID NO: 16423 - DNA, 287 bp, synthetic construct
  source 1..287: mol_type = other DNA
tggggcacggggcgtaagctataacgtcctttaaaccaaaatgtagccgtaagtgtgcagttacctaactcttattatatttggcaaatattgagtgaaggggcacacgcgagatccacatgagcgttcctcaaagtcactattcagtgatgtgaagttgatccacaccgccaaccacccgcattacaaatgaggataatgtagtgcataagggaaccattctcggcaaaattaatactaatctaatcggtattgattctggtgttgttgatgcgcatcaacatcag

SEQ ID NO: 16424 - DNA, 800 bp, synthetic construct
  source 1..800: mol_type = other DNA
gttctctccctacatatgattgtgtgtcgtttcaccgcgacacccggcaatcatacatattcattgcagatctcgttctgctcttattttacgtagatatagacgtgttgaataggggtagaacccctaatcgcatttgctgtatttgctttaagagacctatagaataggcaatagcttaatctatagattatgagaatgtatattaatatgatatttagtcaccactccggaaattaaccacttctaagtgatgaccgtatgaatgaaacagttgtggctactgttttgtacgtttatgccgtcaccccagagagtcaactctgagaataaatcacccacttctgcgagaagttgtagcagcctgtaaggacgagctgtgtttcgacttgttcgcatagattattgaatctcatgaactgaagtttaatgactgataattaacgcttgtaaggttttttaatcgttggaatcccacctattagtttcgatttcgcttaactgatctccacccgcagtagggttgaagagagatcatagatctaacgaacttttaggaagaattggtccaccggttttaatttgactgacgtactagtacttactataagtgaacaatatagatttatatatgcacgtttacctcatgacaacctgagtgaggaggtttggtcacctaaatttaccgtgtctctgtatgaattttgaggttatcgatagttgttctactgatgtgattgagatgatatcgtcttggtttgtttagcccgttgaggttagtccctattcccactaaaatt

SEQ ID NO: 16425 - DNA, 792 bp, synthetic construct
  source 1..792: mol_type = other DNA
cctacatatgattgtgtgtcgtttcaccgcgacacccggcaatcatacatattcattgcagatctcgttctgctcttattttacgtagatatagacgtgttgaataggggtagaacccctaatcgcatttgctgtatttgctttaagagacctatagaataggcaatagcttaatctatagattatgagaatgtatattaatatgatatttagtcaccactccggaaattaaccacttctaagtgatgaccgtatgaatgaaacagttgtggctactgttttgtacgtttatgccgtcaccccagagagtcaactctgagaataaatcacccacttctgcgagaagttgtagcagcctgtaaggacgagctgtgtttcgacttgttcgcatagattattgaatctcatgaactgaagtttaatgactgataattaacgcttgtaaggttttttaatcgttggaatcccacctattagtttcgatttcgcttaactgatctccacccgcagtagggttgaagagagatcatagatctaacgaacttttaggaagaattggtccaccggttttaatttgactgacgtactagtacttactataagtgaacaatatagatttatatatgcacgtttacctcatgacaacctgagtgaggaggtttggtcacctaaatttaccgtgtctctgtatgaattttgaggttatcgatagttgttctactgatgtgattgagatgatatcgtcttggtttgtttagcccgttgaggttagtccctattcccactaaaatt

SEQ ID NO: 16426 - DNA, 481 bp, synthetic construct; identical to SEQ ID NO: 1987
  source 1..481: mol_type = other DNA

SEQ ID NO: 16427 - DNA, 423 bp, synthetic construct
  source 1..423: mol_type = other DNA
aaacaataaacattgtttattagaaacattcaatgctttattggagaagttcaaacattatttaaagtaaagtttaataatgattccttcttattagttaattttatatgtatttgttatctcaatcagatagatacctatatttaaaccaacaacaaaacccaaaatctttatggtcaaaagatcttttaatttattaaaagttgttaataatttaacacctaatatatttaagcatcgagtttatttatatttagtgacccagcattcctatttaggatacggttggctgtaattactaatcctcggtccagctattagtctatagtgttaacgctagtagttgtgtaaatcacttatactaacaacaaacaagaaacaacaacaacaacaaatcaatcaacaacaaatcaagagtctcaa

SEQ ID NO: 16428 - DNA, 696 bp, synthetic construct; identical to SEQ ID NO: 2305
  source 1..696: mol_type = other DNA

SEQ ID NO: 16429 - DNA, 799 bp, synthetic construct
  source 1..799: mol_type = other DNA
ttctctccctacatatgattgtgtgtcgtttcaccgcgacacccggcaatcatacatattcattgcagatctcgttctgctcttattttacgtagatatagacgtgttgaataggggtagaacccctaatcgcatttgctgtatttgctttaagagacctatagaataggcaatagcttaatctatagattatgagaatgtatattaatatgatatttagtcaccactccggaaattaaccacttctaagtgatgaccgtatgaatgaaacagttgtggctactgttttgtacgtttatgccgtcaccccagagagtcaactctgagaataaatcacccacttctgcgagaagttgtagcagcctgtaaggacgagctgtgtttcgacttgttcgcatagattattgaatctcatgaactgaagtttaatgactgataattaacgcttgtaaggttttttaatcgttggaatcccacctattagtttcgatttcgcttaactgatctccacccgcagtagggttgaagagagatcatagatctaacgaacttttaggaagaattggtccaccggttttaatttgactgacgtactagtacttactataagtgaacaatatagatttatatatgcacgtttacctcatgacaacctgagtgaggaggtttggtcacctaaatttaccgtgtctctgtatgaattttgaggttatcgatagttgttctactgatgtgattgagatgatatcgtcttggtttgtttagcccgttgaggttagtccctattcccactaaaatt

SEQ ID NO: 16430 - DNA, 1000 bp, synthetic construct; identical to SEQ ID NO: 2638
  source 1..1000: mol_type = other DNA

SEQ ID NO: 16431 - DNA, 722 bp, synthetic construct; identical to SEQ ID NO: 2338
  source 1..722: mol_type = other DNA

SEQ ID NO: 16432 - DNA, 516 bp, synthetic construct; identical to SEQ ID NO: 2063
  source 1..516: mol_type = other DNA

SEQ ID NO: 16433 - DNA, 542 bp, synthetic construct; identical to SEQ ID NO: 2103
  source 1..542: mol_type = other DNA

SEQ ID NO: 16434 - DNA, 520 bp, synthetic construct; identical to SEQ ID NO: 2069
  source 1..520: mol_type = other DNA

SEQ ID NO: 16435 - DNA, 775 bp, synthetic construct
  source 1..775: mol_type = other DNA
gtcgtttcaccgcgacacccggcaatcatacatattcattgcagatctcgttctgctcttattttacgtagatatagacgtgttgaataggggtagaacccctaatcgcatttgctgtatttgctttaagagacctatagaataggcaatagcttaatctatagattatgagaatgtatattaatatgatatttagtcaccactccggaaattaaccacttctaagtgatgaccgtatgaatgaaacagttgtggctactgttttgtacgtttatgccgtcaccccagagagtcaactctgagaataaatcacccacttctgcgagaagttgtagcagcctgtaaggacgagctgtgtttcgacttgttcgcatagattattgaatctcatgaactgaagtttaatgactgataattaacgcttgtaaggttttttaatcgttggaatcccacctattagtttcgatttcgcttaactgatctccacccgcagtagggttgaagagagatcatagatctaacgaacttttaggaagaattggtccaccggttttaatttgactgacgtactagtacttactataagtgaacaatatagatttatatatgcacgtttacctcatgacaacctgagtgaggaggtttggtcacctaaatttaccgtgtctctgtatgaattttgaggttatcgatagttgttctactgatgtgattgagatgatatcgtcttggtttgtttagcccgttgaggttagtccctattcccactaaaatt

SEQ ID NO: 16436 - DNA, 854 bp, synthetic construct; identical to SEQ ID NO: 2488
  source 1..854: mol_type = other DNA

SEQ ID NO: 16437 - DNA, 479 bp, synthetic construct
  source 1..479: mol_type = other DNA
atcggcttcataagcccgccttgggggctttataccgagggccaccgcagctatgcgttggataagctaaaaatagtcgtttgcgatatgattaacgcacgaattgataggttctgaattacctaccgtttgtggacagctacgcaaatggtcatttaacagtccttatttagggacgggttgacaacccgcaaaaatagcactgttatgtatagattgatgtaccttacataatatttataataaattacattactaaaattaataataataacataatttcatattttgaagaggcacctagcacgcctacttcaacggtcttgagggaagaccttaaaatcccccaaattgggtcttttgactctactgatgagatagaagttctcaagcagcgaaataaagagttgcgtgagaaactatcgaagaagtatcggcacgttactcaattagagaaacgtatcgagcaattagaagct

SEQ ID NO: 16438 - DNA, 811 bp, synthetic construct; identical to SEQ ID NO: 2446
  source 1..811: mol_type = other DNA

SEQ ID NO: 16439 - DNA, 300 bp, synthetic construct; identical to SEQ ID NO: 1485
  source 1..300: mol_type = other DNA

SEQ ID NO: 16440 - DNA, 790 bp, synthetic construct; identical to SEQ ID NO: 2423
  source 1..790: mol_type = other DNA

SEQ ID NO: 16441 - DNA, 545 bp, synthetic construct; identical to SEQ ID NO: 2106
  source 1..545: mol_type = other DNA

SEQ ID NO: 16442 - DNA, 346 bp, synthetic construct; identical to SEQ ID NO: 1635
  source 1..346: mol_type = other DNA

SEQ ID NO: 16443 - DNA, 540 bp, synthetic construct; identical to SEQ ID NO: 2102
  source 1..540: mol_type = other DNA

SEQ ID NO: 16444 - DNA, 543 bp, synthetic construct
  source 1..543: mol_type = other DNA
tgcatataatgtcttctacgacattatatgcacttattaggaaatctttgtacgcttaccgcctacgtgattttcgaacacgtaacgttaggatttgcttagcatttacctggagtactgtaattagttttgacactatgcatgctgtttctacccccgtcttggttactacaccaagcagccggccttttagggcggttaccgttattatacgggctcttttgagtatgaaatttttgaagatttttaatggatgaaaaatcagctggcgggcatgccccgctaggacaagacgctctagctattgagcgcctggctatgaatgccggaatgaggtacattgtttgtaccaagaggttttttagatgttgtttgttagcgataattatgctttcgaaatcagacatcctgacggtgcgaagccgtacgatacaacctcaaggggtgcgtgtcggtgtccattgtattgaacatggacatacttgtttccgggaaacaagtgtcgaggactatctcccctcgagctagcttgctagtaatgtg

SEQ ID NO: 16445 - DNA, 908 bp, synthetic construct; identical to SEQ ID NO: 2530
  source 1..908: mol_type = other DNA

SEQ ID NO: 16446 - DNA, 851 bp, synthetic construct; identical to SEQ ID NO: 2483
  source 1..851: mol_type = other DNA

SEQ ID NO: 16447 - DNA, 259 bp, synthetic construct
  source 1..259: mol_type = other DNA
cgtggacgtagttactgtgcgtgtatatgtactctatatgtttgtaagtgtggacgtttgcgtaaattctctgctagggcgacccccgaaattcctatttaggaatgtgttgttgagacacaattgagtgaccccccagagtgaatagttaataactttggggtttaaatagttaactggaaatatttgtaccaaacatgcgttatctcagacgcaagaaactgagcctattaccatcaataacggaactgatggtgat

SEQ ID NO: 16448 - DNA, 597 bp, synthetic construct
  source 1..597: mol_type = other DNA
gagacaggcgtgaaagaatgccatctgtggagtcgctttatatatactgcgctattctgaccaatattcgacatactagaaagagaatattgttcgttgtagtccagccatgtgaatgcaatcttggtgcagtccttattgcattatgatttcaactgccacgtaagtgatcgcgtcactatagaattccaaaaacattgttttgttctaccgtgtcaatttatcatcaggatacaatttttgcttaggcattcgatggttgttgtcccttccatcgaacccgcacctcggagaaaggtgtgctcccacattacgtcaagttaaggtgaagctgttgttataacacaatgagaatcaggcgatcatttcctatggattagatattacgatttctgtagtatcctcagcatctgtatggatttgtaccaaatgtagttgtgtttattaagcggagcccgatacacttgggtcgtgtgacgagtaaacaagaaggtttggtcaccgtttcttgttgggattatcgaggtccgagattttgcgacatttgaacaaatagtttgagagaattcccatttccacttattctagtgaattata

SEQ ID NO: 16449 - DNA, 349 bp, synthetic construct
  source 1..349: mol_type = other DNA
gctatatacggggctaacatgtaaaaatgctaaacggcatgttagcttgcacggataaaccgaaagcgggttatttaaccttactactcagagcttatcagagagatttagcaacttgcatgaattgggcgattcatgtatgtacatatagtctgctacaataacaaaagaaactaattgtaatgaaatagaagggatttctaatcccactttcactgatttaacaggcactttggtctcagcaggtgttgcaccagtttgtgctgagatcccttacacagtgccatcatcttttatttcaagttctgaggtgtctcaggatttgagagactatttttccagaccaagg

SEQ ID NO: 16450 - DNA, 701 bp, synthetic construct; identical to SEQ ID NO: 2309
  source 1..701: mol_type = other DNA

SEQ ID NO: 16451 - DNA, 297 bp, synthetic construct
  source 1..297: mol_type = other DNA
atcttcaaaatgtgcccaacgtcccggtgtgacagtaaagcgtcccatctcggtatgatgtaaaagagtccctttgggcgtcagggatatgccctcagatgtacatacctgtaaaagaaattccccttttgtgcattggttaccatgcgtgttcatgtttatatgtatcaaaaatacgtagaggcttgcataatagataaaatacataacacggggtgaggctaggcacagtcttgctaccgttcatagtgtgccactacagaagcaaatatttattcattaaatccaacttcggag

SEQ ID NO: 16452 - DNA, 279 bp, synthetic construct
  source 1..279: mol_type = other DNA
agttctccgtcctgaccaaagtggtaacatcagttaccaacgcagacatttttatgttacatgatggcaaaccggcgtttaataaattagggtcgccatcctcccaaccccctgcaatttgggtaaattgtggataaggggaaaactttacctgccacgaatcaagaaaatgaaatagaacagaatccgacgttaaccgaactggcgagtacaccgactttgagtacctctataaatgacaattccgcatctgtggaagtcgtcgaccctgaggtacca

SEQ ID NO: 16453 - DNA, 404 bp, synthetic construct; identical to SEQ ID NO: 1790
  source 1..404: mol_type = other DNA

SEQ ID NO: 16454 - DNA, 1000 bp, synthetic construct; identical to SEQ ID NO: 2639
  source 1..1000: mol_type = other DNA

SEQ ID NO: 16455 - DNA, 572 bp, synthetic construct
  source 1..572: mol_type = other DNA
cgtggagtcgctttatatatactgcgctattttgaccaatattcgacatactagaaagagaatattgctcgttgtagtccagccatatgaatgcaatcttggtgcagtccttattgcattatgatttcaactgccacgtaagtgatcgcgtcactatagaattctaaaaacattgttttgttctaccgtgtcaatttatcatcaggatacaatttttgcttaggcattcgatggttgtcgtcccttccatcgaacccgcacctcggagaaaggtgtgctcccacattacgtcaagttaaggtgaagctgttgttataacacaatgagaatcaggcgatcatttcctatggattagatattacgatttctgtagtatcctcagcatctgtatggatttgtaccaaatgtagttgtgtttattaagcggagcccgatacgcttgggtcgtgtgacgagtaaacaagaaggtttggtcaccgtttcttgttgggattatcgaggtccgagattttgcgacatttgaacaaatagtttgagagaattcccatttccacttattctagtaaattata

SEQ ID NO: 16456 - DNA, 430 bp, synthetic construct; identical to SEQ ID NO: 1867
  source 1..430: mol_type = other DNA

SEQ ID NO: 16457 - DNA, 795 bp, synthetic construct; identical to SEQ ID NO: 2427
  source 1..795: mol_type = other DNA

SEQ ID NO: 16458 - DNA, 895 bp, synthetic construct
  source 1..895: mol_type = other DNA
gaactctatataggtttcacaacctatatagagttccattgattagttattgtccgtttagcaccggaccatgcttttctttattttattgtatactttacattctgaataagtacagtagtctcctctcaggttacaactgtaccctgtttggagtgtctactttattcctaataagttttaccccttattagttatgtataagttttagtgtcgattagcagcctggttttaggttctttgaccctaattccagtgagtagcttacctaatttcacgtttctttgaaccgtgattttcttatgtatacactaaaatgtattttatctcgttaatagagaactattacaaagagagagttgctaaactcttaaatcgtctatatggcgcagtttgagtcatttatctgtgaaaaatgaagccaaattttattgctttgacggtaaatttatacttgattaaaatcaggagtatattacccgtgcttagcttacaatttacgaatttaattaaaatgggaatttgattgtaatgatttagatttgacaattcgattgctcaaaagaatcccactttaataataagctccgttgattataaatacactcgcaaaggacgagtcaagcgtattttagacgtagagcaattattagagaacaattggtcttttggatttcgattaatgcgacgtaccgcatgttatagatcccaatatttttaaaagtacccttagtttcagcacgtaccggcgtgtagggagttgcttcccgtgatttatataaggctatgcttttaaaatgaggcatttagattgataatttcaactttttatttatttttgtgattgttattgaatagcttaatagctactgatattaacccttttcttattata

SEQ ID NO: 16459 - DNA, 287 bp, synthetic construct
  source 1..287: mol_type = other DNA
gatgaaaaattcacaattttgatattgcgttggttacatgcaatagaaaccaaagaacccgaataaggtagttacgaacttacgtatagtatcttccaaactatatgtatgttgcgaaaacttatttgtcttgaacctccctcgtgaggtaccattatttagtggagtagtttgaaactacaaataagagaagctctgattcaagtataatgatgcatatacttgttttataaataatagattgcattactagtattacacaatatccaagtgcattggatttaagt

SEQ ID NO: 16460 - DNA, 430 bp, synthetic construct; identical to SEQ ID NO: 1868
  source 1..430: mol_type = other DNA

SEQ ID NO: 16461 - DNA, 458 bp, synthetic construct
  source 1..458: mol_type = other DNA
gggaaccctgaccgtcatgtcattaaactgtccggaggcgcagcggtggtgtcgtcgttactacaatgaaaccaaaaccgaaccctgatctgattacagacgttaacgcgtggtgcagcacataccatggcggcggactgcttatcagggccaagaatgaagtgaacatactagtcgttttttagcggcagtggttttgaaccccacaaacaaaagtgtgaataggcagaggcaataatgcatgtttctgacccttatcaacaaatcgcattactaattttacaaattttgataaagagcgagcggtctctaaaaaccgctcattatatacaccccagtctggttcactgggggttattcaagaagaaggagttgcgaattttaccgcgcagattactaactttgaggagcaggatgctggttggacctcatccattggcgctggttgggaccctacg

SEQ ID NO: 16462 - DNA, 776 bp, synthetic construct
  source 1..776: mol_type = other DNA
tgtcgtttcaccgcgacacccggcaatcatacatattcattgcagatctcgttctgctcttattttacgtagatatagacgtgttgaataggggtagaacccctaatcgcatttgctgtatttgctttaagagacctatagaataggcaatagcttaatctatagattatgagaatgtatattaatatgatatttagtcaccactccggaaattaaccacttctaagtgatgaccgtatgaatgaaacagttgtggctactgttttgtacgtttatgccgtcaccccagagagtcaactctgagaataaatcacccacttctgcgagaagttgtagcagcctgtaaggacgagctgtgtttcgacttgttcgcatagattattgaatctcatgaactgaagtttaatgactgataattaacgcttgtaaggttttttaatcgttggaatcccacctattagtttcgatttcgcttaactgatctccacccgcagtagggttgaagagagatcatagatctaacgaacttttaggaagaattggtccaccggttttaatttgactgacgtactagtacttactataagtgaacaatatagatttatatatgcacgtttacctcatgacaacctgagtgaggaggtttggtcacctaaatttaccgtgtctctgtatgaattttgaggttatcgatagttgttctactgatgtgattgagatgatatcgtcttggtttgtttagcccgttgaggttagtccctattcccactaaaatt

SEQ ID NO: 16463 - DNA, 574 bp, synthetic construct; identical to SEQ ID NO: 2141
  source 1..574: mol_type = other DNA

SEQ ID NO: 16464 - DNA, 423 bp, synthetic construct; identical to SEQ ID NO: 1841
  source 1..423: mol_type = other DNA

SEQ ID NO: 16465 - DNA, 546 bp, synthetic construct; identical to SEQ ID NO: 2110
  source 1..546: mol_type = other DNA

SEQ ID NO: 16466 - DNA, 490 bp, synthetic construct; identical to SEQ ID NO: 2009
  source 1..490: mol_type = other DNA

SEQ ID NO: 16467 - DNA, 448 bp, synthetic construct; identical to SEQ ID NO: 1916
  source 1..448: mol_type = other DNA

SEQ ID NO: 16468 - DNA, 1000 bp, synthetic construct; identical to SEQ ID NO: 271
  source 1..1000: mol_type = other DNA

SEQ ID NO: 16469 - DNA, 761 bp, synthetic construct; identical to SEQ ID NO: 2388
  source 1..761: mol_type = other DNA

SEQ ID NO: 16470 - DNA, 262 bp, synthetic construct
  source 1..262: mol_type = other DNA
atcaatgaataatatggcagagaaaactgccttaacaaatccttgttgatcagggttgcaacctatagctcacttaataattatatggttatgcaatagaaggataacgatacttctagccatgattataagtgttttctttcgttatatcactggataacaaaacagtgattgaaaattttattttgttacacagcttgaaaatattgataagaattttaaacaaatttcaaatagtgattttgacatcacttctcaaaat

SEQ ID NO: 16471 - DNA, 741 bp, synthetic construct; identical to SEQ ID NO: 212
  source 1..741: mol_type = other DNA

SEQ ID NO: 16472 - DNA, 319 bp, synthetic construct; identical to SEQ ID NO: 1544
  source 1..319: mol_type = other DNA

SEQ ID NO: 16473 - DNA, 1000 bp, synthetic construct; identical to SEQ ID NO: 2640
  source 1..1000: mol_type = other DNA

SEQ ID NO: 16474 - DNA, 706 bp, synthetic construct; identical to SEQ ID NO: 2315
  source 1..706: mol_type = other DNA

SEQ ID NO: 16475 - DNA, 262 bp, synthetic construct
  source 1..262: mol_type = other DNA
attttttaatacagtggagtcaaccactataataaaaccttattgattaggttagcaacctatagctatcaatgcattatacggttatacaacaattcgatgacaatagaattggccgtgatgcaatgattatacaatttttgtctattccttgtgtttaacaatacacaaggtgaaaatttttattgttacagaactacaaaatatagatacacaatttaaacaagtcgcaaacaatgattttgacattgatgcgcaaaat

SEQ ID NO: 16476 - DNA, 660 bp, synthetic construct; identical to SEQ ID NO: 2257
  source 1..660: mol_type = other DNA

SEQ ID NO: 16477 - DNA, 632 bp, synthetic construct; identical to SEQ ID NO: 2218
  source 1..632: mol_type = other DNA

SEQ ID NO: 16478 - DNA, 415 bp, synthetic construct; identical to SEQ ID NO: 1815
  source 1..415: mol_type = other DNA

SEQ ID NO: 16479 - DNA, 695 bp, synthetic construct; identical to SEQ ID NO: 2304
  source 1..695: mol_type = other DNA

SEQ ID NO: 16480 - DNA, 760 bp, synthetic construct; identical to SEQ ID NO: 2387
  source 1..760: mol_type = other DNA

SEQ ID NO: 16481 - DNA, 630 bp, synthetic construct
  source 1..630: mol_type = other DNA
cgtcattatgtcagttgattaattagtttcactgattaattgagataacaaacaacttcctaaatttattttaagtgttttgagttgaagttcacaaatattatgcgatcatattactaatcaccgcctatttccatatcttccgatgaattccgtacaggaatgtaataatttttgttatttgtatttaatttataactttgatctatgctcatcccaccgtttagccattattaggttctgttatgaaactagtaattattgtttgaaaaccagtagttccagcgcgtcgtggcctattgacccccaaacaaagtctttgtctttccctaaaggtttggtcacctataagtctggctctaacatcgagtacagcaagtctgcccaacatttgttgcatctgactctgggggcaacaaatgtggcgggataaagttacaaacctgataacacaggtagctttagcacaaaaccccacattcccacccgagtaatgtcaattttattattttatgcactttataactatgttatggcaaatttattataaaaatgtatttcaactatccaccttcttctttcacctttactgtcgaaactcttttccagtcaagaaaatcttaatgaaaa

SEQ ID NO: 16482 - DNA, 411 bp, synthetic construct
  source 1..411: mol_type = other DNA
aggccagtaaatatatgtaacgtaatgatatataataattatattttcattacgttacgtatgtttgccaggtaaggtggtttaccagccatcatttccttcattcggtctattggtgaattgaccactcacccttcccatagttgttttcaacattccagcttacacccagccgcttttgcggctttgttccagctgtctgtgaatttaacagaccatgattacctatgaagctacaattagcagagttgtagtggaggagttggtttactgaaaccaaaggcattgaggattctctgccaagactagatgccttccttctttttaagttttgcgtgctctccaattttcacgtggattaaacgcaaggtagctgtagagccgttgacctaaacaacaacactatcaatt

SEQ ID NO: 16483 - DNA, 526 bp, synthetic construct; identical to SEQ ID NO: 2079
  source 1..526: mol_type = other DNA

SEQ ID NO: 16484 - DNA, 558 bp, synthetic construct; identical to SEQ ID NO: 2123
  source 1..558: mol_type = other DNA

SEQ ID NO: 16485 - DNA, 361 bp, synthetic construct; identical to SEQ ID NO: 1677
  source 1..361: mol_type = other DNA

SEQ ID NO: 16486 - DNA, 471 bp, synthetic construct; identical to SEQ ID NO: 1966
  source 1..471: mol_type = other DNA

SEQ ID NO: 16487 - DNA, 339 bp, synthetic construct
  source 1..339: mol_type = other DNA
agttagtctaattaccaaaaccaaacctagtcgaccttctgtcgactcattaattaagttaccaaacacaccaaaaccaaacaccataccaaaccaaccaacacaccaaccaaccaacttaccaaccaaccaaccaaccaaccaacctaccagttggctttatagtcaactgcgtcattaattaagtgaaaccaacctatcaaccgatctgttattatacaagattgctgatatatacttatacaccttataccgatacacaacgcacaaacacactaagctagttacacatcgttttaagtgtcacccctacccggaacttccaaattccaatccaag

SEQ ID NO: 16488 - DNA, 465 bp, synthetic construct; identical to SEQ ID NO: 1951
  source 1..465: mol_type = other DNA

SEQ ID NO: 16489 - DNA, 429 bp, synthetic construct; identical to SEQ ID NO: 1860
  source 1..429: mol_type = other DNA

SEQ ID NO: 16490 - DNA, 429 bp, synthetic construct; identical to SEQ ID NO: 1861
  source 1..429: mol_type = other DNA

SEQ ID NO: 16491 - DNA, 496 bp, synthetic construct; identical to SEQ ID NO: 2022
  source 1..496: mol_type = other DNA

SEQ ID NO: 16492 - DNA, 579 bp, synthetic construct; identical to SEQ ID NO: 2147
  source 1..579: mol_type = other DNA

SEQ ID NO: 16493 - DNA, 596 bp, synthetic construct; identical to SEQ ID NO: 2161
  source 1..596: mol_type = other DNA

SEQ ID NO: 16494 - DNA, 280 bp, synthetic construct
  source 1..280: mol_type = other DNA
gaactataatcagtgtgaacttgcttcattgataaagatgccatgaaaatctttgaagtattgctactgatagtttagggtgtccctatttagggatggagtgcccccagcaaccctggatactccaatttggcacaacctttgtgtgggaaggtcgcctgcacaattgcaaattagacttaacgaatttgaacaaaattatagtgcaagtgttggagcactagacaatccttcacaaacaaatttagagcgaaatgaatcgaatataattggaaatacc

SEQ ID NO: 16495 - DNA, 1000 bp, synthetic construct; identical to SEQ ID NO: 2641
  source 1..1000: mol_type = other DNA

SEQ ID NO: 16496 - DNA, 613 bp, synthetic construct; identical to SEQ ID NO: 2192
  source 1..613: mol_type = other DNA

SEQ ID NO: 16497 - DNA, 864 bp, synthetic construct; identical to SEQ ID NO: 2501
  source 1..864: mol_type = other DNA

SEQ ID NO: 16498 - DNA, 665 bp, synthetic construct; identical to SEQ ID NO: 2266
  source 1..665: mol_type = other DNA

SEQ ID NO: 16499 - DNA, 688 bp, synthetic construct; identical to SEQ ID NO: 2295
  source 1..688: mol_type = other DNA

SEQ ID NO: 16500 - DNA, 545 bp, synthetic construct; identical to SEQ ID NO: 2107
  source 1..545: mol_type = other DNA

SEQ ID NO: 16501 - DNA, 275 bp, synthetic construct
  source 1..275: mol_type = other DNA
agcacaccccgtatcatcaatggggttccagtgtaaagttgaatagatgtctctatgtatggttacggtgtttatatgtgttttgttatttttgtatatattgatagacgcttcatagaggaacaatacccgcgagggtactcgtgtttacggggcggattggatccggaccacaaaataacaccagtatacgtttaatcggacgtgtattgtttcataaatagattagtaaattatttagaaagaaaataaaggaacggtcacctaaaggaaaa

SEQ ID NO: 16502 - DNA, 806 bp, synthetic construct; identical to SEQ ID NO: 2442
  source 1..806: mol_type = other DNA

SEQ ID NO: 16503 - DNA, 321 bp, synthetic construct; identical to SEQ ID NO: 1554
  source 1..321: mol_type = other DNA

SEQ ID NO: 16504 - DNA, 410 bp, synthetic construct
  source 1..410: mol_type = other DNA
ggcaaacatacgtaacgtaatgatatataataattatattttcattacgttacgtatgtttgccaggtaaggtggtttaccagccatcatttccttttttcggtccattggtgatatgaccactcacccttcccattgttgttttcaacatttcagcttacatccagccgctcttgcggctctgttccagctgtctgtaagtttaacagactataatcacctatgaagctacaattagcagagttgtagtggaggagttcggttactgaaaccaaatcaagggcattgaggattctctgccgagattagatgccttatttaagttttgcgtgctttccaatttttacgtggatcaaacgcaaggtagcttgtagtcaagccgttgacctaaacaacagtactacaccatt

SEQ ID NO: 16505 - DNA, 416 bp, synthetic construct; identical to SEQ ID NO: 1824
  source 1..416: mol_type = other DNA

SEQ ID NO: 16506 - DNA, 312 bp, synthetic construct; identical to SEQ ID NO: 1526
  source 1..312: mol_type = other DNA

SEQ ID NO: 16507 - DNA, 291 bp, synthetic construct
  source 1..291: mol_type = other DNA
tggcattagacctacgccataaggtcgttaaatatatgtggcgccactatgtggcataggcttgcaccataaagtctgaaccaaaatgtggtcgcagtgcatagttactgccatgctggcttgtgaaaccagcttggagcgtggatgcactcgtatcttggatgggcgttccccaaaatcactatttagtgaagcgtggtcctggacgcacatctcacacaccctcccaggggcttggtcgcccctgtagaggttaaataacggccatctatttccactacttttgatatt

SEQ ID NO: 16508 - DNA, 486 bp, synthetic construct
  source 1..486: mol_type = other DNA
cgtttatacgcatatatgattagtagacgatgtctctatcgataaagaacttcaagtttagtatcccacgtgagatccttggagcgacaccccttttacaaataataccttttaaacgtattttcaggaccttgcatgacaatgattatcccccgcactgaatacaaccatacgtggattgtataagatgggaaccttgacaaacatttggtacgcgccgaaaggccatcggagacataatctccgcacctgtatgtagaccactacctggctctcaacagcttgagactttgtcttaaatcttcggattggaaacggctctatttgggtgtgctgataacccctcatcggagacgctgaggagggagattatgcctttagtgtacgccaccttgtcttgcgtaatgccttggttggtattgattctgggggccagcccagacggagctaagttgcactagagttatactggctgttcatatcgcc

SEQ ID NO: 16509 - DNA, 478 bp, synthetic construct
  source 1..478: mol_type = other DNA
cgcatatatgattagtagacgatgtctctatcgataaagaacttcaagtttagtatcccacgtgagatccttggagcgacaccccttttacaaataataccttttaaacgtattttcaggaccttgcatgacaatgattatcccccgcactgaatacaaccatacgtggattgtataagatgggaaccttgacaaacatttggtacgcgccgaaaggccatcggagacataatctccgcacctgtatgtagaccactacctggctctcaacagcttgagactttgtcttaaatcttcggattggaaacggctctatttgggtgtgctgataacccctcatcggagacgctgaggagggagattatgcctttagtgtacgccaccttgtcttgcgtaatgccttggttggtattgattctgggggccagcccagacggagctaagttgcactagagttatactggctgttcatatcgcc

SEQ ID NO: 16510 - DNA, 362 bp, synthetic construct; identical to SEQ ID NO: 1679
  source 1..362: mol_type = other DNA

SEQ ID NO: 16511 - DNA, 506 bp, synthetic construct
  source 1..506: mol_type = other DNA
gttcagttagtttttctaactgttcttaacttttactctaataagtagtatctatcttcattagcaattcatgaagtgatgtttaactcctaccacctttggtgttagagggggattcttactatcctctttaattagtaagtttgtttgggttcaagccccaactgtgaaattagcttgtagtacaatatattgaggcgtgtgactgaagaatcacacaactcgggaagtgaatacttccctctgataggagtagcagcctaccagagtattgcttatatagtttgcacgacttgaaatttccttttcctgatcgttcccgaaacgattcattaactatgagggacgtggtcctagagggactaccgtatggtaagacgatagaacgttaatctaaaaccttcccacgttaagaccaatgaggtattgttcctataccgtgacattgagtctttgacgtgtaataaaagtagttattttctaaagaggaaccgtggagacacatt

SEQ ID NO: 16512 - DNA, 399 bp, synthetic construct; identical to SEQ ID NO: 1775
  source 1..399: mol_type = other DNA

SEQ ID NO: 16513 - DNA, 388 bp, synthetic construct; identical to SEQ ID NO: 1749
  source 1..388: mol_type = other DNA

SEQ ID NO: 16514 - DNA, 820 bp, synthetic construct; identical to SEQ ID NO: 2455
  source 1..820: mol_type = other DNA

SEQ ID NO: 16515 - DNA, 277 bp, synthetic construct
  source 1..277: mol_type = other DNA
ggatatatacggttccacaagtgtacataatttgcgatcggctattgtggaatgtcaggatgaccccaaagtctttactactcacgactataaagagagagtaatcgcacactccaaggacgtggattaatccttggtttacatagaatccgctacaatcagtaatgagaaagtatgtgatcccattgtagagatcaccaaccccagcacttcagaaacggtaggtttacttaccagcgcaggtgtagcgcccgtatgtgctgagatcccctacacc

SEQ ID NO: 16516 - DNA, 787 bp, synthetic construct
  source 1..787: mol_type = other DNA
cacccgccgcccttcaggcgacgagtggaggtcacaagccctcataaactgtggagtgtaagacacatgccctttaaaggcatgaagattcttgcttattttagcagatgaatcatactagcttgctttacaatattagcaatcgagccagaccacgaggattgaacttcaattgaaaatgaaggacggtccgaatgccctcactttatagagaagtgtgccctcactttatagagcagtagcgttttccctcactctataaagcagatccatattataattgttgccctcacttgattgaatatttcaagccagcgaagcaagttggtgtggtcccggcgtgttaggtgagccgtttaagacatctaacaaatatttagtttctttcttttctcgaactaaattctttatttcaatcgctgaaacttgtatgtgacttaacttaggccagcatattttgtgtaagcgcagtgatagtctgactctatccgaggaatcactacctcgttaaataaatgtggcccggccagggttatccaagcctgagacttcgaaactctcaggtggcatacttcaagcggagcgtaagacctaaccaccgttggctagtggcgcagtatgagcgaattaatggattgtagcaaagtagctttgaataactcctacgatcagcacgcaaccgggttttcgtgccccggcatactagaaactgcttgttacagccaatcaacctgaaaagggcccttaacagggttatttaactaggctatttgtgcagccatacact

SEQ ID NO: 16517 - DNA, 295 bp, synthetic construct
  source 1..295: mol_type = other DNA
gtgcacgctaatgcgtgcacgctgccctttggacttctcagtccaccttagcaggtttgtgagagtcactatttttagttgacaagttagaagctcatccacttccacacaatgatggtgtgttaattccccagtgatgcttgatcctatggatgtatggatctcgatgcatcggcgcgaggaggcgccccggcgaggaggccggacaccagcggtaggggaccgcccgggcgtatttacaggcccggagttttgctaccaagtcgtgaatttacactcgacaaggtagtggctc

SEQ ID NO: 16518 - DNA, 290 bp, synthetic construct
  source 1..290: mol_type = other DNA
gcgtatatacggaagattgcgggggaaatgaataaacccatgacccgctgctttgtcaggaagccttgctcctgctttttagcttactactcagatggaatcagagaattgggtttctgcggagtgttttgaacttggcacccgcagtatataggttcgctacagaattaagagataatgagaagacttgtaatgaggttgacggtgtatccgtcaaccctgtccctgaacaaattggtgtggctaacatttccaacgaggcatgcacctcggttgaggttggcgttaat

SEQ ID NO: 16519 - DNA, 379 bp, synthetic construct; identical to SEQ ID NO: 1730
  source 1..379: mol_type = other DNA

SEQ ID NO: 16520 - DNA, 423 bp, synthetic construct; identical to SEQ ID NO: 1842
  source 1..423: mol_type = other DNA

SEQ ID NO: 16521 - DNA, 278 bp, synthetic construct
  source 1..278: mol_type = other DNA
tcttgtatgcatataatgtagtctagtaagttgcatacactgctatccagcttttaggtcccctatttagggagagcgtcctgcgagcagccctccaaaagctcaatagacttcggagcagccatcctgggttagatcggcagccatgtttacatggtgctcttaaaaattaacctgctaatcaaacttcaactaacaacagcagcacaattgctgcatcaactcccgccaattttggcgatcaggtagtacaatcttccactcaagtatcaactact

SEQ ID NO: 16522 - DNA, 362 bp, synthetic construct; identical to SEQ ID NO: 155
  source 1..362: mol_type = other DNA

SEQ ID NO: 16523 - DNA, 354 bp, synthetic construct; identical to SEQ ID NO: 1655
  source 1..354: mol_type = other DNA

SEQ ID NO: 16524 - DNA, 624 bp, synthetic construct
  source 1..624: mol_type = other DNA
tagcacgattattagttggatgcttgtatggtatatgttgcgcaaacgctcatatgccatgcaggcactaattataagagtctacccagttttaactaaactctgcttctagttccaggagaagccacctactttaaaagtagtttgtataatagtgtgtatatgtaagacctatttaataaaaattattcatgtcaattataaacttaaaacttaggtctgtgaattgtataatatagtccatccggaggacccctgaattactactagtcatgtagtaaggttgatataggaaatcctgcttgttggatgcttagggtatgattcactcactttgtgttgtgatagtacttggataagtatctagtgatgcttgaatgatcactattgctacattcggaatgtgtgtagctgattcaagaggatatggtggaaaaagatcactggcgtaaggcaatccagtgaacactccaggggaggagttagttcaagtttctccgtgtcaggctcaggaaagccgggtgtggacatccacctactgaaccggttttgtctatttccaataaaatagtcaccccaattcgcgcattcctaacccgtctccgcaaaactaaagaattaatc

SEQ ID NO: 16525 - DNA, 728 bp, synthetic construct
  source 1..728: mol_type = other DNA
gatattaacaatatcatgtcaaattttgcctccttctgtgaggaggggtgtgtccttgcgagggcacattcattgcagacgattgtgttacgttacaacacagtgtgggccctggcaccaaggtattatccgctgaatatgacgataccggaccagccatgttattggtgatccaacgtactatttgaggtttgctaatatttttccctacccttgggtagatgacactgttttgtgcttagcacattgtgtttccagtgcaccattccagagggtacagtttggctttagccactatgggttgctacctcttcccatagtcgaaagtagggaggcacttcccgtggaggtgcccacccctatggttgcaagagtttatcagcctgctctacattgtctttgaaccgctgttccggtgaatcgtggaagaccgtcgcctttgcttatgcgccgtgactggttggaagaccgtcgcctttgcttatgcgccgtgactggttggagtggatccggttaggatttctttgatgttgttttgcaggctggggatcttgtaattacgtgtgcctgggttgaccacaccaggcactttattccgaggccactggattggtgtgcagttacacaattcgtatgaactcacttttcctatttattattctttgcctatatgggatgggccttaattggcatgttccattggcactttggtttccattttggtttcc

SEQ ID NO: 16526 - DNA, 913 bp, synthetic construct; identical to SEQ ID NO: 2535
  source 1..913: mol_type = other DNA

SEQ ID NO: 16527 - DNA, 782 bp, synthetic construct; identical to SEQ ID NO: 2413
  source 1..782: mol_type = other DNA

SEQ ID NO: 16528 - DNA, 628 bp, synthetic construct; identical to SEQ ID NO: 199
  source 1..628: mol_type = other DNA

SEQ ID NO: 16529 - DNA, 510 bp, synthetic construct
  source 1..510: mol_type = other DNA
gtgtgacaaatcaaccctgaaatagggttgacgactcgacacgacaacagtttcttctaagttgtcatgatttagtaagtctaaaactgttccacaccgaatttcaaagaaattttgaaaaacgatacggaaagttcttgaattggacaaggcttttcctgtcataaggcaagattgtgcttgtgtgcgctctgaccgaaccggtgggcaaggactggagcataggaaggaccatttagtatgggcttagtcgggcacaagtgaaccgtggggtccaaaagactgcttaccggcttgtgcttagggcttagtcctgaaatttgcgtagtaccccagcttctgttcttacctacttaaagggaaatagacgtggacactagactacatggaaagacatgttgacacagaatgaatagtattctacaaccaacaaaactcaacatttatgaagacaccagacaaacctgaacaagtaattatccgacacccatttagtaattttagtgaaag

SEQ ID NO: 16530 - DNA, 454 bp, synthetic construct; identical to SEQ ID NO: 1925
  source 1..454: mol_type = other DNA

SEQ ID NO: 16531 - DNA, 369 bp, synthetic construct; identical to SEQ ID NO: 1699
  source 1..369: mol_type = other DNA

SEQ ID NO: 16532 - DNA, 525 bp, synthetic construct; identical to SEQ ID NO: 2077
  source 1..525: mol_type = other DNA

SEQ ID NO: 16533 - DNA, 279 bp, synthetic construct
  source 1..279: mol_type = other DNA
ttgctttcccgtggtggagaccacgttaaatatactcactatgtaaattttgtgaagtttgcacattatgtaatcttttgttaatatttgtacattgtgctgaggcagtaaaagtacgaagagtattcaaaagaaattcacatccccgctctatttagagttacagcacaggatggggagggtaatcaccaatatccagaagcctcacgaagcatggagttttagtcaatccatgtttttgtagttagactagctgaaaatactaaaattaatgaagtt

SEQ ID NO: 16534 - DNA, 457 bp, synthetic construct; identical to SEQ ID NO: 1934
  source 1..457: mol_type = other DNA

SEQ ID NO: 16535 - DNA, 801 bp, synthetic construct; identical to SEQ ID NO: 2437
  source 1..801: mol_type = other DNA

SEQ ID NO: 16536 - DNA, 347 bp, synthetic construct; identical to SEQ ID NO: 1636
  source 1..347: mol_type = other DNA

SEQ ID NO: 16537 - DNA, 487 bp, synthetic construct
  source 1..487: mol_type = other DNA
agtcaactctgttgtaaatcaccacccccttctgtaggaggtattagcagcctgtaaggacgagctgtttttgtacctgcctgcatagaccattgaattttatgatgagaaattcagcaactggtaattaacattcgtaaggttttgttgtcagtggaatcccactcgcatttattcatttcgttgatcaatctccacccgcagtagggtagaagagagattgtagatctaagaaatttgcgagaagaattggtccattggtttcaatttgacaaacgtaactgtacttactatgaatgaacaatatagatttgcttatgcacgtttacctcatgacaacctgagtgaggaggtttggtcacctaaatttttcgtgcctctgagtattttcttgaggttatcaatagttgttttatcgatcggattgagatgatttagtcttagtttgtttagccctttgaggttagtccctattcccactaaaatt

SEQ ID NO: 16538 - DNA, 320 bp, synthetic construct
  source 1..320: mol_type = other DNA
gtcagcttctcgaaagcccgccctgggggcttctaataccgggggccaccgcaactatgcgttggataagctaaaaatagttgcttgtgtttgattaacgcacaggttgtaggttctgaattacctgcaatttgtggacagctacacaagtagtcattgtatatagtcgttatttagcgacggggtgacgcccacaaaaatagcactgtcatgttgtcgattgatgcaccgctcatgatatttgtacaaattgcattacttatctacaaagaattttggaggacggtaccctcaataaaaataccgaattgaacactact

SEQ ID NO: 16539 - DNA, 605 bp, synthetic construct; identical to SEQ ID NO: 2174
  source 1..605: mol_type = other DNA

SEQ ID NO: 16540 - DNA, 688 bp, synthetic construct; identical to SEQ ID NO: 2296
  source 1..688: mol_type = other DNA

SEQ ID NO: 16541 - DNA, 599 bp, synthetic construct
  source 1..599: mol_type = other DNA
atgtatggtaaagccatactagctatttgccgcatttgcctaccgcgaaagataggggcacgcgtgccggacgtgttgaagctcggtgcttggaggtcagcgccttaaagcaagacccaaacaaaacagtttcagtttcctgagtgtgtgtgacgagtgaattactatcttaactctatcaaacagacggtgtttctgtttttgtcatgtaggtagcacatgcgattcgtgtgcgcctgctggccactatgaatcatacagtagctgtgggcaatatacgtaagacccacatactggcccgtaagggtgttccattttccaaagtcgtgagtgtttccgactttctgagtatgggctcttccattcatatgttcctgaggtttcctagcagtcgaaaattgaggacacgaccattgggggtttacgcaagttctacccattggagccgttaacaatctgatattagtaggcgatggtataggcgtagtggtcaaagaatactttcggtggtgtattacaccacccaattctttatagtcgccggactttaaacgtttttaaaagtctaatacaagtatacgatatacccggttttaaag

SEQ ID NO: 16542 - DNA, 804 bp, synthetic construct; identical to SEQ ID NO: 2440
  source 1..804: mol_type = other DNA

SEQ ID NO: 16543 - DNA, 489 bp, synthetic construct; identical to SEQ ID NO: 2005
  source 1..489: mol_type = other DNA

SEQ ID NO: 16544 - DNA, 335 bp, synthetic construct; identical to SEQ ID NO: 1602
  source 1..335: mol_type = other DNA

SEQ ID NO: 16545 - DNA, 675 bp, synthetic construct
  source 1..675: mol_type = other DNA
ccctggagaggtgtaattgtatctcttcagagtattttttggtgcgtgttcccgtagggtagtatactgtgaggttgctattcgtaggggcatgttaagaataatatatatattatcatgaggagttgtttaagccgtgtgttatcgggcttctttgaagtagtatattttctttgatttgatatgttacattttgaaagcgatcttttcgaatagtgatgtgcaaatatacagcaacgataatttacacctattttaattcttgtacgaagattttatcttcaattaagatggagtcagttaaacccaacagcctctaaagtttgaggaataagaacaaacgttggtgactgtgtcccatataattgtatttgattaatttaggaataatttggattgctagccttgtctgtggtacgttattggttttagcagcggccatgcagttttgaaaacacagatagtctaggcatctattagctgtagaatcttttgattcgagttgtattggcaatttttggttgacagccccctatcgtcctgggtaattgttcaatatgacgtgcaagtgtatgcaaagagccgattctatataagctcagctatgttaccccaagttgtacgcgatggtatcaaatccttgggagtaaaggaacagagagatagacttagttc

SEQ ID NO: 16546 - DNA, 908 bp, synthetic construct; identical to SEQ ID NO: 235
  source 1..908: mol_type = other DNA

SEQ ID NO: 16547 - DNA, 337 bp, synthetic construct
  source 1..337: mol_type = other DNA
cccttcaacgccctcccccggggcgtaaaataatgtgggccgcgtgtgccggtgcacacgacccccctgagcaaaagggggcgtaagtaaaaatttgccgccgatatatgacaccagcgtctgctatgtttcgttctttagtgagcagcgtgaggctttgtcggtgatgtacttgtagtgagtctcttatttaggagggtgttgcagcacaaaaataaggatgctacattttgtgaataatccgagagcataatgtagaaataaatggattactgaaaacaataaaacaaataaaaaaataagtgtgatcagcactgtaactgatcatcagaccgta

SEQ ID NO: 16548 - DNA, 674 bp, synthetic construct
  source 1..674: mol_type = other DNA
cctggagaggtgtaattgtatctcttcagagtattttttggtgcgtgttcccgtagggtagtatactgggaggttgctattcgtaggggcatgttaagaataatatatatattatcatgaggagttgtttaagccgtgtgttatcgggcttctttgaagtagtatattttctttgatttgatatgttacattttgaaagcgatcttttcgaatagtgatgtgcaaatatacagcaacgataatttacacctattttaattcttgtacgaagattttatcttcaattaagatggagtcagttaaacccaacagcctctaaagattgaggaataagaacaaacgttggtgactgtgtcccatataattgtatttgattaatttaggaataatttggattgctagccttgtctgtggtacgttattggttttagcagcggccatgcagttttgaaaacacagatagtctaggcatctattagctgtagaatcttttgattcgagttgtattggcaatttttggttgacagccccctatcgtcctgggtaattgttcaatatgacgtgcaagtgtatgcaaagagccgattctatataagctcagctatgttaccccaagttgtacgcgatggtatcaaatccttgggagtaaaggaacagagagatagacttagttc

SEQ ID NO: 16549 - DNA, 358 bp, synthetic construct
  source 1..358: mol_type = other DNA
catccgaggttagttctgcccccaaaaatatttgcaacgtgctacgatccaatcgtagtattttgttttgactcagtgagaaccgtttgcaacgcaagaaagacttgtctttcttgtgggatccctcattgttgtcgggtagagtttcgattctacaaagctatttgcgacttgattcggattcgtccgttaagagttgctcctcgcctttcacgaatcttgcttgcttttgctcgcttggtttgtgttcccctcctagccagagctgtctcatccgaggttagttctgcccccttaacttgtcttcaggacttgttgagaagttgtgtgtcaccatcggacagtgaagattccgaac

SEQ ID NO: 16550 - DNA, 305 bp, synthetic construct
  source 1..305: mol_type = other DNA
actaatatgagatggttttagccctatggaaatgtttagtacccttaggtgtgggaacacttttccagagtcggaaaaacttcaaccgctgtgtcgtacatgttgattgattttacatctcaccgctatgaaaaaggacattgctttattcatatgataaggacgatatggaatcggtttagctacgtcgagactttagttgtagacgcgtagtatgccaagctcattggtcaaactattaaggctctctggattagcaacccagtagtagatttagttttgatctgagcgtattccctgaagac

SEQ ID NO: 16551 - DNA, 461 bp, synthetic construct; identical to SEQ ID NO: 1943
  source 1..461: mol_type = other DNA

SEQ ID NO: 16552 - DNA, 373 bp, synthetic construct; identical to SEQ ID NO: 158
  source 1..373: mol_type = other DNA

SEQ ID NO: 16553 - DNA, 347 bp, synthetic construct; identical to SEQ ID NO: 1637
  source 1..347: mol_type = other DNA

SEQ ID NO: 16554 - DNA, 278 bp, synthetic construct
  source 1..278: mol_type = other DNA
ttttttaagatgttttgtactttaaacaaaatatcactgtatattaatttacttgtaaataattattcttgatctgacttaaagaattatttattaaaggaactatacaggataagtggagacctatttaggtttactacgattatatcagcgccactttgaactggggcgatccctcagtaataaacagatataattagtcagcgttatattttaagattgacacatctatttataacgtaatttgtgttgctaaaaatgttaatatatatgataat

SEQ ID NO: 16555 - DNA, 310 bp, synthetic construct; identical to SEQ ID NO: 1514
  source 1..310: mol_type = other DNA

SEQ ID NO: 16556 - DNA, 675 bp, synthetic construct
  source 1..675: mol_type = other DNA
ccctggagaggtgtaattgtatctcttcagagtattttttggtgcgtgttcccgtagggtagtatactgggaggttgctattcgtaggggcatgttaagaataatatatatattatcatgaggagttgtttaagccgtgtgttatcgggcttctttgaagtagtatattttctttgatttgatatgttacattttgaaagcgatcttttcgaatagtgatgtgcaaatatacagcaacgataatttacacctattttaattcttgtacgaagattttatcttcaattaagatggagtcagttaaacccaacagcctctaaagattgaggaataagaacaaacgttggtgactgtgtcccatataattgtatttgattaatttaggaataatttggattgctagccttgtctgtggtacgttattggttttagcagcggccatgcagttttgaaaacacagatagtctaggcatctattagctgtagaatcttttgattcgagttgtattggcaatttttggttgacagccccctatcgtcctgggtaattgttcaatatgacgtgcaagtgtatgcaaagagccgattctatataagctcagctatgttaccccaagttgtacgcgatggtatcaaatccttgggagtaaaggaacagagagatagacttagttc

SEQ ID NO: 16557 - DNA, 293 bp, synthetic construct
  source 1..293: mol_type = other DNA
aaaaataaaaaaataagaaaaagcaaaaagaatgaaggtccggtttaagacttctcctcgaatgaggcactctcttgtgcagaaagggcggtaggccaccgatagcaggccgcgatttttgcgattgcgctagactgaaccatatgtggtatctagcaagcgtgtttaagcaacgtgcactggtaaggcacgaacaataattacctgagggcatgaaatacacatgcctcctgatcaacggcaggtgcaataagaaccgttggggcgaaacctaagtcgaggtctttaacata

SEQ ID NO: 16558 - DNA, 544 bp, synthetic construct; identical to SEQ ID NO: 2104
  source 1..544: mol_type = other DNA

SEQ ID NO: 16559 - DNA, 852 bp, synthetic construct
  source 1..852: mol_type = other DNA
gtatatatttgattaactatcaaatatattcacgttttatgaaaggatgttgcttttagcaacatctaggaagtagtgcttacttctgacctatagcctggttttggcacgaacggataccgtatcgtcataatgcaactgggcctttatggtaccgcctcttatcattgtacgataatcactcgaacaaaccaactatagtcctggcacgtgcgtatgcatgccgtcactatgcagagggccttgaaggtaccgccactagtcattgtactgtaattacacgaacaaataaagcacaaccccatttaagttccctattcctgggttaaggaatgacgaactatcgtctaagcaaatagtgtgttgataatcactaaactatcatccccccttttttatgttaaatgtcaggtgtttcctgaccttcctcacaagggaatgcgttcttaacaattttatattgttaaacacactagtctttttagacttttattatctggttttatgaatactttgaccatgaccccatactacagaatgcgacgttcgcgtttgctccatagtatgtaatttcaaaggtatgttgtgggtttccaaccctccttgttttacgcgttttgccgaacttgatattataataataaatttccatgtgcctgggtgtacttgaagatggaacgacgaactgtttcctatcacttcttgatataccccgcacctctgagttatttttaaagaatattatttttagcctttatgactgcaaagatcagcatattgtttacgttatcccctatgtatgttaagggacactatcaattgtagaaacaagtaacatatgtccatgacgct

SEQ ID NO: 16560 - DNA, 635 bp, synthetic construct; identical to SEQ ID NO: 2222
  source 1..635: mol_type = other DNA

SEQ ID NO: 16561 - DNA, 702 bp, synthetic construct
  source 1..702: mol_type = other DNA
aaatgaaaagacctaatgtcctgatgtggcacggttaagtttaccgataaaaagacccggggggaaaccccccgggttctttttatcggtaaacttaaccgtgccaaggagtaatccgtgctaaacagtccactttttataggttttaggggaacggcccccacgtcttcctatgatagacaaaattcaccgtgctggttacagatatccagtcctaatggaggagaaatctcgtacaagctttcacattgcaagttgtgagtttcgtgcacttacgcattttagaattagattagatatccgacttactacatcaggacattaggtcttttcatttttccgttcaattgcaagtaccgctgttgattaatattttgatgagtttaactcactaacttcaaccaggtaattgttcttgtccacattttccattaaatctacgaatgaccacgtttggatacgctgtctgccttgaggttttgcaacatttgatatagagcgcggctctaattactcattgttgacatttctagcttggtgacactggggccacacttcttgtgttatcgcgtagtaacgcgctacggcgtcttcccttgatatcgcaatgttcatgggatttagttgggggcagtgcccaacattttattgcgttcttcctcatatttgccgttttggacggcccaacagctggtaacacat

SEQ ID NO: 16562 - DNA, 438 bp, synthetic construct; identical to SEQ ID NO: 1881
  source 1..438: mol_type = other DNA

SEQ ID NO: 16563 - DNA, 823 bp, synthetic construct
  source 1..823: mol_type = other DNA
tataagagacaggtgacgagtgaattactatcttaactctatcaaacagacggtgtttctgtttgatagagttaagatagtaattcactcgtcacacacactcaggaaactgaaactgttttgtttgggtcttgctttaaggcgctgacctccaagcaccgagcttcagcacgtccggcacgcgtgcccctatctttcgcggtaggcaaatgcggcaaatagctagtatggctttaccatacatagctatttgccgcatttgcctaccgcgaaagataggggcacgcgtgccggacgtgttgaagctcggtgcttggaggtcagcgccttaaagcaagacccaaacaaaacagtttcagtttcctgagtgtgtgtgacgagtgaattactatcttaactctatcaaacagacggtgtttctgtttttgtcatgcagatagcacatgcgattcgtgtgcgtctgctggccactatgaatcatacagtagctgtgggcaatatacgtaagacccacatactggcccgcaagggtatttcatcttccaaagtcgtgagtgtttccgactttctgagtatgggctcttccatacatatattcctgaggtttcctagcagtcgaaagttgaggacacgaccattgggggtttacgtaagttctacccattggagccgttaacaatctgatattagtaggcgatggtataggcatagtggtcaaagaatattttcggtggtgtattacaccacccaattctttatagtcgccggactttaaacgtttttaaattccagatacaactatacgatatactcggttttaaag

SEQ ID NO: 16564 - DNA, 304 bp, synthetic construct; identical to SEQ ID NO: 1494
  source 1..304: mol_type = other DNA

SEQ ID NO: 16565 - DNA, 323 bp, synthetic construct; identical to SEQ ID NO: 1562
  source 1..323: mol_type = other DNA

SEQ ID NO: 16566 - DNA, 605 bp, synthetic construct; identical to SEQ ID NO: 2175
  source 1..605: mol_type = other DNA

SEQ ID NO: 16567 - DNA, 685 bp, synthetic construct; identical to SEQ ID NO: 2292
  source 1..685: mol_type = other DNA

SEQ ID NO: 16568 - DNA, 490 bp, synthetic construct
  source 1..490: mol_type = other DNA
gcagggtcgttctgtatcattttgtacattagtagagtcacttcggagactataaatccgacccagtttcaaatctgatggttagcaaaattgatgtatgtatatggataccacttgtatattatatttatgtgtttttatactgtatttgtaggctttacatatgtgaacggtccctactggggagtcgagagacgggttccccgtgcccactgtaaacacatcgttctatctgagttaatcggctcgatagtttgtacataaatagattggtaataattgtaaatgtaaattaaatatctttgaaaatgccagtgttggtgttggcgctggcaaccagcctagggttggtaaagacaatacaagttgcagtgaagacaattcgatcgatagtgatacgagtgtgaagtctagtatatttcctaagcgagtgcattttgatgacaatcgaaagactcatcgcaggggaattctgacaccacaatccggt

SEQ ID NO: 16569 - DNA, 630 bp, synthetic construct
  source 1..630: mol_type = other DNA
aagatacagctgaaaggggaaaacgttaagtggaattgacgaacaattttccaaataacgccgtttgtcctaatagaaaatactatagcattgaaccaacttttatgtattatttatgtttttgtattgtattgtatatgtataaaatcttcttttatataataaatgaacttttgtgtgagatattgcattatgacttttaagtactcaggcacgatattaccaacgggacatctaacaccggacttcgaaaacccggcgcatttgtactgtaattatattgtaaatgagcaactgaattttgtatttgtaataataagtaacacgagatagtaaaatattttatggaagaagtacccaataagggttagagatggctgattaccatatcttcaacttattgggtatactgttaattgtacttctaagcactggcatgatcgccgttaagatctaccttcatcaggtacctagaatcggactctaggatgttataacttagtaatgttgggaacagacgtctatcacagaccttaaacgtgagaacccggccaggactggcaaccttccatcaaacggtgcgaacgatagcgatggattgtaacttaactgggcgcacaatgtataata

SEQ ID NO: 16570 - DNA, 462 bp, synthetic construct; identical to SEQ ID NO: 1945
  source 1..462: mol_type = other DNA

SEQ ID NO: 16571 - DNA, 607 bp, synthetic construct; identical to SEQ ID NO: 2185
  source 1..607: mol_type = other DNA

SEQ ID NO: 16572 - DNA, 848 bp, synthetic construct; identical to SEQ ID NO: 2480
  source 1..848: mol_type = other DNA

SEQ ID NO: 16573 - DNA, 272 bp, synthetic construct
  source 1..272: mol_type = other DNA
tttggcgtgccccagctcgtgcatttggggaagaacgcgtccgtttattggtcaacgtatgtcccgggttcactcgcgaggtaatacgttggttgcgagcagtagttgtcactagacatctagctgcatttaagcctggctgcactagcagcttgattgacaaccgcgtagtgtgccacgttcactctggaaaaacacaggccgggcttaatcagttagagagaaaggagttgttttcgttagtgcgtaaggcagtgcctagttattctggc

SEQ ID NO: 16574 - DNA, 866 bp, synthetic construct; identical to SEQ ID NO: 2503
  source 1..866: mol_type = other DNA

SEQ ID NO: 16575 - DNA, 853 bp, synthetic construct; identical to SEQ ID NO: 2486
  source 1..853: mol_type = other DNA

SEQ ID NO: 16576 - DNA, 270 bp, synthetic construct
  source 1..270: mol_type = other DNA
ataaatggtattcgagatcgttggacaaaaatagaggattccgtccatggtgatcgatatcaatcagaggcaagcgttactaagatagcttgtttactattggccattcttggtaaaacgaaattcggatttggattatctgatttagcttccttgattaaagacacgaaaaagaatacgactgtttataaggaattaatcgaagagatagaagatttcgctgaagaacatggattcgggttttcatcacgggctaaattagtaagagaa

SEQ ID NO: 16577 - DNA, 384 bp, synthetic construct
  source 1..384: mol_type = other DNA
cgttgagcggctacaaagtagaccgctccgtccagatttatacgaagccgaggcccggcacaactgcgaaggggaggtcccccatttggtgaagcggaagccccgcaaatttttaaagtatagtttgtttagcatattaactataagtaaggatttatttttaatattcaaataggtacaccctttaggcctattggctgaagggttaagtaaggccttgtgccttagagcgagccgtagggcattataattttattaaatatttattatatatatatttttagtttgatagtcccttaagggctatttagatagttttgtatttatttatattatattatatattttattttattatattatatatatatttaaatattaata

SEQ ID NO: 16578 - DNA, 317 bp, synthetic construct
  source 1..317: mol_type = other DNA
gttcgacttctatagcccgccttgggggctttgtaccttgggccaccgtaactatacgttggataagctaaaaatagttgcttgtgtttgattaacgcacaggttgtaggttctgaattacctgcaatttgtggacagctacacaagtagtcattgtatatagtcgttatttagcgacggggtgacgcccacaaaaatagcactgtcatgttgtcgattgatgcaccgctcatgatatttgtacaaattgcattacttatctacatagaattttggaggacggtaccctcaataaaaataccgaattgaacactact

SEQ ID NO: 16579 - DNA, 569 bp, synthetic construct; identical to SEQ ID NO: 189
  source 1..569: mol_type = other DNA

SEQ ID NO: 16580 - DNA, 812 bp, synthetic construct; identical to SEQ ID NO: 2447
  source 1..812: mol_type = other DNA

SEQ ID NO: 16581 - DNA, 817 bp, synthetic construct; identical to SEQ ID NO: 2452
  source 1..817: mol_type = other DNA

SEQ ID NO: 16582 - DNA, 275 bp, synthetic construct
  source 1..275: mol_type = other DNA
atacggctcacggccgtatagtatatttttcactcttcggagtgcccatgtttatcatatgtggtaaccgcttatatctggtggtataacatcttatatatgtgtgatgacacttatgatattcagggacctgtctcagcagtaattgagcgcgcaatcgtttgcctgtggaatcagtctttccccctctctatgggttactagggctgactgtgtccgcccgtttggcgttaactacacccttatgaatagtacaccacaacaataatagcaat

SEQ ID NO: 16583 - DNA, 401 bp, synthetic construct; identical to SEQ ID NO: 1784
  source 1..401: mol_type = other DNA

SEQ ID NO: 16584 - DNA, 288 bp, synthetic construct
  source 1..288: mol_type = other DNA
tgtacgtgtgatcttgcttttctatataaattccgagtcctttaaaagaaaagtagtgctgcgtgcatgttttccctagctttttagctttacgttccaggatgggaagaggcagcccctcaatatccaggaaagctcggtaggtctcaaaacattaagccgtgtgagagacgacagaactggcttgcgcaatcagtaaataaaaatacaactctctcctctctcggtgtaggagatattaaaaacaccgaaagtgtagaagaatccccgcaacaaggacagggagtt

SEQ ID NO: 16585 - DNA, 474 bp, synthetic construct; identical to SEQ ID NO: 1974
  source 1..474: mol_type = other DNA

SEQ ID NO: 16586 - DNA, 881 bp, synthetic construct
  source 1..881: mol_type = other DNA
aaaaaagtttctccgaagacgagttttgtgtaattttatgtaataaggtgtcagagataatgtaatagtgtgtttacccgctcataataggtagacgtgaattttcttattatttaatttgtttaagttttaaagatagaatcctttgatagttggtttaattgaaatactaatggtaaaaatgtatggtgcgtccgctcgctcagaataggtggacttagtattttgtttcaattaattatcaaaagtgagaggtttaatccctttgttttctaatatattaccttttagtggtaaaaatgtatggtgcgttcgctcgctcagaataggcgaacctaactgtgtggtatattgtaatatgaagagtgattctttctttattttaatgtgtttcctttattattttattttgtatatgatttgatgatttgttacgagtcggaatattttaaactagtatagagtgtagaggatgaagaggtatgatgcgtcgtatctctcctacgtaggttggaaccttaacctgcgttgctcaagatagtagaaagccctgtgatgtcgaaagacccaccggctgctttgccgcttagagcactagaggtgttattgtaggaaatagatagactagctcacgcagctgacttatttatgtttctgctttcttgatgcgcaacatcaagaagggcactgaaggtacgggatctcagttttagccgtctgagatcggccgttatgcatgtagtatattagtttgaatgtgtttttccttcttttaatctaaatcgtgtttgcttttgttttaatcttataatttgatttgccttttattaaaaaggacgcttctcgtgagagacccagtgatcctgggacacttaatcaca

SEQ ID NO: 16587 - DNA, 279 bp, synthetic construct
  source 1..279: mol_type = other DNA
atgttatttattatttattttaaagacaccgtcaatggtgtcgaactgattttgatgttatgttataatgaaagagctatttcagcaaagtaaatcaaaatcagacaaatcggtgttagctcacaccaatctttgttctgttggtagactaaactaagattaaaaactaccgctaatattaatcgaaatgacaattcaatacaggggcgtgatagtggagacgctcccaccaagtatggactttttagtccacttccactcaattttcataaaattaaa

SEQ ID NO: 16588 - DNA, 797 bp, synthetic construct; identical to SEQ ID NO: 2429
  source 1..797: mol_type = other DNA

SEQ ID NO: 16589 - DNA, 603 bp, synthetic construct; identical to SEQ ID NO: 2173
  source 1..603: mol_type = other DNA

SEQ ID NO: 16590 - DNA, 439 bp, synthetic construct; identical to SEQ ID NO: 1887
  source 1..439: mol_type = other DNA

SEQ ID NO: 16591 - DNA, 377 bp, synthetic construct; identical to SEQ ID NO: 1721
  source 1..377: mol_type = other DNA

SEQ ID NO: 16592 - DNA, 266 bp, synthetic construct
  source 1..266: mol_type = other DNA
caaacaaccacaaaaacttattttttgacccacgggctacctttttcaaggaatttactgaatttgctgtcttcattaggacggccgtatacgcaatataaatacaaaacaattagaagagaggaaaaaacaagacaattcaatcgtagaacgcccttggggcataacattgagtaggttcgctactcattacattaagttcggtttacgtttttcttaatccgaacgtattaaagaactataattgacccgttattccccgaccg

SEQ ID NO: 16593 - DNA, 260 bp, synthetic construct
  source 1..260: mol_type = other DNA
actggggcgcgccacagcccttaatcccagatgaacactggacatatcaagaccttgtcgatgcagtttgtgactacggtgaccgaatcctgtcaggccacgaaaaagtgaagtgtgagtgtgatcaaacaatagggtggaaccagccgctgaccgaattcaacgaacacttgcggcgatttcgattaccccccacacacggcaaatgtcatgggtgcttcctgaagcctggcgcactagaagatggattacacatcctc

SEQ ID NO: 16594 - DNA, 502 bp, synthetic construct; identical to SEQ ID NO: 2029
  source 1..502: mol_type = other DNA

SEQ ID NO: 16595 - DNA, 493 bp, synthetic construct
  source 1..493: mol_type = other DNA
actggcacgtctacttgggtagcaaggaagtttgtattcaatcccacccgattagggctccttgcgtgcgaaagcatgggaagtgcacaatgttgatggagggtacaaacattgtgtgtaaacgagactgcgacgggcataaggtaacctaaggtcggctggctatggtgattatgctaacaggaagggcaatgcctgggctgtggacaaccgactagaaatggttaggttgtgcccgagaggacggatgcggcagtcggtcacccaaatgatgacgttaaactgggcttatggtgcaaaccacgtcacaaaggtatgagcacaggattggtcacctggttagcaaaatgtgacgttgttgaccctgtggtgccgatcaagtcttaggacacaatataacacctaaaacttgattaaccccacacattgtgctgtctagggaccagcactcaaacaacaaaactatcataacaacacgggttacaccttaagg

SEQ ID NO: 16596 - DNA, 415 bp, synthetic construct; identical to SEQ ID NO: 1816
  source 1..415: mol_type = other DNA

SEQ ID NO: 16597 - DNA, 455 bp, synthetic construct
  source 1..455: mol_type = other DNA
tctggcacgtctacttgggtagcaagggagtttgtattcaatcccacccgataagggctccttgcgtgcaatagcatgggaagtgggcaacactgatggaggtaacaagtgttgtctgtaaacgagactgcgacgggcataaggtaacctaaggtcggctggctatggtgattatgctaacaggaagggcaatgcctgggctgtggacattcagccagaaatggttggattgtgcccgagaggacggatgcggcagtcggtcacccaaatgatgacgttaaactgggcttatggtgcaaaccatgtcacagaggtatgagcacaggattggtcacctggttagcaaaatgtgacattgttgacccctgtggcgccgatcaagtcttaggacacaacacgacgaacctaaaacttgctggcaccacgcactagtgttgtctagggcacaacacaaa

SEQ ID NO: 16598 - DNA, 274 bp, synthetic construct
  source 1..274: mol_type = other DNA
gcacttcccgtcttggaatgacgttaaacttaccctgcatactgtcttatgcatcaacatttgacacttttcggttatttatactagatatggagttgagaaatagttctcctcctgtattcattatagttttcttgttctattgatagctagacaatgccgaaaatttttccaaaataggacgtctccagcgcatattggcatgtagcgctgcagtgacgttaaatcatagaaattgtcaactaacacctataatattgatcataatattccg

SEQ ID NO: 16599 - DNA, 557 bp, synthetic construct
  source 1..557: mol_type = other DNA
aaaaaatttgactgaatatcgaagcccagaaaaatggtccgactgattgaattcacaattgacttccatgaggatgatattggcgatatccgatccctttcttattatttcccggacgagatcgatgctccaattacactgagtccagaaatgatcattaaatctattgaagacaaataccctcatatctgtattgagcagaccctacgatatgagctcttgcagtctggagagcttatggatgcaaaggcagaagatgaatttgagttccatgaagatcatgtggttttcaatgatgaagaattcagttctatcatgttaattttatatatctccatcgatgaagaacaagaatatgtcaatcacgacagactcatggacactatctaaattttgatttatgataatactgtcacttatttatgagtataagaatctgatcttatatgcttctgtctcaactttttgattaaaaaaaaccttttgatcttatcagtgaagattaaaattccccaaactttgaacactaagaattatacaaccccaattccccaatc

SEQ ID NO: 16600 - DNA, 378 bp, synthetic construct; identical to SEQ ID NO: 1726
  source 1..378: mol_type = other DNA

SEQ ID NO: 16601 - DNA, 565 bp, synthetic construct; identical to SEQ ID NO: 2133
  source 1..565: mol_type = other DNA

SEQ ID NO: 16602 - DNA, 452 bp, synthetic construct
  source 1..452: mol_type = other DNA
actggcacgtctacttgggtagcaaggaagtttgtattcaatcccacccgataagggctccttgcgtgcgaaagcatgggaagtgcacagtgttgatggagggcacaaacactgtgtgtaaacgagactgcgacgggcatgaagtaacctaaggtcggctggctaaggtgatcatgctaacaggaagggcaatgcctgggctgtggacaaccaattggaaacagttgagttgtgcccgagaggacggatgcggcagtcggtcacccaaatgatgacgttaaactgggcttatggtgcaaaccgtgtcacagaggtatgagcacaggattggtcacctggttagcaaaatgtgacactgttgacccctgttgtgccgatcaagtcttaggacacaatataatacctggatttgattgcatgacaaaaacgtgttgtctagggcacaacacaca

SEQ ID NO: 16603 - DNA, 495 bp, synthetic construct
  source 1..495: mol_type = other DNA
actggcacgtctacttgggtagcaaggaagtttgtattcaatcccacccgataagggctccttgcgtgcgaaagcatgggaagtgcacaatgttgatggagggtacaaacattgtgtgtaaacgagactgcgacgggcataaggtaacctaaggtcggctggctatggtgattatgctaacaggaagggcaatgcctgggctgtggacgaccgactagaaatggttaggttgtgcccgagaggacggatgcggcagtcggtcacccaaatgatgacgttaaactgggcttatggtgcaaaccacgtcacaaaggtatgagcacaggattggtcacctggttagcaaaatgtgacactgttgacccctgttgtgccgatcaagtcttaggacacaatataatacctaaaacttgattaactccacacattgtgctgtctagggaccagcactcaaataacaaaaccatcaataataacccgggttacaccttaagg

SEQ ID NO: 16604 - DNA, 623 bp, synthetic construct; identical to SEQ ID NO: 2204
  source 1..623: mol_type = other DNA

SEQ ID NO: 16605 - DNA, 452 bp, synthetic construct
  source 1..452: mol_type = other DNA
actggcacgtctacttgggtagcaagggagtttgtattcaatcccacccgataagggctccttgcgtgcgaaagcatgggaagtgcacagtgttgatggaggacacgaacactgtgtgtaaacgagactgcgacgggcatgaagtaacctaaggtcggctggctaaggtgatcatgctaacaggaagggcaatgcctgggctgtggacaaccaattggaaacagttgagttgtgcccgagaggacggatgcggcagtcggtcacccaaatgatgacgttaaactgggcttatggtgcaaaccgtgtcacagaggtatgagcacaggattggtcacctggttagcaaaatgtgacactgtagacccctgttgtgccgatcaagtcttaggacacaaaataacacctggatttgattgcatgacaaagacgtgttgtctagggcacaacacaca

SEQ ID NO: 16606 - DNA, 494 bp, synthetic construct
  source 1..494: mol_type = other DNA
actggcacgtctacttgggtagcaaggaagtttgtattcaatcccacccgattagggctccttgcgtgcgaaagcatgggaagtgcacaatgttgatggagggtacaaacattgtgtgtaaacgagactgcgacgggcataaggtaacctaaggtcggctggctatggtgattatgctaacaggaagggcaatgcctgggctgtggacgaccgactagaaatggttaggttgtgcccgagaggacggatgcggcagtcggtcacccaaatgatgacgttaaactgggcttatggtgcaaaccgcgtcacaaaggtatgagcacaggattggtcacctggttagcaaaatgtgacgttgttgaccctgtggtgccgatcaagtcttaggacacaatataatacctaaaacttgattaactccacacattgtgctgtctagggaccagcacccaaataataaaaccatcaataataacccgggttacaccttaagg

SEQ ID NO: 16607 - DNA, 501 bp, synthetic construct
  source 1..501: mol_type = other DNA
actggcacgtctacttgggtagcaaggaagtttgtattcaatcccacccgattagggctccttgcgtgcgaaagcatgggaagtgcacaatgttgatggagggtacaaacattgtgtgtaaacgagactgcgacgggcataaggtaacctaaggtcggctggctatggtgattatgctaacaggaagggcaatgcctgggctgtggacaactaactagaaatggttaggttgtgcccgagaggacggatgcggcagtcggtcacccaaatgatgacgttaaactgggcttatggtgcaaaccacgtcacaaaggtatgagcacaggattggtcacctggttagcaaaatgtgacgttgttgaccctgtggtgccgatcaagtcttaggacacaatacaaaagacctaaaacttgctagcactacaaatagtgttgtctagggcacaacacacaacaaacaaaacaacagaccacactcaagagtgcacacacaacacaagg

SEQ ID NO: 16608 - DNA, 291 bp, synthetic construct
  source 1..291: mol_type = other DNA
tatctataatctactagagtggcatattcgtttgcttagcgtaacagcctttgatgaaggtgcaagctccatccttggtcgcctcggtatcaccgattataattgcggttcacgctgtcgatagtaaagccaatggaatgatttactcttagttactacggcttacgtaattttgtttactctagtgtttaaatagaccttctacctttgtctatttttgattatatttatttgaactcctactttattctactttctattttaaaatttattattttaaatttattaaaa

SEQ ID NO: 16609 - DNA, 392 bp, synthetic construct; identical to SEQ ID NO: 1760
  source 1..392: mol_type = other DNA

SEQ ID NO: 16610 - DNA, 478 bp, synthetic construct; identical to SEQ ID NO: 1982
  source 1..478: mol_type = other DNA

SEQ ID NO: 16611 - DNA, 400 bp, synthetic construct; identical to SEQ ID NO: 165
  source 1..400: mol_type = other DNA

SEQ ID NO: 16612 - DNA, 508 bp, synthetic construct; identical to SEQ ID NO: 2044
  source 1..508: mol_type = other DNA

SEQ ID NO: 16613 - DNA, 848 bp, synthetic construct; identical to SEQ ID NO: 2481
  source 1..848: mol_type = other DNA

SEQ ID NO: 16614 - DNA, 411 bp, synthetic construct; identical to SEQ ID NO: 1806
  source 1..411: mol_type = other DNA

SEQ ID NO: 16615 - DNA, 250 bp, synthetic construct
  source 1..250: mol_type = other DNA
gccgcagtcgcgacaagaaattgttgatggcgcaaatgctggtcttttcagaaccacggctcaagccacaccgttcgacccttcggaccccaatgaatacttcatttcgcgccaattggtctttttctttgtccacactagggcccttactgttgctcagttgaatttcattctcggcacaacttatgaccccgataccattattgtccaaaacggcacagtttatccctacgaaacttcgactccgttc

SEQ ID NO: 16616 - DNA, 276 bp, synthetic construct
  source 1..276: mol_type = other DNA
gtggcctagtgccgggccccatttagtgcggtctcttttcagcagcattcagatgtcggagtggtggaggtgcctgggactggtacctacaaaggttttattggaacgtcaggctcgttttcgtgggattattcctccattttacggaggcccacttttgttggttcgtatgcgtggactttggatcatgatgcaactaaatcggtgtttgagtatcagttacctcatcacctgtttgtttcgcatttgcagagtgttccccttcaagccaatcgt

SEQ ID NO: 16617 - DNA, 521 bp, synthetic construct
  source 1..521: mol_type = other DNA
catgttgttgtcggtctgtagccggcactatttgttatatgttaatcacaggctctttactgatcaaatggaagcctatgtatatgtccattagaactaatccgtgatcaacggtaatatgagtattttggctgctcgtctaacagtcaaagctcctcctgagagtgcaacttaatgcaatcgggattgagtcgggacgaattatcccggccaccttttcgaggaacgccttcgggtagggcctcaaccccagacgagactcagtagcaagcgtgttgtgagttgtgtctaggtagtattcgttcatgaattttggacttgaacgcctctatgcaacagcaatgccaacttgcggattgagggtggccatacgtgtccgtggaataacacccaatgaagttcctgactaaactctacattcggcggtaatgtggagccaaaggtgctgtgtcgactgttgaagatttattctttgcaggacgcctgcacggaataatctttgactcgtcgattatattact

SEQ ID NO: 16618 - DNA, 464 bp, synthetic construct; identical to SEQ ID NO: 1950
  source 1..464: mol_type = other DNA

SEQ ID NO: 16619 - DNA, 669 bp, synthetic construct; identical to SEQ ID NO: 2271
  source 1..669: mol_type = other DNA

SEQ ID NO: 16620 - DNA, 323 bp, synthetic construct; identical to SEQ ID NO: 1563
  source 1..323: mol_type = other DNA

SEQ ID NO: 16621 - DNA, 286 bp, synthetic construct
  source 1..286: mol_type = other DNA
gtcgggcttacgcatagaaataatagactatatcgaagagacactattttcgagaggaaagaagacttatcttcttagtgatagctactttgttggatttccaaatagttttattagagacagctatgtggatcaaatagaagtagctactctaaatgaaaattttgatcctgtgcaaggacctcagatatcttggaaattcaaagatgattttgaaaagccagacaacttatctgagattagttatagtaccataaccaacacaaggtacaagttcagtcatgag

SEQ ID NO: 16622 - DNA, 299 bp, synthetic construct
  source 1..299: mol_type = other DNA
cgaacaacttactgaaaaccctagcaaccctgttgaagaaatggagagacacgccaccggattccctaacagcagatgaggcctttaacaactatttggattatgaatttcatcgacatgaatgtctaaacttgttggtgcaaaagaggctcactggagagtttcaacctgagactagcatcaaaagctggattaatgaaaattcattctcaggatttgttgtgaacaatccaagtgttgaaaacaaaagtccagacctgatatatatcagacaagtgttaaaccctgtgactttggtt

SEQ ID NO: 16623 - DNA, 286 bp, synthetic construct
  source 1..286: mol_type = other DNA
gtcgggcttacgcatagaaataattgattacatcgaagaaacactattttcaagaggtaaaaagacttatcttctcagtgatagctactttgttggatttccaactagtttcattagagatagttatgtagaccaaatagaggttgctacattaaatgagaactttgacccagttcaagggcctcaaatatcctggaagtttaaggatgattttgataaaccagacaacttgtctgagatcagctatagtaccataactaatactaggtacaagtttagtcatgag

SEQ ID NO: 16624 - DNA, 744 bp, synthetic construct; identical to SEQ ID NO: 2365
  source 1..744: mol_type = other DNA

SEQ ID NO: 16625 - DNA, 310 bp, synthetic construct; identical to SEQ ID NO: 1515
  source 1..310: mol_type = other DNA

SEQ ID NO: 16626 - DNA, 264 bp, synthetic construct
  source 1..264: mol_type = other DNA
atttaaggaccactcagaccgccgatgtctttaaactccaggcgctagctgcatctagttgttatccaagtggaaatgtgcccttatgtattagtgatttagtgaatcttatatatatttatcgttttgcatatttattcataccctgtacattattgtattaataaaatcttactcttactgcgtcattgcttcacgcgcagacaggagtctaaacatagctgataagcaggtatttcatttacaacaataaaagacacgttt

SEQ ID NO: 16627 - DNA, 600 bp, synthetic construct; identical to SEQ ID NO: 2166
  source 1..600: mol_type = other DNA

SEQ ID NO: 16628 - DNA, 310 bp, synthetic construct; identical to SEQ ID NO: 1516
  source 1..310: mol_type = other DNA

SEQ ID NO: 16629 - DNA, 885 bp, synthetic construct; identical to SEQ ID NO: 2519
  source 1..885: mol_type = other DNA

SEQ ID NO: 16630 - DNA, 475 bp, synthetic construct; identical to SEQ ID NO: 1977
  source 1..475: mol_type = other DNA

SEQ ID NO: 16631 - DNA, 298 bp, synthetic construct
  source 1..298: mol_type = other DNA
acacattgtcggctacacagagcaatctccaaatcacaaaccatttctccaatagtcctctcattttgactttggatttctcatcgtgtttgcagtcattatcacacataattgttgcttccttgcgcttcacattatagccttgacagctgctttgttgtttcagcctttgttgaatcaacaaattggcagtgaccattagtgttaagtcagtttgtagtttatttacttaagttttagttttagctattagttcttagtttttgtttatagtcttagtgtagtttattggtttaag

SEQ ID NO: 16632 - DNA, 1000 bp, synthetic construct; identical to SEQ ID NO: 2642
  source 1..1000: mol_type = other DNA

SEQ ID NO: 16633 - DNA, 339 bp, synthetic construct; identical to SEQ ID NO: 1621
  source 1..339: mol_type = other DNA

SEQ ID NO: 16634 - DNA, 1000 bp, synthetic construct; identical to SEQ ID NO: 2643
  source 1..1000: mol_type = other DNA

SEQ ID NO: 16635 - DNA, 462 bp, synthetic construct; identical to SEQ ID NO: 1946
  source 1..462: mol_type = other DNA

SEQ ID NO: 16636 - DNA, 438 bp, synthetic construct; identical to SEQ ID NO: 1882
  source 1..438: mol_type = other DNA

SEQ ID NO: 16637 - DNA, 317 bp, synthetic construct; identical to SEQ ID NO: 1542
  source 1..317: mol_type = other DNA

SEQ ID NO: 16638 - DNA, 257 bp, synthetic construct
  source 1..257: mol_type = other DNA
agattttttagtccagacaacaaaggttacgtatctgtgtccattcggacggaaaaacttcctgaaaacattgtgccgcctgatatcttcagtgtcatccaggccaggcacccaattgacataaaatctgcagcccgaatggtgggtttagagatagatcaagattctgatcaaaattggtcgattgtacggatgtggtccgatttatgatttgatgccaaaattgacatgaaaaaaagttgttaacagccctcaca

SEQ ID NO: 16639 - DNA, 333 bp, synthetic construct; identical to SEQ ID NO: 1594
  source 1..333: mol_type = other DNA

SEQ ID NO: 16640 - DNA, 333 bp, synthetic construct
  source 1..333: mol_type = other DNA
cctcattatagtaatattatatctcctgaatactatgtctattttgatggttatagtggaaaacctcatggtgaaactctttccgatttagatatatataaagcatatataacatattacagatatattaaggaattttcagaattttgtaacaacgataatgattctaatactagcaatattattgaatatgagaataaggttagaaaatccacgaaggctaaggataaggatttaaaaaccaaaaactttcctgtgtttaatccagcattacaagaattgtataatacatacatcaaagataaatcggaagttaataaaaccaggttatta

SEQ ID NO: 16641 - DNA, 330 bp, synthetic construct
  source 1..330: mol_type = other DNA
cattatagtaatattatatctcctgaatactatgtctattttgatggttatagtggaaaacctcatggtgaaactctttccgatttagatatatataaagcatatataacatattacagatatattaaggaattttcagaattttgtaacaacgataatgattctaatactagcaatattattgaatatgagaataaggttagaaaatccacgaaggctaaggataaggatttaaaaaccaaaaactttcctgtgtttaatccagcattacaagaattgtataatacatacatcaaagataaatcggaagttaataaaaccaggttatta

SEQ ID NO: 16642 - DNA, 404 bp, synthetic construct; identical to SEQ ID NO: 1791
  source 1..404: mol_type = other DNA

SEQ ID NO: 16643 - DNA, 341 bp, synthetic construct; identical to SEQ ID NO: 1624
  source 1..341: mol_type = other DNA

SEQ ID NO: 16644 - DNA, 649 bp, synthetic construct
  source 1..649: mol_type = other DNA
taaagcgcagacagacggaagcgcctcatgaaagaggggagaggatccgcctacgtggcgggcggataagacttctttttcttggtctcaggtgggtactttccagtctatcatgaggctgccacagactgctgcgtcgtaaagcgcagacagacggaagcggttcactacggtggatctcgggacaacgggtcgtgccgtccgaaagatgaggagttgggtgcatcgattgatccttggtgttcatcagccagatgaatatttagaaggatccgtttgatcagattttggtggacaatactacggggctacgtgcagacgttgagtcatctcaccaatgggtaggggaagcttgaatactatggggctacgtgcagacattgatgctgatggagtgacctgattggatgggtgtaattctcatgctcaaccagaaatggtgtagactatccgattcagaggcgacagattgcaactcgggggtaactgcatggatcatggacactcaggtgtcgaattttcgtggacagacttcgcaaccgtggacaatcggggttttacttataacgatgaagcgtgcacaagcggatgttcggagtaggaatgttcttgtgtacgtggagggcctggcctgtgcaagcaatctaac

SEQ ID NO: 16645 - DNA, 311 bp, synthetic construct; identical to SEQ ID NO: 1521
  source 1..311: mol_type = other DNA

SEQ ID NO: 16646 - DNA, 632 bp, synthetic construct; identical to SEQ ID NO: 2219
  source 1..632: mol_type = other DNA

SEQ ID NO: 16647 - DNA, 264 bp, synthetic construct
  source 1..264: mol_type = other DNA
ccgaacccgccctgcaccttgccgactgctgcaggaagttcaggtcccgaaacgacacccgcccgcggatccgccgaacgtcccacacgctctaagcgacctataccgtctttcgtgttcaccccttccgtcaagacctcgctcgaatcgcagccttccctcctctccattggagagaacgcgaaggttgaggcttcgactactctcggtgcaaacgcatctcccgctctatcctccactttcctcgctgaaaatggtttggtt

SEQ ID NO: 16648 - DNA, 399 bp, synthetic construct; identical to SEQ ID NO: 1776
  source 1..399: mol_type = other DNA

SEQ ID NO: 16649 - DNA, 609 bp, synthetic construct; identical to SEQ ID NO: 2188
  source 1..609: mol_type = other DNA

SEQ ID NO: 16650 - DNA, 446 bp, synthetic construct; identical to SEQ ID NO: 1909
  source 1..446: mol_type = other DNA

SEQ ID NO: 16651 - DNA, 485 bp, synthetic construct; identical to SEQ ID NO: 1995
  source 1..485: mol_type = other DNA

SEQ ID NO: 16652 - DNA, 665 bp, synthetic construct
  source 1..665: mol_type = other DNA
ccatttggatagttgttggagagggagaacgaggggaggtaggaggctgctgggggattctttaattgcaccttaaaaatcccccaaaagctcttccgcgggccatttggatagttgttggagagagccaggtggtcgacgcgtgttgccggttgacgacgagccgaagtcaacggcctcccataaaaactcgttgctctggttccatccttcggtggagaacggggttggaggaacacagccttagtggtggggagtagccggggttgtgaagggctgtggtgatcgtcgaccatgcggataccttgcctctctccctcgttgaggccgcttccctgtgcggagcgatacgtgaccgtcagcacagggcaccagataccggtgttttaccggggtggcccaagcgcctagtgactgactccccgcgaacggagttatcggcaggatgtcgggtacggcccccgctatcgccacttcttctttactgtagcctccttcttcctttctcacttcggtgtaccttgtctttttgcctccttcggactgctggacctgcctgggaacacacactaggaggatcgggcggcggagagatttccgggtgtgggcgtggtgaagagccacgtcagagggtgcttaccccacccgtttatcggcgcacggtg

SEQ ID NO: 16653 - DNA, 284 bp, synthetic construct
  source 1..284: mol_type = other DNA
tgataatcttggcgagatatccactagacaaacctatattatatacggaagtaccggaatattatagtattgcccataggctagcaaattggccttttgagaaagaatttgccccaaccatcacgcggccccctggggggacgcggagcctagtcaatcgtgggtctcacgacttgaaacagcttgctgttagcaaagactcgaaacgtattttacggtagtagaacacggttgcacatttgaacactataaaaccctaaccggttttgtgttcacataggctc

SEQ ID NO: 16654 - DNA, 1000 bp, synthetic construct; identical to SEQ ID NO: 2644
  source 1..1000: mol_type = other DNA

SEQ ID NO: 16655 - DNA, 473 bp, synthetic construct; identical to SEQ ID NO: 176
  source 1..473: mol_type = other DNA

SEQ ID NO: 16656 - DNA, 370 bp, synthetic construct
  source 1..370: mol_type = other DNA
taagtacctatattcagcgccccggagcattagttccgaagaatcgataacgattatccagagcattagctacaaaaacgccttacaaagtaagaagacacgatacgataacgttgagtgtatgcgaacacaaagagacgaatacttgtggcacctaaagctgatcacagctttacgtggcaagattccacgtgaggagttgagggagataattataaaatatcaagtacattttaaaataaccccatcaatatatagtagtcataataggaatatagttagacctacggtagaagaatactataggatagcatattaggataagttagattaaaaattagtggaactttccacttaatctacctccact

SEQ ID NO: 16657 - DNA, 259 bp, synthetic construct
  source 1..259: mol_type = other DNA
gtgagcccaccaagcccagagcgggagacgagagaagcatttgtatcgagtgtctaatccacgctacgaaaagcatctgcgcatctctcgctctgggcttggtgggctcacatctacaccagggatcaaccccaaaaccgaacagccggggaatttacctgagtgcaaaggtaaattccttccgaaggaggcttgagaaaagaaggtcaaagacaagattgttaacacccggaccgaaaatattcacggctgagacaaa

SEQ ID NO: 16658 - DNA, 717 bp, synthetic construct; identical to SEQ ID NO: 2333
  source 1..717: mol_type = other DNA

SEQ ID NO: 16659 - DNA, 389 bp, synthetic construct; identical to SEQ ID NO: 1752
  source 1..389: mol_type = other DNA

SEQ ID NO: 16660 - DNA, 483 bp, synthetic construct; identical to SEQ ID NO: 178
  source 1..483: mol_type = other DNA

SEQ ID NO: 16661 - DNA, 832 bp, synthetic construct; identical to SEQ ID NO: 2466
  source 1..832: mol_type = other DNA

SEQ ID NO: 16662 - DNA, 1000 bp, synthetic construct; identical to SEQ ID NO: 2645
  source 1..1000: mol_type = other DNA

SEQ ID NO: 16663 - DNA, 667 bp, synthetic construct; identical to SEQ ID NO: 205
  source 1..667: mol_type = other DNA

SEQ ID NO: 16664 - DNA, 262 bp, synthetic construct
  source 1..262: mol_type = other DNA
atgccggttgactcagcgctcgtcagcgcttaaataaatagacgactgcgtaggtttcatgcaggataaaccaaagaacccgttgtgtgtagttacttgctcttccgtatagtgttaccaaatccgctaaggaggagtagagaaaagcataacgttgggtgtgccctcgtgcacagtgttttttagcatagtcgagttcccgctcgcacaattttggctctggctaggggctgtgcggccagcttctagtgtatgtacataa

SEQ ID NO: 16665 - DNA, 344 bp, synthetic construct; identical to SEQ ID NO: 1632
  source 1..344: mol_type = other DNA

SEQ ID NO: 16666 - DNA, 399 bp, synthetic construct; identical to SEQ ID NO: 1777
  source 1..399: mol_type = other DNA

SEQ ID NO: 16667 - DNA, 251 bp, synthetic construct
  source 1..251: mol_type = other DNA
ccccgcgtctttcacaaagattgcggggagcaagcctcggaaatgttttaggtttaactttttgtgactatatattcattcatttggaaggggataaactgacagatctgaattatattaaaactttagaaccgatagataccattaaaaatagaacttttacacctaatgatgtaagtgctgaaataaatggtcacttcaagtatactttttgtgatcagggctatttggcatattttcaacacgatagt

SEQ ID NO: 16668 - DNA, 585 bp, synthetic construct; identical to SEQ ID NO: 2153
  source 1..585: mol_type = other DNA

SEQ ID NO: 16669 - DNA, 282 bp, synthetic construct
  source 1..282: mol_type = other DNA
gtgcaggatggcctttcccatcttaagtggtttgtaggatttcgtgggtccataccccccgatttcttggtacgtattccatgcacggagaatacgaccaaaactcttatttcaaaaaatattattttttactcttgtgggctgagtgcgacccaccagttccagcttagcaacctggaagttgttggagatttatggaaccaaattacacatgcgtggagtgccgccactccgtatctgttcactcattacgcgattaagttctgcgacgagacgagcgaa

SEQ ID NO: 16670 - DNA, 441 bp, synthetic construct; identical to SEQ ID NO: 1897
  source 1..441: mol_type = other DNA

SEQ ID NO: 16671 - DNA, 853 bp, synthetic construct; identical to SEQ ID NO: 2487
  source 1..853: mol_type = other DNA

SEQ ID NO: 16672 - DNA, 849 bp, synthetic construct
  source 1..849: mol_type = other DNA
ctccctgtaggcctcaaagcctacaggagttccctagagaaagtatattgtgtcgtttgaccgcgacacccgatatatgctttcacagatattcggattttatattccttttcaatgtgaaaaacattggcactggtaagtgctgtcgttactgggatgtgaaatcccggttcgtagtattttgctatatgtgtttaaaggagtctttgtatgctgctaacgcggcttcatcgcaaagtccttatttcatctgttatatttcgtcaccacccttatggtcacccgtaagtgatggttcatcatagattctatttgtggcgagtagagtttattattgatgtaaaccaccccggagagtcaacttcgctaagaaaatcaaaccccttgcgctatcatgtattaggaaattgtaaggaacgtttcccgtattacttgatagtgtcgattgatgctaactcataagattggcttcatttgaggattatttatactagatggtttagtattcgtgaagaatcccactcacattatatgatttcgcttaaccaccttcactcgcagtagagttgaacgaaggtgtagatctaacatttttgtgagaagaattggtcttctcggagctatttgctcaacgtaccgagacattattgatgtatacaataccatattttacaactacgttttaaccagggacaacctgacctggagagtttaagccactcaatttttccgtagctctgtctgatatgtgaggtaatcattactcagaagaagtttcaactatgatgcagtagatatcgtagtattgtttagcccttgtggttagttccctattcccattttgaaatc

SEQ ID NO: 16673 - DNA, 718 bp, synthetic construct; identical to SEQ ID NO: 2335
  source 1..718: mol_type = other DNA

SEQ ID NO: 16674 - DNA, 474 bp, synthetic construct; identical to SEQ ID NO: 1975
  source 1..474: mol_type = other DNA

SEQ ID NO: 16675 - DNA, 396 bp, synthetic construct; identical to SEQ ID NO: 1769
  source 1..396: mol_type = other DNA

SEQ ID NO: 16676 - DNA, 427 bp, synthetic construct
  source 1..427: mol_type = other DNA
cttttgggaaagtaggatgtatctttcaaaggaaagataagctaaatgtggttagatggaaggaaatgtccatcggcataaactcagattgatttactatcaaatagaggaatgattcgcgtcgcgtggggcccagttcacactgggcgcatcggcccaacatacaggttgggtgcgctacgtcgtagcacgcattgaaaagtccccttaagcaagggagcctttgcttcatcgattgcagatgaagatggtgatcaatataccgaaccgcaacagagaaagcggtagtcaaggcttacaagtcgcaatggataccacgactgtacgagtcgtgtgaaccgaaattgcgcaatctgacaacatacgcgacaggcttaaatggccagaaggcttacggtcccaggctttgggagtccacaaaaccaac

SEQ ID NO: 16677 - DNA, 483 bp, synthetic construct; identical to SEQ ID NO: 1992
  source 1..483: mol_type = other DNA

SEQ ID NO: 16678 - DNA, 467 bp, synthetic construct; identical to SEQ ID NO: 1957
  source 1..467: mol_type = other DNA

SEQ ID NO: 16679 - DNA, 1000 bp, synthetic construct; identical to SEQ ID NO: 272
  source 1..1000: mol_type = other DNA

SEQ ID NO: 16680 - DNA, 502 bp, synthetic construct; identical to SEQ ID NO: 2030
  source 1..502: mol_type = other DNA

SEQ ID NO: 16681 - DNA, 491 bp, synthetic construct; identical to SEQ ID NO: 2012
  source 1..491: mol_type = other DNA

SEQ ID NO: 16682 - DNA, 438 bp, synthetic construct; identical to SEQ ID NO: 1883
  source 1..438: mol_type = other DNA

SEQ ID NO: 16683 - DNA, 455 bp, synthetic construct; identical to SEQ ID NO: 1928
  source 1..455: mol_type = other DNA

SEQ ID NO: 16684 - DNA, 1000 bp, synthetic construct; identical to SEQ ID NO: 2646
  source 1..1000: mol_type = other DNA

SEQ ID NO: 16685 - DNA, 645 bp, synthetic construct; identical to SEQ ID NO: 2239
  source 1..645: mol_type = other DNA

SEQ ID NO: 16686 - DNA, 434 bp, synthetic construct; identical to SEQ ID NO: 1874
  source 1..434: mol_type = other DNA

SEQ ID NO: 16687 - DNA, 411 bp, synthetic construct
  source 1..411: mol_type = other DNA
tggcgatgaaaatgcctcaacaaataacaaacggcgaagaaaatgccttatcaaataaccaagattggcgatgagaatgcctgaccaaataactggcgatgaaaatgcctcaacaaataaccgtcgattaagaatagccatgagggctagactctacgttagcgaaacgtgaaaatgaattgttacgtagccacagagacagtgtgagcgttcgactgcaatagaattgggaatttgattgttccatagtattgctttcccgcgcttccactcctgttggtgattgatggggtatgataagaagcccactacataagcgcaccaaggatatcaacatcgattcttcgtgcacttgcttgcgtgctgccgcctttaaaggccgcaaaaccgattggtaaagctataaggcca

SEQ ID NO: 16688 - DNA, 311 bp, synthetic construct; identical to SEQ ID NO: 1522
  source 1..311: mol_type = other DNA

SEQ ID NO: 16689 - DNA, 638 bp, synthetic construct; identical to SEQ ID NO: 2226
  source 1..638: mol_type = other DNA

SEQ ID NO: 16690 - DNA, 515 bp, synthetic construct
  source 1..515: mol_type = other DNA
gggtactagacccgatgacggaatttcgctcctgccggccctggtcggggggggcagacttcggcgcacgtagacttcggtcgcggactggtgatatgcgcaagagatattctagttaagtcctagtggcaatatgtcccgggtgctgccctgattatagcagccgagtaacctgctcgatcgttaagagaaatataaggaccggaccgcaagtgggggtcatgcacaccgtcgttggatatgcatcagctcctacgtaggtccgacggcgcaccacgctttaaaatggtctcctagctggagtgtacgctagtggcagcttgtgtaggcttgttgttacgactacataccctggtccttggtacaccgatggacccctggccgaggttaatggcggccccgcagggcagttaaatatatgcaggtaagctccagccttgagtgggccggtctgacatacgtgagtccgttcgtgcaccagcgttaggtgtacactacccccctacaattacatc

SEQ ID NO: 16691 - DNA, 489 bp, synthetic construct; identical to SEQ ID NO: 2006
  source 1..489: mol_type = other DNA

SEQ ID NO: 16692 - DNA, 324 bp, synthetic construct; identical to SEQ ID NO: 1565
  source 1..324: mol_type = other DNA

SEQ ID NO: 16693 - DNA, 558 bp, synthetic construct
  source 1..558: mol_type = other DNA
cgttaataagttcaaggacttattagctattttatttgatagttttgcttctattcagaagtgtgccctgcatgcaaaacatgcaaattaggttaggcagtggaaacacagatcgccggggaccagcattcactctttacgaatcactgggttacagctactttgactagatcatatactgtatttatcattcgcgttggttggacctgtatcagcagggttccggtcttggaaatcaaaatgagggcactcaccaagatgcgttacgtcgtaacaacctgaaaaagcgggcttgacaacctggcctatcatacactggcaagtgatatgagaggtgatcaaatataccgagtagcataaatatcgctacatgtagtcacaacatgaaaacattctgacactgggaaagaccagaaacaatcgtgggatccaacgatggcaaaatgacgtttgggaatcaacgtgcccaatgccgaatcgatcacagttagtcaccgacgaaggtgcaattgaaaagaacacatagttagtatcctaaccacgacgctacaataattc

SEQ ID NO: 16694 - DNA, 276 bp, synthetic construct
  source 1..276: mol_type = other DNA
cgaggagtttggggatatacccggttttgcatttacaaaactacatcttacccgaataagtggggaagttcgtcttgtggattacaacacagatagatctccgtaagaaagagtatcaaacatgtttgaaactgttcttggagagtcctcaataaaggtggtatggacaacataaaattatgacatcgggaaagaccgaatattacttaattttgggtttacttttcagctcctttatcagcagaaaaccgtttgccgggtcgacggctaacgcac

SEQ ID NO: 16695 - DNA, 562 bp, synthetic construct; identical to SEQ ID NO: 188
  source 1..562: mol_type = other DNA

SEQ ID NO: 16696 - DNA, 280 bp, synthetic construct
  source 1..280: mol_type = other DNA
cgaggagttcggggatatacccggtttgcatttacaaaactacatctgccctgagtaatggggaagttcgtcttgtggattacaacacagatagatctccgcatgcacagaatcaaatacacttgaaactgtccttggagagtcctcaaacaaaagggttaaaccttataaaatacaaaactatgacattgggaaagactaaacaattatttaattatagggtttacttttcagctccttatcagcagaaaaccgtttgccgggttgacggctaaagcaa

SEQ ID NO: 16697 - DNA, 328 bp, synthetic construct; identical to SEQ ID NO: 1578
  source 1..328: mol_type = other DNA

SEQ ID NO: 16698 - DNA, 370 bp, synthetic construct; identical to SEQ ID NO: 1702
  source 1..370: mol_type = other DNA

SEQ ID NO: 16699 - DNA, 911 bp, synthetic construct; identical to SEQ ID NO: 237
  source 1..911: mol_type = other DNA

SEQ ID NO: 16700 - DNA, 982 bp, synthetic construct; identical to SEQ ID NO: 2564
  source 1..982: mol_type = other DNA

SEQ ID NO: 16701 - DNA, 341 bp, synthetic construct; identical to SEQ ID NO: 152
  source 1..341: mol_type = other DNA

SEQ ID NO: 16702 - DNA, 860 bp, synthetic construct; identical to SEQ ID NO: 2494
  source 1..860: mol_type = other DNA

SEQ ID NO: 16703 - DNA, 1000 bp, synthetic construct; identical to SEQ ID NO: 2647
  source 1..1000: mol_type = other DNA

SEQ ID NO: 16704 - DNA, 836 bp, synthetic construct; identical to SEQ ID NO: 2469
  source 1..836: mol_type = other DNA

SEQ ID NO: 16705 - DNA, 258 bp, synthetic construct
  source 1..258: mol_type = other DNA
ctcagtttaaagatttttctaaaattttatcaggacctcaaaagaaaatacagaaccaagggaatttatctattgaatttttaacaaaagaaaacgaacatttaaagaatagactaaaagatttagaaaatcgattcgagatcttaagtcttcgagtcttggcactagagtcatcatcagtaacacctcaagtagtagttccggataaagtagtatattgtaagccttcgactttagcgtggcacttaaataaagaac

SEQ ID NO: 16706 - DNA, 323 bp, synthetic construct; identical to SEQ ID NO: 1564
  source 1..323: mol_type = other DNA

SEQ ID NO: 16707 - DNA, 330 bp, synthetic construct; identical to SEQ ID NO: 1580
  source 1..330: mol_type = other DNA

SEQ ID NO: 16708 - DNA, 425 bp, synthetic construct; identical to SEQ ID NO: 1847
  source 1..425: mol_type = other DNA

SEQ ID NO: 16709 - DNA, 916 bp, synthetic construct; identical to SEQ ID NO: 2538
  source 1..916: mol_type = other DNA

SEQ ID NO: 16710 - DNA, 291 bp, synthetic construct
  source 1..291: mol_type = other DNA
gggtgccccgctcgtgaggacggagtcgacactaagaaaccgctatatcataccggagtgggatttaatggtgtcacagaagggattaccgtccgcgagtgtgggacatcgaaaccgcgtgagcagcgtatatcaatacggcaccctgcttgcgcaacaaaggaatttaggtgccacaacgcctccttgcccaacctcctgcgcgcgcttaatgagcgtgtatttaacgtggaggatgagcatgggggcgtcaagcccaccccacaggctgcccctggggaatgggctagg

SEQ ID NO: 16711 - DNA, 1000 bp, synthetic construct
  source 1..1000: mol_type = other DNA
tatcaaccctcgtacaaacgagaaagttgagcatccgggcctaagacacgaacagtcggcgataatgtctttaaaagttcagattgaatacaatcctttggttcgattttattcaaaagaaatagccgatattagtgatgcacctgcagatcaagtcacgatcgaaacagaggttattcaagagtggaataagttagaacgattgttggacacctttgtaactgatattaacgatatcaagattacacgagcgtgcaggcgcgaagctacaacccttgatgctctcacaaaaactcgagtctgtttttctcaaaatgacttggtcggttataaatcactattagacggattgaactcagcttctaatgatttgaaagattctacatctgacataagtagtctaaatatgggaatctgaagtgtaccgaacggttttcatatcgtatttaaatttaaagaaactaggagaactataatgacttcgaacaatgtcgagcttgatgatctatccgtacagcgtgtatcaagcagtatatcagagcttcgtggcgaccacctatctagtaagctatctgctggccatacaattcgtgactcaggtgagttacaccctaataccatacttactctcgcaaagaactcgactacaatagtcgttccttacgcaactgttccaagatatcctcttcgacgtgcatcggcgttatcagatctgacaatgaagaaaccatctttcttcaagcgcttgtcattgaaattcaagatctggaagaaattgaagcttttccattctcgaagaaaaatatgactgttcatacactacactaaagatcagtgcgaactgatattctacggtgttctattttacttatttgcttgtctggtggttatttaatttaaagaaactaggagatactcttactactttactcatctaacaatcattattcgtactttaaaaacttaaatcagttgtcccagacagaaatttgcaatcgtc

SEQ ID NO: 16712 - DNA, 256 bp, synthetic construct
  source 1..256: mol_type = other DNA
cggaatcgcgttttcaacccgaagtcccgggcttggcgcgagggcacccaaagctgcgaagtaatctttgggttcagtggccgggatatcccgccattcctattttgcactgttcgcagggccctttcctgcgcaactttgactttgcagattcttcctgcaagaattttctctcaacatttaattttgttcagctaacgctgttattttaattttgtccagctaacgctgttattttaactgtttgaccatcgcc

SEQ ID NO: 16713 - DNA, 813 bp, synthetic construct; identical to SEQ ID NO: 2448
  source 1..813: mol_type = other DNA

SEQ ID NO: 16714 - DNA, 490 bp, synthetic construct; identical to SEQ ID NO: 2010
  source 1..490: mol_type = other DNA

SEQ ID NO: 16715 - DNA, 416 bp, synthetic construct
  source 1..416: mol_type = other DNA
ctcagcaccaactgggctcttccagtataaaaaggggcccccctcgggcctggtacgggggaacagaaggaaaactgttcgcaatggaaaacccgggaccgctcgttagacggaggaaacatggcctaatggaagacgtttggaccttacgagggagcgcgcagatggacataattgtcccggtaccagcgattacggatttgtggagcaatgtacccttagctcttaagagacgcctggtatgagaggtggagtgctatttagcacaggaggcaggctcgagtgccacctttaagacgtagagatgcgttaataggtttgggcctgtgggtaatcgcgcgcaagagaccgaggtatcttttgcatgttaaatcatataccttactaataataaaaataataaaaataacagaaac

SEQ ID NO: 16716 - DNA, 391 bp, synthetic construct
  source 1..391: mol_type = other DNA
ccccagtgacctctatcaaatatctgtttagttgatgtctagggctattgagagactcattctgatcactgtgctaggctgccttctcttggaaatctttgactacatacagagaaataacaaggaaagtgaagtgactgttctcgggagaggtgactgtgttatatatacagggaaaaggttttgtgaggaagggaggaagttgagctgccctggtgtctatgaggatttcttctttgtaacaggtatcctgatttcaaaaggtttttcattggctgctattgcaggttctgtagcactgctagcatttgtttacgggaaaataacccgagagttgagaaccagcgaagtgatagacagacgactggacagggaagaagttgtgtaaagt

SEQ ID NO: 16717 - DNA, 392 bp, synthetic construct; identical to SEQ ID NO: 1761
  source 1..392: mol_type = other DNA

SEQ ID NO: 16718 - DNA, 782 bp, synthetic construct; identical to SEQ ID NO: 2414
  source 1..782: mol_type = other DNA

SEQ ID NO: 16719 - DNA, 832 bp, synthetic construct
  source 1..832: mol_type = other DNA
gcggggcttgctcgtagggtttgtggccattttggcccagccgtgtcgttaattagcttcgcgctttaattaaagtcccaggcctcagggaggaaatgccctgggggagacggcgtaggaccactgcaaacacggggatattccgcccctcgctcctggtccggggtgctgaagggagacaccctaacaagccgggcttattcttgacccctgcccgatgagcgcgggcagggcgcagcctgccggtcctgtgtaggagctggacctgaggtgaaggccgtgtcgagcgcgggtttaccaccgcgtggggttggccacccttaatcggcacagaaggggcccctctcccgcgcattcctaaggaatgtgactccagcacccaagccgcaaggcgtggtgtgttgggagggcctcgaaagaatggttacgatgtgacccagcactgcttgacaaatctgggcacacctagtagcaggagcacgtttccaagcccgccgacctctcacgtggactatcaaacatccatggtagctgttgacccatttccagtcatgtcggttgaggtggtttcttgagcgccaccttttggaaacaccaggatttagtcacctgactcggcgccgaacggttcgtccgatagttttggccgagtttgtgtggatacgtgctctgggtgtgggtacacctttgattattgcgtcattggttatcgctctgtacatagtttttctcgtcgtcccgaaacggctcacgacgacctgggtgaggactagatccgcactgcgatcgttgtagtgtgttcacgagctatcgcagctcaaagattgtagga

SEQ ID NO: 16720 - DNA, 300 bp, synthetic construct; identical to SEQ ID NO: 1486
  source 1..300: mol_type = other DNA

SEQ ID NO: 16721 - DNA, 429 bp, synthetic construct; identical to SEQ ID NO: 1862
  source 1..429: mol_type = other DNA

SEQ ID NO: 16722 - DNA, 335 bp, synthetic construct; identical to SEQ ID NO: 1603
  source 1..335: mol_type = other DNA

SEQ ID NO: 16723 - DNA, 327 bp, synthetic construct
  source 1..327: mol_type = other DNA
agaaagaaaaaacgtgtctccctagccatggattaaattcacggaccatggttagtgtggtgaaggcgataccgtgagtcgatccttaaccacccttcgactggtgaacctgtgggttggaagcccactgggggtggacaggtcgaagtgtaaaaaatccacaaaatttcctctaaaaatcaaagtgaagatgacgcattactcgaagtgatacgtaacagcgcagtgaaacagactcgggaaaactttgaacaggaggaggaattcactgtggcctccggtgttgcctttttggcggcactgaacgcccgatattctgactccgtg

SEQ ID NO: 16724 - DNA, 477 bp, synthetic construct; identical to SEQ ID NO: 1980
  source 1..477: mol_type = other DNA

SEQ ID NO: 16725 - DNA, 378 bp, synthetic construct; identical to SEQ ID NO: 1727
  source 1..378: mol_type = other DNA

SEQ ID NO: 16726 - DNA, 1000 bp, synthetic construct; identical to SEQ ID NO: 2648
  source 1..1000: mol_type = other DNA

SEQ ID NO: 16727 - DNA, 1000 bp, synthetic construct; identical to SEQ ID NO: 273
  source 1..1000: mol_type = other DNA

SEQ ID NO: 16728 - DNA, 1000 bp, synthetic construct; identical to SEQ ID NO: 2649
  source 1..1000: mol_type = other DNA

SEQ ID NO: 16729 - DNA, 342 bp, synthetic construct; identical to SEQ ID NO: 1627
  source 1..342: mol_type = other DNA

SEQ ID NO: 16730 - DNA, 799 bp, synthetic construct; identical to SEQ ID NO: 2431
  source 1..799: mol_type = other DNA

SEQ ID NO: 16731 - DNA, 277 bp, synthetic construct
  source 1..277: mol_type = other DNA
aaatgtcgcggaattggcctccgttggtgaaaaccaaaacggctatattgatggagcaaagactatcggtagcgcgatagacactagcttccttgatatagttgagaagcccggtgaaactagtactgcggtacgaaatgttgccaccgttgcatcgaatgctgaaacatgcaatcgatccaagaaagcaacatctgcaggttctcccaaggggaacaatgcacaacccggtaaaacgggttctgcgcctgctacccaacgcaaaaaacgccacaat

SEQ ID NO: 16732 - DNA, 858 bp, synthetic construct; identical to SEQ ID NO: 2491
  source 1..858: mol_type = other DNA

SEQ ID NO: 16733 - DNA, 985 bp, synthetic construct; identical to SEQ ID NO: 2567
  source 1..985: mol_type = other DNA

SEQ ID NO: 16734 - DNA, 963 bp, synthetic construct
  source 1..963: mol_type = other DNA
acttgtcggagttctgcactgcacgtaattcactcttcagcaattggaaggggtgctctgggcaagataacggcccggggtgagagtgacacaacccaatacgacgtatccggccaacctgccgccgcccaggggttgcacgcgttgaagggcccgcgtgtccgctgcgtcagcagcgagtgtccgccttattcttttgccaccttctcccggggtggtggaagcctggtgcgtggggacgggcccacctgaggtgaaggccagtcaggaggggggagatgggctccccctcgcgtccagccaacgcgcaacgtcctgagctacgagatcggcccggcccggggcttaattgtcaacagtggtcgcgtgctagcaatggcacgcggttgcaagccgatccttgcgatgtctacggaacctgaacgcgcggccgaaccgcgcgggcacgtacccgtggtcggacttacgaagctgtgagggaaggggaaaaggttcgagccagccgcaagtacccgtgacccttgagcttcggtcccccgcggcagtgccgccctatgtacagacgggaagtgcatgaaaacccctcgaggataaaacccgcactctggaggtggagtctgaagctgggcggcgcccgaccgggacgctgcgtgtgtccacgacaacggtccacgcgtcgcccgcttcggatggaagccatgagactgcggactaaaaatccctgaaaaccaaccaaaccccgcccgtcggcctgagccagtcaaaacgaccggccagaggaaccgcgggagggaccataaaccgtactctggaggtggagtccaggcggggagcgggccgcgagtcactcggcacactcggatggaaatgctgcggcatacgccaccaagtgtgcaggccccgccacggatggaagccatgagactacggccaaagggaaccccttgagtcgaattcgccacc

SEQ ID NO: 16735 - DNA, 269 bp, synthetic construct
  source 1..269: mol_type = other DNA
ccggtgccgtggtgagtgaatcgagcgccgatgcactccccacgactgctagcgttgttatccccagggtaagtaatgttatttcactttagttcaggctgggataagttttgcctgtgagcattttaccgtcgtccagtagggatctgcgcggcgggcaaccgagagatagcaccaggctagggaacatcagggctgccccaagttctctcggtgagcatgatgtgctaggtgccacatcatgtcttcctgcaccgcgcggtgggtaa

SEQ ID NO: 16736 - DNA, 258 bp, synthetic construct
  source 1..258: mol_type = other DNA
gatatagcgggagtaggcaagataaaagtaaaaggaggaactcctaatgtgaccctttcgtctcaaacctcagcaaattactacgctgactcgacaggtattcacttagatccgccgacagaccctaaaaggaagatctacctgtacgaagaaacctttgagcagactgttgaggtagaagctactgacgacagcggagtgataggtgctctaacctcctatcacgatcccagttcatacggagcaacctacgaacca

SEQ ID NO: 16737 - DNA, 1000 bp, synthetic construct; identical to SEQ ID NO: 2650
  source 1..1000: mol_type = other DNA

SEQ ID NO: 16738 - DNA, 774 bp, synthetic construct; identical to SEQ ID NO: 219
  source 1..774: mol_type = other DNA

SEQ ID NO: 16739 - DNA, 415 bp, synthetic construct; identical to SEQ ID NO: 1817
  source 1..415: mol_type = other DNA

SEQ ID NO: 16740 - DNA, 628 bp, synthetic construct; identical to SEQ ID NO: 2212
  source 1..628: mol_type = other DNA

SEQ ID NO: 16741 - DNA, 644 bp, synthetic construct; identical to SEQ ID NO: 2237
  source 1..644: mol_type = other DNA

SEQ ID NO: 16742 - DNA, 562 bp, synthetic construct; identical to SEQ ID NO: 2128
  source 1..562: mol_type = other DNA

SEQ ID NO: 16743 - DNA, 258 bp, synthetic construct
  source 1..258: mol_type = other DNA
gatatagcgggagtaggcaagataaaagtaaaaggaggaactcctaatgtgaccctttcgtcgcaaacctcagcaaattactatactgacccgacaggtattcacttagatccaccgacagaccccaaaaggaagatctacctgtacgaagaaacctttgagcagactgttgaggtagaagctactgacgacagcggagtgataggtgctctaacctcctatcatgaccccagttcatacggagcaacctacgagcca

SEQ ID NO: 16744 - DNA, 345 bp, synthetic construct; identical to SEQ ID NO: 1633
  source 1..345: mol_type = other DNA

SEQ ID NO: 16745 - DNA, 952 bp, synthetic construct; identical to SEQ ID NO: 2554
  source 1..952: mol_type = other DNA

SEQ ID NO: 16746 - DNA, 258 bp, synthetic construct
  source 1..258: mol_type = other DNA
gatatagcgggagtaggcaagataaaagtaaaaggaggaactcctaatgtgaccctttcgtcacaaacctcagcaaattactacactgactcgacaggaattcacttagatccgccgacagacccccaaaggaagatctacctgtacgaagagacctttgagcagactgttgaggtagaagcctctgacgacagcggagtgataggtgctctaacctcctatcacgaccctagttcatacggagcaacctacgagcca

SEQ ID NO: 16747 - DNA, 882 bp, synthetic construct; identical to SEQ ID NO: 2518
  source 1..882: mol_type = other DNA

SEQ ID NO: 16748 - DNA, 781 bp, synthetic construct; identical to SEQ ID NO: 2411
  source 1..781: mol_type = other DNA

SEQ ID NO: 16749 - DNA, 551 bp, synthetic construct; identical to SEQ ID NO: 2117
  source 1..551: mol_type = other DNA

SEQ ID NO: 16750 - DNA, 297 bp, synthetic construct
  source 1..297: mol_type = other DNA
ggggatggctatatagccatccccatcgaaaaccctttaccgtgtttgggaggtgcaaactcggacgcaaagaaggagcgtgttagcgtagctacgaatcctccccatgagaacagttacatttctgttcatatcggggacactccaccggagcctgtcgggaggtggagggatgaggagaaggaaaataggcctgctaggcaggaattgcgtcgcaaagcaattaaagactccgaagagaggggtcgcttggaggcggagggaaacaatgatggtatcgaagaacacaaagccatc

SEQ ID NO: 16751 - DNA, 334 bp, synthetic construct; identical to SEQ ID NO: 1600
  source 1..334: mol_type = other DNA

SEQ ID NO: 16752 - DNA, 294 bp, synthetic construct
  source 1..294: mol_type = other DNA
ctccgcataggacgacggcaggactatcatcaaaagggtgactataccctccctactgcgaaaacatttaatgcgtacgttcactatcctattgatcccgtcaaccgaccgcctgccaaaccgccaaagttaccgatttacagcactaatgaaatcttttctgctgtatatcatgttgacgaggcggcggttgaccctgtgcccgccgagacaattgaacctgaaccaccgcctttaccgttttcgcctgccgccgtccatggatctgtgggaaatctacagatctactatgac

SEQ ID NO: 16753 - DNA, 384 bp, synthetic construct; identical to SEQ ID NO: 1742
  source 1..384: mol_type = other DNA

SEQ ID NO: 16754 - DNA, 402 bp, synthetic construct; identical to SEQ ID NO: 1788
  source 1..402: mol_type = other DNA

SEQ ID NO: 16755 - DNA, 308 bp, synthetic construct; identical to SEQ ID NO: 1510
  source 1..308: mol_type = other DNA

SEQ ID NO: 16756 - DNA, 282 bp, synthetic construct
  source 1..282: mol_type = other DNA
gagccggccctgaaatattcgcaacagtcaatcacgatatttcgcaacaatttttgtggtccatactggtctgacgggaaattccagcagtcagtatccgacccgcaactaccatcagcaaacgagttcgacgaaacctgtagagttcacgacattgcaatcgcaaagtccaaaacgaacgcagatcttagacgagcagacaaagtattttacgagcagaacatcaacaagggcaagttacgtagtgcagcggcaatccttgttaaacacatcaacccaatc

SEQ ID NO: 16757 - DNA, 734 bp, synthetic construct; identical to SEQ ID NO: 2355
  source 1..734: mol_type = other DNA

SEQ ID NO: 16758 - DNA, 1000 bp, synthetic construct; identical to SEQ ID NO: 2651
  source 1..1000: mol_type = other DNA

SEQ ID NO: 16759 - DNA, 469 bp, synthetic construct; identical to SEQ ID NO: 1962
  source 1..469: mol_type = other DNA

SEQ ID NO: 16760 - DNA, 258 bp, synthetic construct
  source 1..258: mol_type = other DNA
gatatagcgggagtaggcaagataaaagtaaaaggaggaactcctaatgtgaccctttcgtctcaaacctcagcaaattactacgctgactcgacaggtattcacttagatccgccgacagaccctaaaaggaagatctacctgtacgaagaaacctttgagcagactgttgaggtagaagctactgacgacagcggagtgataggtgctctaacctcctatcatgaccccagttcatacggagcaacctacgaacca

SEQ ID NO: 16761 - DNA, 1000 bp, synthetic construct; identical to SEQ ID NO: 274
  source 1..1000: mol_type = other DNA

SEQ ID NO: 16762 - DNA, 335 bp, synthetic construct; identical to SEQ ID NO: 1604
  source 1..335: mol_type = other DNA

SEQ ID NO: 16763 - DNA, 840 bp, synthetic construct; identical to SEQ ID NO: 2472
  source 1..840: mol_type = other DNA

SEQ ID NO: 16764 - DNA, 295 bp, synthetic construct
  source 1..295: mol_type = other DNA
gcccccctacagttcaatctccattgatgtaaaattgatatataagattgtcttataaaagatacaatacaatttaatcatctgattaacttagttggtgctcagtaagttttaaagagaagtgattttacttcggtgatttgggaccagctgaattatagtggcaaataaatcttactggtaaagaaagctcaggtttgttctgataaagagcaggtcaagtagacattattaactgactgtctagctacaatcacatttaagtgcaagcctaactaactggaaatttaaaata

SEQ ID NO: 16765 - DNA, 395 bp, synthetic construct; identical to SEQ ID NO: 1768
  source 1..395: mol_type = other DNA

SEQ ID NO: 16766 - DNA, 280 bp, synthetic construct
  source 1..280: mol_type = other DNA
aagccggcgctaatttatcaattaggacaagatagattaccacacgaatttttgcggggcgtactggtcagacggtcaatttcaaccatctgtcgcatatcccaccaaaccagcacttaacgaatttgacgaaacgtgtagatcacacgattcagagaacgcgttagcaacaactaactcagaactacgagaatcagatttaaagttttacgaggccaatatcaacaaaggtctgaaacgagctatagcagccaacctcgtatattacattaacccaatc

SEQ ID NO: 16767 - DNA, 375 bp, synthetic construct; identical to SEQ ID NO: 1719
  source 1..375: mol_type = other DNA

SEQ ID NO: 16768 - DNA, 267 bp, synthetic construct
  source 1..267: mol_type = other DNA
ttggcaacaggtattgcataccggcggtttggctcccgccccttttgtagccgtgaaagtttcacaatcaatgcgctttggcgtcttcccaatagcgcgaaacctctgccgtggtacgcccacggtctcaattttgcgtaaaaatagcataatttactcttgagcgatcttcggtacgcttggcgtcttcggcacgtctctgaagagcgcggcgggtgacaatttcctttcgattgtcgaacgttgtctgttgcgttgggcattacc

SEQ ID NO: 16769 - DNA, 287 bp, synthetic construct
  source 1..287: mol_type = other DNA
gttgggacggttctcgcttggttaattttgaactccttaatgctaccaaggttaaggccgtcactgattcaccatacatttcgtttaatcgtcattccattcttattcaatcatatcatcatcatcagcttgtcaaggatatagacatttcctcctatgtgttaaaatgtgccgtcactgtcgtacagggcgtacctggtgccggtaagactgagcacatattgcgttctattgattattctaaaaagactcttctgttgacgttgaataaggttgcgaaggaggat

SEQ ID NO: 16770 - DNA, 274 bp, synthetic construct
  source 1..274: mol_type = other DNA
gaccaacgttcaagcaaaaagtaatgctctcacgcttttgaatgtggttgttggttccctgacccggggagcccggggcgggggagttcagctcagaccgaagggcactcgcgagcaacagttgctgcgcgagtatgcctcatatctcggtttggctaagacgaactctaagaagaattgttggaagttccaagacggatttgtctctggaccagaggcggctttcttttcgagagcctacctggaagtccttttggactacagcgtcaagttc

SEQ ID NO: 16771 - DNA, 297 bp, synthetic construct
  source 1..297: mol_type = other DNA
tctcctccattcgacacaaaattgggtctatggtgttaaatctcccaaaacggtgtgtgcgtcgtacccgagtaatcaactcatgtctagcatcaaatctgaaattccgctggaccgctgtgtgtggttacgcttcgtacacttaatacttccgtgctaagtgcgcttaacgtccccttgtacacgcggggatgtccgctaaatgccgacagactgcacgggaagcctacggtaacgtgggtcaccacagatgtacagtcgcgcgattctcagtctcgcgggatccaatactaagac

SEQ ID NO: 16772 - DNA, 434 bp, synthetic construct
  source 1..434: mol_type = other DNA
gcgaaagctagttactcacaggtgctgaaaggtacccagcctgctgaaaagcaagccgcccgaaagggcaaacaatccgcccgaaagggcaagaaatcagccccgttggaagtggctttgggtaagttgttacccggagtgcatttggggtggttgggtaaggttgtggctgaattggccaagcccagccctgggtctgcggaggcatcgcaacctccgttgttcagagcgctcaccgctgctctgaaggtgattggcggccaggacatcgatgctgccaatgcgtacaggaacagctctgccgtgaaagagtacgtgggaaaggtttttccccgtccgggaaacgccaagcagagcgaggggccggcaacgaacgtggctccgttgaacagcaagcaacgtcgggcgctcaagcgtgccgacaaacaggccgc

SEQ ID NO: 16773 - DNA, 429 bp, synthetic construct; identical to SEQ ID NO: 1863
  source 1..429: mol_type = other DNA

SEQ ID NO: 16774 - DNA, 258 bp, synthetic construct
  source 1..258: mol_type = other DNA
cccggtgtccgttgagttaagccttctaactgcgctgtattaactgcatagttgttataaggttgttatcaacagctgccagtggtttctactgagagtcggagtcttctggctatcttatgtcagttgtggttgtgtttttatttctgatttggtgcttcgccaaatatctcttgagtgacatcaagaattctatcctttccctccttctactcagcttttctcttcgtctaggagttgcgattctgcagatccaaa

SEQ ID NO: 16775 - DNA, 667 bp, synthetic construct; identical to SEQ ID NO: 206
  source 1..667: mol_type = other DNA

SEQ ID NO: 16776 - DNA, 370 bp, synthetic construct; identical to SEQ ID NO: 157
  source 1..370: mol_type = other DNA

SEQ ID NO: 16777 - DNA, 461 bp, synthetic construct; identical to SEQ ID NO: 1944
  source 1..461: mol_type = other DNA

SEQ ID NO: 16778 - DNA, 900 bp, synthetic construct; identical to SEQ ID NO: 2525
  source 1..900: mol_type = other DNA

SEQ ID NO: 16779 - DNA, 386 bp, synthetic construct; identical to SEQ ID NO: 161
  source 1..386: mol_type = other DNA

SEQ ID NO: 16780 - DNA, 444 bp, synthetic construct; identical to SEQ ID NO: 1901
  source 1..444: mol_type = other DNA

SEQ ID NO: 16781 - DNA, 681 bp, synthetic construct; identical to SEQ ID NO: 209
  source 1..681: mol_type = other DNA

SEQ ID NO: 16782 - DNA, 410 bp, synthetic construct; identical to SEQ ID NO: 1802
  source 1..410: mol_type = other DNA

SEQ ID NO: 16783 - DNA, 261 bp, synthetic construct
  source 1..261: mol_type = other DNA
ctggggggccataagcccctccagtctttcagactattgtctgatttgctcacactcgctcatatccggagacggcgagtgagtgcggagtgataacgaacatgtaagtctccgtgaggagtctacgtggatagtcgtacccgttcatctggcggaatctctagcgaagttactcgtttcattcatggcgcccagtcgggctctgtgaatgcttatgagtacatcgtccgtaacaccgaccctgtatttaggttaggtggt

SEQ ID NO: 16784 - DNA, 404 bp, synthetic construct; identical to SEQ ID NO: 1792
  source 1..404: mol_type = other DNA

SEQ ID NO: 16785 - DNA, 362 bp, synthetic construct; identical to SEQ ID NO: 1680
  source 1..362: mol_type = other DNA

SEQ ID NO: 16786 - DNA, 1000 bp, synthetic construct; identical to SEQ ID NO: 2652
  source 1..1000: mol_type = other DNA

SEQ ID NO: 16787 - DNA, 575 bp, synthetic construct; identical to SEQ ID NO: 2143
  source 1..575: mol_type = other DNA

SEQ ID NO: 16788 - DNA, 314 bp, synthetic construct; identical to SEQ ID NO: 1530
  source 1..314: mol_type = other DNA

SEQ ID NO: 16789 - DNA, 288 bp, synthetic construct
  source 1..288: mol_type = other DNA
ctccatgaaaattggtcctttgaaattgcagataagtctagtttatattaggcttaactgagtttcttagatagccagtttccaatgaaagttattccctggtacttgggttaaagatcacccataattagttgggttacggtgagtggatccttaatgtacgttaagcatatagcccgtaacctcggccgagtgggaaacctctacaatctctcttgtccataagagagattgcatgtttcctagacgaccgaggaccattatttgaggctgtgttaaaacacccct

SEQ ID NO: 16790 - DNA, 282 bp, synthetic construct
  source 1..282: mol_type = other DNA
aaacgcattgaaatcttgccttgcgcctgcgtcaacgtcgtacctattgacctaacgagacctagcttggcaattcgaacggatttcagtgctgtacacaagcagaagaactacattaaagtagttcatatagaaggactgggactatcagaacagttcttctacaatagttgttcctgtaacgagactgacggtctaaaacgccgtcatgttctcggagatatagaagggtttgatccaaagaacaaacatatagatctacttcggaaagagatagcatca

SEQ ID NO: 16791 - DNA, 360 bp, synthetic construct; identical to SEQ ID NO: 1676
  source 1..360: mol_type = other DNA

SEQ ID NO: 16792 - DNA, 332 bp, synthetic construct; identical to SEQ ID NO: 1589
  source 1..332: mol_type = other DNA

SEQ ID NO: 16793 - DNA, 526 bp, synthetic construct; identical to SEQ ID NO: 2080
  source 1..526: mol_type = other DNA

SEQ ID NO: 16794 - DNA, 1000 bp, synthetic construct; identical to SEQ ID NO: 275
  source 1..1000: mol_type = other DNA

SEQ ID NO: 16795 - DNA, 1000 bp, synthetic construct
  source 1..1000: mol_type = other DNA
aatctgtagccgaagttccgtcgcatttatcggagagttttaacaggatacggttatcaatctttgtggctctggacgcaacttttgataagagcaaagtcacttagaacaactagccaagagcagtcgagtcacagggctaacgcgagtgacgttggatgtgtaacgtacatcaattgagaaacgaacgtcactcaaaaaacctacggtaaaggccgtatcagacgacgcctcaaccactgacaaggcggacacggccggcccgaaatgttcaacaattgaatccttctcgggggcttgagccgttgatgggcggacccagctgtggcgatcgcatctctgattggtagagtgccaagcggcacccgcaaccactgaccgtctgatccgaggagcccaagcagcacccgcaaccactgaccgtctggtctgcggaggccaagcggcacccagcaatcctgaaggcctgttgcggcaacgagtgcactcagccaatcagagacacaatcctgacggctggacacgcctactcacggctcaaaccgccactcgtggaagattcgattgtcgaatctttcaactgcaattgtaccgttaggcactggggctaaggtctgttcggtacgtaatgtaccgaaagaaagaaaagtagccttttccttccttcggccgaaaatgattattttgccaaaattttaatcgcccagtacaagttacgatcccgggaccccttgctccgaaagcggatgtccaagccactggactacggggcgaccgtctttcgaattattaatttaccgattctactcagttcgtgtcttttaacacggcactcggtgtaagttcccctggtgatgtttatgcgcctttgagtgttgccgataagcgaatcttccgtgcgtttaatccacctttcgagagcggaaatggcgatctgacatttgttagaaatgcaatcatagaaagggctgagttggcacgtgtttctgacgccgtcgtc

SEQ ID NO: 16796 - DNA, 945 bp, synthetic construct; identical to SEQ ID NO: 2549
  source 1..945: mol_type = other DNA

SEQ ID NO: 16797 - DNA, 268 bp, synthetic construct
  source 1..268: mol_type = other DNA
gccttgccgcgtaagcggcaaggtagggttcctggattgtcaatcccggatcccaaaggacttttggaaaagtccctatcgttggaatgtttgttgaaatagatgggttcccccacctatcgttattttcaactcagtctcttcatcgatagagaatccctctttcttggcctagttagccaaggaggagtatccccatacttcagaacaattaaccacgtctccgatccggaaaaagatcggaagcgacggtaggcgtcaacctacc

SEQ ID NO: 16798 - DNA, 267 bp, synthetic construct
  source 1..267: mol_type = other DNA
ggggtcggcacgagggagccaagcgtatgtagtccatctgtatgcccacctgtctacaaaccaatcaggttgggttgctcggtcgtacgcgttcctccccaccagtgccaagatgataagcggtccatcacggtttatactcctcccgttgatggattataccgcccgttcgcccatcgcgggtgcacatgcaatgaacttcttgctatacgcaatcgagtaattggcgatgtacctgcaccagaaaggagtggtctctctcggctg

SEQ ID NO: 16799 - DNA, 324 bp, synthetic construct; identical to SEQ ID NO: 1566
  source 1..324: mol_type = other DNA

SEQ ID NO: 16800 - DNA, 337 bp, synthetic construct; identical to SEQ ID NO: 1615
  source 1..337: mol_type = other DNA

SEQ ID NO: 16801 - DNA, 660 bp, synthetic construct; identical to SEQ ID NO: 203
  source 1..660: mol_type = other DNA

SEQ ID NO: 16802 - DNA, 332 bp, synthetic construct
  source 1..332: mol_type = other DNA
acggcctctaagaggaatatcctctccggctctcgccggtcacctatcttacgatggtgatatcccataaccagcaactataggagagaagatcatgaaagacaagagccttgcggagattgctgtatcttcgccatattttgacgaatacgacatcaatctctacgtcgcaatgctcgaaatctctcttggtctcatcgaacctacagacgctgtttgctcataccattatggttgtgtgctcgcagctgctgagttgttgggttttgactggtccaaccagttgaaacttctccccagtgtcccgtccgaccctcttcacggagggttcc

SEQ ID NO: 16803 - DNA, 253 bp, synthetic construct
  source 1..253: mol_type = other DNA
ccatgtggttttcgaaggttatcaagatgctcctcatttcgaaagagatgggacatcttcccttcgttgcaatttgggtaggtgctattatggcgtctacctatatgattgcctctggtttcatactggaatcagatgcagctcaaattgcagcggaggtccgtgacttactgggtttccccagcgagtaagcctgtcggtaccctaatgatggggtatcgaatcttgttttcttgttccaaaggaaaagaat

SEQ ID NO: 16804 - DNA, 378 bp, synthetic construct; identical to SEQ ID NO: 1728
  source 1..378: mol_type = other DNA

SEQ ID NO: 16805 - DNA, 357 bp, synthetic construct; identical to SEQ ID NO: 1667
  source 1..357: mol_type = other DNA

SEQ ID NO: 16806 - DNA, 390 bp, synthetic construct; identical to SEQ ID NO: 1755
  source 1..390: mol_type = other DNA

SEQ ID NO: 16807 - DNA, 250 bp, synthetic construct
  source 1..250: mol_type = other DNA
ggagcgtttaccgtgccgacacgcctgccgactgtgtcaccgttggattctggccttccttcggctagtgggcacgttaattgtacacgattaggcttgaggttgacctgaagctctcagggtcctgcccgtagctggcagtagatgaccgtataatccgtaagagcaaatccccttcttagtgtgctcctttttgtatgaattgccggactgatcttgcctatgactatgcctgaaattgataaaatat

SEQ ID NO: 16808 - DNA, 1000 bp, synthetic construct; identical to SEQ ID NO: 2653
  source 1..1000: mol_type = other DNA

SEQ ID NO: 16809 - DNA, 1000 bp, synthetic construct; identical to SEQ ID NO: 2654
  source 1..1000: mol_type = other DNA

SEQ ID NO: 16810 - DNA, 331 bp, synthetic construct; identical to SEQ ID NO: 1585
  source 1..331: mol_type = other DNA

SEQ ID NO: 16811 - DNA, 347 bp, synthetic construct; identical to SEQ ID NO: 1638
  source 1..347: mol_type = other DNA

SEQ ID NO: 16812 - DNA, 887 bp, synthetic construct; identical to SEQ ID NO: 2520
  source 1..887: mol_type = other DNA

SEQ ID NO: 16813 - DNA, 624 bp, synthetic construct; identical to SEQ ID NO: 2207
  source 1..624: mol_type = other DNA

SEQ ID NO: 16814 - DNA, 256 bp, synthetic construct
  source 1..256: mol_type = other DNA
gggccccctagagtagcaaggcacagccgcctacacagtttcacacctgtgctcttagcagtgcgtcgacatggccacaatggctcgggggtgaacagcccggcgaatgtcatcagtgggttcgatccagtaattgcccaaaatcctttacagttaggtgctaaccaaaatgccaagagactgcacggcgcacccatttaggtttggatcggatgaacagtccctttatgtatgaggcatccactacaatacaaaa

SEQ ID NO: 16815 - DNA, 335 bp, synthetic construct; identical to SEQ ID NO: 1605
  source 1..335: mol_type = other DNA

SEQ ID NO: 16816 - DNA, 299 bp, synthetic construct
  source 1..299: mol_type = other DNA
gatctcccccgaaggggttgggtctgacttgccacaacggagtaccttgtgatatgcgcatagctgattttaacatcaaccatgcgggtatcgctcgcgccatcgttcttacggatgatggtgacttcgttgctctcatccaccttccagtaatggagatggaggatatggtaagacagctcagcggtaagattgccgctgggttggaacaggcgttgcgaaacgccttggtcgctccgtgtggggcgaaccttaactaagactgtcggaggtcttcgctcctccgcaaggaggaacga

SEQ ID NO: 16817 - DNA, 257 bp, synthetic construct
  source 1..257: mol_type = other DNA
ttcgttgatcactttgtcattgtgttggttataacacacgggtgcaccgttaagcactccaccattgcatttggtaaggttaacatgcagcttggcatcgttgctggggccccactcataattggggactggtgtgattcccaggtctgaatccggtgtatgagagtaaacttcagctcttaccattggtattaagtgggtcgtttgttgatacgtgacaacacttgcagcttggctgcactcacacaacactcacc

SEQ ID NO: 16818 - DNA, 274 bp, synthetic construct
  source 1..274: mol_type = other DNA
cgagagtttccagctttgctgccttggtgagtttgcaccattgatcctttactacggactgtcggaaattggggcgggaaggtgagttgctgcacttctccttggttaacacccacgctcgaaaggcggaggtcccataacacacgtttcttaatttcccattcatccattcctggcgtgcggaaacctaagtcctgttcgtagtctttggttggcgggttccggcgttgccggttgggttcttacagcaacattcgcaactacgttaaacaac

SEQ ID NO: 16819 - DNA, 366 bp, synthetic construct; identical to SEQ ID NO: 1690
  source 1..366: mol_type = other DNA

SEQ ID NO: 16820 - DNA, 350 bp, synthetic construct; identical to SEQ ID NO: 1647
  source 1..350: mol_type = other DNA

SEQ ID NO: 16821 - DNA, 516 bp, synthetic construct; identical to SEQ ID NO: 2064
  source 1..516: mol_type = other DNA

SEQ ID NO: 16822 - DNA, 258 bp, synthetic construct
  source 1..258: mol_type = other DNA
gctcttccgatctggccccctttgggggccccacggagattcgtctcctttcccgaataactgaaggagtgaactgtggtacgtagacgcacttattcccttccaagtactagcggaacttatacctgggatttatatcctggtaaagtttatactactactgcgaaaggcgacagtggccaatgcgatgatatcgcaaataaccctggcgggaacaacgtttttgacctcattcatgagtcgggaacctacacacca

SEQ ID NO: 16823 - DNA, 665 bp, synthetic construct
  source 1..665: mol_type = other DNA
atacgaaattggcacaccgcttagtcgttatgctacactgcagaagacggcttcgccaaagatcaggcgacatgtcgaggaagcagcggctgatatatcggaaggaaaattgccaccatcaatagctggtggcccgcgtccccggtagccttgcagcattaagatctaggcaagattatagccatggaatggatagttatttaaatagactaagacaccaaaatccatttctagtgtagttcatgcctcacaaaattacaatacagattcacataacaaatacacatataatttctaatttcataatgttccataaatgtataaaataaatgtataataaatgtataattagtttcattgttggaggtcttggatttaagaccaggtggtgaagcttgtcctgcggtttcttagaaatttaagctagtagaactagcgccgcaatagccggtccgattggatatgcattggttggatagtttaccagctactgtttgggcacgccccatgctcacttggcgagggattcaaccagcgggacaccccgtgctatttagcagaagctttgagtgtttgctggatgcaggaaatgctcgggtgctttggagattaccatcgagcagtggttctactccgagataaacaaagggctcagaacgaatttt

SEQ ID NO: 16824 - DNA, 407 bp, synthetic construct; identical to SEQ ID NO: 1798
  source 1..407: mol_type = other DNA

SEQ ID NO: 16825 - DNA, 1000 bp, synthetic construct; identical to SEQ ID NO: 2655
  source 1..1000: mol_type = other DNA

SEQ ID NO: 16826 - DNA, 268 bp, synthetic construct
  source 1..268: mol_type = other DNA
cgggtttcaatatatcccaggcaaccatggtggaggtgcttaccaccatgagtttgagcaactggattggctcaagtacaagcattttagcaattcgcaggtaactgttacctgccaactacttgagagcctaggggcaaatcacctctttgtgtacacccgtggcagacaactgagccctagagtaaggacctttgagaaagatacttttgtcatactccctgccgtcttccaccccacctgccgcaatcaaagcgagcccatcaag

SEQ ID NO: 16827 - DNA, 439 bp, synthetic construct; identical to SEQ ID NO: 1888
  source 1..439: mol_type = other DNA

SEQ ID NO: 16828 - DNA, 753 bp, synthetic construct
  source 1..753: mol_type = other DNA
ttatgtccactcctgacggcactgaatatcagcatccatacaacatctggaaagccgagggttgcattgtaggctccggtggtgctgccgtctacgcccgagtttatcgcgggccttcaatggacgtctattatgcctatcccgcttctggcacttatcatagtgatgatccacaccgcctcaaacgatcagaccaattcgaaaatcttcgcctcagcagtggcaacattgccagactctcttacaattctgtcaagattcaaactacttctggtgacaacattcttgattgtcctcgagatccatttgaaagagcagtcgcgaaatgtggtagcggtgtccgtgatctaaagttcttgcccacattatcatcatacattatatctaaattaaccatgcacgatttggaaattaacaacgcacaagacatcttagaattagcaaacatcatgtgtgagcgcttcgcgtttgacttctattcacactcccatcttgaatatgatcccactagtatcaacatctttactaggtgtcgccgtcatgccatgttgctagctcgtgctatccgacataccttagcacgcaatttgacttgctcaatcattaatcgcccgatcctacggcaatttacaccttgggcttttaagagcatcacgatgcctgcttacatcaagcatcgacgtgcacgtcacatcgacttgagacttgcttctgagaaacccaagccctttcgtgacgggcgcccgatacttg

SEQ ID NO: 16829 - DNA, 482 bp, synthetic construct; identical to SEQ ID NO: 1988
  source 1..482: mol_type = other DNA

SEQ ID NO: 16830 - DNA, 287 bp, synthetic construct
  source 1..287: mol_type = other DNA
tactactacctaacttttaaggagataatcatggatacgaagtataatattactaatgttgtcaggaattctatttcgactctaatgtcgagattagatcctggctccaaaatttatattatattagtaaccattatgaatacgaagtataatattaagatttatattatattagtactctttcttatctctcttatacttggtagtagcattctagcagatattctgttagaacagcttttgcaagctgacggtgtagttcgccttttacctctcaaggaggtaat

SEQ ID NO: 16831 - DNA, 606 bp, synthetic construct; identical to SEQ ID NO: 2181
  source 1..606: mol_type = other DNA

SEQ ID NO: 16832 - DNA, 1000 bp, synthetic construct; identical to SEQ ID NO: 2656
  source 1..1000: mol_type = other DNA

SEQ ID NO: 16833 - DNA, 753 bp, synthetic construct
  source 1..753: mol_type = other DNA
ttatgtctactcccgacggcactgaatatcagcacccgtacaacgtctggaaagctgaaggttgtattatcggctccggtggcgctgccgtctacgcccgagtctatcgcgggccttcaatggatgtttactacgcttaccccgcttcaggcacttatcatagtgatgatccgcaccgcctcaaacgatccgaccaattcgaaaatcttcgccttagtagtggcaatatcgccagactctctttcaaatcagtcaagatccaaaccacctccggtgacatcattctcgattgccctcgtgatccgttcgaaagagcagtcgctaagtgtggcagcggtgttcgtgatctgaagttcctgcccaccttatcctcatatatcatatctaaactcaccatgcacgacttggaaattaataacgcacaagacatcctagagttagctaacatcatgtgtgaacgcttcgcgtttgacttctattcccactcccatcttgagtatgatcccactagcattaacatcttcaccaggcttcgtcgccatgccatgttatttgctcgtgctatccgccataccctagcacgtaacttaacatgctcgatcatcaatcgccccatccttcggcaatttacaccttgggcgtttaagagcattaccatgccagcatacattaagcaccgacgcgcacgtcacattgacttgaggcttgcttctgacaaacccaagccctttcgtgacgggcgcccgatacttg

SEQ ID NO: 16834 - DNA, 753 bp, synthetic construct
  source 1..753: mol_type = other DNA
tcatgtccacccctgacggcactgaatatcagcacccatacaacatttggaaagctgaaggttgtatcataggatccggtggtgctgccgtctatgcccgagtctatcgtgggccttcaatggatgtttactacgcctatcccgcttctggcacttatcatagtgatgatccacaccgcctaaaacgctcagaccaattcgagaatctccgccttagtagtggcaacattgctagactttccttcaaatctgtcaagattcaaaccacttccggtgacaccatcctcgattgccctcgcgatccctttgaaagagcagttgccaaatgcggtagcggtgttcgtgatctgaagttcttacccacgctatcttcatatatcatatccaaattgaccatgcacgatttagagattaacaacgcacaagacatcttagaattagcaaacatcatgtgtgagcgcttcgcttttgacttctactcccattcccatcttgagtatgatcccaccaacataaacatctttactaggtgccgtcgtcatgccatgctgctggcccgcgctatccgccacactctagcgcgcaatataacatgttcgatcataaatcgtccgatcttacggcagtttacaccttgggcatttaaaagcatcaccatgcctgcttacatcaagcaccgacgcgcacgtcacatcgacttaagacttgcgtctgacaagcctaagccctttcgtgacgggcgcccgatacttg

SEQ ID NO: 16835 - DNA, 753 bp, synthetic construct
  source 1..753: mol_type = other DNA
tcatgtccacccctgacggcactgaatatcagcacccatacaacatctggaaagccgaaggttgtatcataggatccggtggtgctgccgtctatgcccgagtctatcgtgggccctcaatggatgtttactacgcctatcccgcttctggcacttatcatagtgatgatccacaccgcctaaaacgctcagaccaattcgagaatctccgccttagtagtggcaacattgctagactttccttcaaatctgtcaagattcaaaccacttccggtgacactatcctagattgccctcgcgatccttttgaaagagctgttgccaaatgcggtagcggtgttcgtgatctgaagttcttacccacgctatcttcatacatcatatccaaattaaccatgcacgatttagagattaataacgcacaagacatcttagagttagcaaacatcatgtgtgagcgcttcgcttttgacttctactcccactcccatcttgagtatgatcccaccaacataaacatctttactaggtgtcgtcgtcatgccatgctgctggctcgcgctatccgccacactctagcgcgcaatataacatgttcgatcataaatcgtccgatcttacggcagtttacaccttgggcatttaaaagcattaccatgcctgcttacatcaagcaccgacgcgcacgtcacatcgacttaagacttgcgtctgacaagcctaagccctttcgtgacgggcgcccgatacttg

SEQ ID NO: 16836 - DNA, 1000 bp, synthetic construct; identical to SEQ ID NO: 276
  source 1..1000: mol_type = other DNA

SEQ ID NO: 16837 - DNA, 281 bp, synthetic construct
  source 1..281: mol_type = other DNA
tgacgcgtaatacaattacacatcatactgcggggggtcgtgccccccagttgtcgaaagacaggcgacctcgtcgtgtgctgagaagcacaccaacaagcgctgaccttcacgtactgttacctgaactggtttgggatccagttcaggtagcaaggttgagtgctaagggatgttggcgtaaagccaacgacgcactaattgattccttccaactcttggggtacaagttcgagaacattctctgtcccgttcctcctagctcttcagtccctgaactg

SEQ ID NO: 16838 - DNA, 585 bp, synthetic construct; identical to SEQ ID NO: 2154
  source 1..585: mol_type = other DNA

SEQ ID NO: 16839 - DNA, 404 bp, synthetic construct
  source 1..404: mol_type = other DNA
tttatgactaacattacagttaacagtaaaactttcaaagaagttgctgaatacccagatagaaccgaatattctaattcggctgttgcgaccacgtcgccagagtcaatttctattacacaaaagtggaataagaaacctaattctaaaagatcaactacactgacatgcaggaaagttgttccgtataaaaacgaaaatggcgttgatgttgtcgaagttattcaagcatcaatccgcttaactcacctaccaggtcgtttagctaacgacaagctggagactatacagaatctttttaaagatctattagctattgcatcaaactctgatgttcaagtgtcgctagttgccggtgagcataatttgactctttcaatttagtaaaacttaaaggatttata

SEQ ID NO: 16840 - DNA, 293 bp, synthetic construct
  source 1..293: mol_type = other DNA
ctccatgcaccacgaacgggccgcaagcgaccttacgtgattgtgcatgaagttgtcgatcccaccttggtggggttttgagcggctgacgccgctcggtcctatgtaccttaactctaggagactcacatgtcgaccatcgatcgtctggttttcaacgatttcttcgaagtttacgaagaagcaggttcaaaagacctgtacgtaggagtaaatttctccgaatacgtttgttcgccagatgagctacgggcgttgtatgagtttctgaagagtcggtatgaaccggagct

SEQ ID NO: 16841 - DNA, 856 bp, synthetic construct; identical to SEQ ID NO: 2490
  source 1..856: mol_type = other DNA

SEQ ID NO: 16842 - DNA, 753 bp, synthetic construct
  source 1..753: mol_type = other DNA
ttatgtccactcctgacggcactgaatatcagcatccatacaacatctggaaagccgagggttgtattgtaggctcaggtggtgccgccgtctacgcccgagtttaccgcgggccttcaatggacgtttactatgcctatcccgcttctggcacctatcatagtgatgatccacaccgcctcaaacgatcagaccaattcgaaaatcttcgccttagtagtggcaacattgccagactctcttacaattcagtcaagattcaaacaacttctggtgacaacattcttgattgtcctcgagatccatttgaaagagcagtcgcgaaatgtggtagcggtgtccgcgatctaaagttcttgcccacattatcatcatatattatatctaaattaactatgcacgatttagaaattaacaacgcacaagacatcttagaattagcaaacatcatgtgtgagcgctttgcgtttgacttctattcacactcccatcttgaatatgatcccactagtatcaacatctttactaggtgccgccgtcatgccatgttgctagctcgtgctatccgacatactttagcacgtaatttgacttgctcaatcattaatcgcccaatcctacggcaatttacaccttgggcttttaagagtatcacgatgcctgcttacatcaagcatcgacgtgcacgtcacatcgacttgagacttgcttctgagaaacccaagccctttcgtgacgggcgcccgatacttg

SEQ ID NO: 16843 - DNA, 606 bp, synthetic construct; identical to SEQ ID NO: 2182
  source 1..606: mol_type = other DNA

SEQ ID NO: 16844 - DNA, 319 bp, synthetic construct; identical to SEQ ID NO: 1545
  source 1..319: mol_type = other DNA

SEQ ID NO: 16845 - DNA, 500 bp, synthetic construct
  source 1..500: mol_type = other DNA
cgaccgcccaaatgagttttcattaaaagtttgtcacacatgtttgatgagacacaattcatccccttatagttgactatgcacttcagtcgtaattctatgagagtcttgcctgctagtgggttcacactagttccgttgtagagttcctgggatcttcggattaaaaccccatacccctcatatatcgaaatagcctagtcttagccaataaagaagctagatgtgctatcagatcactatgtgcggcactggaactttgcagacaatattagtctgttaaaatcgacttaccagagtcagagacgccatctttggcctctatgggtgatgtgccctgacatctccgtctagtcaacgtgagcactatcgcatcattttaccttacacataacttacctgttcttgggttgccctctttcacgggccgaatatcatgtattcgaagtcttgtgttcgccgggtcaccaaaaccggttaggatctaactccgagaagtt

SEQ ID NO: 16846 - DNA, 512 bp, synthetic construct; identical to SEQ ID NO: 2055
  source 1..512: mol_type = other DNA

SEQ ID NO: 16847 - DNA, 371 bp, synthetic construct; identical to SEQ ID NO: 1706
  source 1..371: mol_type = other DNA

SEQ ID NO: 16848 - DNA, 265 bp, synthetic construct
  source 1..265: mol_type = other DNA
tacgcgctggagcccaaccctcccctccattggagggcggttgggtcccagggtgaacttaccgacgaatttggtttcgtcggcatatagtgagaagctttctcacttttatcttgaacgcgattcttgcgcgaatatcttcgtgcgacgcgtcaactcttccttcctgcgtaaagcaggaagggtagaccttataggttcatacctaaaagatctaccgtacgatgtgctttacgcatatcttttaaagggcctgtatccacgg

SEQ ID NO: 16849 - DNA, 705 bp, synthetic construct; identical to SEQ ID NO: 2313
  source 1..705: mol_type = other DNA

SEQ ID NO: 16850 - DNA, 404 bp, synthetic construct; identical to SEQ ID NO: 1793
  source 1..404: mol_type = other DNA

SEQ ID NO: 16851 - DNA, 366 bp, synthetic construct; identical to SEQ ID NO: 1691
  source 1..366: mol_type = other DNA

SEQ ID NO: 16852 - DNA, 499 bp, synthetic construct; identical to SEQ ID NO: 2024
  source 1..499: mol_type = other DNA

SEQ ID NO: 16853 - DNA, 419 bp, synthetic construct; identical to SEQ ID NO: 1830
  source 1..419: mol_type = other DNA

SEQ ID NO: 16854 - DNA, 325 bp, synthetic construct; identical to SEQ ID NO: 1568
  source 1..325: mol_type = other DNA

SEQ ID NO: 16855 - DNA, 405 bp, synthetic construct; identical to SEQ ID NO: 1795
  source 1..405: mol_type = other DNA

SEQ ID NO: 16856 - DNA, 600 bp, synthetic construct; identical to SEQ ID NO: 196
  source 1..600: mol_type = other DNA

SEQ ID NO: 16857 - DNA, 394 bp, synthetic construct; identical to SEQ ID NO: 1765
  source 1..394: mol_type = other DNA

SEQ ID NO: 16858 - DNA, 861 bp, synthetic construct; identical to SEQ ID NO: 2495
  source 1..861: mol_type = other DNA

SEQ ID NO: 16859 - DNA, 405 bp, synthetic construct
  source 1..405: mol_type = other DNA
tatgacaaataaagccatacttctccaggcgactggatcgaatcgcgtgtacgcacaccccgaagacattacacggactgttaaccaaaaattgcagttaaaagaacgtgtcgtcgacggaaaacgagtgccacatgtgagaacagaggtgatcctcggtaggcaagcaccaatcgcagtgtgtgaaaacacctgcgcgggctttgaaaatcttagtgtgcgtttaagtctaagtggcagcttatctaatgctgccaaactggacgaaatgctggatgaacttaaatccatcattgaccgtgccaaagaagacaaagtcagcaagggcttcccgttaactgaaattaatttcaatgattaaggaaggttaatgtgagtaaacaatctcgtgcgcaagcaccgaaa

SEQ ID NO: 16860 - DNA, 511 bp, synthetic construct
  source 1..511: mol_type = other DNA
ggtgtgacaaatcaaccctgaaatagggttgacgactcgacacgacaacagtttcttctaagttgtcatgatttagtaagtctaaaactgttccacaccgaatttcaaagaaattttgaaaaacgatacggaaagttcttgaattggacaaggcttttcctgtcataaggcaagattgtgcttgtgtgcgctctgaccgaaccggtgggcaaggactggagcataggaaggaccatttagtatgggcttagtcgggcacaagtgaaccgtggggtccaaaagactgcttaccggcttgtgcttagggcttagtcctgaaatttgcgtagtaccccagcttctgttcttacctacttaaagggaaatagacgtggacactagactacatggaaagacatgttgacacagaatgaatagtattctacaaccaacaaaactcaacatttatgaagacaccagacaaacctgaacaagtaattatccgacacccatttagtaattttagtgaaag

SEQ ID NO: 16861 - DNA, 291 bp, synthetic construct
  source 1..291: mol_type = other DNA
aagtgtctggtccttggattccctgcttaggcacatgatcagaacgggaactcagccgtaaaagttgcagtcgggtggcaaggcctcgtacataaccttccccacagagctcatcgatacctgtggttaaacatagtcgatgggtgcctcgtgcaccgtagtggacatctacagcttgtccagtccgtggaaccggacttgaatcagttctacgggtccaactagtccatacacccgtttccgtagtggtctagggctggcatcctctgccgtttccaaatgcactaaaca

SEQ ID NO: 16862 - DNA, 251 bp, synthetic construct
  source 1..251: mol_type = other DNA
ttcgggtttacccgcgtaagcggccacactgactggttgtcggtgttgaatttgtataccagatgaggagacgttaccaccgtctcggcagtgctacgtctgggaaaggactgtgatagtggacagtcctaccgtctttagatacattgcgttgtgtatagcccgggagggattaactaatagcaacgcaatgcacacggcggttcggatttgcttgactgatggaaagacatctaagttctaattgaacc

SEQ ID NO: 16863 - DNA, 293 bp, synthetic construct
  source 1..293: mol_type = other DNA
atgactcgcctgtgttagatccaacttcttcacctggtaatccgtggcaatctttgggctctactaatggttgtgtttttggctacgagccgtgtttgggatatttgggccttgaggtccataacctttacgcggctgtggtcaagcgcttccaggagcttgaagagggtcgaaaggcagacgacatttttccctttatcaaacaggagccccacaaacgagctaaggccgaatccgatcgatggcgtatcatttccggcgttggttgtaccgatcagcttgtggccgaactt

SEQ ID NO: 16864 - DNA, 305 bp, synthetic construct; identical to SEQ ID NO: 1498
  source 1..305: mol_type = other DNA

SEQ ID NO: 16865 - DNA, 708 bp, synthetic construct; identical to SEQ ID NO: 2320
  source 1..708: mol_type = other DNA

SEQ ID NO: 16866 - DNA, 403 bp, synthetic construct
  source 1..403: mol_type = other DNA
ttaaccctcctaggagaaatccttatgccacaagcaattgagctttatagcaatgcaaccgaagccgcttttgtacacccagaagacgtcctcactcgtgcgcgtttcacacgcaaattgagcgagaagactgtcaatgggcttaaaactgcgaatcttcgatccgagattatcttaaaccaaacggtcggcctgcgcgtatgcgagcagacctgtgcaggtgacgaggtactttccgcccgtgcttcaatatctggttcaatcaagaaccatgagaaggtcgacgcgttagtcgacaatttgattgcagcgttacaacagtggaaaacggataagggtagccgaggcttccctgttaccgacttcacgtttaacgattaacaattaaatcaacggagggtcc

SEQ ID NO: 16867 - DNA, 708 bp, synthetic construct; identical to SEQ ID NO: 2321
  source 1..708: mol_type = other DNA

SEQ ID NO: 16868 - DNA, 1000 bp, synthetic construct; identical to SEQ ID NO: 2657
  source 1..1000: mol_type = other DNA

SEQ ID NO: 16869 - DNA, 289 bp, synthetic construct
  source 1..289: mol_type = other DNA
cgtacacgtgttcactgtgacgctgatctctgaggatgatcgcccagtggctgctagagcacctgagcatactcgacggccgcgtcgtcgtgggccatccaactggcctccaagacgcggtgacgcgatgtgcgatggtagcaggagtcggcttcgctggctactgtgtgactcgggcagtgatgcgtaacatgcgcccaagcgcgtacgacgctcaacgtgtaccgtcagtcctgttggcgtgccagcgcgcgctgacggactacacccgaaaggacctgcgtgtgac

SEQ ID NO: 16870 - DNA, 372 bp, synthetic construct; identical to SEQ ID NO: 1711
  source 1..372: mol_type = other DNA

SEQ ID NO: 16871 - DNA, 514 bp, synthetic construct; identical to SEQ ID NO: 2061
  source 1..514: mol_type = other DNA

SEQ ID NO: 16872 - DNA, 422 bp, synthetic construct; identical to SEQ ID NO: 1837
  source 1..422: mol_type = other DNA

SEQ ID NO: 16873 - DNA, 274 bp, synthetic construct
  source 1..274: mol_type = other DNA
cgagcagcgagtcggacgcgatgagttcgatgagctcgaagcacgcatccaaggcctgaatcaggccgacggtgcggaggctgatcaaccaggcctcgaggcgaatcggttggagagggagcgcatccgtgaggaagccatcctcgaaatcgagagagttaggctacaaatagccgacgccgagagggctgcagcagcagcccgggaaggtgcgaggacgcctttctggttcaaggctttatgcttttgtaccggatttggattcttcgttctg

SEQ ID NO: 16874 - DNA, 1000 bp, synthetic construct; identical to SEQ ID NO: 2658
  source 1..1000: mol_type = other DNA

SEQ ID NO: 16875 - DNA, 513 bp, synthetic construct; identical to SEQ ID NO: 2059
  source 1..513: mol_type = other DNA

SEQ ID NO: 16876 - DNA, 650 bp, synthetic construct; identical to SEQ ID NO: 2244
  source 1..650: mol_type = other DNA

SEQ ID NO: 16877 - DNA, 629 bp, synthetic construct
  source 1..629: mol_type = other DNA
actgacctggttatcactaaccagtaccgtgtacaagtgactccacatgtggagactcctgtcttcacccgttaagtggccttcaactacacgtttcgacttgttctacgaacgagtcagacctgtagttggggttgccatcctgaagtagcattcttccttgtctcgacctgttcttgaacagaatcagactgggaagacattgctcccaggtggcttccccccgtttgctggagttctcattagactccagcagacggataagcccacctaatagtggtcattcaccattgcattgtgcgtaagtgaatggttgtcagaagtgacgtgatcgtgtcctctctcgaaattgttcttgttcaagagagagctcatgctgtgactttacaaccaccggtgtcctatttaggacaggtaccggggggtgcagcccaccccaaaaccttaacaggataggactagtgcgattgggtaaccgcattatcctttaccaacggtaagggagtccgaaaatacaactacctgctaacacgaaaacaaccccaggtataagggtcgttcccgtgtcgaggcgccgtactacttgtcctagcgaccgcaaggtcaatggaaagtcggacttgaaggct

SEQ ID NO: 16878 - DNA, 602 bp, synthetic construct; identical to SEQ ID NO: 2170
  source 1..602: mol_type = other DNA

SEQ ID NO: 16879 - DNA, 265 bp, synthetic construct
  source 1..265: mol_type = other DNA
cgggactagatggttgctaggaccccgggtggtggtggtcggcgacctcgcggggtcgtcgacgttttcatttgtcttcatccatgccccttctgttttccttctgttcgagttattgatttttacagtcagcaactgtaccttgctggctcgcctctcccatgggcgagcaatacaagtgcatgggacgtgagagaaccgtgctagatacctcacgtacacccaaagtcggtacggggatcgtaaccattacgctttttcctta

SEQ ID NO: 16880 - DNA, 367 bp, synthetic construct; identical to SEQ ID NO: 1694
  source 1..367: mol_type = other DNA

SEQ ID NO: 16881 - DNA, 275 bp, synthetic construct
  source 1..275: mol_type = other DNA
gttagcgatagcgttgagcattgctcgtctttgtaaatcgttactccgcctgatagccaagtctttgggtctcgcgtgtttagtagggctcgcaaataagctcgcccaaggtttgcgaagattgattgagtataggcagtcccgtccttatctcaagtcacgcgtttccgctttaacattgttcacccgttggttgactgacgtaaccaaagaaaccgtcgcatacaactggtaccctcttgacaaagtcccggactccttcaggaagtctgata

SEQ ID NO: 16882 - DNA, 415 bp, synthetic construct; identical to SEQ ID NO: 1818
  source 1..415: mol_type = other DNA

SEQ ID NO: 16883 - DNA, 446 bp, synthetic construct; identical to SEQ ID NO: 1910
  source 1..446: mol_type = other DNA

SEQ ID NO: 16884 - DNA, 321 bp, synthetic construct; identical to SEQ ID NO: 1555
  source 1..321: mol_type = other DNA

SEQ ID NO: 16885 - DNA, 307 bp, synthetic construct; identical to SEQ ID NO: 1505
  source 1..307: mol_type = other DNA

SEQ ID NO: 16886 - DNA, 605 bp, synthetic construct; identical to SEQ ID NO: 2176
  source 1..605: mol_type = other DNA

SEQ ID NO: 16887 - DNA, 330 bp, synthetic construct; identical to SEQ ID NO: 1581
  source 1..330: mol_type = other DNA

SEQ ID NO: 16888 - DNA, 254 bp, synthetic construct
  source 1..254: mol_type = other DNA
tgctcttccgatctgttcaggaacaagttattacaaaagcatttgacacattatcgaatattcgctttagtagcatagattcgaaaaaagtatacatactaagcatacccagaatacacataccaacaccgctaccacaaggtttcgttactataaaccaggtaccggcaagtgactttcctttattatatgatatcaaaatacttaaaaaaggcagtgaagaggatattacgttacgtcctacaatactgttt

SEQ ID NO: 16889 - DNA, 1000 bp, synthetic construct; identical to SEQ ID NO: 2659
  source 1..1000: mol_type = other DNA

SEQ ID NO: 16890 - DNA, 254 bp, synthetic construct
  source 1..254: mol_type = other DNA
ggagtctggatgctctgaatcctgatgttgcttctaggtggggtgaaatcgttgacgtcttggggagaaatcccgctgaacagtatgtggcgccgccagacactgacgcagctttattagactctttgtgttggcatgggaggaagtattgtgaagtccgagacaacacacaggaaccaggacttagcgagttcaagacagtagtcagtagaacttgccaggatctgggaatcctgtatagcgttccagacaac

SEQ ID NO: 16891 - DNA, 679 bp, synthetic construct; identical to SEQ ID NO: 208
  source 1..679: mol_type = other DNA

SEQ ID NO: 16892 - DNA, 698 bp, synthetic construct; identical to SEQ ID NO: 2306
  source 1..698: mol_type = other DNA

SEQ ID NO: 16893 - DNA, 335 bp, synthetic construct; identical to SEQ ID NO: 1606
  source 1..335: mol_type = other DNA

SEQ ID NO: 16894 - DNA, 556 bp, synthetic construct; identical to SEQ ID NO: 2120
  source 1..556: mol_type = other DNA

SEQ ID NO: 16895 - DNA, 607 bp, synthetic construct; identical to SEQ ID NO: 2186
  source 1..607: mol_type = other DNA

SEQ ID NO: 16896 - DNA, 1000 bp, synthetic construct; identical to SEQ ID NO: 2660
  source 1..1000: mol_type = other DNA

SEQ ID NO: 16897 - DNA, 365 bp, synthetic construct; identical to SEQ ID NO: 1687
  source 1..365: mol_type = other DNA

SEQ ID NO: 16898 - DNA, 746 bp, synthetic construct; identical to SEQ ID NO: 2369
  source 1..746: mol_type = other DNA

SEQ ID NO: 16899 - DNA, 639 bp, synthetic construct; identical to SEQ ID NO: 2227
  source 1..639: mol_type = other DNA

SEQ ID NO: 16900 - DNA, 347 bp, synthetic construct; identical to SEQ ID NO: 1639
  source 1..347: mol_type = other DNA

SEQ ID NO: 16901 - DNA, 398 bp, synthetic construct; identical to SEQ ID NO: 1773
  source 1..398: mol_type = other DNA

SEQ ID NO: 16902 - DNA, 1000 bp, synthetic construct; identical to SEQ ID NO: 277
  source 1..1000: mol_type = other DNA

SEQ ID NO: 16903 - DNA, 370 bp, synthetic construct; identical to SEQ ID NO: 1703
  source 1..370: mol_type = other DNA

SEQ ID NO: 16904 - DNA, 1000 bp, synthetic construct; identical to SEQ ID NO: 2661
  source 1..1000: mol_type = other DNA

SEQ ID NO: 16905 - DNA, 652 bp, synthetic construct; identical to SEQ ID NO: 2246
  source 1..652: mol_type = other DNA

SEQ ID NO: 16906 - DNA, 514 bp, synthetic construct
  source 1..514: mol_type = other DNA
actggaatgacgaggttagctactcccgagaatccatgtcttatccagaccatggtccggtagagcggcctgctgatgtgatacgtcagcaagagtccgctcccgtgtccacgtcacccgtagcacaagcagccccagcagtgtccgcgcccgcagcgcccgcttcgcccgttacctcctctcagcaggagggaaacgcgagcagggcctctgcaggtgcggaggcccgtggcaacgccagtccacaaggaagtgtactgagcggaaacgcttcagtaaaccccgcatcagcaactccttcgggaccgcaggcgacagctaccagtggccagacatcgacgcctgctccgcgaagcgtagcttccgtctccacgtcgaccgatttttcgcggcgcaagcaagccgcaaagctggtccgattggagcccggagcatcgaccgcgttgagaagagatgccgtagctggaagtgctcagtaacccgttttaaagattttgaagaaaactttgaaatc

SEQ ID NO: 16907 - DNA, 538 bp, synthetic construct; identical to SEQ ID NO: 2099
  source 1..538: mol_type = other DNA

SEQ ID NO: 16908 - DNA, 1000 bp, synthetic construct; identical to SEQ ID NO: 278
  source 1..1000: mol_type = other DNA

SEQ ID NO: 16909 - DNA, 1000 bp, synthetic construct
  source 1..1000: mol_type = other DNA
agatgaccaggtattgatggtcgagacaaaccaactcgacaacctggtcaaggagcttagtcccacattcgcgcgatttggttttcgcgtgaaagtagaggatcctgtctgggaattcgagagaatagatttttgccaaaccagaccgatcttcctatcaccaagtgagcctataatgtgccgatacccaatgcaatctatgtccaaagacgttgcgtccttcctcaatatagaaagatcagagggatggaaatacatgctcagagctataggagcatgtgggtcttctagtttctctcaagttccagtgcttggcgagttttatagtgcgctcagctccacatcaaacaaagatgaaaccagatggtggaggcgcacgggagttgatttggggtttaaacagcttaccaacaatgtaggcacgatcccctacgacgaggtcacggcacgaagctccttctataaggccttcggaatcctcccggacacccaagctgcactcgaaagcaatatacgcaactggaaaatgagctccgtaccacacatcgagcaagtccacaagttctcgagtgagttccccgtggttgacggatgggcctaacttagggaattcagttaggttaagttagtcggcctctcctcttgctggctgggtgaggggggaggccaacgcagactggttggataggtttgggaacatagatccgaactccaaccaacgggtaggtcgcacccgcgtagtcgagaatgattaccataattggtaggtgaggtcacgccgtatggccaagtcacccgagctttcggtagggggtctagttgttgagtgctactatggcataaccagatagacaccccacatttggagaagcggcttgcccacgctccaacattccatggatagattgaacgacgaaatgtcattgtcttgccgtcagaggcgttcccctctccaaggctagcccgagctgcgccatgcttgggatctatggaatagttg

SEQ ID NO: 16910 - DNA, 1000 bp, synthetic construct
  source 1..1000: mol_type = other DNA
atacacattgaagtagccaatgatggagatgatcaggtgctgatggtcgagacaaaccaactcgacaacctgatcaaggagcttagccccacatttgcacgatttggttttcgtgtaaaagttgaagatccagtctgggaattcgaaagaatagatttttgccaaaccagaccgatcttcctgtcgcccggcgaacctttaatgtgccggtacccaatgcaatctatgtcaaaagacgttgcatccttcctcaatatagaaagatcagagggatggaaatacatgctcagagctataggagcatgtgggtcttctagtttctctcaagttccagtacttgggaagttttatagtgcgctcagttccacatcaaataaagatgaatcaagatggtggaaacgcacgggagttgatttgggatttcagcagctcacaagtggtgtgggcgatattccctacgacgaggtcacggcacgaagctccttctataaggccttcggaatcctcccagacacccaagtagcactcgaaagcaaaatagaaaactggaatatgagctccgtaccaccaattgagcaagtccacaaattctcgagtgagtttcccgtggttgacggatgggcctaacatagggttaaagttaggtgttagtagttagggccccttcctcgctggctgggtgagaaaggggccaccgcagactggttggataggtttgggaacatagatccgaactccaaccaacgggtaggtcgaacccgcggagtcgagaatgattaccataattggtaggtgaggtcacgccgtttggtcaagtcacccgagctttcggtagggactctagttgttgagtgttattatggcatgacccgctagacgacccacacttggagaagcggcttgcccacgctccaacattccatagatagattgaacgacgaaatgtcattgtcttgccgtcagaggcgttcccctctccaaggctgacccgagctgcgcc

SEQ ID NO: 16911 - DNA, 1000 bp, synthetic construct
  source 1..1000: mol_type = other DNA
gggagatagtgatacctccctaggaaacgtgagtatcatgctagcgatcacgcgggtgatttgtgaggagctaaaaggcatacacattgaagtagccaatgatggagatgatcaggtgctgatggtcgagacaaaccaactcgacaacctgatcaaggagcttagccccacatttgcacgatttggttttcgtgtaaaagttgaagatccagtctgggaattcgaaagaatagatttttgccaaaccagaccgatcttcctgtcgcccggcgaacctttaatgtgccggtacccaatgcaatctatgtcaaaagacgttgcatccttcctcaatatagaaagatcagagggatggaaatacatgctcagagctataggagcatgtgggtcttctagtttctctcaagttccagtacttgggaagttttatagtgcgctcagttccacatcgaataaggatgaatcaagatggtggaaacgcacgggagttgatttgggatttcagcagctcacaagtggtgtgggcgatattccctacgacgaggtcacggcacgaagctccttctataaggccttcggaatcctcccagacacccaagtagcactcgaaagcaaaatagaaaactggaatatgagctccgtaccaccaattgagcaagtccacaaattctcgagtgagtttcccgtggttgacggatgggcctaacatagggttaaagttaggtgttagtagttagggccccttcctcgctggctgggtgagaaaggggccaccgcagactggttggataggtttgggaacatagatccaaactccaaccaacgggtaggtcgaacccgcggagtcgagaatgattaccataattggtaggtgaggccacgccgtttggtcaagtcacccgagctttcggtagggactctagttgttgagtgttattatggcatgaccaactagacgacccacatttggagaagcggcttgcccacgctccaacattcc

SEQ ID NO: 16912 - DNA, 572 bp, synthetic construct; identical to SEQ ID NO: 191
  source 1..572: mol_type = other DNA

SEQ ID NO: 16913 - DNA, 583 bp, synthetic construct; identical to SEQ ID NO: 193
  source 1..583: mol_type = other DNA

SEQ ID NO: 16914 - DNA, 336 bp, synthetic construct; identical to SEQ ID NO: 1611
  source 1..336: mol_type = other DNA

SEQ ID NO: 16915 - DNA, 439 bp, synthetic construct; identical to SEQ ID NO: 1889
  source 1..439: mol_type = other DNA

SEQ ID NO: 16916 - DNA, 970 bp, synthetic construct; identical to SEQ ID NO: 2558
  source 1..970: mol_type = other DNA

SEQ ID NO: 16917 - DNA, 332 bp, synthetic construct; identical to SEQ ID NO: 1590
  source 1..332: mol_type = other DNA

SEQ ID NO: 16918 - DNA, 394 bp, synthetic construct
  source 1..394: mol_type = other DNA
caatgtcacaatacaaaacgcgtactcgcggagaagccaaaactgtgcttgttaatccgtcaagctataaatcaacgcttgaggttatccacagtttcaaacgagacacagcccttaatcaggaccaagtccgaatcggtgttgcttcggcatatactgatgtagttaaaacctgcaaggactcctgtggcgtgccacgtcgcgagctggttaagcttgaaatgcctgttttattaggcatggacgaagcttattacaccagaaagaaacaacagctgactgacgttttagcgtcgggtcagaaacttctcgaagcattcgatgatgtgcagattggaatcattcctgatctgaacgtcgaagctactgtcgcttaacaataaggaatataatt

SEQ ID NO: 16919 - DNA, 458 bp, synthetic construct; identical to SEQ ID NO: 1937
  source 1..458: mol_type = other DNA

SEQ ID NO: 16920 - DNA, 254 bp, synthetic construct
  source 1..254: mol_type = other DNA
ggcgcctttaaagctggtggtgaggtagctggttgtacagccactatctcaggtgaacctataggtccattttgtgtatccggtctaaccaaccggcgtatattgcttacagagcccttggtcgggctctgtttgcgtatatgtatactttacacatccaccttcagggggtcagatatgaccccctgggtaccgcttgtactttaagcgtatccaaacctgaatacactcaattaacctaacaggagaaaccc

SEQ ID NO: 16921 - DNA, 425 bp, synthetic construct; identical to SEQ ID NO: 1848
  source 1..425: mol_type = other DNA

SEQ ID NO: 16922 - DNA, 321 bp, synthetic construct; identical to SEQ ID NO: 149
  source 1..321: mol_type = other DNA

SEQ ID NO: 16923 - DNA, 520 bp, synthetic construct; identical to SEQ ID NO: 2070
  source 1..520: mol_type = other DNA

SEQ ID NO: 16924 - DNA, 573 bp, synthetic construct; identical to SEQ ID NO: 2140
  source 1..573: mol_type = other DNA

SEQ ID NO: 16925 - DNA, 297 bp, synthetic construct
  source 1..297: mol_type = other DNA
cgctttcgttgcgtattagtatataagtatatgtgagtctgtacataatactatatctatagtgtcctgtgtgggttgatacagtagacaactgtgacgcgatgtcgtgttgagaagggaacacatctggttcttgtaagccacatcattagttttgaggttcaattcctcttgctccctgttgtgcccccttactttttcatggatgcttctccacgaaattgcgtttcgtctactggatcttagagagtctgtgttgtgtttttctctttgtgtcgtagatatttgagtcgagtc

SEQ ID NO: 16926 - DNA, 368 bp, synthetic construct; identical to SEQ ID NO: 1696
  source 1..368: mol_type = other DNA

SEQ ID NO: 16927 - DNA, 309 bp, synthetic construct; identical to SEQ ID NO: 1513
  source 1..309: mol_type = other DNA

SEQ ID NO: 16928 - DNA, 420 bp, synthetic construct; identical to SEQ ID NO: 1832
  source 1..420: mol_type = other DNA

SEQ ID NO: 16929 - DNA, 361 bp, synthetic construct; identical to SEQ ID NO: 1678
  source 1..361: mol_type = other DNA

SEQ ID NO: 16930 - DNA, 253 bp, synthetic construct
  source 1..253: mol_type = other DNA
cttctttctcgatgttctgatccactccttccgcaaggtcaagcggaggggggccgggtcctcggacccggtggcggccctcagttgcgatggacgcaaccaggtggtcttcgatgactctaagttgaaagcagccggcattcgagatagctcgattcctgactgccttcggactgtcaacgatgaccccgccaacaagttcttgacgtctgatgatgctacccgacggcttcgccgttatattgcagcatca

SEQ ID NO: 16931 - DNA, 379 bp, synthetic construct; identical to SEQ ID NO: 159
  source 1..379: mol_type = other DNA

SEQ ID NO: 16932 - DNA, 465 bp, synthetic construct
  source 1..465: mol_type = other DNA
ggccgccgtacatcccgacccccccgggggggggaatcgggctcgacagtacggtgcctggtggtccggcgctagcaccgccgtccagacctgccccggcaggtcccccaatgcccagcgacctctctccctagtcggggcctccactcggtgcccccgttgccgaagaccggccggcctacccgtgagggtaaagtcggaactggtcgccggtatcgggcggcagcgaggaaagcggccaacgaggtgaggaggttgctggttggggcgactgggtccgtcgggcccaccgtctcccaccctccagcagacgtccgcggtcggtctctgcccgagttgcccggcgcttgcctccggtcggcaggtgggcgggtcgcggcccccagggaattgaccctgggtgcctggtgcgacccgtctgtcctgcgctctcccgaagcggctgttaaggccccagtggggcat

SEQ ID NO: 16933 - DNA, 380 bp, synthetic construct; identical to SEQ ID NO: 1731
  source 1..380: mol_type = other DNA

SEQ ID NO: 16934 - DNA, 567 bp, synthetic construct; identical to SEQ ID NO: 2135
  source 1..567: mol_type = other DNA

SEQ ID NO: 16935 - DNA, 349 bp, synthetic construct; identical to SEQ ID NO: 332
  source 1..349: mol_type = other DNA

SEQ ID NO: 16936 - DNA, 498 bp, synthetic construct
  source 1..498: mol_type = other DNA
gacgcgcatcccgggtgaaagccccgggcgtacgacctggttcgggacttgtcccgtgtccagtgcggaggccccgcaaaccgagccgccctgtaggcagcttttagaatgcggagttaactcctggcactggcccgaagcatgaactgatcgcggtggcagggttcttcgggtaaatcccggccgcgtgttgtgattgtgttagggcaggtgacagtcggcggggtcggccccccgcttcaggaccactgactccgtggacgaccgctgctgaaaaagggccgccacggtctgtagctcgccgacgcttccaattcaggccggaggaccacgctccgtaatcgagcccaagtactcaaaccccagcacccctgggtcacgccctacgccgccctttttacgcttcggctaatagggtctatccggcgggttgacaaagggcgcagggttacctggtactacgagcttgggtgtccctgggagtgatctcagggtgcc

SEQ ID NO: 16937 - DNA, 614 bp, synthetic construct
  source 1..614: mol_type = other DNA
gataccgtgtcccggtacgacctgcgcgtccccaagctcgccctgaggggggagcgtaagggcgcgtagtggggtagccccccaaaccgagccaccctagtgagtgactttagaatggttagggagactaccgccttcgctgtttgggacctaatgatccgcgtgccagggttcttcgggtaaatcccggcgcggtgttttgggttcagggcagtaggggcagacgggccagcagtcgctggttcctggtaccaccaccctatccggacgacctccctcacgaaaggtcgccacggtctgtggctcgacgacgcctataattcagtccgaggggcgcagccctcgttaaacttaggcaaggttcctcgccattgatttggccaggggtttaagtgaacgccgcccttttaatgtttaatagggttctttcccggcgggttgacaaacacttccctgggctcttcgttggcctcggttccttgatgcttcggcacccatgagcgcacaggggggggaccctgcgacagtccgccaagaggaaaatccttcgggtgacctcgtgcgcaacccaatcccttcttcttccacatggcgtgtctgtggtgcatgctgtg

SEQ ID NO: 16938 - DNA, 590 bp, synthetic construct
  source 1..590: mol_type = other DNA
cgcgtccccaagcccgccctgaggggggggcgtaagggcgcgtagtggggtagccccccaaaccgagccaccctagtgagtgactttagaatggttagggagactaccgccttcgctgtttgggacctactgatccgcgtgccagggttcttcgggtaaatcccggcgcggtgttgtgggttcagggcagtaggggcagacgggccagcagtagctggttcctggtaccaccaccctatccggacgacctccctcacgaaaggtcgccacggtctgtggctcgacgacgcctacaattcagtccgaggggcgcagccctcgttaaacttaggcatggttcctcgcctttgatctggccaggggtttaagtgaacgccgcccttttaatgtttaatagggttctttcccggcgggttgacaaacacttccctgggcttttcctcggctccggttctatgttgcttcggcacccatgagcgcacaggggggggaccctgcgacagtccgccaagaggaaaatccttcgggtgacctcgtgcgcaacccaatccctttctcttccacatggcgtgtctgtggtgcatgctgtg

SEQ ID NO: 16939 - DNA, 285 bp, synthetic construct
  source 1..285: mol_type = other DNA
cgctaggtacgccaaaggcgtaggcccccggcgggttaaccgacgtgggacaatgcgctggaggattttacagccgacagagctgcgaaacctgtagtaaggccggagtaccggcctcccagcccgcgtcagcctaaacctggctgtgatacgcggtgtatggaggacatgtccaactatgggtgccttggggtggttcccctcggcgtggtgtgacgaccatagcagtactgcctgatagggtcccggcggatgggtcggctgtgtacatccgttgtccctccc

SEQ ID NO: 16940 - DNA, 617 bp, synthetic construct; identical to SEQ ID NO: 706
  source 1..617: mol_type = other DNA

SEQ ID NO: 16941 - DNA, 259 bp, synthetic construct
  source 1..259: mol_type = other DNA
gcaaggtaggacgtggtaaatgctcctaagggaacatgggctcggtagagcgagtaagacccacgaagcccggggaactgggctcccagcccgcgtcagcgtaaacctcgctgtcatacgcggtgcatggagggcatgtcccacgtgacgtgtctgcgtgggggggggttcccccacgcgcgggcgtggttgcccgtgctcgtactgcctgatagggtgccggcggacgcaccgagctcattagtccgtaggcagaggc

SEQ ID NO: 16942 - DNA, 323 bp, synthetic construct; identical to SEQ ID NO: 308
  source 1..323: mol_type = other DNA

SEQ ID NO: 16943 - DNA, 590 bp, synthetic construct
  source 1..590: mol_type = other DNA
cgcgtccccaagcccgccctgaggggggggcgtaagggcgcgtagtggggtagccccccaaaccgagccaccctagtgagtgactttagaatggttagggagactaccgccttcgctgtttgggacctactgatccgcgtgccagggttcttcgggtaaatcccggcgcggtgttgtgggttcagggcagtaggggcagacgggccagcagtagctggtccctggtaccaccaccctatccggacgacctccctcacgaaaggtcgccacggtctgtggctcgacgacgcctacaattcagtccgaggggcgcagccctcgttaaacttaggcatggttcctcgcctttgatctggccaggggtttaagtgaacgccgcccttttaatgtttaatagggttctttcccggcgggttgacaaacacttccctgggcttttcctcggctccggttctatgttgcttcggcacccatgagcgcacaggggggggaccctgcgacagtccgccaagaggaaaatccttcgggtgacctcgtgcgcaacccaatccctttctcttccacatggcgtgtctgtggtgcatgctgtg

SEQ ID NO: 16944 - DNA, 590 bp, synthetic construct
  source 1..590: mol_type = other DNA
cgcgtccccaagctcgccctgaggggggagcgtaagggcgcgtagtggggtagccccccaaaccgagccaccctagtgagtgactttagaatggttagggagactaccgccttcgctgtttgggacctaatgatccgcgtgccagggttcttcgggtaaatcccggcgcggtgttttgggttcagggcagtaggggcagacgggccagcagtcgctggttcctggtaccaccaccctatccggacgacctccctcacgaaaggtcgccacggtctgtggctcgacgacgcctataattcagtccgaggggcgcagccctcgttaaacttaggcaaggttcctcgccattgatttggccaggggtttaagtgaacgccgcccttttaatgtttaatagggttctttcccggcgggttgacaaacacttccctgggctcttcgttggcctcggttccttgatgcttcggcacccatgagcgcacaggggggggaccctgcgacagtccgccaagaggaaaatccttcgggtgacctcgtgcgcaacccaatcccttcttcttccacatggcgtgtctgtggtgcatgctgtg

SEQ ID NO: 16945 - DNA, 327 bp, synthetic construct
  source 1..327: mol_type = other DNA
aactgttgttgtagcaatgcgcatattgctacttcggtacgcctaattggtaggcgcccggccgaccggccccgcaagggcctagtaggacgtgtgacaatgccatgagggatcatgacactggggtgagcggaggcagcaccgaagtcgggtgaactcgactcccagtgcgaccacctggcttggtcgttcatggagggcatgcccacgggaacgctgatcgtgcaaagggatgggtccctgcactggtgccatgcgcggcaccactccgtacagcctgatagggtggcggcgggcccccccagtgtgacgtccgtggagcgcaac

SEQ ID NO: 16946 - DNA, 316 bp, synthetic construct
  source 1..316: mol_type = other DNA
tagcaatgcgcatattgctacttcggtacgcctgattggtaggcgcccggccgaccggccccgcaagggcctagtaggacgtgtgacaatgccatgagggatcatgacactggggtgagcggaggcagcaccgaagtcgggtgaactcgactcccagtgcgaccacctggcttggtcgttcatggagggcatgcccacgggaacgctgatcgtgcaaagggatgggtccctgcactggtgccatgcgcggcaccactccgtacagcctgatagggtggcggcgggcccccccagtgtgacgtccgtggagcgcaac

SEQ ID NO: 16947 - DNA, 312 bp, synthetic construct
  source 1..312: mol_type = other DNA
aatgcgcatattgctacttcggtacgcctaattggtaggcgcccggccgaccggccccgcaagggcctagtaggacgtgtgacaatgccatgagggatcatgacactggggtgagcggaggcagcaccgaagtcgggtgaactcgactcccagtgcgaccacctggcttggtcgttcatggagggcatgcccacgggaacgctgatcgtgcaaagggatgggtccctgcactggtgccatgcgcggcaccactccgtacagcctgatagggtggcggcgggcccccccagtgtgacgtccgtggagcgcaac

SEQ ID NO: 16948 - DNA, 327 bp, synthetic construct
  source 1..327: mol_type = other DNA
aactgttgttgtagcaatgcgcatattgctacttcggtacgcctaattggtaggcgcccggccgaccggccccgcaagggcctagtaggacgtgtgacaatgccatgagggattatgacactggggtgagcggaggcagcaccgaagtcgggtgaactcgactcccagtgcgaccacctggcttggtcgttcatggagggcatgcccacgggaacgctgatcgtgcaaagggatgggtccctgcactggtgccatgcgcggcaccactccgtacagcctgatagggtggcggcgggcccccccagtgtgacgtccgtggagcgcaac

SEQ ID NO: 16949 - DNA, 304 bp, synthetic construct
  source 1..304: mol_type = other DNA
tattgctacttcggtacgcctaattggtaggcgcccggccgaccggccccgcaagggcctagtaggacgtgtgacaatgccatgagggatcatgacactggggtgagcggaggcagcaccgaagtcgggtgaactcgactcccagtgcgaccacctggcttggtcgttcatggagggcatgcccacgggaacgctgatcgtgcaaagggatgggtccctgcactggtgccatgcgcggcaccactccgtacagcctgatagggtggcggcgggcccccccagtgtgacgtccgtggagcgcaac

SEQ ID NO: 16950 - DNA, 574 bp, synthetic construct; identical to SEQ ID NO: 623
  source 1..574: mol_type = other DNA

SEQ ID NO: 16951 - DNA, 528 bp, synthetic construct; identical to SEQ ID NO: 18
  source 1..528: mol_type = other DNA

SEQ ID NO: 16952 - DNA, 528 bp, synthetic construct
  source 1..528: mol_type = other DNA
gtcaggtggaaggcctgaaaccgatcctacaattggagagtaaccaacatgctcattaacacctcgggctggctcgaaagccggtgttgggcagatggcagggttcttagggtaaatcccggtctgtctggatccggtatagagctggcacttgaggtccactgttggcttgctgaagtgctcagaagattgatggacacggtacacaggtttggatgcaccggtgtgaatagcgtcccgtcaggagcgtctgacgttaaactgagtccccctcaacgatcgcaacatgggattgcgtacggacacgccgccaaaacccttcggggacagctatgcgggttgacaagtccagcagtcgcgtggggcctatattgtttaggcctgcgagttccggtttgggggagccgtaaggcagccacgggggtaccaaggcggcgtcgcgctacaggcggcaaggggaaaaatccttcgggtgacccctggtaccattttcctttcttgggtgttatgggtgtcggcaacgccacc

SEQ ID NO: 16953 - DNA, 560 bp, synthetic construct; identical to SEQ ID NO: 24
  source 1..560: mol_type = other DNA

SEQ ID NO: 16954 - DNA, 318 bp, synthetic construct
  source 1..318: mol_type = other DNA
tgtagcaatgcgcatattgctacttcggtacgcctaattggtaggcgcccggccgaccggccccgcaagggcctagtaggacgtgtgacaatgccatgcgggatcatgacactggggtgagcggaggcagcaccgaagtcgggtgaactcgactcccagtgcgaccacctggcttggtcgttcatggagggcatgcccacgggaacgctgatcgtgcaaagggatgggtccctgcactggtgccatgcgcggcaccactccgtacagcctgatagggtggcggcgggcccccccagtgtgacgtccgtggagcgcaac

SEQ ID NO: 16955 - DNA, 531 bp, synthetic construct; identical to SEQ ID NO: 20
  source 1..531: mol_type = other DNA

SEQ ID NO: 16956 - DNA, 329 bp, synthetic construct; identical to SEQ ID NO: 313
  source 1..329: mol_type = other DNA

SEQ ID NO: 16957 - DNA, 327 bp, synthetic construct
  source 1..327: mol_type = other DNA
aactgttgttgtagcaatcgctatattgctacttcggtacgcctaattggtaggcgcccggccgaccggccccgcaagggcctagtaggacgtgtgacaatgccatgagggatcatgacactggggtgagcggaggcagcaccgaagtcgggtgaactcgactcccagtgcgaccacctggcttggtcgttcatggagggcatgcccacgggaacgctgatcgtgcaaagggatgggtccctgcactggtgccatgcgcggcaccactccgtacagcctgatagggtggcggcgggcccccccagtgtgacgtccgtggagcgcaac

SEQ ID NO: 16958 - DNA, 520 bp, synthetic construct
  source 1..520: mol_type = other DNA
ggggaatctcaccccccgtccggttccggaagaatcggaaaccgacaccctgaccaatcattcttgatcatagagtggatgttagtgaaagccagacgaaagccggcggatgggtggtgacagggttggtaggtcgtaaatcccggccaccctggtacccggtataagttgggcggaagctgactgaagctccgtgctcttttctgtgcgttcttggtgcacggtccacaggtgacgcctataccggtgtgaataataggccgactcgagcggagtcgttaaactgagaacctccatacggatggcaacttggcttgcgtacggggacgccgctaaagtcacagtgggttaagtccggcgggttgacaaccccagcaaggcgagggggtcctattgttggactctgccagttcccggtggaggtaggcatggggtggcccagctccgcggcgcgctacagccggggtagcccaaaatccgaaaggtgagggcgggccacatgtccgaaatttagtcaagc

SEQ ID NO: 16959 - DNA, 520 bp, synthetic construct
  source 1..520: mol_type = other DNA
ggggaatctcaccccccgtccggttccggaagaatcggaaaccgacaccctgaccaatcattcttgatcatagagtggatgttagtgaaagccagacgaaagccggcggatgggtggtgacagggttggtaggtcgtaaatcccggccaccctggtacccggtataagttgggcggaagctgactgaagctccatgctcttttttgtgcgtgcttggtgcacggtccacaggtgacgcctataccggtgtgaataataggccgactcgagcggagtcgttaaactgagaacctccatacggatggcaacttggcttgcgtacggggacgccgctaaagtcacagtgggttaagtccggcgggttgacaaccccagcaaggcgagggggtcctattgttggactctgccagttcccggtggaggtaggcatggggtggcccagctccgcggcgcgctacagccggggtagcccaaaatccgaaaggtgagggcgggccacatgtccgaaatttagtcaagc

SEQ ID NO: 16960 - DNA, 520 bp, synthetic construct
  source 1..520: mol_type = other DNA
ggggaatctcaccccccgtccggttccggaagaatcggaaaccgacaccctgatcaatcattcttgatcatagagtggatgttagtgaaagccagacgaaagccggcggatgggtggtgacagggttggtaggtcgtaaatcccggccaccctggtacccggtataagttgggcggaagctgattgaagctctgtgctcttttctgtgcgttcttggtgcacggtccacaggtgacgcctataccggtgtgaataataggccgactcgagcggagtcgttaaactgagaacctccatacggatggcaacttggcttgtgtacggggacgccgctaaagtcacagtgggttaagtccggcgggttgacaaccccagcaaggcgagggggtcctattgttggactctgccagttcccggtggaggtaggcatggggtggcccagctccgcggcgcgctacagccggggtagcccaaaatccgaaaggtgagggcgggccacatgtccgaaatttagtcaagc

SEQ ID NO: 16961 - DNA, 520 bp, synthetic construct
  source 1..520: mol_type = other DNA
ggggaatctcaccccccgtccggttccggaagaatcggaaaccgacaccctgaccaatcattcttgatcatagagtggatgttagtgaaagccagacgaaagccggcggatgggtggtgacagggttggtaggtcgtaaatcccggccaccctggtacccggtataagttgggcggaagctgacggaagctccgtgctcttttttgtgcgtgcttggtgcacggtccacaggtgacgcctataccggtgtgaataatgggccgactcgagcggagtcgttaaactgagaacctccatacggatggcaacttggcttgcgtacggggacgccgctaaagtcacagtgggttaagtccggcgggttgacaaccccagcaaggcgagggggtcctattgttggactctgccagttcccggtggaggtaggcatggggtggcccagctccgcggcgcgctacagccggggtagcccaaaatccgaaaggtgagggcgggccacatgtccgaaatttagtcaagc

SEQ ID NO: 16962 - DNA, 519 bp, synthetic construct
  source 1..519: mol_type = other DNA
ggggaatctcaccccccgctcggttccggaagaatcgaaaccgacaccctgatcaatcattcttgatcatagagtggatgttagtgaaagccagacgaaagccggcggatgggtggtgacagggttggtaggtcgtaaatcccggccaccctggtacccggtataagttgggcggaagctgactgaagctccgtgctcttttttgtgcgttcttggtgcacggtccacaggtgacgcctataccggtgtgaataataggccgactcgagcggagtcgttaaactgagaacctccatacggatggcaacttggcttgcgtacggggacgccgctaaagtcacagtgggttaagtccggcgggttgacaaccccagcaaggcgagggggtcctattgttggactctgccagttcccggtggaggtaggcatggggtggcccagctccgcggcgcgctacagccggggtagcccaaaatccgaaaggtgagggcgggccacatgtccgaaatttagtcaagc

SEQ ID NO: 16963 - DNA, 309 bp, synthetic construct
  source 1..309: mol_type = other DNA
cgctatattgctacttcggtacgcctaattggtaggcgcccggccgaccggccccgcaagggcctagtaggacgtgtgacaatgccatgagggattctgacactggggtgagcggaggcagcaccgaagtcgggtgaactcgactcccagtgcgaccacctggcttggtcgttcatggagggcatgcccacgggaacgctgatcgtgcaaagggatgggtccctgcactggtgccatgcgcggcaccactccgtacagcctgatagggtggcggcgggcccccccagtgtgacgtccgtggagcgcaac

SEQ ID NO: 16964 - DNA, 307 bp, synthetic construct
  source 1..307: mol_type = other DNA
gcatattgctacttcggtacgcctaattggtaggcgcccggccgaccggccccgcaagggcctagtaggacgtgtgacaatgccatgagggatcatgacactggggtgagcggaggcagcaccgaagtcgggtgaactcgactcccagtgcgaccacctggcttggtcgttcatggagggcatgcccacgggaacgctgatcgtgcaaagggatgggtccctgcactggtgccatgcgcggcaccactccgtacagcctgatagggtggcggcgggcccccccagtgtgacgtccgtggagcgcaac

SEQ ID NO: 16965 - DNA, 520 bp, synthetic construct
  source 1..520: mol_type = other DNA
ggggaatctcaccccccgaccggttccggaagaatcggaaaccgacaccctgaccaatcattcttgatcatagagtggatgttagtgaaagccagacgaaagccggcggatgggtggtgacagggttggtaggtcgtaaatcccggccaccctggtacccggtataagttgggcggaagctgactgaagctccgtgttcttttttgtgcgtgcttggtgcacggtccacaggtgacgcctataccggtgtgaataataggccgactcgagcggagtcgttaaactgagaacctccatacggatggcaacttggcttgcgtacggggacgccgctaaagtcacagtgggttaagtccggcgggttgacaaccccagcaaggcgagggggtcctattgttgggctctgccagttcccggtggaggtaggcatggggtggcccagctccgcggcgcgctacagccggggtagcccaaaatccgaaaggtgagggcgggccacatgtccgaaatttagtcaagc

SEQ ID NO: 16966 - DNA, 312 bp, synthetic construct
  source 1..312: mol_type = other DNA
atgcgctatattgctacttcggtacgcctaattggtaggcgcccggccgaccggccccgcaagggcctagtaggacgtgtgacaatgccatgagggattctgacactggggtgagcggaggcagcaccgaagtcgggtgaactcgactcccagtgcgaccacctggcttggtcgttcatggagggcatgcccacgggaacgctgatcgtgcaaagggatgggtccctgcactggtgccatgcgcggcaccactccgtacagcctgatagggtggcggcgggcccccccagtgtgacgtccgtggagcgcaac

SEQ ID NO: 16967 - DNA, 452 bp, synthetic construct; identical to SEQ ID NO: 493
  source 1..452: mol_type = other DNA

SEQ ID NO: 16968 - DNA, 309 bp, synthetic construct
  source 1..309: mol_type = other DNA
cgctatattgctacttcggtacgcctaattggtaggcgcccggccgaccggccccgcaagggcctagtaggacgtgtgacaatgccatgagggatcatgacactggggtgagcggaggcagcaccgaagtcgggtgaactcgactcccagtgcgaccacctggcttggtcgttcatggagggcatgcccacgggaacgctgatcgtgcaaagggatgggtccctgcactggtgccatgcgcggcaccactccgtacagcctgatagggtggcggcgggcccccccagtgtgacgtccgtggagcgcaac

SEQ ID NO: 16969 - DNA, 520 bp, synthetic construct
  source 1..520: mol_type = other DNA
ggggaatctcaccccccgtccggttccggaagaatcggaaaccgacaccctgaccaatcattcttgatcatagagtggatgttagtggaagccagacgaaagccggcggatgggtggtgacagggttggtaggtcgtaaatcccggccaccctggtacccggtataagttgggcggaagctaactgaagctccgtgctcttttttgtgcgtgcttggtgcacggtccacaggtgacgcctataccggtgtgaataataggccgactcgagcggagtcgttaaactgagaacctccatacggatggcaacttggcttgcgtacggggacgccgctaaagtcacagtgggttaagtccggcgggttgacaaccccagcaaggcgagggggccctattgttgggctctgccagttcccggtggaggtaggcatggggtggcccagctccgcggcgcgctacagccggggtagcccaaaatccgaaaggtgagggcgggccacatgtccgaaatttagtcaagc

SEQ ID NO: 16970 - DNA, 305 bp, synthetic construct
  source 1..305: mol_type = other DNA
ttattgctacttcggtacgcctaattggtaggcgcccggccgaccggccccgcaagggcctagtaggacgtgtgacaatgccatgagggatcatgacactggggtgagcggaggcagcaccgaagtcgggtgaactcgactcccagtgcgaccacctggcttggtcgttcatggagggcatgcccacgggaacgctgatcgtgcaaagggatgggtccctgcactggtgccatgcgcggcaccactccgtacagcctgatagggtggcggcgggcccccccagtgtgacgtccgtggagcgcaac

SEQ ID NO: 16971 - DNA, 520 bp, synthetic construct
  source 1..520: mol_type = other DNA
ggggaatcccaccccccgtccggttccggaagaatcggaaaccgacaccctgaccaatcattcttgatcatagagtggatgttagtgaaagccagacgaaagccggcggatgggtggtgacagggttggtaggtcgtaaatcccggccaccctggtacccggtataagttgggcggaagctgactgaagctccatgctcttttttgtgcgtgcttggtgcacggtccacaggtgacgcctataccggtgtgaataataggccgactcgagcggagtcgttaaactgagaacctccatacggatggcaacttggcttgcgtacggggacgccgctaaagtcacagtgggttaagtccggcgggttgacaaccccagcaaggcgagggggtcctattgttggactctgccagttcccggtggaggtaggcatggggtggcccagctccgcggcgcgctacagccggggtagcccaaaatccgaaaggtgagggcgggccacatgtccgaaatttagtcaagc

SEQ ID NO: 16972 - DNA, 304 bp, synthetic construct
  source 1..304: mol_type = other DNA
tattgctacttcggtacgcctaattggtaggcgcccggccgaccggccccgcaagggcctagtaggacgtgtgacaatgccatgcgggatcatgacactggggtgagcggaggcagcaccgaagtcgggtgaactcgactcccagtgcgaccacctggcttggtcgttcctggagggcatgcccacgggaacgctgatcgtgcaaagggatgggtccctgcactggtgccatgcgcggcaccactccgtacagcctgatagggtggcggcgggcccccccagagtgacgtccgtggagcgcaac

SEQ ID NO: 16973 - DNA, 303 bp, synthetic construct
  source 1..303: mol_type = other DNA
attgctacttcggtacgcctaattggtaggcgcccggccgaccggccccgcaagggcctagtaggacgtgtgacaatgccatgagggatcatgacactggggtgagcggaggcagcaccgaagtcgggtgaactcgactcccagtgcgaccacctggcttggtcgttcatggagggcatgcccacgggaacgctgatcgtgcaaagggatgggtccctgcactggtgccatgcgcggcaccactccgtacagcctgatagggtggcggcgggcccccccagtgtgacgtccgtggagcgcaac

SEQ ID NO: 16974 - DNA, 273 bp, synthetic construct
  source 1..273: mol_type = other DNA
tggggcgggccgaccggtccgcagggcctagtaggacgtgtgacaatgccatgagggattctgacactggggtgagcggaggcagcaccgaagtcgggtgaactcgactcccagtgcgaccacctggcttggtcgttcatggagggcatgcccacgggaacgctgatcgtgcaaagggatgggtccctgcactggtgccatgcgcggcaccactccgtacagcctgatagggtggcggcgggcccccccagtgtgacgtccgtggagcgcaac

SEQ ID NO: 16975 - DNA, 521 bp, synthetic construct
  source 1..521: mol_type = other DNA
ggggaatctcacccccccgtccggttccggaagaatcggaaaccgacaccctgaccaatcattcttgatcatagagtggatgttagtgaaagccagacgaaagccggcggatgggtggtgacagggttggtaggtcgtaaatcccggccaccctggtacccggtataagttgggcggaagctgactgaagctccatgctcttttttgtgcgtgcttggtgcacggtccacaggtgacgcctataccggtgtgaataataggccgactcgagcggagtcgttaaactgagaacctccatacggatggcaacttggcttgcgtacggggacgccgctaaagtcacagtgggttaagtccggcgggttgacaaccccagcaaggcgagggggtcctattgttggactctgccagttcccggtggaggtaggcatggggtggcccagctccgcggcgcgctacagccggggtagcccaaaatccgaaaggtgagggcgggccacatgtccgaaatttagtcaagc

SEQ ID NO: 16976 - DNA, 520 bp, synthetic construct
  source 1..520: mol_type = other DNA
ggggaatctcaccccccgtccggttccggaagaatcggaaaccgacaccctgaccaatcattcttgatcatagagtggatgttagtgaaagccagacgaaagccggcggatgggtggtgacagggttggtaggtcgtaaatcccggccaccctggtacccggtataagttgggcggaagctaattgaagctccgtgctcttttttgtgcgttcttggtgcacggtccacaggtgacgcctataccggtgtgaataataggccgactcgagcggagtcgttaaactgagaacctccatacggatggcaacttggcttgcgtacggggacgccgctaaagtcacagtgggttaagtccggcgggttgacaaccccagcaaggcgagggggtcctattgttggactctgccagttcccggtggaggtaggcatggggtggcccagctccgcggcgcgctacagccggggtagcccaaaatccgcaaggtgagggcgggccacatgtccgaaatttagtcaagc

SEQ ID NO: 16977 - DNA, 498 bp, synthetic construct
  source 1..498: mol_type = other DNA
gttccggaagaatcggaaaccgacaccctgaccaatcatttttgatcatagagtggatgttagtgaaagccagacgaaagccggcggatgggtggtgacagggttggtaggtcgtaaatcccggccaccctggtacccggtataagttgggcggaagctgactgaagctccgtgctcttttctgtgcgttcttggtgcacggtccacaggtgacgcctataccggtgtgaataataggccgactcgagcggagtcgttaaactgagaacctccatacggatggcaacttggcttgcgtacggggacgccgctaaagtcacagtgggttaagtccggcgggttgacaaccccagcaaggcgagggggtcctattgttggactctgccagttcccggtggaggtaggcatggggtggcccagctccgcggcgcgctacagccggggtagcccaaaatccgaaaggtgagggcgggccacatgtccgaaatttagtcaagc

SEQ ID NO: 16978 - DNA, 436 bp, synthetic construct
  source 1..436: mol_type = other DNA
gtaaatcccggccccagtggatctgggaatatgataggaggagcagtgcggttcgaccaccgcacgggaccactgaccggcttgacgaagcggctagtagttgactagggcacggtccacaggtgtggcgtaccggtgtgaataacggcccgtctggagcgacagacgttaaactgaggggggtgtgaggatggcaacgcggcccgtgtacggggacgtcgctaaataccttcgggaacagctatgcgggttgtcaaccccagcggtggcgcggcccgcctactgttggcgggtgccagttccctctcaccctcgcgaaagcagcacggggccccccagctggcgcagcgctacatgcggcaagaggaaaatccttcgggtgacctcggggggcatgtcccaaccaaacatgatactaggggtagcaactgccaag

SEQ ID NO: 16979 - DNA, 509 bp, synthetic construct
  source 1..509: mol_type = other DNA
ccccccgtccggttccggaagaatcggaaaccgacaccctgaccaatcattcttgatcatagagtggatgttagtgaaagccagacgaaagccggcggatgggtggtgacagggttggtaggtcgtaaatcccggccaccctggtacccggtataagttgggcggaagctgactgaagctccgtgctcttttctgtgcgttcttggtgcacggtccacaggtgacgcctataccggtgtgaataataggccgactcgagcggagtcgttaaactgagaacctccatacggatggcaacttggcttgcgtacggggacgccgctaaagtcacagtgggttaagtccggcgggttgacaaccccagcaaggcgagggggtcctattgttggactctgccagttcccggtggaggtaggcatggggtggcccagctccgcggcgcgctacagccggggtagcccaaaatccgaaaggtgagggcgggccacatgtccgaaatttagtcaagc

SEQ ID NO: 16980 - DNA, 520 bp, synthetic construct
  source 1..520: mol_type = other DNA
ggggaatctcaccccccgtccggttccggaagaatcggaaaccgacaccctgaccaatcattcttgatcatagagtggatgttagtggaagccagacgaaagccggcggatgggtggtgacagggttggtaggtcgtaaatcccggccaccctggtacccggtataagttgggcggaagctgactgaagctccgtgctcttttctgtgcgttcttggtgcacggtccacaggtgacgcctataccggtgtgaataataggccgactcgagcggagtcgttaaactgagaacctccatacggatggcaacttggcttgcgtacggggacgccgctaaagtcacagtgggttaagtccggcgggttgacaaccccagcaaggcgagggggtcctattgttggactctgccagttcccggtggaggtaggcatggggtggcccagctccgcggcgcgctacagccggggtagcccaaaatccgaaaggtgagggcgggccacatgtccgaaacttagtcaagc

SEQ ID NO: 16981 - DNA, 419 bp, synthetic construct; identical to SEQ ID NO: 6
  source 1..419: mol_type = other DNA

SEQ ID NO: 16982 - DNA, 508 bp, synthetic construct
  source 1..508: mol_type = other DNA
cccccgtccggttccggaagaatcggaaaccgacaccctgatcaatcattcttgatcatagagtggatgttagtgaaagccagacgaaagccggcggatgggtggtgacagggttggtaggtcgtaaatcccggccaccctggtacccggtataagttgggcggaagctgactgaagctccgtgctcttttctgtgcgttcttggtgcacggtccacaggtgacgcctataccggtgtgaataataggccgactcgagcggagtcgttaaactgagaacctccatacggatggcaacttggcttgcgtacggggacgccgctaaagtcacagtgggttaagtccggcgggttgacaaccccagcaaggcgagggggtcctattgttggactctgccagttcccggtggaggtaggcatggggtggcccagctccgcggcgcgctacagccggggtagcccaaaatccgaaaggtgagggcgggccacatgtccgaaatttagtcaagc

SEQ ID NO: 16983 - DNA, 519 bp, synthetic construct
  source 1..519: mol_type = other DNA
ggggaatctcaccccccgtccggttccggaagaatcggaaaccgacaccctgaccaatcattcttgatcatagagtggatattagtgaaagccagacgaaagccggcggatgggtggtgacagggttggtaggtcgtaaatcccggccaccctggtacccggtataagttgggcggaagctgactgaagctctgtgctcttttttgtgcgtgcttggtgcacggtccacaggtgacgcctataccggtgtgaataataggccgactcgagcggagtcgttaaactgagaacctccatacggatggcaacttggcttgcgtacggggacgccgctaaagtcacagtgggttaagtccggcgggttgacaaccccagcaaggcgagggggtcctattgttggactctgccagttcccggtggaggtaggcatggggtggcccagctccgcggcgcgctacagccggggtagcccaaaatccgaaaggtgagggcgggccacatgtccgaatttagtcaagc

SEQ ID NO: 16984 - DNA, 275 bp, synthetic construct
  source 1..275: mol_type = other DNA
aggttgtgggcggcgacggtccgcagggcctagtaggacgtgtgacaatgccatgcgggatcatgacactggggtgagcggaggcagcaccgaagtcgggtgaactcgactcccagtgcgaccacctggcttggtcgttcatggagggcatgcccacgggaacgctgatcgtgcaaagggatgggtccctgcactggtgccatgcgcggcaccactccgtacagcctgatagggtggcggcgggcccccccagtgtgacgtccgtggagcgcaac

SEQ ID NO: 16985 - DNA, 524 bp, synthetic construct; identical to SEQ ID NO: 550
  source 1..524: mol_type = other DNA

SEQ ID NO: 16986 - DNA, 546 bp, synthetic construct; identical to SEQ ID NO: 585
  source 1..546: mol_type = other DNA

SEQ ID NO: 16987 - DNA, 531 bp, synthetic construct
  source 1..531: mol_type = other DNA
cccccccggcactgggtgcaagccccagaaaccgacgcctatcttagtagacgcaatgactcggcgccgactcggcgaccggccaaaaggtggtggatgggtgatgacagggttggtaggtcgtaaatcccggtcaccttggtagccactataggtgggtcttaagagaaggttaagattcctcttgtgcctgcgacgagaccgcgcacggtccgcaggtgttggccctaccggtgtgaataagggcccgacgtcaggctcgtcgttaaaccgagcccgtcacccacctgggcaaacgacgcccacgtacggtccacgtcgcccttcaatgcctctcttggccaataggtttaaccggcgagttggcaaggaccagtgggggccgggggcttggagagggactccaagtcctgcccttcccggtgggccgggaaatgcatggggccacccagctccgcggcggcctgcagccggggtagcccaagaatccttcgggtgagggcgggtggcatttctcttttctataccatc

SEQ ID NO: 16988 - DNA, 530 bp, synthetic construct; identical to SEQ ID NO: 561
  source 1..530: mol_type = other DNA

SEQ ID NO: 16989 - DNA, 533 bp, synthetic construct
  source 1..533: mol_type = other DNA
cccccccccggcactgggtgcaagccccagaaaccgacgcctactaaagcaggcattaaggcctcgcgccgaaccggcgaccggccaaaaggtggtggatgggtgatgccagggttggtaggtcgtaaatcccggtcatcttggtagccactataggtgggtcttaaggggaggctacagtccctctattacctgcggcgggaacgcgcacggtccacaggtgttggccctaccggtgtgaataagggcccgacgtcaggctcgtcgttaaaccgagcccgtcatccccctgggcaaacgacgcccacgtacggctcacgtcgcccttcaatgtctctcttgaccaataggcttagccggcgagttgacaagagccagtgggggccgggggtgagggggaaggacccccctccctgcccatcccgggggagcgggaaatgcatggggccacccagctccgcggcggcctgcagccggggtagcccaagagccttcgggtgagggcgggtggcatttctttccttgtaccgatc

SEQ ID NO: 16990 - DNA, 411 bp, synthetic construct; identical to SEQ ID NO: 448
  source 1..411: mol_type = other DNA

SEQ ID NO: 16991 - DNA, 533 bp, synthetic construct; identical to SEQ ID NO: 568
  source 1..533: mol_type = other DNA

SEQ ID NO: 16992 - DNA, 532 bp, synthetic construct
  source 1..532: mol_type = other DNA
cccccccccggcactgggtgcgagccccagaaaccgacgcctactgaagtagacgtaatggccctgcgccaaaccggcgaccggccaaaaggtggtggatgggtgatgacagggttggtaggtcgtaaatcccggtcatcctggtagccactataggtgggtctaaaggggaggttatggtccctcttgcgcatatggaggaaaagcgcacggtccacaggtgttggtcctaccggtgtaataaggacccggcgctaggcacgccgttaaaccgagcccgttactcccctgggcaaacgacgcccacgtacggtccacgtcgcccttcaatgtctctcttgaccaataggcttagccggcgagttgacaaggaccagtgggggccgggcgggagggggaaggacccccaccgctgcccttcccggggaggcgggaaatgcatggggccacccagctccgcggcggcctacagccggggtagcccaagaaccttcgggtgagggcgggtggcattctttttcctataccaatc

SEQ ID NO: 16993 - DNA, 532 bp, synthetic construct
  source 1..532: mol_type = other DNA
cccccccacggcactgggtgcgagccccagaaaccgacgcctactgaagtagacgtaatggccccgcgccaacctggcgaccggccaaaaggtggtggatgggtgatgacagggttggtaggtcgtaaatcccggtcatcctggtagccactataggtgggtcttaagggaaggctacggtccctcttgcgcatatggaggaaaagcgcacggtccacaggtgttggtcctaccggtgtaataaggacccggcgctaggcacgccgttaaaccgagcccgttactcccctgggcaaacgacgcccatgtacggtccacgtcgcccttcaatgtctctcttgaccaataggcttagccggcgagttgacaaggaccagtgggggccgggcgggagggggaaggaccccccccgctgcccttcccggggaggcgggaaatgcatggggccacccagctccgcggcggcctacagccggggtagcccaagagccttcgggtgagggcgggtggcatttctctttctgtaccaatc

SEQ ID NO: 16994 - DNA, 532 bp, synthetic construct
  source 1..532: mol_type = other DNA
cccccccccggcactgggtgcaagccccagaaaccgacgcctactgaagtagacgtaatggcccagcgccaaaccggcgaccggccaaaaggtggtggatgggtgatgccagggttggtaggtcgtaaatcccggtcatcttggtagccactataggtgggtcttaaggggaggcaaaggtccctcttgcgcttatggaggaacagcgcacggtccacaggtgttggtcctaccggtgtaataaggacccggcgctaggcacgccgttaaaccgagcccgttactcccctgggcgaacgacgctcacgtacggtccacgtcgcccttcaatgtctctcttgaccaataggcatagccggcgagttgacaaggaccagtgggggccgggcgggagggggaaggacccccaccgctgcccttcccggggaggcgggaaatgcatggggccacccagctccgcggcggcctacagccggggtagcccaagaaccttcgggtgagggcgggtggcatttttcttcctgtaccgatc

SEQ ID NO: 16995 - DNA, 389 bp, synthetic construct; identical to SEQ ID NO: 4
  source 1..389: mol_type = other DNA

SEQ ID NO: 16996 - DNA, 529 bp, synthetic construct
  source 1..529: mol_type = other DNA
cccacggcactgggtgcaagccccagaaaccgacgcctactgaagtagacgtaatggccccgcgccgaaccggcgaccggccaaaaggtggtggatgggtgatgccagggttggtaggtcgtaaatcccggtcatcttggtagccactataggtgggtcttaaggggaggtaaaggtccctcttgcgcatatggagggaaagcgcacggtccacaggtgttggtcctaccggtgtaataaggacccggcgctaggcacgccgttaaaccgagcccgttactctcctgggcaaacgacgcccacgtacggtccacgtcgcccttcaatgtctctcttgaccaataggcttagccggcgagttgacaaggaccagtgggggccgggcgagtgggggagggacccccaccgctgcccttcccggggaggcgggaaatgcatggggccacccagctccgcggcggcctacagccggggtagcccaagagccttcgggtgagggcgggtggcatttttctttcctgtaccgatc

SEQ ID NO: 16997 - DNA, 513 bp, synthetic construct; identical to SEQ ID NO: 538
  source 1..513: mol_type = other DNA

SEQ ID NO: 16998 - DNA, 523 bp, synthetic construct
  source 1..523: mol_type = other DNA
cactgggtgtaagccccagaaaccgacgcctatctaagtagacgcaatgactcggcgccaactcggcgaccggccaaaaggtggtggatgggtgatgacagggttggtaggtcgtaaatcccggtcatcctggtagccactataggtgggtcttaagagaaggttaagattcctcttgtgcctgcggcgagaccgcgcacggtccacaggtgttggccctaccggtggtaataagggcccgacgtcaggctcgtcgttaaaccgagcccgtcacccacctgggcaaacgacgcccacgtacggtccacgtcgcccttcaatgtctctcttgaccaataggcttagccggcgagttgacaaggaccagtgggggccgggggcttggagaaggactccaagtcctgcccttcccggtggaacgggaaatgcatggggccacccagctccgcggcggcctgcagccggggtagcccaagaatccttcgggtgagggcgggtggcattttctcttttctataccatc

SEQ ID NO: 16999 - DNA, 481 bp, synthetic construct
  source 1..481: mol_type = other DNA
acgcaatgactcggcgccgactcggcgaccggccaaaaggtggtggatgggtgatgacagggttggtaggtcgtaaatcccggtcatcctggtagccactataggtgggtcttaagagaaggttaagattcctcttgtgcctgcggcgagaccgcgcacggtccacaggtgttggccctaccggtgtgaataagggcccgacgtcaggctcgtcgttaaaccgagcccactacccacctgggcaaacgacgcccacgtacggtccacgtcgcccttcaatgtctctcttgaccaataggttcgtccggcgagttgacaaggaccagtgggggccgggggtcacggggatggaccccggaccctgcccttcccggtggagtgggaaatgcatggggccacccagctccgcggcggcctgcagccggggtagcccaagagccttcgggtgagggcgggtggcattttttcttctataccgatc

SEQ ID NO: 17000 - DNA, 518 bp, synthetic construct
  source 1..518: mol_type = other DNA
gggtgcaagccccagaaaccgacgcctatctaagtagacgcaatgactcggcgccgactcggcgaccggccaaaaggtggtggatgggtgatgacagggttggtaggtcgtaaatcccggtcaccttggtagccactataggtgggtcttaagaggaggttaagattcctcttgtgcctgcggcgagaccgcgcacggtccgcaggtgttggccctaccggtgtgaataagggcccgacgtcaggctcgtcgttaaaccgagcccgtaacccacctgggcaaacgacgcccacgtacggtccacgccgcccttcaatgcctctcttggccaataggtttaaccggcgggttgacaaggaccagtgggggccgggggctaggagagggactcctagccctgcccttcccggtgggccgggaaatgcatggggccacccagctccgcggcggcctgcagccggggtagcccaagaatccttcgggtgagggcgggtggcatttcctttttctataccatc

SEQ ID NO: 17001 - DNA, 513 bp, synthetic construct
  source 1..513: mol_type = other DNA
aagccccagaaaccgacgcctatctaagtagacgcaatgactcggcgccgactcggcgaccggccaaaaggtggtggatgggtgatgacagggttggtaggtcgtaaatcccggtcatcctggtagccactataggtgggtcttaagagaaggttaagattcctcttgtgcctgcggcgagaccgcgcacggtccacaggtgttggccctaccggtgtgaataagggcccgacgtcaggctcgtcgttaaaccgagcccgttacccacctgggcaaacgacgcccacgtacggtccacgtcgcccttcaatgtctctcttgaccaataggcttagccggcgagttgacaaggaccagtgggggccgggggctatggagatggactccaagtcctgcccttcccggtggggcgggaaatgcatggggccacccagctccgcggcggcctgcagccggggtagcccaagaacccttcgggtgagggcgggtggcatttttcttttctataccatc

SEQ ID NO: 17002 - DNA, 523 bp, synthetic construct; identical to SEQ ID NO: 548
  source 1..523: mol_type = other DNA

SEQ ID NO: 17003 - DNA, 498 bp, synthetic construct; identical to SEQ ID NO: 525
  source 1..498: mol_type = other DNA

SEQ ID NO: 17004 - DNA, 497 bp, synthetic construct
  source 1..497: mol_type = other DNA
gcttcggcgcctagccgaaaccgacaccctgttcgaaatctttccgaaacatagagcggttgtggggaaactggacgaaagccagcggatggggggtgacagggtaggcaggtcgtaaatcccggcctccctggtacctggtataagtctggtggaaccatagcttaactgtgcagacgtgggacgtaggcagagtgcacggtccacaggtgacgcctataccggtgtgaataataggccgactcgagcggagtcgttaaactgaggacccattctaggatcacaacttggctgccgtacggtgacgccgctaaagtcacagtgggttaagtccggcgggttgacaacaccaggcaggcggggggacgctactgttgcgccctgtgagttccctagttgggtaggcatggggggacccagctccgcggcgcgctacagccggggtaggccaaaaatccgaaaggtgaggccgggtcccattttctttcttgagtctc

SEQ ID NO: 17005 - DNA, 516 bp, synthetic construct
  source 1..516: mol_type = other DNA
cactgggtgcaagccccagaaaccgacgcctatctaagtagacgcaatgactcggcgccaactcggcgaccggccaaaaggtggtggatgggtgatgacagggttggtaggtcgtaaatcccggtcaccttggtagccactataggtgggtcttaagagaaggttaagattcctcttgtgcctgcggcgagaccgcgcacggtccgcaggtgttggccctaccggtgtgaataagggcccgacgtcagggtcgtcgttaaaccgagcccgttaccctcctgggcaaacgacgcccacgtacggtccacgtcgcccttcaatgtctctcttgaccaataggcttggccggcgagttgacaaggaccagtgggggccgggggtggagagggactcaccctgcccttcccggggggccgggaaatgcatggggccacccagctccgcggcgccctgcagccggggtagcccaagatccttcgggtgagggcgggtggcattttccttttctgtaccatc

SEQ ID NO: 17006 - DNA, 521 bp, synthetic construct
  source 1..521: mol_type = other DNA
ggggaatctcacccccccgtccggttccggaagaatcggaaaccgacaccctgaccaatcattcttgatcatagagtggatgttagtgaaagccagacgaaagccggcggatgggtggtgacagggttggtaggtcgtaaatcccggccaccctggtacccggtataagttgggcggaagctgacggaagctccgtgctcttttttgtgcgtgcttggtgcacggtccacaggtgacgcctataccggtgtgaataataggccgactcgagcggagtcgttaaactgagaacctccatacggatggcaacttggcttgcgtacggggacgccgctaaagtcacagtgggttaagtccggcgggttgacaaccccagcaaggcgagggggtcctattgttggactctgccagttcccggtggaggtaggcatggggtggcccagctccgcggcgcgctacagccggggtagcccaaaatccgaaaggtgagggcgggccacatgtccgaaatttagtcaagc

SEQ ID NO: 17007 - DNA, 420 bp, synthetic construct; identical to SEQ ID NO: 459
  source 1..420: mol_type = other DNA

SEQ ID NO: 17008 - DNA, 420 bp, synthetic construct
  source 1..420: mol_type = other DNA
gttggtaggtcgtaaatcccggtcatcttggtagccactataggtgggtcttaagggtgggtcaaggttcctcttacgcctgtggcgggacagcgcacggtccacaggtgttggccctaccggtgtgaataagggcccgacgtcaggctcgtcgttaaaccgagaccattacccgcctgggcaaacgacgcccacgtacggtccacgtcgcccttcaatgtctctcttgaccaataggctttgccggcgagttgacaaggaccagtgggggccgggtgcagggggaaggaccccctgtactgcccattccggcggggtgggaaatgcatggggccacccagctccgcggcggcctgcagccggggtagcccaagaatccttcgggtgagggcgggtggcatttttctttctgtaccaatc

SEQ ID NO: 17009 - DNA, 420 bp, synthetic construct
  source 1..420: mol_type = other DNA
gttggtaggtcgtaaatcccggtcatcttggtagccactataggtgggtcttaagggtgggtcaaggttcctcttacgcctgtggcgggacagcgcacggtccacaggtgttggccctaccggtgtgaataagggcccgacgtcaggttcgtcgttaaaccgagaccattactcacctgggcgaacgacgcccatgtacggtccacgtcgcccttcaatgtctctcttgaccaataggcttagccggcgagttgacaaggaccagtgggggccgggtgtagggggaaggaccccctgcactgcccttcccggtggggtgggaaatgcatggggccacccagctccgcggcgacctgcagccggggtagcccaagaacccttcgggtgaggacgggtggcattttattttctgtaccaatc

SEQ ID NO: 17010 - DNA, 513 bp, synthetic construct
  source 1..513: mol_type = other DNA
cccccccccggcactgggtgcgagccccagaaaccgacgcctactgaagtagacgtaatggccctgcgccaaaccggcgaccggccaaaaggtggtggatgggtgatgacagggttggtaggtcgtaaatcccggtcatcctggtagccactataggtgggtctaaaggggaggttatggtccctcttgcgcatatggaggaaaagcgcacggtccacaggtgttggtcctaccggtgtaataaggacccggcgctaggcacgccgttaaaccgagcccgttactcccctgggcaaacgacgctcacgtacggtccacgtcgcccttcaatgtctctcttgaccaataggcttagccggcgagttgacaaggaccagtgggggccccccctcgctgcccttcccggggaggcgggaaatgcatggggccacccagctccgcggcggcctacagccggggtagcccaagaaccttcgggtgagggcgggtggcattctttttcctataccaatc

SEQ ID NO: 17011 - DNA, 513 bp, synthetic construct
  source 1..513: mol_type = other DNA
cccccccccggcactgggtgcaagccccagaaaccgacgcctactgaagtagacgtaatggccccgcgccgaaccggcgaccggccaaaaggtggtggatgggtgatgacagggttggtaggtcgtaaatcccggtcatcctggtagccactataggtgggtcttaaggggaagcaacggtccctcttgcgcatatggagggaaagcgcacggtccacaggtgttggtcctaccggtgtaataaggacccggcgctaggcacgccgttaaaccgagcccgttactcccctgggcaaacgacgcccacgtacggtccacgtcgcccttcaatgtctctcttgaccaataggcttagccggcgagttgacaaggaccagtgggggccccccctcgctgcccttcccggggaggcgggaaatgcatggggccacccagctccgcggcggcctacagccggggtagcccaagagccttcgggtgagggcgggtggcatttctcttcctataccgatc

SEQ ID NO: 17012 - DNA, 513 bp, synthetic construct; identical to SEQ ID NO: 539
  source 1..513: mol_type = other DNA

SEQ ID NO: 17013 - DNA, 513 bp, synthetic construct
  source 1..513: mol_type = other DNA
cccccccccggcactgggtgcgagccccagaaaccggcgcctactaaagtagacgtaatggccccgcgccaaaccggcgaccggccaaaaggtggtggatgggtgatgccagggttggtaggtcgtaaatcccggtcatcttggtagccactataggtgggtcttaaggggaggtaacggtccctcttgcgtgtatggagggaaagcgcacggtccacaggtgttggtcctaccggtgtaataaggacccggcgctaggcacgccgttaaaccgagcccgttactcccctgggcaaacgacgcccacgtacggtccacgtcgcccttcaatgtctctcttgaccaataggcgtagccggcgagttgacaaggaccagtgggggccccccctcgctgcccttcccggggaggcgggaaatgcatggggccacccagctccgcggcggcctacagccggggtagcccaagagccttcgggtgagggcgggtggcatttttcttcctgaaccgatc

SEQ ID NO: 17014 - DNA, 513 bp, synthetic construct
  source 1..513: mol_type = other DNA
cccccccccggcactgggtgcgagccccagaaaccgacgcctactaaagtagacgcaatggtccagcgccaaactggcgaccggccaaaaggtggtggatgggtgatgacagggttggtaggtcgtaaatcccggtcatcctggtagccactataggtgggtcttaaagggaggctacggtccctcttgcgcttatggagggaaagcgcacggtccacaggtgttggtcctaccggtgtaataaggacccggcgctaggcacgccgttaaaccgagcccgttactcccctgggcaaacgacgcccatgtacggtccacgtcgcccttcaatgtctctcttgaccaataggcttagccggcgagttgacaaggaccagtgggggccccccctcgctgcccttcccggggaggcgggaaatgcatggggccacccagctccgcggcggcctacagccggggtagcccaagagccttcgggtgagggcgggtggcatttttcttcctgtaccgatc

SEQ ID NO: 17015 - DNA, 512 bp, synthetic construct
  source 1..512: mol_type = other DNA
cccccccccggcactgggtgcaagccccagaaaccgacgcctactgaagtagacgtaatggtccagcgccgaaccggcgaccggccaaaaggtggtggatgggtgatgacagggttggtaggtcgtaaatcccggtcatcctggtagccactataggtgggtctaaaggggaggttacggtccctcttgcgcatatggaggaaaagcgcacggtccacaggtgttggtcctaccggtgtaataaggacccggcgctaggcacgccgttaaaccgagcccgttactcccctgggcaaacgacgctcacgtacggtccacgtcgcccttcaatgtctctcttgaccaataggcttagccggcgagttgacaaggaccagtgggggcccccaccgctgcccttcccggggaggcgggaaatgcatggggccacccagctccgcggcggcctacagccggggtagcccaagagccttcgggtgagggcgggtggcatttttcttcctataccgatc

SEQ ID NO: 17016 - DNA, 512 bp, synthetic construct
  source 1..512: mol_type = other DNA
cccccccacggcactgggtgcgagccccagaaaccgacgcctactgaagtagacgtaatggccccgcgccgaaccggcgaccggccaaaaggtggtggatgggtgatgccagggttggtaggtcgtaaatcccggtcatcttggtagccactataggtgggtcttaaggagaggcaacggtccctcttgcgcatatggagggaaagcgcacggtccacaggtgttggtcctaccggtgtaataaggacccggcgctaggcacgccgttaaaccgagcccgttactcccctgggcaaacgacgcccacgtacggtccacgtcgcccttcaatgtctctcttgaccaataggtttatccggcgagttgacaaggaccagtgggggcccccgccgctgcccgttccggggaggcgggaaatgcatggggccacccagctccgcggcggcctacagccggggtagcccaagagccttcgggtgagggcgggtggcatttttcttcctgtaccgatc

SEQ ID NO: 17017 - DNA, 512 bp, synthetic construct
  source 1..512: mol_type = other DNA
cccccccccggcactgggtgcaagccccagaaaccgacgcctactgaagtagacgtaatggccctgcgccgaaccggcgaccggccaaaaggtggtggatgggtgatgacagggttggtaggtcgtaaatcccggtcatcctggtagccactataggtgggtcttaaggggaggttatggtccctcttgcgcgtatggaaggaaagcgcacggtccacaggtgttggtcctaccggtgtaataaggacccggcgctaggcacgccgttaaaccgagcccgttactcccctgggcaaacgacgcccacgtacgacccacgtcgcccttcaatgtctctcttgaccaataggctttgccggcgagttgacaagggtcagtgggggcccccaccgctgcccttcccggggaggcgggaaatgcatggggccacccagctccgcggcggcctacagccggggtagcccaagagccttcgggtgagggcgggtggcatttctcttcctgtaccgatc

SEQ ID NO: 17018 - DNA, 534 bp, synthetic construct; identical to SEQ ID NO: 571
  source 1..534: mol_type = other DNA

SEQ ID NO: 17019 - DNA, 533 bp, synthetic construct; identical to SEQ ID NO: 569
  source 1..533: mol_type = other DNA

SEQ ID NO: 17020 - DNA, 533 bp, synthetic construct
  source 1..533: mol_type = other DNA
cccccccccggcactgggtgcaagccccagaaaccgacgcctactaaagcaggcattaaggcctcgcgccgaaccggcgaccggccaaaaggtggtggatgggtgatgccagggttggtaggtcgtaaatcccggtcatcttggtagccactataggtgggtcttaaggggaggctacagtccctctattgcccgtggcgggaacgcgcacggtccacaggtgttggccctaccggtgtgaataagggcccgacgtcaggctcgtcgttaaaccgagcccgttatccccctgggcaaacgacgcccacgtacggctcacgtcgcccttcaatgtctctcttgaccaataggcttagccggcgagttggcaagagccagtgggggccgggggtgagggggatggaccccccaccctgcccttcccgggggagcgggaaatgcatggggccacccagctccgcggcggcctgcagccggggtagcccaagagccttcgggtgagggcgggtggcattttctcttctgtaccaatc

SEQ ID NO: 17021 - DNA, 529 bp, synthetic construct
  source 1..529: mol_type = other DNA
ccccccggcactgggtgcaagccccagaaaccgacgcctactgaagtagacgtgatggccccgcgccgaaccggcgaccggccaaaaggtggtggatgggtgatgccagggttggtaggtcgtaaatcccggtcatcttggtagccactataggtgggtcttaaggggaggtaacggtccctctcgcgcttatggaggaaaagcgcacggtccacaggtgttggtcctaccggtgtaataaggacccggcgctaggcacgccgttaaaccgagcccgttatccccctgggcaaacgacgcccatgtacggtccacgtcgcccttcaatgtctctcttgaccaataggcgtagccggcgagttgacaaggaccagtgggggccgggcggagggggaaggacctcctccgctgcccttcccgggggagcgggaaatgcatggggccacccagctccgcggcggcctacagccggggtagcccaagagccttcgggtgagggcgggtggcatttttctttcctgtaccgatc

SEQ ID NO: 17022 - DNA, 529 bp, synthetic construct
  source 1..529: mol_type = other DNA
ccccccggcactgggtgcgagccccagaaaccgacgcctatcaaaatagacgtgatggccccgcgccaaactggcgaccggccaaaaggtggtggatgggtgatgacagggttggtaggtcgtaaatcccggtcatcctggtagccactataggtgggtcttaaagggcggctacggtccctctcgcgcttacggagagaaagcgcacggtccacaggtgttggccctaccggtgtaataagggcccggcgctaggcacgccgttaaaccgagaccgttatccccctgggctaacgacgcccatgtacggcctacgtcgcccttcaatgtctctcttgaccaataggctttgccggcgagttgacaagggccagtgggggccgggcggcgggggaaggacctcctccgctgcccttcccgggggagcgggaaatgcatggggccacccagctccgcggcggcctacagccggggtagcccaagagccttcgggtgagggcgggtggcatttttctttcctataccgatc

SEQ ID NO: 17023 - DNA, 529 bp, synthetic construct
  source 1..529: mol_type = other DNA
ccccccggcactgggtgcaagccccagaaaccgacgcctactgaagtagacgtgatggccctgcgccgaaccggcgaccggccaaaaggtggtggatgggtgatgccagggttggtaggtcgtaaatcccggtcatcttggtagccactataggtgggtcttaaggggaggtaacggtccctctcgcgcttatggagggaaagcgcacggtccacaggtgttggtcctaccggtgtaataaggacccggcgctaggcacgccgttaaaccgagcccgttatccccctgggcaaacgacgcccacgtacggtccacgtcgcccttcaatgtctctcttgaccaataggcttagccggcgagttgacaaggaccagtgggggccgggtgagagggggagggacccccctcactgcccttcccgggggagcgggaaatgcatggggccacccagctccgcggcggcctacagccggggtagcccaagaaccttcgggtgagggcgggtggcatttttcttcctgtaccgatc

SEQ ID NO: 17024 - DNA, 528 bp, synthetic construct
  source 1..528: mol_type = other DNA
ccccccggcactgggtgcaagccccagaaaccgacgcctatcaaagtagacgtgatggccccgcgccaaactggcgaccggccaaaaggtggtggatgggtgatgacagggttggtaggtcgtaaatcccggtcatcctggtagccactataggtgggtcttaaagggaggctacggtccctctcgcgcttatggagagaaagcgcacggtccacaggtgttggccctaccggtgtaataagggcccggcgctaggcacgccgttaaaccgagaccgttatccccctgggcaaacgacgcccacgtacggcccacgtcgcccttcaatgtctctcttgaccaataggcaaagccggcgagttgacaagggccagtgggggccgggcggcaggggaaggacccctgtcgctgcccttcccgggggagcgggaaatgcatggggccacccagctccgcggcggcctacagccggggtagcccaagagccttcgggtgagggcgggtggcatttttcttcctataccaatc

SEQ ID NO: 17025 - DNA, 528 bp, synthetic construct
  source 1..528: mol_type = other DNA
ccccccggcactgggtgcaagccccagaaaccgacgcctatcaaaatagacgtgatggccccgcgccaaactggcgaccggccaaaaggtggtggatgggtgatgacagggttggtaggtcgtaaatcccggtcactctggtagccactataggtgggtcttaaagggcggctacggtccctctcgcgcttacggagagaaagcgcacggtccacaggtgttggccctaccggtgtaataagggcccggcgctaggcacgccgttaaaccgagaccgcactccccctgggcaaacgacgcccatgtacggcctacgtcgcccttcaatgtctctcttgaccaataggctttgccggcgagttgacaagggccagtgggggccgggcggcgggagaaggactccctccgctgcccatcccgggggaacgggaaatgcatggggccacccagctccgcggcggcctacagccggggtagcccaagagccttcgggtgagggcgggtggcattttctcttctgtaccaatc

SEQ ID NO: 17026 - DNA, 528 bp, synthetic construct
  source 1..528: mol_type = other DNA
ccccccggcactgggtgcaagccccagaaaccgacgcctactaaagtagacgtgatggccccgcgccgaaccggcgaccggccaaaaggtggtggatgggtgatgccagggttggtaggtcgtaaatcccggtcatcttggtagccactataggtgggtcttaaggggaggttacggtccctctcgcgcttacggagggaaagcgcacggtccacaggtgttggccctaccggtgtaataagggcccggcgataggcacgccgttaaaccgagcccgttatctccctgggcaaacgacgcccatgtacggtccacgtcgcccttcaatgtctctcttgaccaataggcttagccggcgagttgacaaggaccagtgggggccgggcaaggggggaaggaccccccttgctgcccttcccgggggagcggggaatgcatggggccacccagctccgcggcggcctacagccggggtagcccaagagccttcgggtgagggcgggtggcatttatctttcctgtatgatc

SEQ ID NO: 17027 - DNA, 531 bp, synthetic construct
  source 1..531: mol_type = other DNA
ccccccccggcactgggtgcaagccccagaaaccgacgcctatctaagcaggcgttatggcctcgcgccaaaccggcgaccggccaaaaggtggtggatgggtgatgccagggttggtaggtcgtaaatcccggtcatcttggtagccactataggtgggtcttaaggggaggctacagtccctctaatgcccgtggcgagaacgcgcacggtccacaggtgttggtcctaccggtgtaataaggacccgacgccaggctcgtcgttaaaccgagcccattatccccctgggcaaacgacgcccacgtacggtctacgtcgcccttcaatgtctctcttgaccaataggcgtgagccggcgagttgacaaagaccagtgggggccgggggtgtggggaaggaccccgcatcctgcccttcccgggggagtgggaaatgcatggggccacccagctccgcggcggcctgcagccggggtagcccaagagccttcgggtgagggcgggtggcattttctttcctataccgatc

SEQ ID NO: 17028 - DNA, 528 bp, synthetic construct
  source 1..528: mol_type = other DNA
ccccccggcactgggtgcaagccccagaaaccgacgcctatcaaagtagacgtgatggccccgcgccaaactggcgaccggccaaaaggtggtggatgggtgatgacagggttggtaggtcgtaaatcccggtcatcctggtagccactataggtgggtcttaaagggaggctacggtccctctcgcgcttatggagagaaagcgcacggtccacaggtgttggccctaccggtgtaataagggcccggcgctaggcacgccgttaaaccgagaccattatccccctgggcaaacgacgcccatgtacggtccacgtcgcccttcaatgtctctcttgaccaataggctatgccggcgagttgacaagggccagtgggggccgggcggtgggggaaggacctccaccgctgcccttcccgggggagtgggaaatgcatggggccacccagctccgcggcggcctacagccggggtagcccaagagccttcgggtgagggcgggtggcattttctttcctataccaatc

SEQ ID NO: 17029 - DNA, 529 bp, synthetic construct
  source 1..529: mol_type = other DNA
ccccccggcactgggtgcgagccccagaaaccgacgcctatcaaagtagacgtgatggccctgcgccaaactggcgaccggccaaaaggtggtggatgggtgatgacagggttggtaggtcgtaaatcccggtcatcctggtagccactataggtgggtcttaaagggaggtaatggtccctctcgcgcttatggagagaaagcgcacggtccacaggtgttggtcctaccggtgtaataaggacccggcgctaggcacgccgttaaaccgagaccgctatccccctgggcaaacgacgcccacgtacggcctacgtcgcccttcaatgtctctcttgaccaataggcctagccggcgagttggcaagggccagtgggggccgggcaccaagggagggacccttggtgctgcccatcccgggggaaacgggaaatgcatggggccacccagctccgcggcggcctacagccggggtagcccaagaaccttcgggtgagggcgggtggcattttctttcctataccaatc

SEQ ID NO: 17030 - DNA, 427 bp, synthetic construct; identical to SEQ ID NO: 469
  source 1..427: mol_type = other DNA

SEQ ID NO: 17031 - DNA, 427 bp, synthetic construct
  source 1..427: mol_type = other DNA
ctggacgaaagcccgtggacgggcggtgacagggttggcaggtcgtaaatcccggccgccctggtagcgggtataagtctggaggaaacccgtgaaccgacagcgtgacgctctgctagcgaacgtgcacggtccacaggagacgccgattccggtgtgaataatcggccgactcgagcggagtcgttaaactgaggaccattgaggagatggaaacctggcttgcgtacgggaacgccgctaaagtcacagtgggttaagtccggcgggttgacaatcccagcaaggcggggggacgttattgttacgcccttccagttcctcctctttggtaggcatggggggacccagctccgcggcgcgctacagccggggtagcccaaaatccttcgggtgagggcgggtcccatgtccctctttttcaggc

SEQ ID NO: 17032 - DNA, 529 bp, synthetic construct; identical to SEQ ID NO: 556
  source 1..529: mol_type = other DNA

SEQ ID NO: 17033 - DNA, 423 bp, synthetic construct; identical to SEQ ID NO: 463
  source 1..423: mol_type = other DNA

SEQ ID NO: 17034 - DNA, 498 bp, synthetic construct
  source 1..498: mol_type = other DNA
gcttcggcgcctagccgaaaccgacaccctgttcgaaatctttccgaaacatagagcggttgtggggaaactggacgaaagccagcggatggggggtgacagggtaggcaggtcgtaaatcccggcctccctggtacctggtataagtctggtggaaccatagcttaactgtgtggactttggacgtaggcagagtgcacggtccacaggtgacgcctataccggtgtgaataataggccgactcgagcggagtcgttaaactgaggacccattctaggatcacaacttggctgccgtacggtgacgccgctaaagtcacagtgggttaagtccggcgggttgacaacaccaggcaggcggggggacgctactgttgcgccctgtgagttccctagttgggtaggcatgggggggcccagctccgcggcgcgctacagccggggtaggccaaaaatccgaaaggtgaggccgggtcccatcttctttctttgagtctc

SEQ ID NO: 17035 - DNA, 387 bp, synthetic construct; identical to SEQ ID NO: 413
  source 1..387: mol_type = other DNA

SEQ ID NO: 17036 - DNA, 389 bp, synthetic construct; identical to SEQ ID NO: 423
  source 1..389: mol_type = other DNA

SEQ ID NO: 17037 - DNA, 387 bp, synthetic construct
  source 1..387: mol_type = other DNA
tagccactataggtgggtcttaagggtgggtcaaggcacctcttactcctgcggcgggacagcgcacggtccacaggtgttggccctaccggtgtgaataagggcccgacgtcaggctcgtcgttaaaccgagcccactacccacctgggcaaacgacgcccacgtacggtccacgtcgcccttcaatgtctctcttggccaataggctttgccggcgagttgacaaagaccaatgggggccgggcacagggggaaggacccctgtgctgcccttcccggtggggtgggaaatgcatggggccacccagctccgcggcggcctgcagccggggtagcccaagaaccttcgggtgagggcgggtggcattcttctttcctgactaatc

SEQ ID NO: 17038 - DNA, 388 bp, synthetic construct; identical to SEQ ID NO: 420
  source 1..388: mol_type = other DNA

SEQ ID NO: 17039 - DNA, 518 bp, synthetic construct
  source 1..518: mol_type = other DNA
actgggtgcaagccccagaaaccgacgcctatctaagtagacgcaatgactcggcgccgacccggcgaccggccaaaaggtggtggatgggtgatgccagggttggtaggtcgtaaatcccggtcatcttggtagccactataggtgggtcttaagggaaggttaagattcctcttgtgcctgttgcgagacagcgcacggtccacaggtgttggccctaccggtgtgaataagggcccgacgtcaggctcgtcgttaaaccgagaccgacaccacctgggcaaacgacgcccacgtacggtccacgtcgcccttcaatgtctctcttgaccaataggctttgccgcgagttgacaaggaccagtgggggccgggggcggggggaaggaccctccgtcctgcccttcccggtgggacgggaaatgcatggggccacccagctccgcggcggcctgcagccggggtagcccaagagccttcgggtgagggcgggtggcattttctcttctataccgatc

SEQ ID NO: 17040 - DNA, 423 bp, synthetic construct; identical to SEQ ID NO: 464
  source 1..423: mol_type = other DNA

SEQ ID NO: 17041 - DNA, 290 bp, synthetic construct
  source 1..290: mol_type = other DNA
ataggtgggtcttaagagaaggttaagattcctcttgtgcctgcggcgagaccgcgcacggtccacaggtgttggccctaccggtgtaataagggcccgacgtcaggctcgtcgttaaaccgagcccgtcacccacctgggcgaacgacgcccacgtacggtccacgtcgcccttcaaagcctctcttggacaataggatctcatccggcgagttggcaaggaccagtgggggccgggggtcacagggaaggaccctggaccctgcccttcccggtgggccgggaaatgc

SEQ ID NO: 17042 - DNA, 531 bp, synthetic construct; identical to SEQ ID NO: 564
  source 1..531: mol_type = other DNA

SEQ ID NO: 17043 - DNA, 461 bp, synthetic construct
  source 1..461: mol_type = other DNA
attcttgatcatagagtggatgttagtgaaagccagacgaaagccggcggatgggtggtgacagggttggtaggtcgtaaatcccggccaccctggtacccggtataagttgggcggaagctgactgaagctccgtgctcttttctgtgcgttcttggtgcacggtccacaggtgacgcctataccggtgtgaataataggccgactcgagcggagtcgttaaactgagaacctccatacggatggcaacttggcttgcgtacggggacgccgctaaagtcacagtgggttaagtccggcgggttgacaaccccagcaaggcgagggggtcctattgttggactctgccagttcccggtggaggtaggcatggggtggcccagctccgcggcgcgctacagccggggtagcccaaaatccgaaaggtgagggcgggccacatgtccgaaatttagtcaagc

SEQ ID NO: 17044 - DNA, 402 bp, synthetic construct; identical to SEQ ID NO: 438
  source 1..402: mol_type = other DNA

SEQ ID NO: 17045 - DNA, 501 bp, synthetic construct; identical to SEQ ID NO: 528
  source 1..501: mol_type = other DNA

SEQ ID NO: 17046 - DNA, 527 bp, synthetic construct; identical to SEQ ID NO: 552
  source 1..527: mol_type = other DNA

SEQ ID NO: 17047 - DNA, 450 bp, synthetic construct; identical to SEQ ID NO: 492
  source 1..450: mol_type = other DNA

SEQ ID NO: 17048 - DNA, 450 bp, synthetic construct
  source 1..450: mol_type = other DNA
acatagagcggttgtggggaaactggacgaaagccagcggatggggggtgacagggtaggcaggtcgtaaatcccggcctccctggtacctggtataagtctggtggaaccatagcttaactgtgtggactttggacgtaggcagagtgcacggtccacaggtgacgcctataccggtgtgaataataggccgactcgagcggagtcgttaaactgaggacccattctaggatcacaacttggctgccgtacggtgacgccgctaaagtcacagtgggttaagtccggcgggttgacaacaccaggcaggcggggggacgctactgttgcgccctgtgagttccctagttgggtaggcatggggggacccagctccgcggcgcgctacagccggggtaggccaaaaatccgaaaggtgaggccgggtcccatttctctttcttgagtctc

SEQ ID NO: 17049 - DNA, 367 bp, synthetic construct
  source 1..367: mol_type = other DNA
ggcacggtccacaggtgttggatgggtgatgccagggttggtaggtcgtaaatcccggtcatcatcttggtagccactataggtgggtcttaagcgttggtcaagatccctcttgtgcttgcggcgagaaagcgcacggtccacaggtgttggccctaccggtgggaataagggcccgacgtcaggctcgtcgttaaaccgagcccgtaacccgcctgggcaaacgacgcccacgtacggtccacgtcgcccttcaatgtcgctcttgaccaataggcttagccggcgagttgacaaggaccagtgggggccggggtttttggggaaggaccccaaaccctgcccttcccggcggaccgggaaatgc

SEQ ID NO: 17050 - DNA, 468 bp, synthetic construct
  source 1..468: mol_type = other DNA
gttcgaaatctttccgaaacatagagcggttgtggggaaactggacgaaagccagcggatggggggtgacagggtaggcaggtcgtaaatcccggcctccctggtacctggtataagtctggtggaaccatagcttaactgtgtggactttggacgtaggcagagtgcacggtccacaggtgacgcctataccggtgtgaataataggccgactcgagcggagtcgttaaactgaggacccattctaggatcacaacttggctgccgtacggtgacgccgctaaagtcacagtgggttaagtccggcgggttgacaacaccaggcaggcggggggacgctactgttgcgccctgtgagttccctagttgggtaggcatggggggacccagctccgcggcgcgctacagccggggtaggccaaaaatccgaaaggtgaggccgggtcccattttctttctttgagtctc

SEQ ID NO: 17051 - DNA, 375 bp, synthetic construct
  source 1..375: mol_type = other DNA
tgggtcttaaggggaggtaacggtccctctcgcgcttgtggagagaaagcgcacggtccacaggtgttggtcctaccggtgtgaataaggacccggcgttaggcacgccgttaaaccgagcccgtcatccccctgggcaaacgacgcccacgtacggcctacgtcgcccttcaatgtctctcttgaccaataggcttagccggcgagttgacaagggccagtgggggccgggcgtagggggaaggaccccctgcgctgcccttcccgggggagcgggaaatgcatggggccacccagctccgcggcggcctacagccggggtagcccaagagccttcgggtgagggcgggtggcattttcctttcctaaccgatc

SEQ ID NO: 17052 - DNA, 275 bp, synthetic construct
  source 1..275: mol_type = other DNA
caatgactcggcgccgactcggcgaccggccaaaaggtggtggatgggtgatgacagggttggtaggtcgtaaatcccggtcaccttggtagccactataggtgggtcttaagagaaggttaagattcctcttgtgcctgcggcgagaccgcgcacggtccacaggtgttggccctaccggtgggaataagggcccgacgtcaggctcgtcgttaaaccgagcccgtaacccgcctgggcaaacgacgcccacgtacggtccacgtcgcccttca

SEQ ID NO: 17053 - DNA, 427 bp, synthetic construct; identical to SEQ ID NO: 470
  source 1..427: mol_type = other DNA

SEQ ID NO: 17054 - DNA, 427 bp, synthetic construct
  source 1..427: mol_type = other DNA
tggacgaaagcccgtggatggacggtgacagggttggcaggtcgtaaatcccggccgccctggtagcgggtataagtctgagggaaacccactagaggcttacgtgtacttgtccgcgtggacgtgcacggtccacaggagacgcctattccggtgtgaataataggccgactcgagcggagtcgttaaactgaggaccatttgtaagatggcaacctggcctgcgtacgggaacgccgctaaagaatacagtgggttaagtccggcgggttggcaatcccagcagggcggggggactctattgttgagccctgccagttccttacaattggtaggcatggggggacccagctccgcggcgcgctacagccggggtagtccaaaatccttcgggtgaggacgggtcccatgtccctttttatggctc

SEQ ID NO: 17055 - DNA, 427 bp, synthetic construct
  source 1..427: mol_type = other DNA
tggacgaaagcccgtggatggacggtgacagggttggcaggtcgtaaatcccggccgccctggtagcgggtataagtctgagggaaacccactagaggcttacgtgtacttgtccgcgtggacgtgcacggtccacaggagacgcctattccggtgtgaataataggccgactcgagcggagtcgttaaactgaggaccatttgtaagatggcaacttggcctgcgtacgggaacgccgctaaagaatacagtgggttaagtccggcgggttggcaatcccagcagggcggggggactctattgttgagccctgccagttccttacaagtggtaggcatggggggacccagctccgcggcgcgctacagccggggtagtccaaaatccttcgggtgaggacgggtcccatgtccctttttatggctc

SEQ ID NO: 17056 - DNA, 427 bp, synthetic construct
  source 1..427: mol_type = other DNA
tggacgaaagcccgtggatggacggtgacagggttggcaggtcgtaaatcccggccgccctggtagcgggtataagtctgagggaaacccactagaggcttacgtgtacttgtccgcgtggacgtgcacggtccacaggagacgcctattccggtgtgaataataggccgactcgagcggagtcgttaaactgaggaccatttgtaagatggcaacttggcctgcgtacgggaacgccgctaaagaacacagtgggttaagtccggcgggttggcaatcccagcagggcggggggactctattgttgagccctgccagttccttacaagtggtaggcatggggggacccagctccgcggcgcgctacagccggggtagtccaaaatccttcgggtgaggacgggtcccatgtccctttttatggctc

SEQ ID NO: 17057 - DNA, 427 bp, synthetic construct
  source 1..427: mol_type = other DNA
tggacgaaagcccgtggatggacggtgacagggttggcaggtcgtaaatcccggccgccctggtagcgggtataagtctgagggaaacccactagaggcttacgtgtatttgtccgcgtggacgtgcacggtccacaggagacgcctattccggtgagaataataggccgactcgagcggagtcgttaaactgaggaccatttgtaagatggcaacttggcctgcgtacgggaacgccgctaaagaatacagtgggttaagtccggcgggttggcaatcccagcagggcggggggactctattgttgagccctgccagttccttacaagtggtaggcatggggggacccagctccgcggcgcgctacagccggggtagtccaaaatccttcgggtgaggacgggtcccatgtccctttttatggctc

SEQ ID NO: 17058 - DNA, 427 bp, synthetic construct
  source 1..427: mol_type = other DNA
tggacgaaagcccgtggatggacggtgacagggttggcaggtcgtaaatcccggccgccctggtagcgggtataagtctgagggaaacccactagaggcttacgtgtatttgtccgcgtggacgtgcacggtccacaggagacgcctattccggtgtgaataataggccgactcgagcggagtcgttaaactgaggaccatttgtaagatggcaacctggcctgcgtacgggaacgccgctaaagaatacagtgggttaagtccggcgggttggcaatcccagcagggcggggggactctattgttgagccctgccagttccttacaagtggtaggcatggggggacccagctccgcggcgcgctacagccggggtagtccaaaatccttcgggtgaggacgggtcccatgtccctttttatggctc

SEQ ID NO: 17059 - DNA, 427 bp, synthetic construct
  source 1..427: mol_type = other DNA
tggacgaaagcccgtggatggacggtgacagggttggcaggtcgtaaatcccggccgccctggtagcgggtataagtctgagggaaacccactagaggcttacgtgtatttgtccgcgtggacgtgcacggtccacaggagacgcctattccggtgtgaataataggccgactcgagcggagtcgttaaactgaggaccgcctgtgagatggtaacttggcctgcgtacgggaacgccgctaaagaatacagtgggttaagtccggcgggttgacaatcccagcagggcgggggggctctactgttgagtcctgccagttcctcacaggtggtaggcatggggggacccagctccgcggcgcgctacagccggggtagtccaaaatccttcgggtgaggacgggtcccatgtccctttttttggctc

SEQ ID NO: 17060 - DNA, 427 bp, synthetic construct
  source 1..427: mol_type = other DNA
tggacgaaagcccgtggatggacggtgacagggttggcaggtcgtaaatcccggccgccctggtagcgggtataagtctgagggaaacccactagaggcttacgtgtacttgtccgcgtggacgtgcacggtccacaggagacgcctattccggtgtgaataataggccgactcgagcggagtcgttaaactgaggaccgcctgtaagatggtaacttggcctgcgtacgggaacgccgctaaagaatacagtgggttaagtccggcgggttggcaatcccagcagggcgggggggctctaatgttgagtcctgccagttccttacaggtggtaggcatggggggacccagctccgcggcgcgctacagccggggtagtccaaaatccttcgggtgaggacgggtcccatgtccctttttgatgctc

SEQ ID NO: 17061 - DNA, 427 bp, synthetic construct
  source 1..427: mol_type = other DNA
tggacgaaagcccgtggatggacggtgacagggttggcaggtcgtaaatcccggccgccctggtagcgggtataagtctgagggaaacccactagaggcttacgtgtacttgtccgcgtggacgtgcacggtccacaggagacgcctattccggtgtgaataataggccgactcgagcggagtcgttaaactgaggaccgcctgtaagatggtaacttggcctgcgtacgggaacgccgctaaagaatacagtgggttaagtccggcgggttggcaatcccagcagggcgggggggctctactgttgagtcctgccagttccttacaggtggtaggcatggggggacccagctccgcggcgcgctacagccggggtagtccaaaatccttcgggtgaggacgggtcccatgtcccttttttatgctc

SEQ ID NO: 17062 - DNA, 427 bp, synthetic construct
  source 1..427: mol_type = other DNA
tggacgaaagcccgtggatggacggtgacagggttggcaggtcgtaaatcccggccgccctggtagcgggtataagtctgagggaaacccacgagaggcttacgtgtttttgtccgagtggacgtgcacggtccacaggagacgcctattccggtgtgaataataggccgactcgagcggagtcgttaaactgaggaccgcctgtaagatggcaacttggcctgcgtacgggaacgccgctaaagaatacagtgggttaagtccggcgggttggcaattccagcagggcgggggggccctattgttgggctctgccagttccttacaggtggtaggcatggggggacccagctccgcggcgcgctacagccggggtagcccaaaatccttcgggtgagggcgggtcccatgtccctttttatggctc

SEQ ID NO: 17063 - DNA, 534 bp, synthetic construct
  source 1..534: mol_type = other DNA
acccccccccggcactgggtgcaagccccagaaaccgacgcctatctaagtagacgcaatgactcggcgccgactcggcgaccggccaaaaggtggtggatgggtgatgacagggttggtaggtcgtaaatcccggtcaccttggtagccactataggtgggtcttaagagaaggttaagattcctcttgtgcctgcggcgagaccgcgcacggtccacaggtgttggccctaccggtgtgaataagggcccgacgtcaggctcgtcgttaaaccgagcccattacccacctgggcaaacgacgcccacgtacggtccacgtcgcccttcaatgtctctcttgaccaataggctagtccggcgagttgacaaggaccagtgggggccgggggtcacagggaaggaccctggaccctgcccttcccggtggggtgggaaatgcatggggccacccagctccgcggcggcctgcagccggggtagcccaagagccttcgggtgagggcgggtggcatttttcttcctgtaccgatc

SEQ ID NO: 17064 - DNA, 524 bp, synthetic construct
  source 1..524: mol_type = other DNA
ggcactgggtgcaagccccagaaaccgacgcctatctaagtagacgcaatgactcggcgccgactcggcgaccggccaaaaggtggtggatgggtgatgacagggttggtaggtcgtaaatcccggtcaccttggtagccactataggtgggtcttaagagaaggttaagaatcctcttgtgcctgcggcgagaccgcgcacggtccacaggtgttggccctaccggtgtgaataagggcccgacgtcaggctcgtcgttaaaccgagcccattacccacctgggcaaacgacgcccacgtacggtccacgtcgcccttcaatgtctctcttgaccaataggctaagccggcgagttgacaaggaccagtgggggccgggggtcacagggatggaccctggaccctgcccttcccggtggggtgggaaatgcatggggccacccagctccgcggcggcctgcagccggggtagcccaagagccttcgggtgagggcgggtggcatttctcttcttgtaccaatc

SEQ ID NO: 17065 - DNA, 521 bp, synthetic construct
  source 1..521: mol_type = other DNA
tcactgggtgcaagccccagaaaccgacgcctatcaaaatagacgtgatggccccgcgccgaactggcgaccggccaaaaggtggtggatgggtgatgacagggttggtaggtcgtaaatcccggtcatcctggtagccactataggtgggtcttaaagggaggctacggtccctctcgcgcttacggagagaaagcgcacggtccacaggtgttggccctaccggtgtaataagggcccggcgctaggcacgccgttaaaccgagaccgttatccccctgggcaaacgacgcccatgtacggcctacgtcgcccttcaatgtctctcttgaccaataggctttgccggcgagttgacaagggccagtgggggccgggcggcgggggaaggacctccgccgctgcccttcccgggggagcgggaaatgcatggggccacccagctccgcggcggcctacagccggggtagcccaagaaccttcgggtgagggcgggtggcattttctttcctataccgatc

SEQ ID NO: 17066 - DNA, 413 bp, synthetic construct
  source 1..413: mol_type = other DNA
cagaaaccgacgcctatctaagtagacgcaatgactcggcgccgactcggcgaccggccaaaaggtggtggatgggtgatgacagggttggtaggtcgtaaatcccggtcaccttggtagccactataggtgggtcttaagagaaggttaagattcctcttgtgcctgcggcgaaaccgcgcacggtccgcaggtgttggccctaccggtgtaaataagggcccgacgtcaggctcgtcgttaaaccgagcccgttacccacctgggcaaacgacgcccacgtacggtccacgtcgcccttcaatgtctctcttgaccaataggcttagccggcgagttgacaaggaccagtgggggccgggggcttggagagggaccccaagtcccgccccccccggtgggccgggaaatgc

SEQ ID NO: 17067 - DNA, 432 bp, synthetic construct; identical to SEQ ID NO: 477
  source 1..432: mol_type = other DNA

SEQ ID NO: 17068 - DNA, 359 bp, synthetic construct; identical to SEQ ID NO: 338
  source 1..359: mol_type = other DNA

SEQ ID NO: 17069 - DNA, 423 bp, synthetic construct
  source 1..423: mol_type = other DNA
agggttggtaggtcgtaaatcccggtcatcctggtagccactataggtgggtcttaagagaaggttaagattcctcttgtgcctgcggcgagaccgcgcacggtccacaggtgctggccttaccggtgtgaataaaggcccgacgtcaggctcgtcgttaaaccgagcccgttacccacctgggcaaacgacgcccacgtacggtccacgtcgcccttcaatgcctctcttggccaataggtttatccggcgagttgacaaggaccagtgggggccggggccttggagatggactccaagtcctgcccttcccggtgggccgggaaatgcatggggccacccagctccgcggcggcctgcagccggggtagcccaagaatccttcgggtgagggcgggtggcatttctcttttctataccatc

SEQ ID NO: 17070 - DNA, 376 bp, synthetic construct
  source 1..376: mol_type = other DNA
tgggtcttaagggaaggttaagattcctcttgtgcctgtggcgagacagcgcacggtccacaggtgttggccctaccggtgtgaataagggcccgacgtcaggctcgtcgttaaaccgagcccgttacccacctgggcaaacgacgcccacgtacggtccacgtcgcccttcaatgtctctcttgaccaataggcttagccggcgagttgacaaggaccagtgggggccggaggcggggggaaggaccccccgacctcgcccatcccggtggaacgggaaaagcatggggccacccagctccgcggcggcctgcagccggggtagcccaagagccttcgggtgagggcgggtggcatttcttttccttgactaatc

SEQ ID NO: 17071 - DNA, 400 bp, synthetic construct; identical to SEQ ID NO: 436
  source 1..400: mol_type = other DNA

SEQ ID NO: 17072 - DNA, 328 bp, synthetic construct
  source 1..328: mol_type = other DNA
agcgcacggtccacaggtgttggtcctaccggtgtaataaggacccggcgctaggcacgccgttaaaccgagcccgttactcccctgggcaaacgacgcccacgtacggtccacgtcgcccttcaatgtctctcttgaccaataggcttagccggcgagttgacaaggaccagtgggggccgggcggatgggggaaggacccccaccgctgcccttcccggggaggcgggaaatgcatggggccacccagctccgcggcggcctacagccggggtagcccaagagccttcgggtgagggcgggtggcatttctcttcctataccaatc

SEQ ID NO: 17073 - DNA, 425 bp, synthetic construct
  source 1..425: mol_type = other DNA
cagggttggtaggtcgtaaatcccggtcaccttggtagccactataggtgggtcttaagagaaggttaagattcctctcgtgcctgcggcgagaccgcgcacggtccacaggtgttggccctaccggtgtgaataagggcccgacgttaggctcgtcgttaaaccgagcccgttaaccacctgggcaaacgacgcccacgtacggtccacgtcgcccttcaatgcctctcttggccaataggtttatccggcgagttggcaaggaccagtgggggccgggggtcatggagatggactccagaccctgcccttcccggtgggacgggaaatgcatggggccacccagctccgcggcggcctacagccggggtagcccaagaatccttcgggtgagggcgggtggcatttttcttttctataccatc

SEQ ID NO: 17074 - DNA, 427 bp, synthetic construct; identical to SEQ ID NO: 471
  source 1..427: mol_type = other DNA

SEQ ID NO: 17075 - DNA, 390 bp, synthetic construct
  source 1..390: mol_type = other DNA
ggtagccactataggtgggtcttaagggttggtcaaggtccctctggcgcttgtggcgagaaagcgcacggtccacaggtgttggccctaccggtgtgaataagggcccgacgtcaggctcgtcgttaaactgagcccattacccacctgggcaaacaacgcccacgtacggtccacgtcgccctacaatgtctctcttgaccaataggctttgccggcgagttgacaaggaccagtgggggctgggcggcaggggagggacccctgtcgctgcccttcccggtggggtgggaaatgcatggggccacccagctccgcggcggcctgcagccggggtagcccaagagccttcgggtgagggcggttggcatttttcttcctataccgatc

SEQ ID NO: 17076 - DNA, 390 bp, synthetic construct
  source 1..390: mol_type = other DNA
ggtagccactataggtgggtcttaagggttggtcaaggtccctctggcgcttgtggcgagaaagcgcacggtccacaggtgatggccctaccggtgtgaataagggcccgacgtcaggctcgtcgttaaaccgagcccattacccacctgggcaaacaacgcccacgtacggtccacgtcgccctacaatgtctctcttgaccaataggctttgccggcgagttgacaaggaccagtgggggctgggcggtaggggagggacccctgccgctgcccttcccggtggggtgggaaatgcatggggccacccagctccgcggcggcctgcagccggggtagcccaagagccttcgggtgagggcgggtggcatttctttccttataccgatc

SEQ ID NO: 17077 - DNA, 296 bp, synthetic construct
  source 1..296: mol_type = other DNA
tagccactataggtgggtcttaagggttggttaaggtccctctggcgcttgtggcgagaaagcgcacggttcacaggtgatggccctaccggtgtgaataagggcccgacgtcaggctcgtcgttaaaccgagcccattacccacctgggcaaacgacgcccacgtacggtccacgtcgcccttcaatgtctctcttgaccaataggcttagccggcgagttgacaaggaccactgggggccgggcggcaggggaaggacctctgtctctgcccttcccggtggggtgggaaatgc

SEQ ID NO: 17078 - DNA, 266 bp, synthetic construct
  source 1..266: mol_type = other DNA
ttaaaccgagcccgttacccacctgggcaaacgacgcccacgtacggtccacgtcgcccttcaatgcctctcttggccaataggtttatccggcgagttgacaaggaccagtgggggccggggccttggagatggactccaagtcctgcccttcccggtgggccgggaaatgcatggggccacccagctccgcggcggcctgcagccggggtagcccaagaatccttcgggtgagggcgggtggcatttctcttttctataccatc

SEQ ID NO: 17079 - DNA, 266 bp, synthetic construct
  source 1..266: mol_type = other DNA
ttaaaccgagcccatttcccacctgggcaaacgacgcccacgtacggtccacgtcgcccttcaatgtctctcttgaccaataggctttgccggcgagttgacaaggaccagtgggggccgggcagcaggggaaggacccctgttgtcgcccttcccggtggggatgggaaatgcatggggccacccagctccgcggcggcctgcagccggggtagcccaagaaccttcgggtgagggcgggtggcatttttcttcctataccgatc

SEQ ID NO: 17080 - DNA, 510 bp, synthetic construct; identical to SEQ ID NO: 534
  source 1..510: mol_type = other DNA

SEQ ID NO: 17081 - DNA, 333 bp, synthetic construct; identical to SEQ ID NO: 318
  source 1..333: mol_type = other DNA

SEQ ID NO: 17082 - DNA, 384 bp, synthetic construct; identical to SEQ ID NO: 396
  source 1..384: mol_type = other DNA

SEQ ID NO: 17083 - DNA, 387 bp, synthetic construct; identical to SEQ ID NO: 414
  source 1..387: mol_type = other DNA

SEQ ID NO: 17084 - DNA, 387 bp, synthetic construct
  source 1..387: mol_type = other DNA
tgtatacgagagttagacaaaatgctcgtatacacattgggcaaactaaataataataattgggcctagggtactaatccccctctgcgaaggccgaagagaggctagccatgcccttagtaggactagcataatgaggggggtagcaacagtggtgagttcgctggatggcttaagccctgagtacagggtagtcgtcagtggttcgacgccttagtataaaggtctcgagatgccacgtggacgagggcacgcccaaagcacatcttaacctgagcgggggtcgctcaggcgaaagcagtttaaccaactgttacgaatacagcctgatagggtgctgcagaggcccactgtactgctactaaaaatctctgctgtacatggcac

SEQ ID NO: 17085 - DNA, 426 bp, synthetic construct; identical to SEQ ID NO: 8
  source 1..426: mol_type = other DNA

SEQ ID NO: 17086 - DNA, 386 bp, synthetic construct
  source 1..386: mol_type = other DNA
gtatacgagagttagacaaaatgcttgtatacacattgggcaaactaaataataataattgggcctagggtactaatccccctctgcgaaggccgaagagaggctagccatgcccttagtaggactagcataatgaggggggtagcaacagtggtgagttcgttggatggcttaagccctgagtacagggtagtcgtcagtggttcgacgccttagtataaaggtctcgagatgccacgtggacgagggcacgcccaaagcacatcttaacctgagcgggggtcgctcaggcgaaagcagtttaaccaactgttacgaatacagcctgatagggtgctgcagaggcccactgtactgctactaaaaatctctgctgtacatggcac

SEQ ID NO: 17087 - DNA, 386 bp, synthetic construct
  source 1..386: mol_type = other DNA
gtatacgagagttagacaaaatgctcgtatacacattgggcaaactaaataataataattgggcctagggtactaatccccctctgcgaaggccgaagagaggctagccatgcccttagtaggactagcataatgaggggggtagcaacagtggtgagttcgttggatggcttaagccctgagtacagggtagtcgtcagtggttcgacgccttagtataaaggtctcgagatgccacgtggacgagggcacgcccaaagcacatcttaacctgagcgggggtcgctcaggcgaaagcagtttaaccaactgttacgaatacagcctgatagggtgctgcagaggcccactgtactgctactaaaaatctctgctgtacatggcac

SEQ ID NO: 17088 - DNA, 498 bp, synthetic construct; identical to SEQ ID NO: 526
  source 1..498: mol_type = other DNA

SEQ ID NO: 17089 - DNA, 385 bp, synthetic construct
  source 1..385: mol_type = other DNA
gtatacgagaattagaaaaggcactcgtatacgtattgggcaattaaaaataataattaggcctagggaacaaatccctctcagcgaaggccgaaaagaggctagccatgcccttagtaggactagcataatgaggggggtagcaacagtggtgagttcgttggatggcttaagccctgagtacagggtagtcgtcagtggttcgacgccttggaataaaggtctcgagatgccacgtggacgagggcatgcccaaagcacatcttaacctgagcgggggtcgcccaggtaaaagcagttttaaccgactgttacgaatacagcctgatagggtgctgcagaggcccactgtattgctactaaaaatctctgctgtacatggcac

SEQ ID NO: 17090 - DNA, 373 bp, synthetic construct; identical to SEQ ID NO: 357
  source 1..373: mol_type = other DNA

SEQ ID NO: 17091 - DNA, 399 bp, synthetic construct; identical to SEQ ID NO: 434
  source 1..399: mol_type = other DNA

SEQ ID NO: 17092 - DNA, 386 bp, synthetic construct; identical to SEQ ID NO: 405
  source 1..386: mol_type = other DNA

SEQ ID NO: 17093 - DNA, 356 bp, synthetic construct
  source 1..356: mol_type = other DNA
ggattggatgtcggcaaaaatattgtattgaaaatgtagggaatcttcccctcagcgaaggccgaaaagaggctagccatgcccttagtaggactagcaaaagtaggggactagcggtagcagtgagttcattggatggccgaacccctgagtacaggggagtcgtcaatggttcgacactccattggttgaggagtctcgagatgccatgtggacgagggcatgcccacggcacatcttaacctatgcgggggctgcatgggtgaaagcgccattcgtggcgttatggacacagcctgatagggtgtagcagagacctgctattccgctagtaaaaactctgctgtacatggcac

SEQ ID NO: 17094 - DNA, 379 bp, synthetic construct; identical to SEQ ID NO: 382
  source 1..379: mol_type = other DNA

SEQ ID NO: 17095 - DNA, 371 bp, synthetic construct
  source 1..371: mol_type = other DNA
aaagtactcgtatacggattggacgttgacaaaatattgaattgaaaatgtagggaatcttcccctcagcgaaggccgaaaagaggctaaccacgcccttagtaggactagcaaaaggaggggactagcggtagcagtgagttcattggatggccgaacccctgagtacaggggagtcgtcaatggttcgacactccttcagttgaggagtctcgagatgccatgtggacgagggcatgcccacggcacatcttaacccatgcgggggctgcatgggtgaaagcgccattcgtggcgttatggacacagcctgatagggtgtagcagagacctgctatcccgctagtaaaaaactctgctgtacatggcac

SEQ ID NO: 17096 - DNA, 365 bp, synthetic construct
  source 1..365: mol_type = other DNA
ctcgtatacagattgggtgttggcaaacagttaattagtgaagtagggaaccttcccccctctgcgaaggccgaaaagaggctaaccatgcccttagtaggactagcaaaaagagggggctagcggtagcagtgagtttattggatggccgaatccctgagtacagggaagtcgtcaatggttcgacactctggtaatataagagtctcgagatgccatgtggacgagggcatgcccacggcacatcttaacctatgcgggggttgcatgggtgaaagcaccatttacggtgttataaacacagcctgatagggtgtagcagagacctgctatcccgctagtaaaaactctgctgtacatggcac

SEQ ID NO: 17097 - DNA, 367 bp, synthetic construct
  source 1..367: mol_type = other DNA
cgttatgcatcattggccataacaaattatctaatttggaatagggacctgcgacctgtacgaaggccgagcgtcggcagccattccgactagtaggactagtacaaataggtcaactggttgagcaggtgagtgtgctgcagcggctaagcggtgagtacaccgtattcgtcaacaggtgctactggaaaggatcacccactagcgatgcctgtgtggacgaggacatgtccaagccaatgttatcagtagcgggggtcgttactgagaaagctgcccagattgggtggttgcacatacagtctgataggatgccggcggatgccctgtattttgaccagtataaatattatccgttgtaaagcat

SEQ ID NO: 17098 - DNA, 356 bp, synthetic construct
  source 1..356: mol_type = other DNA
ggattggatgtcggcaaaaatattgaattgaaaatgtagggaatcttcccctcagcgaaggccgaaaagaggctagccatgcccttagtaggactagcaaaaggaggggactagcggtagcagtgagttcattggatggccgaacccctgagtacaggggagtcgtcaatggttcgacactccttcagctgaggagcctcgagatgccatgtggacgagggcatgcccacggcacatcttaacctatgcgggggctgcatgggtgaaagcgccattcgtggtgttatggacacagcctgatagggtgtagcagagacctgctattccgctagaaaaaactctgctgtacatggcac

SEQ ID NO: 17099 - DNA, 381 bp, synthetic construct; identical to SEQ ID NO: 388
  source 1..381: mol_type = other DNA

SEQ ID NO: 17100 - DNA, 382 bp, synthetic construct; identical to SEQ ID NO: 390
  source 1..382: mol_type = other DNA

SEQ ID NO: 17101 - DNA, 378 bp, synthetic construct; identical to SEQ ID NO: 377
  source 1..378: mol_type = other DNA

SEQ ID NO: 17102 - DNA, 372 bp, synthetic construct; identical to SEQ ID NO: 353
  source 1..372: mol_type = other DNA

SEQ ID NO: 17103 - DNA, 357 bp, synthetic construct
  source 1..357: mol_type = other DNA
ggattggatgtcggcaaaaatattgtattgaaaatgtagggaatcttcccctcagcgaaggccgaaaagaggctagccatgcccttagtaggactagcaaaaggaggggactagcggtagcagtgagttcattggatggccgaacccctgagtacagaggagtcgtcaatggttcgacactccttcagttgaggagtctcgagatgccatgtggacgagggcatgcccacggcacatcttaacctatgcgggggctgcatgggtgaaagcgccattcgtggcgttatggacacagcctgatagggtgtagcagagacctgctatcccgctagtaaaaaactctgctgtacatggcac

SEQ ID NO: 17104 - DNA, 391 bp, synthetic construct; identical to SEQ ID NO: 425
  source 1..391: mol_type = other DNA

SEQ ID NO: 17105 - DNA, 384 bp, synthetic construct
  source 1..384: mol_type = other DNA
gtatacgcccggttagctcatgtcggcgtatatgattgggtatcccaaattaatgatttggtttagggactaaattcccctagcgaaggccgaaataggttaaccataccttcagtaggacgagcataatgggggactagtggtagcagtgagctccttggattaccgaagccccgagtacggggtagtcgtcaatggttcgacgcatcaaggaatgcctcgagatgccatgtggacgagggcgtgcccacggtgaatcttaactcaagcgggggccgcttgggtgaaagagggtcattatgtggctctttgggagtacagcctgatagggtgttgcagagacctgctacatcactagtataaaaactctgctgtacatggcac

SEQ ID NO: 17106 - DNA, 384 bp, synthetic construct
  source 1..384: mol_type = other DNA
ctatacgcccggttagctcatgtcggcgtatatgattgggtatcccaaattaatgatttggtttagggactaaattcccctagcgaaggccgaaataggttaaccataccttcagtaggactagcataatgggggactagtggtagcagtgagctccttggattaccgaagccccgagtacggggtagtcgtcaatggttcgacgcatcaaggaatgcctcgagatgccatgtggacgagggcgtgcccacggtgaatcttaactcaagcgggggccgcttgggtgaaagagggtcattatgtggctctttgggagtacagcctgatagggtgttgcagagacctgctacatcactagtataaaaactctgctgtacatggcac

SEQ ID NO: 17107 - DNA, 284 bp, synthetic construct
  source 1..284: mol_type = other DNA
ttccgactagtaggactagtacaaataggtcaactggttgagcaggtgagtgtgctgcagcggctaagcggtgagtacaccgtattcgtcaacaggtgctactggaaaggatcacccactagcgatgcctgtgtggacgaggacatgtccaagccaatgttatcagtagcgggggtcgttactgagaaagctgcccagattgggtagttgcacatacagtctgataggatgccggcggatgccctgtattttgaccagtataaatattatccgttgtaaagcat

SEQ ID NO: 17108 - DNA, 385 bp, synthetic construct
  source 1..385: mol_type = other DNA
gtatacgagattagctaaagtactcgtatacggattggacgtcgacaaactttgaattggcaacacagggaaccttcccctcggcgaaggccgaaaagaggctagccatgcccttagtaggactagccaaaggaggggactagcggtagcagtgagtccattggatggccgaacccctgagtacaggggagtcgtcaatggttcgacactcctttagtcgaggagtctcgagatgccatgtggacgagggcatgcccacggcacatcttaacccacgcgggggttgcgtgggtgaaagcgccattcgtggcgtcatggacacagcctgatagggtgtagcagagacctgctactccgctagtaaaaactctgctgtacatggcac

SEQ ID NO: 17109 - DNA, 383 bp, synthetic construct; identical to SEQ ID NO: 393
  source 1..383: mol_type = other DNA

SEQ ID NO: 17110 - DNA, 379 bp, synthetic construct
  source 1..379: mol_type = other DNA
gttagataaagtactcgtatacagattggatattgacaaaacattgaattggcgaagtagggaactttttcccctcagcgaaggccgaaaagaggctagccatgcccttagtaggacgagcaaaatgaggggactagcggtagcagtgagttcattggatggcctaatccctgagtacagggaagtcgtcaatggttcgacactccatcagttgaggagtctcgagatgccatgtggacgagggcatgcccaaggcacatcttaacctatgcgggggttgcataggcaaaagcaccactcacggtgttgtggacacagcctgatagggtgtagcagagacctgctattccgctagtaaaaactctgctgtacatggcac

SEQ ID NO: 17111 - DNA, 379 bp, synthetic construct
  source 1..379: mol_type = other DNA
gattagataaagtactcgtatacagattggatattgacaaaacattgaattggcgaagtagggaacttttcccctcagcgaaggccgaaaagaggctagccatgcccttagtaggacgagcaaaatgaggggactagcggtagcagtgagttcattggatggcctaatccctgagtacagggaagtcgtcaatggttcgacactccatcagttgaggagtctcgagatgccatgtggacgagggcatgcccaaggcacatcttaacctatgcgggggttgcataggcaaaagcaccactcacggtgttgtggacacagcctgatagggtgtagcagagacctgctattccgctagtaaaaactctgctgtacatggcac

SEQ ID NO: 17112 - DNA, 367 bp, synthetic construct
  source 1..367: mol_type = other DNA
tactcgtatacagattggatattgacaaaacattgaattggcgaagtagggaacttttcccctcagcgaaggccgaaaagaggctagccatgcccttagtaggacgagcaaaatgaggggactagcggtagcagtgagttcattggatggcctaatccctgagtacagggaagtcgtcaatggttcgacactccatcagttgaggagtctcgagatgccatgtggacgagggcatgcccaaggcacatcttaacctatgcgggggttgcataggcaaaagcaccactcacggtgttgtggacacagcctgatagggtgtagcagagacctgctattccgctagtaaaaactctgctgtacatggcac

SEQ ID NO: 17113 - DNA, 367 bp, synthetic construct
  source 1..367: mol_type = other DNA
tactcgtatacagattggatattgacaaaacattgaattggcgaagtagggaacttttcccctcagcgaaggccgaaaagaggctagccatgcccttagtaggacgagcaaaatgaggggactagcggtagcagtgagttcattggatggcctaatccctgagtacagggaagtcgtcaatggttcgacactccatcagttgaggagtctcgagatgccatgtggacgagggcatgcccaaggcacatcttaacctatgcgggggttgcatgggcaaaagcaccactcacggtgttgtggacacagcctgatagggtgtagcagagacctgctattccgctagtaaaaactctgctgtacatggcac

SEQ ID NO: 17114 - DNA, 384 bp, synthetic construct; identical to SEQ ID NO: 397
  source 1..384: mol_type = other DNA

SEQ ID NO: 17115 - DNA, 373 bp, synthetic construct
  source 1..373: mol_type = other DNA
gtatacgaggttagttcattctcgtgtacatgattggacaaatcaaaatcactatttggtttagggcctccctccagcgacggccgaactgggctagccatgcccatagtaggactagcaaacggagggactagccatagtggcgagctccctgggtggtctaagtcctgagtacaggacagtcgtcagtagttcgacgtgagcaggagcccacctcgagatgctatgtggacgagggcatgcccaagacacaccttaaccctagcgggggtcgctagggtgaaatcacaccacgtgatgggagtacgacctgatagggcgctgcagaggcccactattaggctagtataaaaatctctgctgtacatggcac

SEQ ID NO: 17116 - DNA, 384 bp, synthetic construct
  source 1..384: mol_type = other DNA
gtatacgagagttagataaaaatactcgtatacacattgggcaataaaaattataattaggcctagggaacaaatcctcctctgcgaaggccgaaaagaggctagccatgcccttagtaggactagcataaagaggggggtagcaacagtggtgagttcgttggatggcttaagccctgagtacagggtagtcgtcagtggttcgacgccttggcataaaggtctcgagatgccacgtggacgagggcacgcccaaagcacatcttaacctgagcgggggtcgctcgggcgaaaacagtttgatcaactgctacgaatacagcctgatagggtgctgcagaggcccactgtattgctactaaaaatctctgctgtacatggcac

SEQ ID NO: 17117 - DNA, 383 bp, synthetic construct; identical to SEQ ID NO: 394
  source 1..383: mol_type = other DNA

SEQ ID NO: 17118 - DNA, 372 bp, synthetic construct; identical to SEQ ID NO: 354
  source 1..372: mol_type = other DNA

SEQ ID NO: 17119 - DNA, 388 bp, synthetic construct; identical to SEQ ID NO: 421
  source 1..388: mol_type = other DNA

SEQ ID NO: 17120 - DNA, 385 bp, synthetic construct
  source 1..385: mol_type = other DNA
gtatacgagattagctaaagaactcgtatatggattggacgtcaacaaatttttaattggcaacgtagggaaccttcccctcagcgaaggccgaaaagaggctagccatgcccttagtaggactagcaaaagtaggggactagcggtagcagtgagttcgttggatggccgaacccctgagtacaggggagtcgtcaatggttcgacactccattagtcgaggagtctcgagatgccatgtggacgagggcatgcccacggcacatcttaacccatgcgggggttgcatgggtgaaagcgctattcgtggcgttatggacacagcctgatagggtgtagcagagacctgctattccgctagtaaaaactctgctgtacatggcac

SEQ ID NO: 17121 - DNA, 374 bp, synthetic construct; identical to SEQ ID NO: 361
  source 1..374: mol_type = other DNA

SEQ ID NO: 17122 - DNA, 374 bp, synthetic construct; identical to SEQ ID NO: 362
  source 1..374: mol_type = other DNA

SEQ ID NO: 17123 - DNA, 376 bp, synthetic construct; identical to SEQ ID NO: 370
  source 1..376: mol_type = other DNA

SEQ ID NO: 17124 - DNA, 375 bp, synthetic construct
  source 1..375: mol_type = other DNA
gtatacgagagtagttcaggctcgtatgcaaaattgggtgtttcaaattttaaaattcgactagggccaccccccagcgacggccgaaacgggttagccatacccttagtaggactagcggacggggggactagccatcgtggtgagatccctgagcggtctaagtcctgagtacaggacagtcgtcagtggttcgacgcggtcatcgcatcgtctcgagatgccacgtggacgagggcatgcccaagacacgctttaatcctggcgggggtcgccagggtgaaaacgtcctagtggcgttggggttacagcctgatagggtgctgcagaggcccacgcataggctagtataaaaaactctgctgtacatggcac

SEQ ID NO: 17125 - DNA, 373 bp, synthetic construct
  source 1..373: mol_type = other DNA
gtatacgaggttagttcattctcgtatgcatgattggacaaattaaaatttcaatttggatcagggcctccctccagcgacggccgaactgggctagccatgcccacagtaggactagcaaacggagggactagccgtagtggcgagctccctgggtggtctaagtcctgagtacaggacagtcgtcagtagttcgacgtgagcagaagcccacctcgagatgctatgtggacgagggcatgcccaagacacaccttaaccctagcgggggtcgctagggtgaaatcacaccacgtgatgggagtacgacctgatagggtgctgcagaggcccactattaggctagtataaaaatctctgctgtacatggcac

SEQ ID NO: 17126 - DNA, 385 bp, synthetic construct
  source 1..385: mol_type = other DNA
gtatacgagattagctaaagtactcgtatatggattggacgtcaacaaatttttaattggcaacgtagggaaccttcccctcagcgaaggccgaaaagaggctagccatgcccttagtaggactagcaaaagtaggggactagcggtagcagtgagttcgttggatggccgaacccctgagtacaggggagtcgtcaatggttcgacactccattagtcgaggagtctcgagatgccatgtggacgagggcatgcccacggcacatcttaacccatgcgggggttgcatgggtgaaagcgctaatcgtggcgttatggacacagcctgatagggtgtagcagagacctgctattccgctagtaaaaactctgctgtacatggcac

SEQ ID NO: 17127 - DNA, 370 bp, synthetic construct; identical to SEQ ID NO: 347
  source 1..370: mol_type = other DNA

SEQ ID NO: 17128 - DNA, 346 bp, synthetic construct
  source 1..346: mol_type = other DNA
gacaaaacattgaattggcgaagtagggaacttttttcccctcagcgaaggccgaaaagaggctagccatgcccttagtaggacgagcaaaatgaggggactagcggtagcagtgagttcattggatggcctaatccctgagtacagggaagtcgtcaatggttcgacactccatcagttgaggagtctcgagatgccatgtggacgagggcatgcccaaggcacatcttaacctatgcgggggttgcataggcaaaagcaccactcacggtgttgtggacacagcctgatagggtgtagcagagacctgctattccgctagtaaaaactctgctgtacatggcac

SEQ ID NO: 17129 - DNA, 369 bp, synthetic construct; identical to SEQ ID NO: 344
  source 1..369: mol_type = other DNA

SEQ ID NO: 17130 - DNA, 373 bp, synthetic construct
  source 1..373: mol_type = other DNA
gtatacgaggttagttcattctcgtatacacgattggacaaatcaaaattataatttggttcagggcctccctccagcgacggccgaactgggctagccatgcccatagtaggactagcaaaacggagggactagccatagtggcgagctccctgggtggtctaagtcctgagtacaggacagtcgtcagtagttcgacgtgagcagaagcccacctcgagatgctacgtggacgagggcatgccaagacacaccttaaccctagcgggggtcgctagggtgaaatcacaccacgtgatgggagtacgacctgatagggcgctgcagaggcccactattaggctagtataaaaatctctgctgtacatggcac

SEQ ID NO: 17131 - DNA, 374 bp, synthetic construct
  source 1..374: mol_type = other DNA
gtatacgaggttagctcgttctcgtatatatgactggacaaatcaaaattataatttggttcagggctcccctccagcgacggccgaactgggctagccatgcccatagtaggactagcaaaacggagggactagccatagtggcgagctccctgggtggtctaagtcctgagtacaggacagtcgtcagtagttcgacgtgagcagaagcccacctcgagatgctatgtggacgagggcatgcccaagacgcaccttaaccctagcgggggtcgctagggtgaaatcacaccacgtgatgggagtacgacctgatagggcgctgcagaggcccactattaggctagtataaaaatctctgctgttcatggcac

SEQ ID NO: 17132 - DNA, 374 bp, synthetic construct
  source 1..374: mol_type = other DNA
gtatacgaggttagttcattctcgtatacacgattggacaaatcaaaattataatttggttcagggcctccctccagcgacggccgaactgggctagccatgcccatagtaggactagcaaaacggagggactagccatagtggcgagctccctgggtggtctaagtcctgagtacaggacagtcgtcagtagttcgacgtgagcagaagcccacctcgagatgctacgtggacgagggcatgcccaagacacaccttaaccctagcgggggtcgctagggtgaaatcacaccacgtgatgggagtacgacctgatagggcgctgcagaggcccactattaggctagtataaaaatctctgctgtacatggcac

SEQ ID NO: 17133 - DNA, 377 bp, synthetic construct; identical to SEQ ID NO: 373
  source 1..377: mol_type = other DNA

SEQ ID NO: 17134 - DNA, 385 bp, synthetic construct; identical to SEQ ID NO: 400
  source 1..385: mol_type = other DNA

SEQ ID NO: 17135 - DNA, 374 bp, synthetic construct
  source 1..374: mol_type = other DNA
gtatacgaggttagttcattctcgtatacacgattggacaaatcaaaattataatttggttcagggcctccctccagcgacggccgaactgggctagccatgcccatagtaggactagcaaaacggagggactagccatagtggcgagctccctgggtggtctaagtcctgagtacaggacagtcgtcagtagttcgacgtgagcagaagcccacctcgagatgctacgtggacgagggcatgcccaagacacaccttaaccctagcgggggtcgctagggtgaaatcacgccacgtgatgggagtacgacctgatagggcgccgcagaggcccactattaggctagtataaaaatctctgctgtacatggcac

SEQ ID NO: 17136 - DNA, 372 bp, synthetic construct
  source 1..372: mol_type = other DNA
gtatacgaggttagttcattctcgtatacaggatcggacaaatcaaatttcaatttggttcagggcctccctccagcgacggccgaactgggctagccatgcccacagtaggactagcaaacggagggactagccgtagtggcgagctccctgggtggtctaagtcctgagtacaggacagtcgtcagtagttcgacgtgagcagaagcccacctcgagatgctacgtggacgagggcatgcccaagacacaccttaaccctagcgggggtcgctagggtgaaatcacaccacgtgatgggagtacgacctgatagggtgctgcagaggcccactattaggctagtataaaaatctctgctgtacatggcac

SEQ ID NO: 17137 - DNA, 374 bp, synthetic construct
  source 1..374: mol_type = other DNA
gtatacgaggttagttcattctcgtatacacgattggacaaatcaaaattataatttggttcagggcctccctccagcgacggccgaactgggctagccatgcccatagtaggactagcaaaacggagggactagccatagtggcgagctccctgggtggtctaagtcctgagtacaggacagtcgtcagtagttcgacgtgagcagaagcccacctcgagatgctacgtggacgagggcatgcccaagacacaccttaaccctagcgggggtcgctagggtgaaatcacaccacgtgatgggagtacgacctgatagggcgctgcggaggcccactattaggctagtataaaaatctctgctgtacatggcac

SEQ ID NO: 17138 - DNA, 375 bp, synthetic construct
  source 1..375: mol_type = other DNA
gtatacgagagtagttcatgctcgtatacgaattggatattctaaaatttgttaattggactagggtctcctcctggcgacggccgaaccgggttagccatacccgtagtaggactagcatatgggaggactagctttcgtggtgaggttcctgagtggtctaagtcctgagtacaggatagtcgtcagtagttcgacacaaacggagtttttgtctcgagatgctacgtggacgagggcatgcccaagactcactttaatcctggcgggggtcgccagggtgaaaacgcccaatggcgttgggactacagcctgatagggtgctgcagaggcccacgcaacagctagtataaaaatctctgctgtacatggcac

SEQ ID NO: 17139 - DNA, 385 bp, synthetic construct; identical to SEQ ID NO: 401
  source 1..385: mol_type = other DNA

SEQ ID NO: 17140 - DNA, 381 bp, synthetic construct
  source 1..381: mol_type = other DNA
gtatacgagaatttgcctaacctcgtatacacattgggcactctaaaaatgaattaggcctgagggacaaatcctccttagcgaaggccgaaaagaggctagccatgcccttagtaggactagcaaaacaaggagggtagcaacagtggtgagttcgttggatggctgaagccctgagtacagggtagtcgtcagtggttcgacgctttgtgcgacaagcctcgagatgccacgtggacgagggcatgcccacagcacatcttaacctgagcgggggtcgttcaggtgaaaacggtttaaccaaccgctacgaatacagcctgatagggtgctgcagaggcccactgtatcgctactaaaaatctctgctgtacatggcac

SEQ ID NO: 17141 - DNA, 372 bp, synthetic construct
  source 1..372: mol_type = other DNA
gtatacgaggttagttcattctcgtatacaggatcggacaaatcaaatttcaatttggttcagggcctccctccagcgacggccgaactgggctagccatgcccacagtaggactagcaaacggagggactagccgtagtggtgagctccctgggtggtctaagtcctgagtacaggacagtcgtcagtagttcgacgtgagcagaagcccacctcgagatgctacgtggacgagggcatgcccaagacacaccttaaccctagcgggggtcgctagggtgaaatcacaccacgtgatgggagtacgacctgatagggtgctgcagaggcccactattaggctagtataaaaatctctgctgtacatggcac

SEQ ID NO: 17142 - DNA, 386 bp, synthetic construct; identical to SEQ ID NO: 406
  source 1..386: mol_type = other DNA

SEQ ID NO: 17143 - DNA, 381 bp, synthetic construct
  source 1..381: mol_type = other DNA
gtatacgaggttaggcaaattctcgtatacatattgggcattctaaaaataaattaggcctaagggacaaatcctccttagcgaaggccgaaaagaggctagccatgcccttagtaggactagcaaaacgaggagggtagcaacagtggtgagttcgttggatggctgaagccctgagtacagggtagtcgtcagtggttcgacgctttgtgtgaaaagcctcgagatgccacgtggacgagggcatgcccacagcacatcttaacctgagcgggggtcgttcaggtgaaaacggtttaaccaaccgctacgaatacagcctgatagggtgctgcagaggcccactgtattgctactaaaaatctctgctgtacatggcac

SEQ ID NO: 17144 - DNA, 376 bp, synthetic construct; identical to SEQ ID NO: 371
  source 1..376: mol_type = other DNA

SEQ ID NO: 17145 - DNA, 368 bp, synthetic construct
  source 1..368: mol_type = other DNA
cgaggttagttcattctcgtatacatgattggacaaatcaaaatttcaatttggttcagggcctccctccagcgacggccgaactgggctagccatgcccacagtaggactagcaaacggagggactagccgtagtggcgagctccctgggtggtctaagtcctgagtacaggacagtcgtcagtagttcgacgtgagcagaagcccacctcgagatgctatgtggacgagggcatgcccaagacacaccttaaccctagcgggggtcgctagggtgaaatcacaccacgtgatgggagtacgacctgatagggtgctgcagaggcccactattaggctagtataaaaatctctgctgtacatggcac

SEQ ID NO: 17146 - DNA, 379 bp, synthetic construct
  source 1..379: mol_type = other DNA
gtatacgagaatttgcctaacctcgtatacgtattggacactctaaaaaataattaggtccaaccaaaatcctccttagcgaaggccgaaaagaggctagccatgcccttagtaggactagcaaaataaggggggtagcaacagtggtgagttcgttggatggctgaagccctgagtacagggtagtcgtcagtggttcgacgctttggaggacaagcctcgatatgccacgtggacgagggcatgcccacagcacatcttagcctggacgggggtcgttcaggtgaaaacggtttaaccaaccgctacgaatacagcctgatagggtgctgcagaggcccactgtattgctactgaaaatctctgctgtacatggcac

SEQ ID NO: 17147 - DNA, 386 bp, synthetic construct; identical to SEQ ID NO: 407
  source 1..386: mol_type = other DNA

SEQ ID NO: 17148 - DNA, 373 bp, synthetic construct
  source 1..373: mol_type = other DNA
gtatacgaggttagttcattctcgtatgcattattggacaaatcaaaatttcaatttggttcagggcctccctccagcgacggccgaactgggctagccatgcccatagtaggactagcaaacggagggactagccgtagtggcgagctccctgggtgttctaagtcctgagtacaggacagtcgtcagtagttcgacgtgagcagaagcccacctcgagatgctatgtggacgagggcatgcccaagacgcaccttaaccctagcgggggtcgctagggtgaaatcacaccacgtgatgggagtacgacctgatagggtgctgcagaggctcactattaggctagtataaaaatctctgctgtacatggcac

SEQ ID NO: 17149 - DNA, 381 bp, synthetic construct
  source 1..381: mol_type = other DNA
gtatacgagaatttgcctaacctcgtatacacattgggcactctaaaaatgaattaggcctgagggacaaatcctccttagcgaaggccgaaaagaggctagccatgcccttagtaggactagcaaaacaaggagggtagcaacagtggtgagttcgttggatggctgaagccctgagtacagggtagtcgtcagtggttcgacgctttgtgcgacaagcctcgagatgccacgtggacgagggcatgcccacagcacatcttaacctgagcgggggtccttcaggtggaaacggtgtaaccaaccgctacgaatacagcctgatagggtgctgcagaggcccactgtatcgctactaaaactatctgctgtacatggcac

SEQ ID NO: 17150 - DNA, 373 bp, synthetic construct
  source 1..373: mol_type = other DNA
gtatacgaggttagttcattctcgtatgcattattggacaaatcaaaatttcaatttggttcagggcctccctccagcgacggccgaactgggctagccatgcccatagtaggactagcaaacggagggactagccgtagtggcgagctccctgggtgttctaagtcctgagtacaggacagtcgtcagtagttcgacgtgagcagaagcccacctcgagatgctatgtggacgagggcatgcccaagacgcaccttaaccctagcgggggtcgctagggtgaaatcacaccacgtgatgggagtccgacctgatagggtgctgcagaggctcactattaggctagtataaaaatctctgctgtacatggcac

SEQ ID NO: 17151 - DNA, 373 bp, synthetic construct
  source 1..373: mol_type = other DNA
gtatacgaggttagttcattctcgtatgcatgattggacaaattaaaatttcaatttggatcagggcctccctccagcgacggccgaactgggctagccatgccctcagtaggactagcaaacggagggactagccgtagtggcgagctccctgggtggtctaagtcctgagtacaggacagtcgtcagtagttcgacgtgagcagaagcccacctcgatatgctatgtggacgagggcatgcccaagacacaccttaaccctagcgggggtcgctagggtgaaatcgcatcacgtgatgggagtacgacctgatagggtgctgcagaggcccactattaggctagtataaaaatctctgctgtacatggcac

SEQ ID NO: 17152 - DNA, 373 bp, synthetic construct
  source 1..373: mol_type = other DNA
gtatacgaggttagttcattctcgtatgcatgattggacaaatcaaaatttcaatttggttcagggcctccctccagcgacggccgaactgggctagccatgcccacagtaggactagcaaacggagggactagccgtagtggcgagctccctgggtggtctaagtcctgagtacaggacagtcgtcagtagttcgacgtgagcagaagcccacctcgagatgctatgtggacgagggcatgcccaagacacaccttaaccctagcgggggtcgctagggtgaaatcacaccacgtgatgggagtacgacctgatagggcgctgcagaggcccactattaggctagtataaaaatctctgctgtacatggcac

SEQ ID NO: 17153 - DNA, 379 bp, synthetic construct
  source 1..379: mol_type = other DNA
gtatacgagaatttgcctaacctcgtatacgtattggacactctaaaaaataattaggtctagggaaaatcctccttagcgaaggccgaaaagaggctagccatgcccttagtaggactagcaacataaggggggtagcaacagtggtgagttcgttggatggctgaagccctgagtacagggtagtcgtcagtggttcgacgctttggaggacaagcctcgagatgccacgtggacgagggcatgcccacagcacatcttaacatggacgggggtcgttcatgtgaaaacggtttaaccaaccgctacgaatacagcctgatagggtgctgcagaggcccactgtattgctactgaaaatctctgctgtacatggcac

SEQ ID NO: 17154 - DNA, 373 bp, synthetic construct
  source 1..373: mol_type = other DNA
tattacgaggttagctcgtcctcgtatacaaaattggacaaaattaaattctgattcgacctagggcatccctccagcgacggccgacctgggctagccatgcccacagtaggactagcaaacggagggactagccgtagtggcgagctccctgggtggtctaagtcctgagtacaggacagtcgtcagtagttcgacgtgagcaggagcccacctcgagatgctatgtggacgagggcatgcccaagacacaccttaaccctggcgggggtcgctagggtgaaatcacaccatgtgatgggggtacgacctgatagggcgctgcagaggcccactaacaggctagtataaaaatctctgctgtacatggcac

SEQ ID NO: 17155 - DNA, 373 bp, synthetic construct
  source 1..373: mol_type = other DNA
gtatacgaggttagttcattctcgtatgcaatattggacaaaactaaattccgattcggtttagggcatccctccagcgacggccgagctgggctagccatgcccacagtaggactagcagacggagggactagccgtagtggcgagctccctgggtggtctaagtcctgagtacaggacagtcgtcagtagttcgacatgagcagaagctcacctcgagatgctatgtggacgagggcatgcccaagacacaccttaaccctggcgggggtcgctagggtgaactcacataatgtgatgggggtacgacctgatagggtgctgcagaggcccactaacaggctagtataaaaatctctgctgtacatggcac

SEQ ID NO: 17156 - DNA, 372 bp, synthetic construct
  source 1..372: mol_type = other DNA
gtatacgggagtagctcatacccgtatgcaaaattggacgtctcaaaatccgattgggtgagggagccctcctagcgacggccgaaccgtgttaaccatacacgtagtaggactagcaaacgggaggactagccatcgtggtgagatccctgagcagtctaagtcctgagtacaggatagtcgtcagtagttcaacgcaggcgtggttctgccttgagatgctacgtggacgagggcatgcccaagacatgctttaatcccgacgggggtcgccgggatgaaaacacctactggtgttgggattacagcctgatagggtgttgcagagacccacgtataggctagtataaaaatctctgctgtacatggcat

SEQ ID NO: 17157 - DNA, 373 bp, synthetic construct
  source 1..373: mol_type = other DNA
gtatacgaggttagttcattctcgtatgcattattggacaaatcaaaatttcaatttggttcagggcctccctccagcgacggccgaactgggctagccatgcccatagtaggactagcaaacggagggactagccgtagtggcgagctccctgggtgttctaagtcctgagtacaggacagtcgtcagtagttcgacgtgagcagaagcccacctcgagatgctatgtggacgagggcatgcccaagacacaccttaaccctagcgggggtcgctagggtgaaatcacaccacgtgatgggagtacgacctgatagggtgctgcagaggctcactattaggctagtataaaaatctctgctgtacatggcac

SEQ ID NO: 17158 - DNA, 373 bp, synthetic construct
  source 1..373: mol_type = other DNA
gtatacgaggttagttcattctcgtatgcatgattggacaaattaaaatttcaatttggatcagggcctccctccagcgacggccgaactgggctagccatgcccgcagtaggactagcaaacggagggactagccgtagtggcgagctccctgggtggtctaagtcctgagtacaggacagtcgtcagtagttcgacgtgagcagaagcccacctcgatatgctatgtggacgagggcatgcccaagacacaccttaaccctagcgggggtcgctagggtgaaatcacaccacgtgatgggagtacgacctgatagggtgctgcagaggcccactattaggctagtataaaaatctctgctgtacatggcac

SEQ ID NO: 17159 - DNA, 387 bp, synthetic construct
  source 1..387: mol_type = other DNA
tgtatacgagagttagataaaatactcgtatacacattgggcaaactaaataataataattgggcctagggtactaatccccctctgcgaaggccgaaaagaggctagccatgcccttagtaggactagcataatgaggggggtagcaacagtggtgagttcgttggatggcttaagccctgagtacagggtagtcgtcagtggttcgacgccttagtataaaggtctcgagatgccacgtggacgagggcacgcccaaagcacatcttaacctgagcgggggtcgctcaggcgaaagcagtttaaccaactgctacgaatacagcctgatagggtgctgcagaggcccactgtattgctactaaaaatctctgctgtacatggcac

SEQ ID NO: 17160 - DNA, 373 bp, synthetic construct
  source 1..373: mol_type = other DNA
gtatacgaggttagttcattctcgtatgcatgattggacaaattaaaatctcaatttggatcagggcctccctccagcgacggccgaactgggctagccatgccctcagtaggactagcaaacggagggactagccgtagtggcgagctccctgggtggtctaagtcctgagtacaggacagtcgtcagtagttcgacgtgagcagaagcccgcctcgatatgctatgtggacgagggcatgcccaagacacaccttaaccctagcgggggtcgctagggtgaaatcgcatcacgtgatgggagtacgacctgatagggtgctgcagaggcccactattaggctagtataaaaatctctgctgtacatggcac

SEQ ID NO: 17161 - DNA, 373 bp, synthetic construct
  source 1..373: mol_type = other DNA
gtatacgaggttagctctttctcgtatacgacattggatacactaaatttcgatttggtctagggcacccctccagcgacggccgaaatgggctagccatgcccatagtaggactagcaaacggagggactagccgtagtggcgagctccctgggtggtctaagtcctgagtacaggacagtcgtcagtagttcgacgtgagcaccagcccacctcgagatgctacgtggacgagggcatgcccaagacacaccttaaccctggcgggggtcgctagggtgaaatcacactatgtgatgggggtacgacctgatagggtgctgcagaggcccactagcaggctagtataaaaaatctctgctgtacatggcac

SEQ ID NO: 17162 - DNA, 373 bp, synthetic construct
  source 1..373: mol_type = other DNA
gtatacgaggttagttcattctcgtatgcatgattggacaaattaaaatttcaatttggatcagggcctccctccagcgacggccgaactgggctagccatgcccacagtaggactagcaaacggagggactagccgtagtggcgagctccctgggtggtctaagtcctgagtacaggacagtcgtcagtagttcgacgtgagcagaagcccacctcgatatgctatgtggacgagggcatgcccaagacacaccttaaccctagcgggggtcgctagggtgaaatcacaccacgtgatgggagtacgacctgatagggtgctgcagaggcccactattaggctagtataaaaatctctgctgtacatggcac

SEQ ID NO: 17163 - DNA, 373 bp, synthetic construct
  source 1..373: mol_type = other DNA
gtatacgaggttagttcattctcgtatgcatgattggaaaaattaaaatttcaatttggttcagggcctccctccagcgacggccgaactgggctagccatgcccacagtaggactagcaaacggagggactagccgtagtggcgagctccctgggtggtctaagtcctgagtacaggacagtcgtcagtagttcgacgtgagcagaagcccacctcgagatgctatgtggacgagggcatgcccaagacacaccttaaccctagcgggggtcgctagggtgaaatcacaccacgtgatgggagtacgacctgatagggtgctgcagaggcccactattaggctagtataaaaatctctgctgtacatggcac

SEQ ID NO: 17164 - DNA, 373 bp, synthetic construct
  source 1..373: mol_type = other DNA
gtatacgaggttagttcattctcgtatgcatgattggacaaatcaaaatttcaatttggttcagggcctccctccagcgacggccgaactgggctagccatgcccacagtaggactagcaaacggagggactagccgtagtggcgagccccctgggtggtctaagtcctgagtacaggacagtcgtcagtagttcgacgtgagcagaagcccacctcgagatgctacgtggacgagggcatgcccaagacacaccttaaccctagcgggggtcgctagggtgaaatcacaccacgtgatgggagtacgacctgatagggcgctgcagaggcccactattaggctagtataaaaatctctgctgtacatggcac

SEQ ID NO: 17165 - DNA, 373 bp, synthetic construct
  source 1..373: mol_type = other DNA
gtatacgaggttagttcattctcgtatgcatgattggacaaaacaaaatttcaatttggttcagggcctccctccagcgacggccgaactgggctagccatgcccatagtaggactagcaaacggagggactagccgtagtggcgagctccctgggtggtctaagtcctgagtacaggacagtcgtcagtagttcgacgtgagcagaagcccacctcgagatgctatgtggacgagggcatgcccaagacacaccttaaccctagcgggggtcgctagggtgaaatcacaccacgtgatgggagcacgacctgatagggcgctgcagaggcccactattaggctagtataaaaatctctgctgttcatggcac

SEQ ID NO: 17166 - DNA, 373 bp, synthetic construct
  source 1..373: mol_type = other DNA
gtatacgaggttagttcattctcgtatgcatgattggacaaaacaaaatttcaatttggttcagggcccccctccagcgacggccgaactgggctagccatgcccatagtaggactagcaaacggagggactagccgtagtggcgagctccctgggtggtctaagtcctgagtacaggacagtcgtcagtagttcgacgtgagcagaagcccacctcgagatgctatgtggacgagggcatgcccaagacgcaccttaaccctagcgggggtcgctagggtgaaatcacaccacgtgatgggagtacgacctgatagggcgctgcagaggcccactattaggctagtataaaaatctctgctgtacatggcac

SEQ ID NO: 17167 - DNA, 373 bp, synthetic construct
  source 1..373: mol_type = other DNA
gtatacgaggttagttcattctcgtatgcatgattggacaaattaaaattttaatttggatcagggcctccctccagcgacggccgaactgggctggccatgcccgcagtaggactagcaaacggagggactagccgtagtggcgagctccctgggtggtctaagtcctgagtacaggacagtcgtcagtagttcgacgtgagcagaagcccacctcgatatgctatgtggacgagggcatgcccaagacacaccttaaccctagcgggggtcgctagggtgaaatcacaccacgtgatgggagtacgacctgatagggtgctgcagaggcccactattaggctagtataaaaatctctgctgtacatggcac

SEQ ID NO: 17168 - DNA, 373 bp, synthetic construct
  source 1..373: mol_type = other DNA
gtatacgaggttagttcattctcgtatgcatgattggacaaatcaaaatttcaatttggttcagggcctccctccagcgacggccgaactgggctagccatgcccacagtaggactagcaaacggagggactagccgtagtggcgagctccctgggtggtctaagtcctgagtacaggacagtcgtcagtagttcgacgtgagcagaagcccacctcgagatgctatgtggacgagggcatgcccaagacacaccttaaccctagcgggggtcgttagggtgaaatcacaccacgtgatgggagtacgacctgatagggcgctgcagaggcccactattaggctagtataaaaatctctgctgtacatggcac

SEQ ID NO: 17169 - DNA, 373 bp, synthetic construct
  source 1..373: mol_type = other DNA
gtatacgaggttagttcattctcgtatgcatgattggacaaaacaaaatttcaatttggttcagggcctccctccagcgacggccgaactgggctagccatgcccatagtaggactagcaaacggagggactagccgtagtggcgagctccctgggtggtctaagtcctgagtacaggacagtcgtcagtagttcgacgtgagcagaagcccacctcgagatgctatgtggacgagggcatgcccaagacacaccttaaccctagcgggggtcgctagggtgaaatcacaccacgtgatgggagtacgacctgatagggcgctgcagaggcccactattaggctagtataaaaatctctgctgtacatggcac

SEQ ID NO: 17170 - DNA, 374 bp, synthetic construct; identical to SEQ ID NO: 363
  source 1..374: mol_type = other DNA

SEQ ID NO: 17171 - DNA, 375 bp, synthetic construct; identical to SEQ ID NO: 367
  source 1..375: mol_type = other DNA

SEQ ID NO: 17172 - DNA, 373 bp, synthetic construct; identical to SEQ ID NO: 358
  source 1..373: mol_type = other DNA

SEQ ID NO: 17173 - DNA, 373 bp, synthetic construct
  source 1..373: mol_type = other DNA
gtatacgaggttagttcgtactcgtgtacaatattgggcaaacctaaattccgatttggtttagggcacccctccagcgacggccgaactgggctagccatgcccatagtaggactagcaaacggagggactagccgtagtggcgagctccctgggtggtctaagtcctgagtacaggacagtcgtcagtagttcgacgtgagcagaagctcatctcgagatgctatgtggacgagggcatgcccaagacacaccttaaccctagcgggggtcgctagggcgaaatcatacaacgtgatgggggtacgacctgatagggtgctgcagaggcccactaacaggctagtataaaaatctctgctgtacatggcac

SEQ ID NO: 17174 - DNA, 373 bp, synthetic construct
  source 1..373: mol_type = other DNA
gtatacgaggttagttcgtactcgtgtacaatattgggcaaacctaaattccgatttggtttagggcacccctccagcgacggccgaactgggctagccatgcccatagtaggactagcaaacggagggactagacgtagtggcgagctccctgggtggtctaagtcctgagtacaggacagtcgtcagtagttcgacgtgggcagaagcccacctcgagatgctatgtggacgagggcatgcccaagacacaccttaaccctggcgggggtcgctagggtgaaatcacacaacgtgatgggggtacgacctgatagggtgctgcagaggcccactaacaggctagtataaaaatctctgctgtacatggcac

SEQ ID NO: 17175 - DNA, 373 bp, synthetic construct
  source 1..373: mol_type = other DNA
gtatacgaggttagttcattctcgtatacatgattggacaaaacaaaatttcaatttggttcagggcccccctccagcgacggccgaactgggctagccatgcccatagtaggactagcaaacggagggactagccgtagtggcgagctccctgggtggtctaagtcctgagtacaggacagtcgtcagtagttcgacgtgagcagaagcccacctcgagatgctatgtggacgagggcatgcccaagacacaccttaaccctagcgggggtcgctagggtgaaatcacaccacgtgatgggagtacgacctgatagggcgctgcagaggcccactattaggctagtataaaaatctctgctgtacatggcac

SEQ ID NO: 17176 - DNA, 373 bp, synthetic construct
  source 1..373: mol_type = other DNA
gtatacgaggttagttcattctcgtatgcatgattggacaaattaaaatttcaatttggatcagggcctccctccagcgacggccgaactgggctagccatgccctcagtaggactagcaaacggagggactagccgtagtggcgagctccctgggtggtctaagtcctgagtacaggacagtcgtcagtagttcgacgtgagcagaagcccacctcgatatgctatgtggacgagggcatgcccaagacacatcttaaccctagcgggggtcgctagggtgaaatcacatcacgtgatgggagtacgacctgatagggtgctgcagaggcccactattaggctagtataaaaatctctgctgtacatggcac

SEQ ID NO: 17177 - DNA, 373 bp, synthetic construct
  source 1..373: mol_type = other DNA
gtatacgaggttagttcattctcgtatgcatgattggacaaattaaaacttcaatttggatcagggcctccctccagcgacggccgaactgggctagccatgccctcagtaggactagcaaacggagggactagccgtagtggcgagctccctgggtggtctaagtcctgagtacaggacagtcgtcagtagttcgacgtgagcagaagcccacctcgatatgctatgtggacgagggcatgcccaagacacatcttaaccctagcgggggtcgctagggtgaaatcacatcacgtgatgggagtacgacctgatagggtgctgcagaggcccactattaggctagtataaaaatctctgctgtacatggcac

SEQ ID NO: 17178 - DNA, 373 bp, synthetic construct
  source 1..373: mol_type = other DNA
gtatacgaggttagttcattctcgtatgcatgattggacaaattaaaatttcaatttggatcagggcctccctccagcgacggccgaactgggctagccatgcccgcagtaggactagcaaacggagggactagccgtagtggcgagctccctgggtggtctaagtcctgagtacaggacagtcgtcagtagttcgacgtgagcagaagcccacctcgatatgctatgtggacgagggcatgcccaagacacaccttaaccctagcgggggtcgctagggtgaaatcactccacgtgatgggagtacgacctgatagggtgctgcagaggcccactattaggctagtataaaaatctctgctgtacatggcac

SEQ ID NO: 17179 - DNA, 373 bp, synthetic construct
  source 1..373: mol_type = other DNA
gtatacgaggttagttcattctcgtatgcataattggacaaattaaaatttcaatttggatcagggcctccctccagcgacggccgaactgggctagccatgcccgcagtaggactagcaaacggagggactagccgtagtggcgagctccctgggtggtctaagtcctgagtacaggacagtcgtcagtagttcgacgtgagcagaagcccacctcgatatgctatgtggacgagggcatgcccaagacacaccttaaccctagcgggggtcgctagggtgaaatcacaccacgtgatgggagtacgacctgatagggtgctgcagaggcccactattaggctagtataaaaatctctgctgtacatggcac

SEQ ID NO: 17180 - DNA, 373 bp, synthetic construct
  source 1..373: mol_type = other DNA
gtatacgaggttagttcattctcgtatgcatgattggacaaattaaaatttcaatttggataagggcctccctccagcgacggccgaactgggctagccatgcccgcagtaggactagcaaacggagggactagccgtagtggcgagctccctgggtggtctaagtcctgagtacaggacagtcgtcagtagttcgacgtgagcagaagcccacctcgatatgctatgtggacgagggcatgcccaagacacaccttaaccctagcgggggtcgctagggtgaaatcacaccacgtgatgggagtacgacctgatagggtgctgcagaggcccactattaggctagtataaaaatctctgctgtacatggcac

SEQ ID NO: 17181 - DNA, 373 bp, synthetic construct
  source 1..373: mol_type = other DNA
gtatacgaggttagttcattctcgtatgcatgattggacaaattaaaatttcaatttggatcagggcctccctccagcgacggccgaactgggctagccatgcccgcagtaggactagcaaacggagggactagccgtagtggcgagctccctgggtggtctaagtcctgagtacaggacagtcgtcagtagttcgacgtgagcagaagcccacctcgatatgctacgtggacgagggcatgcccaagacacaccttaaccctagcgggggtcgctagggtgaaatcacaccacgtgatgggagtacgacctgatagggtgctgcagaggcccactattaggctagtataaaaatctctgctgtacatggcac

SEQ ID NO: 17182 - DNA, 373 bp, synthetic construct
  source 1..373: mol_type = other DNA
gtatacgaggttagttcattctcgtatgcatgattggacaaattaaaatttcaatttggatcagggcctccctccagcgacggccgaactgggctagccatgcccgcagtaggactagcaaacggagggactagccgtagtggcgagctccctgggtggtctaagtcctgagtacaggacagtcgtcagtagttcgacgtgagcggaagcccacctcgatatgctatgtggacgagggcatgcccaagacacaccttaaccctagcgggggtcgctagggtgaaatcacaccacgtgatgggagtacgacctgatagggtgctgcagaggcccactattaggctagtataaaaatctctgctgtacatggcac

SEQ ID NO: 17183 - DNA, 373 bp, synthetic construct; identical to SEQ ID NO: 359
  source 1..373: mol_type = other DNA

SEQ ID NO: 17184 - DNA, 373 bp, synthetic construct
  source 1..373: mol_type = other DNA
gtatacgaggttagttcattctcgtatgcatgattggacaaattaaaatttcaatttggatcagggcctccctccagcgacggccgaactgggctaaccatgcccgcagtaggactagcaaacggagggactagccgtagtggcgagctccctgggtggtctaagtcctgagtacaggacagtcgtcagtagttcgacgtgagcagaagcccacctcgatatgctatgtggacgagggcatgcccaagacacaccttaaccctagcgggggtcgctagggtgaaatcacaccacgtgatgggagtacgacctgatagggtgctgcagaggcccactattaggctagtataaaaatctctgctgtacatggcac

SEQ ID NO: 17185 - DNA, 373 bp, synthetic construct
  source 1..373: mol_type = other DNA
gtatacgaggttagttcattctcgtatgcatgattggacaaattaaaatttcaatttggatcagggcctccctccagcgacggccgaactgggctagccatgcccgcagtaggactagcaaacggagggactagccgtagtggcgagctccctgggtggtctaagttctgagtacaggacagtcgtcagtagttcgacgtgagcagaagcccacctcgatatgctatgtggacgagggcatgcccaagacacaccttaaccctagcgggggtcgctagggtgaaatcacaccacgtgatgggagtacgacctgatagggtgctgcagaggcccactattaggctagtataaaaatctctgctgtacatggcac

SEQ ID NO: 17186 - DNA, 373 bp, synthetic construct
  source 1..373: mol_type = other DNA
gtatacgaggttagttcattctcgtatgcatgattggacaaatcaaaattccaatttggttcagggcctccctccagcgacggccgaactgggctagcaatgcccacagtaggactagcaaacggagggactagccgtagtggcgagccccctgggtggtctaagtcctgagtacaggacagtcgtcagtagttcgacgtgagcagaagcccacctcgagatgctacgtggacgagggcatgcccaagacacaccttaaccctagcgggggtcgctagggtgaaatcacaccacgtgatgggagtacgacctgatagggtgctgcagaggcccactattaggctagtataaaaatctctgctgtacatggcac

SEQ ID NO: 17187 - DNA, 373 bp, synthetic construct
  source 1..373: mol_type = other DNA
gtatacgaggttagttcattctcgtatgcatgattggacaaatcaaaatttcaatttggttcagggcccccctccagcgacggccgaactgggctagccatgcccacagtaggactagcaaacggagggactagccgtagtggcgagctccctgggtggtctaagtcctgagtacaggacagtcgtcagtagttcgacgtgagcagaagcccacctcgagatgctacgtggacgagggcatgcccaagacacaccttaactctagcgggggtcgctagggtgaaatcacaccacgtgatgggagtacgacctgatagggcgctgcagaggcccactattaggctagtataaaaatctctgctgtacatggcac

SEQ ID NO: 17188 - DNA, 372 bp, synthetic construct
  source 1..372: mol_type = other DNA
gtatacgaggttagctctttctcgtatacgatattggatacactaaatttcgatttggtctagggcacccctccagcgacggccgaaatgggctagccatgcccatagtaggactagcaaacggagggactagccgtagtggcgagctccctgggtggtctaagtcctgagtacaggacagtcgtcagtagttcgacgtgagcactagcccacctcgagatgctacgtggacgagggcatgcccaagacacaccttaaccctggcgggggtcgctagggtgaaatcacattatgtgatgggggtacgacctgatagggtgctgcagaggcccactagcaggctagtataaaaatctctgctgtacatggcac

SEQ ID NO: 17189 - DNA, 373 bp, synthetic construct
  source 1..373: mol_type = other DNA
gtatacgaggttagttcattctcgtatgcatgattggacaaaacaaaatttcaatttggttcagggcctccctccagcgacggctgaactgggctagccatgcccatagtaggactagcaaacggagggactagccgtagtggcgagctccctgggtggtctaagtcctgagtacaggacagtcgtcagtagttcgacgtgagcagaagcccacctcgagatgctatgtggacgagggcatgcccaagacacaccttaaccctagcgggggtcgctagggtgaaatcacaccacgtgatgggagtacgacctgatagggcgctgcagaggcccactattaggctagtataaaaatctctgctgtacatggcac

SEQ ID NO: 17190 - DNA, 374 bp, synthetic construct; identical to SEQ ID NO: 364
  source 1..374: mol_type = other DNA

SEQ ID NO: 17191 - DNA, 373 bp, synthetic construct
  source 1..373: mol_type = other DNA
gtatacgaggttagctcgttctcgtatacgatatcggatacactaaatttcgatttggtctagggcacccctccagcgacggccgaaatgggctagccatgcccatagtaggactagcaaacggagggactagccgtagtggcgagctccctgggtggtctaagtcctgagtacaggacagtcgtcagtagttcgacgtgagcaccagcccacctcgagatgctacgtggacgagggcatgcccaagacacaccttaaccctagcgggggtcgctagggtgaaatcacattatgtgatgggggtacgacctgatagggtgctgcagaggcccactatcaggctagtataaaaaatctctgctgtacatggcac

SEQ ID NO: 17192 - DNA, 373 bp, synthetic construct
  source 1..373: mol_type = other DNA
gtatacgaggttagctcgttctcgtatacgatatcggatacactaaatttcgattcggtctagggcacccctccagcgacggccgaaatgggctagccatgcccatagtaggactagcaaacggagggactagccgtagtggcgagctccctgggtggtctaagtcctgagtacaggacagtcgtcagtagttcgacgtgagcaccagcccacctcgagatgctacgtggacgagggcatgcccaagacacaccttaaccctagcgggggtcgctagggtgaaatcacattatgtgatgggggtacgacctgatagggtgctgcagaggcccactatcaggctagtataaaaaatctctgctgtacatggcac

SEQ ID NO: 17193 - DNA, 373 bp, synthetic construct
  source 1..373: mol_type = other DNA
gtatacgaggttagctcgttctcgtatacgatatcggatacactaaatttcgattcggtctagggcacccctccagcgacggccgaaatgggctagccatgcccatagtaggactagcaaacggagggactagccgtagtggcgagctccctgggtggtctaagtcctgagtacaggacagtcgtcagtagttcgacgtgagcactagcccacctcgagatgctacgtggacgagggcatgcccaagacacaccttaaccctagcgggggtcgctagggtgaaatcacattatgtgatgggggtacgacctgatagggtgctgcagaggcccactatcaggctagtataaaaaatctctgctgtacatggcac

SEQ ID NO: 17194 - DNA, 373 bp, synthetic construct
  source 1..373: mol_type = other DNA
gtatacgaggttagctcattctcgcatacgatattggatacactaaatttcgatttggtctagggcacccctccagcgacggccgaaatgggctagccatgcccatagtaggactagcaaacggagggactagccatagtggcgagctccctgggtggtctaagtcctgagtacaggacagtcgtcagtagttcgacgtgagcactagcccacctcgagatgctacgtggacgagggcatgcccaagacacaccttaaccctggcgggggtcgctagggtgaaatcacattatgtgatgggggtacgacctgatagggtgctgcagaggcccactagcaggctagtataaaaaatctctgctgtacatggcac

SEQ ID NO: 17195 - DNA, 373 bp, synthetic construct
  source 1..373: mol_type = other DNA
gtatacgaggttagttcgtactcgtgtacaatattgggcaaacctaaattccgatttggtttagggcacccctccagcgacggccgaactgggctagccatgcccatagtaggactagcaaacggagggactagccgtagtggcgagctccctgggtggtctaagtcctgagtacaggacagtcgtcagtagttcgacgtgggcagaagcccatctcgagatgctatgtggacgagggcatgcccaagacacaccttaaccctggcgggggtcgctagggcgaaatcatacaacgtgatgggggtacgacctgatagggtgctgcagaggcccactgacaggctagtataaaaatctctgctgtacatggcac

SEQ ID NO: 17196 - DNA, 373 bp, synthetic construct
  source 1..373: mol_type = other DNA
gtatacgaggttagctcatcctcgtatacaatattggacaaacgaaattccgatttggcctaggacacccctccagcgacggccgaactgggctagccatgcccacagtaggactagcagatggagggactagccgtagtggcgagctccctgggtggtctaagtcctgagtacaggacagtcgtcagtagttcgacgtgagcaggagcccacctcgagatgctatgtggacgagggcatgcccaagacacaccttaaccctggcgggggtcgccagggtgaaatcacatcatgtgatgggggtacgacctgatagggtgctgcagaggcccactaacaggctagtataaaaaatctctgctgtacatggcac

SEQ ID NO: 17197 - DNA, 374 bp, synthetic construct
  source 1..374: mol_type = other DNA
gggtatacgaggttagctcatcctcgtgtacaatattggacaaacaaaattccgatttggcttagggaacccctccagcgacggccgaactgggctagccacgcccatagtaggactagcagatggagggactagccgtagtggcgagctccctgggtggtctaagtcctgagtacaggacagtcgtcagtagttcgacgtgagcaggagcccacctcgagatgctatgtggacgagggcacgcccaagacacaccttaaccctggcgggggtcgccagggtgaaatcacaccatgtgatgggggtacgacctgatagggtgctgcagaggcccactaacaggctagtataaaaatctctgctgtacatggcac

SEQ ID NO: 17198 - DNA, 373 bp, synthetic construct
  source 1..373: mol_type = other DNA
gtatacgaggttagttcattctcgtatgcattattggacaaatcaaaatttcaatttggttcagggcctccctccagcgacggccgaactgggctagccatgcccatagtaggactagcaaacggagggactagccatagtggcgagctcgctgggtggtctaagtcctgagtacaggacagtcgtcagtagttcgacgtggacagaagcccacctcgagatgctatgtggacgagggcatgcccaagacacaccttaaccctggcgggggtcgctagggtgaaatcacacgacgtgatgggggtacgacctgatagggtgctgcagaggcccactaacaggctagtataaaaatctctgctgtacatggcac

SEQ ID NO: 17199 - DNA, 373 bp, synthetic construct
  source 1..373: mol_type = other DNA
gtatacgaggttagctcgtactcgtgtacaatattgggcaaactaaaattccgatttggtttagggcacccctccagcgacggccgaactgggctagccatgcccatagtaggactagcagacggagggactagccgtggtggcgagctccctgggtggtctaagtcctgagtacaggacagtcgtcagtagttcgacgtgggcagaagcccacctcgagatgctatgtggacgagggcacgcccaagacacaccttaaccctggcgggggtcgctagggtgaaatcacacaacgtgatgggggtacgacctgatagggtgctgcagaggcccactagcaggctagtataaaaatctctgctgtacatggcac

SEQ ID NO: 17200 - DNA, 373 bp, synthetic construct
  source 1..373: mol_type = other DNA
gtatacgaggtgagttcattctcgtatgcattattggacaaatcaaaatttcaatttggttcagggcctccctccagcgacggccgaactgggctagccatgcccatagtaggactagcaaacggagggactagccgtagtggcgagctccctgggtgttctaagtcctgagtacaggacagtcgtcagtagttcgacgtgagcagaagcccacctcgagatgctatgtggacgagggcatgcccaagacgcaccttaaccctagcgggggtcgctagggtgaaatcacaccacgtgatgggagtacgacctgatagggtgctgcagaggctcactattaggctagtataaaaatctctgctgtacatggcac

SEQ ID NO: 17201 - DNA, 374 bp, synthetic construct
  source 1..374: mol_type = other DNA
agatttagctcaatctctcgtatgcatattgggtaaaccaaacgataattgggcctagggaacaaaatcctccccagcgaaggccgaaaagaggctagccatgcccttagtaggactagcatattggggagggtagcaacagtggtgagttagttggatggctgaagccctgagtacagggtagtcgtcagtggttcgacgccttaggatgtaggcctcgagatgccacgtggacgagggcatgcccacagcacatcttaacctgagcaggggtcgcccaggtgaaaacggataaaaccgttactaacacagcctgatagggtgctgcagaggcccactgcactgctactaaaaatctctgctgtacatggcac

SEQ ID NO: 17202 - DNA, 373 bp, synthetic construct
  source 1..373: mol_type = other DNA
gtatacgaggttagttcattctcgtatgcatgattggacaaactaaaatttcaatttggatcagggcctccctccagcgacggccgaactgggctagccatgcccgcagtaggactagcaaacggagggactagccgtagtggcgagctccctgggtggtctaagtcctgagtacaggacagtcgtcagtagttcgacgtgagcagaagcccacctcgatatgctatgtggacgagggcatgcccaagacgcaccttaaccctagcgggggtcgctagggtgaaatcacaccacgtgatgggagtacgacctgatagggtgctgcagaggcccactattaggctagtataaaaatctctgctgtacatggcac

SEQ ID NO: 17203 - DNA, 373 bp, synthetic construct
  source 1..373: mol_type = other DNA
gtatacgaggttagttcattctcgtgtacaatattggacaaaccaaaattccgatttggcctagggcacccctccagcgacggccgaactgggctagccatgcccacagtaggactagcaaacggagggactagccgtagtggcgagctccctgggtggtctaagtcctgagtacaggacagtcgtcaatagttcgacgtgagcaggagcccacctcgagatgctaagtggacgagggcatgcccaagacacaccttaaccctggcaggggtcgccagggtgaaatcacaccatgtgatgggggtacgacctgatagggtgctgcagaggcccactaacaggctagtataaaaatctctgctgtacatggcac

SEQ ID NO: 17204 - DNA, 372 bp, synthetic construct
  source 1..372: mol_type = other DNA
gtatacgagattagctcgccctcgtgtacaatattggacaaataaaattccgatttggcttagggcacccctccagcgacggccgaactgggctagccatgcccacagtaggactagcaaatggagggactagccgtagtggcgagctccctgggtggtctaagtcctgagtacaggacagtcgtcagtagttcgacgtgagcaggagcccacctcgagatgctatgtggacgagggcatgcccaagacacaccttaaccctggcgggggtcgctagggtgaaatcacaccacgtgatgggggtacgacctgatagggtgctgcagaggcccactaacaggctagtataaaaatctctgctgtacatggcac

SEQ ID NO: 17205 - DNA, 373 bp, synthetic construct
  source 1..373: mol_type = other DNA
gtatacgaggttagctcgtcctcgtgtacaatattggacaagctaaaattccgatttggcctagggcacccctccagcgacggccgaactgggctagccatgcccacagtaggactagcaaacggagggactagccgtagtggcgagctccctgggtggtctaagtcctgagtacaggacagtcgtcagtagttcgacgtgagcatgagcccacctcgagatgctatgtggacgagggcatgcccaagacacaccttaaccctggcgggggtcgccagggtgaaatcacaccatgtgatgggggtacgacctgatagggtgctgcagaggcccactaacaggctagtataaaaatttttgttgtacatggcac

SEQ ID NO: 17206 - DNA, 372 bp, synthetic construct; identical to SEQ ID NO: 355
  source 1..372: mol_type = other DNA

SEQ ID NO: 17207 - DNA, 373 bp, synthetic construct
  source 1..373: mol_type = other DNA
gtatacgaggttagttcattctcgtatgcatgattggacaaaacaaaatttcaatttggttcagggcccccctccagcgacggccgaactgggctagccatgcccatagtaggactagcaaacggagggactagccgtagtggcgagctccctgggtggtctaagtcctgagtacaggacagtcatcagtagttcgacgtgagcagaagcccacctcgagatgctatgtggacgagggcatgcccaagacgcaccttaaccctagcgggggtcgctagggtgaaatcacaccacgtgatgggagtacgacctgatagggcgctgcagaggcccactattaggctagtataaaaatctctgctgtacatggcac

SEQ ID NO: 17208 - DNA, 373 bp, synthetic construct
  source 1..373: mol_type = other DNA
gtatacgaggttagttcattctcgtgtacaatattggacaaacaaaattccgatttggcttagggcacccctccagcgacggccgaactgggctagccatgcccacagtaggactagcagatggagggactaaccgtagtggcgagctccctgggtggtctaagtcctgagtacaggacagtcgtcagtagttcgacgtgagcaggagctcacctcgagatgctatgtggacgagggcatgcccaagacacaccttaaccctggcgggggtcgccagggtgaaatcacaccatgtgatgggggtacgacctgatagggtgctgcagaggcccactaacaggctagtataaaaaatctctgctgtacatggcac

SEQ ID NO: 17209 - DNA, 373 bp, synthetic construct
  source 1..373: mol_type = other DNA
gtatacgaggttagttcattctcgtgtacaatattggacaaacaaaaattccgatttggcctagggcacccctccagcgacggccgaactgggctagccatgcccacagtaggactagcaaacggagggactagccgtagtggcgagctccctgggtggtctaagtcctgagtacaggacagtcgtcagtagttcgacgtgagcagtagcccacctcgagatgctatgtggacgagggcatgcccaagacacaccttaaccctggcgggggtcgccagggtgaaatcacaccatgtgatgggggtacgacctgatagggtgctgcagaggcccactaacaggctagtataaaaatctctgctgtacatggcac

SEQ ID NO: 17210 - DNA, 372 bp, synthetic construct
  source 1..372: mol_type = other DNA
gtatacgaggttagttcattctcgtgtgcaatattgggtaaacaaaattccgatttggcctagggcacccctccagcgacggccgaactgggctagccatgcccacagtaggactagcaaacggagggactagccgtagtggcgagcttcctgggtggtctaagtcctgagtacaggacagtcgtcagtagttcgacgtgagcaggagcccacctcgagatgctatgtggacgagggcatgcccaagacacaccttaaccctggcgggggtcgccagggtgaaatcacaccatgtgatgggagtacgacctgatagggtgctgcagaggcccactaacaggctagtataaaaatctctgctgtacatggcac

SEQ ID NO: 17211 - DNA, 373 bp, synthetic construct
  source 1..373: mol_type = other DNA
gtatacgaggttagctcgtcctcgtgtactacattggacaaactaaaattccgatttggcctagggtacccctccagcgacggccgaactgggctagccatgcccacagtaggactagcaaacggagggactagccgtagtggcgagctccctgggtggtctaagtcctgagtacaggacagtcgtcagtagttcgacgtgagcaggagcccacctcgagatgctatgtggacgagggcatgcccaagacacaccttaaccctggcgggggtcgccagggtgaaatcacaccatgtgatgggggtacgacctgatagggtgctgcagaggcccactaacaggctagtataaaaatctctgctgtacatggcac

SEQ ID NO: 17212 - DNA, 373 bp, synthetic construct
  source 1..373: mol_type = other DNA
gtatacgaggttagctcgtcctcgtatacgatattggatacactaaatttcgatttggtctagggcacccctccagcgacggccgaaacgggctagccatgcccatagtaggactagcaaacggagggactagccgtagtggcgagctccctgggtggtctaagtcctgagtacaggacagtcgtcagtagttcgacgtgagcactagcccgcctcgagatgctacgtggacgagggcatgcccaagacacaccttaaccctggcgggggtcgctagggtgaaatcacattatgtgatgggggtacgacctgatagggtgctgcagaggcccactagcaggctagtataaaaaatctctgctgtacatggcac

SEQ ID NO: 17213 - DNA, 373 bp, synthetic construct
  source 1..373: mol_type = other DNA
gtatacgaggttagctcgtcctcgtatacaatattggacaaaccaaaattccgatttggcctagggcacccctccagcgacggccgaactgggctagccatgcccacagtaggactagcaaacggagggactagccgtagtggcgagctccctgggtggtctaagtcctgagtacaggacagtcgtcaatagttcgacgtgagcaggagcccacctcgagatgctatgtggacgagggcatgcccaagacacaccttaaccctggcaggggtcgccagggtgaaaccacaccatgtgatgggggtacgacctgatagggtgctgcagaggcccactaacaggctagtataaaaatctctgctgtacatggcac

SEQ ID NO: 17214 - DNA, 372 bp, synthetic construct
  source 1..372: mol_type = other DNA
gtatacgaggttagctcgtcctcgtgtacaatattggacaaacaaaattccgatttggcctagggcacccctccagcgacggccgaaccgggctagccatgcccatagtaggactagcaaacggagggactagccgtagtggcgagctccctgggtggtctaagtcctgagtacaggacagtcgtcagtagttcgacgtgagcaggagcccacctcgagatgctatgtggacgagggcatgcccaagacacaccttaaccctggcgggggtcaccagggtgaaatcacaccatgtggtgggggtacgacctgatagggtgctgcagaggcccactaacaggctagtataaaaatctctgctgtacatggcac

SEQ ID NO: 17215 - DNA, 372 bp, synthetic construct
  source 1..372: mol_type = other DNA
gtatacgaggttagttcgttctcgtgtacaaaattggacaaattaaattctgattcgacctagggcatccctccagcgacggccgacctgggctagccatgcccacagtaggactagcaaacggagggactagccgtagtggcgagctccctgggtggtctaagtcctgagtacaggacagtcgtcagtagttcgacgtgagcaggagcccacctcgagatgctatgtggacgagggcatgcccaagacacaccttaaccctggcgggggtcgctagggtgaaatcacaccatgtgatgggggtacgacctgatagggtgctgcagaggcccactaacaggctagtataaaaatctctgctgtacatggcac

SEQ ID NO: 17216 - DNA, 372 bp, synthetic construct
  source 1..372: mol_type = other DNA
gtatacgaggttagttcgttctcgtgtacaaaattggacaaatcaaattctgattcgacctagggcatccctccagcgacggccgacctgggctagccatgcccacagtaggactagcaaacggagggactagccgtagtggcgagctccctgggtggtctaagtcctgagtacaggacagtcgtcagtagttcgacgtgagcaggagcccacctcgagatgctatgtggacgagggcatgcccaagacacaccttaaccctggcgggggtcgctagggtgaaatcacaccatgtgatgggggtacgacctgatagggtgctgcagaggcccactaacaggctagtataaaaatctctgctgtacatggcac

SEQ ID NO: 17217 - DNA, 373 bp, synthetic construct
  source 1..373: mol_type = other DNA
gtatacgaggttagctcttcctcgtgtacaatattggacaaaacaaaattccgatttggcttagggcacccctccagcgacggccgaactgggctagccacgcccacagtaggactagcagatggagggactagccgtagtggcgagctccctgggtggtctaagtcctgagtacaggacagtcgtcagtagttcgacgtgagcaggagcccacctcgagatgctatgtggacgagggcatgcccaagacacaccttaaccctggcgggggtcgccagggtgaaatcacaccatgtgatgggggtacgacctgatagggtgctgcagaggcccactaacaggctagtataaaaatctctgctgtacatggcac

SEQ ID NO: 17218 - DNA, 372 bp, synthetic construct
  source 1..372: mol_type = other DNA
gtatacgaggttagttcgttctcgtgtacaaaattggacaaattaaattctgattcggcctagggcatccctccagcgacggccgacctgggctagccatgcccacagtaggactagcaaacggagggactagccgtagtggcgagctccctgggtggtctaagtcctgagtacaggacagtcgtcagtagttcgacgtgagcaggagcccacctcgagatgctatgtggacgagggcatgcccaagacacaccttaaccctggcgggggtcgctagggtgaaatcacaccatgtgatgggggtacgacctgatagggtgctgcagaggcccactaacaggctagtataaaaatctctgctgtacatggcac

SEQ ID NO: 17219 - DNA, 372 bp, synthetic construct
  source 1..372: mol_type = other DNA
gtatacgaggttagctcgtcctcgtgtacaaaattggacaaattaaattctgattcgacctagggcatccctccagcgacggccaacctgggctagccatgcccacagtaggactagcaaacggagggactagccgtagtggcgagctccctgggtggtctaagtcctgagtacaggacagtcgtcagtagttcgacgtgagcaggagcccaccttgagatgctatgtggacgagggcatgcccaagacacaccttaaccctggcgggggtcgctagggtgaaatcacaccatgtgatgggggtacgacctgatagggtgctgcagaggcccactaacaggctagtatgaaaatctctgctgtacatggcac

SEQ ID NO: 17220 - DNA, 373 bp, synthetic construct
  source 1..373: mol_type = other DNA
gtatacgagaatgaactaacctcgtatacctaattgggtagttcaaattccaatttggttcagggcccccctccagcgacggccgaactgggctagccatgcccacagtaggactagcagacggagggactagccgtagtggcgagctccctgggtggtctaagtcctgagtacaggacagtcgtcagtagttcgacgtgagcagcagctcatctcgagatgctatgtggacgagggcacgcccaagacacaccttaaccctggcgggggtcgccagggtgaaatcacactgcgtgatgggagtacgacctgatagggtgctgcagaggcccactattaggctagtataaaaaatctctgctgtacatggcac

SEQ ID NO: 17221 - DNA, 373 bp, synthetic construct
  source 1..373: mol_type = other DNA
gtatacgaggttagctcatcctcgtgtacaatattggacaaacaaaattccgatttggtttaggacacccctccagcgacggccgaactgggctagccatgcccacagtaggactagcagatggagggactagccgtagtggcgagctccctgggtggtctaagtcctgagtacaggacagtcgtcagtagttcgacgtgagcaggagcccacctcgagatgctatgtggacgagggcatgcccaagacacaccttaaccctggcgggggtcgccagggtgaaatcacatcatgtgatgggggtacgacctgatagggtgctgcagaggcccactaacaggctagtataaaaaatctctgctgtacatggcac

SEQ ID NO: 17222 - DNA, 373 bp, synthetic construct
  source 1..373: mol_type = other DNA
gtatacgaggttagctcatcctcgtgtacaatattggacaaacaaaattccgatttggcttaggacacccctccagcgacggccgaactgggctagccatgcccacagtaggactagcagatggagggactagccgtagtggcgagctccctgggtggtctaagtcctgagtacaggacagtcgtcagtagttcgacgtgagcaggagctcacctcgagatgctatgtggacgagggcatgcccaagacacaccttaaccctggcgggggtcgccagggtgaaatcacatcatgtgatgggggtacgacctgatagggtgctgcagaggcccactaacaggctagtataaaaaatctctgctgtacatggcac

SEQ ID NO: 17223 - DNA, 373 bp, synthetic construct
  source 1..373: mol_type = other DNA
gtatacgaggttagctcgtcctcgtatacaatattggacaaaccaaaattccgatttggcctagggcacccctccagcgacggccgaactgggctagccatgcccacagtaggactagcaaacggagggactagccgtagtggcgagctccctgggtggtctaagtcctgagtacaggacagtcgtcaatagttcgacgtgagcaggagcccacctcgagatgctatgtggacgagggcatgcccaagacacaccttaaccctggcaggggtcgccagggtgaaatcacaccaagtgatgggggtacgacctgatagggtgctgcagaggcccactaacaggctagtataaaaatctctgctgtacatggcac

SEQ ID NO: 17224 - DNA, 373 bp, synthetic construct
  source 1..373: mol_type = other DNA
gtatacgaggttagttcattctcgtgtacaatattggataaaacaaaattacgatttggcctagggcacccctccagcgacggccgaactgggctagccatgcccacagtaggactagcaaacggagggactagccgtagtggcgagctccctgggtggtctaagtcctgagtacaggacagtcgtcagtagttcgacgtgagcaggagcccacctcgagatgctatgtggacgagggcatgcccaagacacaccttaaccctggcgggggtcgccagggtgaaatcacaccatgtgatgggggtacgacctgatagggtgctgcagaggcccactaataggctagtataaaaatctctgctgtacatggcac

SEQ ID NO: 17225 - DNA, 373 bp, synthetic construct
  source 1..373: mol_type = other DNA
gtatacgaggttagctcatcctcgtgtacaatattggacaaacaaaattacgatttggcctagggcacccctccagcgacggccgaactgggctagccatgcccacagtaggactagcaaacggagggactagccatagtggcgagctccctgggtggtctaagtcctgagtacaggacagtcgtcagtagttcgacgtgagcaggagcccacctcgagatgctatgtggacgagggcatgcccaagacacaccttaaccctggcgggggtcgccagggtgaaatcacaccatgtgatgggggtacgacctgatagggtgctgcagaggcccactaataggctagtataaaaaatctctgctgtacatggcac

SEQ ID NO: 17226 - DNA, 372 bp, synthetic construct
  source 1..372: mol_type = other DNA
gtatacgaggttagttcattctcgtatgcaatattggacaaactaaatctcgattcggtttagggcacccctccagcgacggccgaactgggctagccatgcccacagtaggactagcagacggagggactagccgtagtggcgagctccctgggtggtctaagtcctgagtacaggacagtcgtcagtagttcgacgtgagcagaagcccacctcgagatgctatgtggacgagggcatgcccaagacacaccttaatcctggcgggggtcgccagggtgaaatcacacaatgtgaggggggtacgacctgatagggcgctgcagaggcccactaacaggctagtataaaaatctctgctgtacatggcac

SEQ ID NO: 17227 - DNA, 372 bp, synthetic construct
  source 1..372: mol_type = other DNA
tatacgaggttagctcggtcctcgtatacaatattggacaaacaaaattccgatttggcctagggcacccctccagcgacggccgaactgggctagccatgcccacagtaggactagcaaacggagggactagccgtagtggcgagctccctgggtggtctaagtcctgagtacaggacagtcgtcagtagttcgacgtgagcaggagcccacctcgatatgctatgtggacgagggcatgcccaagacacaccttaaccctggcgggggtcgccagggtgaaatcacaccatgtgatgggagtacgacctgatagggtgctgcagaggcccactaacaggctagtataaaaatctctgctgtacatggcac

SEQ ID NO: 17228 - DNA, 373 bp, synthetic construct
  source 1..373: mol_type = other DNA
gtatacgaggttagctcgttctcgtatactatattggatacactaaatttcgatttggcctagggcgcccctccagcgacggccgaaatgggctagccatgcccatagtaggactagcaaacggagggactagccgtagtggcgagctccctgggtggtctaagtcctgagtacaggacaatcgtcagtagttcgacgtgagcaccagcccacctcgagatgctacgtggacgagggcatgcccaagacacaccttaaccctggcgggggtcgctagggtgaaatcacattatgtgatgggggtacgacctgatagggtgctgcagaggcccactagcaggctagtataaaaaatctctgctgtacatggcac

SEQ ID NO: 17229 - DNA, 372 bp, synthetic construct
  source 1..372: mol_type = other DNA
gtatacgaggttagctcatcctcgtgtacaatattggacaaacaaaattccgatttggctcagggcacccctccagcgacggccgaactgggctagccatgcccatagtaggactagcagatggagggactagccgtagtggcgagctccctgggtggtctaagtcctgagtacaggacagtcgtcagtagttcgacgtgagcaagagcccacctcgagatgctatgtggacgagggcacgcccaagacacaccttaaccctggcgggggtcgccagggtgaaatcacaccatgtgatgggggtacgacctgatagggtgctgcagaggcccactaacaggctagtataaaaatctctgctgtacatggcac

SEQ ID NO: 17230 - DNA, 372 bp, synthetic construct
  source 1..372: mol_type = other DNA
gtatacgaggttagttcattctcgtgtacaatattggacaaactaaattcagatttggtctagggcacccctccagcgacggccgagctgggctagccatgcccacagtaggactagcaaacggagggactagccgtggtggcgagctccctgggtggtctaagtcctgagtacaggacagtcgtcagtagttcgacgtgagcagaatctcacctcgagatgctatgtggacgagggcatgcccaagacacaccttaaccctggcgggggtcgctagggtgaaatcacattatgtgatgggggtacgacctgatagggtgctgcagaggcccactaacaggctagtataaaaatctctgctgtacatggcac

SEQ ID NO: 17231 - DNA, 372 bp, synthetic construct
  source 1..372: mol_type = other DNA
gtatacgaggttagttcattctcgtgtacaatattggacaaacaaaattccgatttggcttagggcacccctccagcgacggccgaactgggctagccatgcccacagtaggactagcaaacggagggactagccgtagtggcgagctccctgggtggtctaagtcctgagtacaggacagtcgtcagtagttcgacgtgagcaggagcccacctcgagatgctatgtggacgagggcatgcccaagacacaccttaaccctggcgggggtcgccagggtgaaaccacaccatgtgatgggggtacgacctgatagggtgctgcagaggcccactaacaggctagtataaaaatctctgctgtacatggcac

SEQ ID NO: 17232 - DNA, 373 bp, synthetic construct
  source 1..373: mol_type = other DNA
gtatacgagattagctcatcctcgtgtacaatattgggcaaaacaaaatcccgatttggcttagggaatccctccagcgacggccgaactgggctagccatgcccacagtaggactagcagatggagggactagccgtagtggcgagctccctgggtggtctaagtcctgagtacaggacagtcgtcagtagttcgacgtgagcaggagcccacctcgagatgctatgtggacgagggcacgcccaagacacaccttaaccctggcgggggtcgccagggtgaaatcacaccatgtgatgggggtacgacctgatagggtgctgcagaggcccactaacaggctagtataaaaatctctgctgtacatggcac

SEQ ID NO: 17233 - DNA, 371 bp, synthetic construct
  source 1..371: mol_type = other DNA
gtatacgaggttagttcatcctcgtgtacaatattggacaacaaaattccgatttggcttaggacacccctccagcgacggccgaactgggctagccatgcccacagtaggactagcagatggagggactagccgtagtggcgagctccctgggtggtctaagtcctgagtacaggacagtcgtcagtagttcgacgtgagcaggagctcacctcgagatgctatgtggacgagggcatgcccaagacacaccttaaccctggcgggggtcgccagggtgaaatcacatcatgtgatgggggtacgacctgatagggtgctgcagaggcccactaacaggctagtataaaaatctctgctgtacatggcac

SEQ ID NO: 17234 - DNA, 373 bp, synthetic construct
  source 1..373: mol_type = other DNA
gtatacgaggttagctcatcctcgtgtacaatattggataaacaaaattccgatttggcctagggcacccctccagcgacggccgaactgggctagccatgcccacagtaggactagcaaacggagggactagccgtagtggcgagcttcctgggtggtctaagtcctgagtacaggacagtcgtcagtagttcgacgtgagcaggagcccacctcgagatgctatgtggacgagggcatgcccaagacacaccttaaccctggcgggggtcgccagggtgaaatcacaccatgtgatgggagtacgacctgatagggtgctgcagaggcccactaacaggctagtataaaaaatctctgctgtacatggcac

SEQ ID NO: 17235 - DNA, 348 bp, synthetic construct; identical to SEQ ID NO: 331
  source 1..348: mol_type = other DNA

SEQ ID NO: 17236 - DNA, 374 bp, synthetic construct
  source 1..374: mol_type = other DNA
gggtatacgaggttagctctttctcgtatacgatattggatacactaaatttcgatttggtctagggcacccctccagcgacggccgaaatgggctagccatgcccatagtaggactagcaaacggagggactagccgtagtggcgagctccctgggtggtctaagtcctgagtacaggacagtcgtcagtagttcgacgtgagcactagcccacctcgagatgctacgtggacgagggcatgcccaagacacaccttaaccctggcgggggtcgctagggtgaaatcacattatgtgatgggggtacgacctgatagggtgctgcagaggcccactagcaggctagtataaaaatctctgctgtacatggcac

SEQ ID NO: 17237 - DNA, 372 bp, synthetic construct
  source 1..372: mol_type = other DNA
gtatacgaggttagctcatcctcgtgtacaatattggacaaacaaaattccgatttggcttaggacacccctccagcgacggccgaactgggctagccatgcccacagtaggactagcagatggagggactagccgtagtggcgagctccctgggtggtttaagtcctgagtacaggacagtcgtcagtagttcgacgtgagcaggagcccacctcgagatgctatgtggacgagggcatgcccaaaacacaccttagccctggcgggggtcgccagggtgaaatcacatcatgtgatgggggtacgacctgatagggtgctgcagaggcccactaacaggctagtataaaaatctctgctgtacatggcac

SEQ ID NO: 17238 - DNA, 372 bp, synthetic construct
  source 1..372: mol_type = other DNA
gtatacgaggttagctcatcctcgtgtacaatattggacaaacaaaattccgatttggcttaggacacccctccagcgacggccgaactgggctagccatgcccacagtaggactagcagatggagggactagccgtagtggcgagctccctgggtggtttaagtcctgagtacaggacagtcgtcagtagttcgacgtgagcaggagcccacctcgagatgctatgtggacgagggcatgcccaaaacacaccttaaccctggcgggggtcgccagggtgaaatcacatcatgtgatgggggtacgacctgatagggtgctgcagaggcccactaacaggctagtataaaaatctctgctgtacatggcac

SEQ ID NO: 17239 - DNA, 372 bp, synthetic construct
  source 1..372: mol_type = other DNA
gtatacgaggttagctcatcctcgtgtacaatattggacaaacaaaattccgatttggcttaggacacccctccagcgacggccgaactgggctagccatgcccacagtaggactagcagatggagggactagccgtagtggcgagctccctgggtggtttaagtcctgagtacaggacagtcgtcagtagttcgacgtgagcaggagcccacctcgagatgctatgtggacgagggcatgcccaaaacacaccttaaccctggcgggggtcgccagggtgaaatcacatcatgtgatgggggtacgacctgatagggtgctgcagaggcccactaacaggctagtataaaaatctctgctgtacacggcac

SEQ ID NO: 17240 - DNA, 372 bp, synthetic construct
  source 1..372: mol_type = other DNA
gtatacgaggttagctcatcctcgtgtacaatattggacaaacaaaattccgatttggcttaggacacccctccagcgacggccgaactgggctagccatgcccacagtaggactagcagatggagggactagccgtagtggcgagctccctgggtggtctaagtcctgagtacaggacagtcgtcagtagttcgacgtgagcaggagctcacctcgagatgctatgtggacgagggcatgcccaagacacaccttaaccctggcgggggtcgccagggtgaaatcacatcatgtgatgggggtacgacctgatagggtgctgcagaggcccactaacaggctagtataaaaatctctgctgtacatggcac

SEQ ID NO: 17241 - DNA, 372 bp, synthetic construct
  source 1..372: mol_type = other DNA
gtatacgaggttagctcatcctcgtgtacaatattggacaaacaaaattccgatttggcttaggtcacccctccagcgacggccgaactgggctagccatgcccacagtaggactagcagatggagggactagccgtagtggcgagctccctgggtggtttaagtcctgagtacaggacagtcgtcagtagttcgacgtgagcaggagcccacctcgagatgctatgtggacgagggcatgcccaaaacacaccttaaccctggcgggggtcgccagggtgaaatcacatcatgtgatgggggtacgacctgatagggtgctgcagaggcccactaacaggctagtataaaaatctctgctgtacatggcac

SEQ ID NO: 17242 - DNA, 372 bp, synthetic construct
  source 1..372: mol_type = other DNA
gtatacgaggttagttcattctcgtatacaatattggacaaacaaaattcctatttggcttaggacacccctccagcgacggccgaactgggctagccatgcccacagtaggactagcagatggagggactagccgtagtggcgagctccctgggtggtttaagtcctgagtacaggacagtcgtcagtagttcgacgtgagcaggagcccacctcgagatgctatgtggacgagggcatgcccaaaacacaccttaaccctggcgggggtcgccagggtgaaatcacatcatgtgacgggggtacgacctgatagggtgctgcagaggcccactaacgggctagtataaaaatctctgctgtacatggcac

SEQ ID NO: 17243 - DNA, 372 bp, synthetic construct
  source 1..372: mol_type = other DNA
gtatacgaggttagttcattctcgtatacaatattggacaaacaaaattcctatttggcttaggacacccctccagcgacggccgaactgggctagccatgcccacagtaggactagcagatggagggactagccgtagtggcgagctccctgggtggtttaagtcctgagtacaggacagtcgtcagtagttcgacgtgagcaggagcccacctcgagatgctatgtggacgagggcatgcccaaaacacaccttaaccctggcgggggtcgccagggtgaaatcacatcatgtgatgggggtacgacctgatagggtgctgcagaggcccactaacaggctagtataaaaatctctgctgtacatggcac

SEQ ID NO: 17244 - DNA, 391 bp, synthetic construct; identical to SEQ ID NO: 426
  source 1..391: mol_type = other DNA

SEQ ID NO: 17245 - DNA, 372 bp, synthetic construct
  source 1..372: mol_type = other DNA
gtatacgaggttagctcattctcgtgtacaatattggacaaacaaaattccgatttggcttaggacacccctccagcgacggccgaactgggctagccatgcccatagtaggactagcagatggagggactagccgtggtggcgagctccctgggtggtctaagtcctgagtacaggacagtcgtcagtagttcgacgtgagcaggagctcacctcgagatgctatgtggacgagggcatgcccaagacacaccttaaccctggctggggtcgccagggtgaaatcacatcatgtgatgggggtacgacctgatagggtgctgcagaggcccactaacaggctagtataaaaatctctgctgtacatggcac

SEQ ID NO: 17246 - DNA, 372 bp, synthetic construct
  source 1..372: mol_type = other DNA
gtatacgaggttagttcatcctcgtgtacaatattggacaaacaaaattccgatttggcttaggacacccctccagcgacggccgaactgggctagccatgcccacagtaggactagcagatggagggactagccgtagtggcgagctccctgggtggtttaagtcctgagtacaggacagtcgtcagtagttcgacgtgagcaggagcccacctcgagatgctatgtggacgagggcatgcccaaaacacaccttaaccctggcgggggtcgccagggtgaaatcacatcatgtgatgggggtacgacctgatagggtgctgcagaggcccactaacaggctagtataaaaatctctgctgtacatggcac

SEQ ID NO: 17247 - DNA, 382 bp, synthetic construct
  source 1..382: mol_type = other DNA
gtatacgaggttaggcaagttctcgtatacatattggacactctaaaaataattaggcctaggggacaaaaatcctccttagcgaaggccgaaaagaggctaaccatgcccttagtaggactagcaaaataaggggggtagcaacagtggcgagttcgttggatggctgaagccctgagtacagggtagtcgtcagtggttcgacgctttggaggacaagcctcgagatgccacgtggacgagggcatgcccacagcacatcttaacctggacaggggtcgttcaggtgaaaacggtttaaccaaccgctacgaatacagtctgataggatgctgcagaggcccactgtattgctactgaaaatctctgctgtacatggcac

SEQ ID NO: 17248 - DNA, 373 bp, synthetic construct
  source 1..373: mol_type = other DNA
gtatacgaggttagttcattctcgtatgcacaatcgggcaaatgaaaacttcaatttggttcagggcctctctccagcgacggccgaactgggctagccatgcccatagtaggactagcaaatggagggactagccgtagtggcgagctccctgggtggtctaagtcctgagtacaggacagtcgtcagtagttcgacgtgagcagaagctcacctcgagatgctatgtggacgagggcgtgcccaagacacaccttaactctagcgggggtcgctagggtgagaccacaccatgtgatgggagtacgacccgatagggtgctgcttaggcccactaacaggctagtataaaaatctctgctgtacatggcac

SEQ ID NO: 17249 - DNA, 377 bp, synthetic construct; identical to SEQ ID NO: 374
  source 1..377: mol_type = other DNA

SEQ ID NO: 17250 - DNA, 373 bp, synthetic construct
  source 1..373: mol_type = other DNA
gtatacgaggttagttcattctcgtatacacgattggacaaatcaaaattataatttggttcagggcctccctccagcgacggccgaactgggctagccatgcccatagtaggactagcaaacggagggactagccgtagtggcgagctccctgggtggtctaagtcctgagtacaggacagtcgtcagtagttcgacgtgagcagaagcccacctcgagatgctacgtggacgagggcatgcccaagacacaccttaaccctagcgggggtcgctagggtgaaatcacaccacgtgatgggagtacgacctgatagggcgctgcagaggcccactattaggctagtataaaaatctctgctgtacatggcac

SEQ ID NO: 17251 - DNA, 366 bp, synthetic construct; identical to SEQ ID NO: 342
  source 1..366: mol_type = other DNA

SEQ ID NO: 17252 - DNA, 386 bp, synthetic construct
  source 1..386: mol_type = other DNA
gtatacgagattagctaaagtactcgtatacggattgggtgtcaacaaatttttgaattggcaacgtagggaaccttcccctcagcgaaggccgaaaagaggctagccatgcccttagtaggactagcaaaaagaggggactagcggtagcagtgagttcattggatggccgaacccctgagtacaggggagtcgtcaatggttcgacactccattagtcgaggagtctcgagatgccatgtggacgagggcatgcccacggcacatcttaacccatgcgggggttgcatgggtgaaagcgctattcgtggcgttatggacacagcctgatagggtgtagcagagacctgctactccgctagtaaaaactctgctgtacatggcac

SEQ ID NO: 17253 - DNA, 387 bp, synthetic construct; identical to SEQ ID NO: 415
  source 1..387: mol_type = other DNA

SEQ ID NO: 17254 - DNA, 361 bp, synthetic construct
  source 1..361: mol_type = other DNA
agttcattctcgtgtacatgattggacaaatcaaaatctcaatttggttcagggcctccctccagcgacggccgagctgggctagccatgcccacagtaggactagcaaacggagggactagccgtagtggcgagctccctgggtggtctaagtcctgagtacaggacagtcgtcagtagttcgacgtgagcagaagcccacctcgagatgctatgtggacgagggcatgcccaagacacaccttaaccctagcgggggtcgttagggtgaaatcacaccatgtgatgggagtacgacctgatagggtgctgcagaggcccactattaggctagtataaaaatctctgctgtacatggcac

SEQ ID NO: 17255 - DNA, 387 bp, synthetic construct; identical to SEQ ID NO: 416
  source 1..387: mol_type = other DNA

SEQ ID NO: 17256 - DNA, 390 bp, synthetic construct; identical to SEQ ID NO: 424
  source 1..390: mol_type = other DNA

SEQ ID NO: 17257 - DNA, 360 bp, synthetic construct
  source 1..360: mol_type = other DNA
gctctttctcgtatacgacattggatacactaaatttcgatttggtctagggcacccctccagcgacggccgaaatgggctagccatgcccatagtaggactagcaaacggagggactagccgtagtggcgagctccctgggtggtctaagtcctgagtacaggacagtcgtcagtagttcgacgtgagcaccagcccacctcgagatgctacgtggacgagggcatgcccaagacacaccttaaccctggcgggggtcgctagggtgaaatcacattatgtgatgggggtacgacctgatagggtgctgcagaggcccactaacaggctagtataaaaaatctctgctgtacatggcac

SEQ ID NO: 17258 - DNA, 360 bp, synthetic construct
  source 1..360: mol_type = other DNA
gctcgttctcgtatacgacattggatacactaaatttcgatttggtctagggcacccctccagcgacggccgaaatgggctagccatgcccatagtaggactagcaaacggagggactagccgtagtggcgagctccctgggtggtctaagtcctgagtacaggacagtcgtcagtagttcgacgtgagcaccagcccacctcgagatgctacgtggacgagggcatgcccaagacacaccttaaccctggcgggggtcgctagggtgaaatcacatcatgtgatgggggtacgacctgatagggtgctgcagaggcccactagcaggctagtataaaaaatctctgctgtacatggcac

SEQ ID NO: 17259 - DNA, 386 bp, synthetic construct
  source 1..386: mol_type = other DNA
gtatacgagattagctaaagtactcgtatacggattggatgttgacaaatatcgaattggcaaagtagggaacctttcccctcagcgaaggccgaaaagaggctagccatgcccttagtaggactagcaaaaggaggggactagcggtagcagtgagttcattggatggccgaatccctgagtacagggaagtcgtcaatggttcgacactccaccaatcgaggagtctcgagatgccatgtggacgagggcatgcccacggcacatcttaacctatgcgggggttgcatgggtgaaagcaccatttgcggtgttatggacacagcctgatagggtgtagcagagacctgctattccgctagtaaaaactctgctgtacatggcac

SEQ ID NO: 17260 - DNA, 386 bp, synthetic construct
  source 1..386: mol_type = other DNA
gtatacgagattagctaaagtactcgtatacggattggatgttgacaaaatattgaattgacaaggtagggaatttttccctcagcgaaggccgaaaagaggctaaccatgcccttagtaggactagcaaaaggaggggactagcggtagcagtgagttcattggatggcctaatccctgagtacagggaagtcgtcaatggttcgacactccaccagttgtggagtctcgagatgccatgtggacgagggcatgcccaaggcacatcttaacctatgcgggggttgcatgggcgaaagcaccatttatggtgttatggacacagcctgatagggtgtagcagagacctgctactccgctagtaaaaactctgctgtacatggcac

SEQ ID NO: 17261 - DNA, 385 bp, synthetic construct
  source 1..385: mol_type = other DNA
gtatacgagattagctaaagtactcgtatatggattggacgtcaacaaatttttaattggcaagtcagggaaccttcccctcagcgaaggccgaaaagaggctagccatgcccttagtaggactagccaaaggaggggactagcggtagcagtgagttcattggatggccgaacccctgagtacaggggagtcgtcaatggttcgacactccatcagctgaggagtctcgagatgccatgtggacgagggcatgcccacggcacatcttaacctatgcgggggttgcatgggtgaaagcgccattcgtggcgttatggacacagcctgatagggtgtagcagaagcctgctattccgctagtaaaaactctgctgtacatggcac

SEQ ID NO: 17262 - DNA, 385 bp, synthetic construct; identical to SEQ ID NO: 402
  source 1..385: mol_type = other DNA

SEQ ID NO: 17263 - DNA, 385 bp, synthetic construct
  source 1..385: mol_type = other DNA
gtatacgagattagctaaagtactcgtatacgcattggacgtcaacaaattttgaattggtaacgtagggaaccttcccctcagcgaaggccgaaaagaggctagccatgcccttagtaggactagcaaaagtaggggactagcggtagcagtgagttcgttggatggccgaacccctgagtacaggggagtcgtcaatggttcgacactccattagtcgaggagtctcgagatgccatgtggacgagggcatgcccacggcacatcttaacccatgcgggggttgcatgggtgaaagcgctattcgtggcgttatggacacagcctgatagggtgtggcagagacctgctactccgctagtaaaaactctgctgtacatggcac

SEQ ID NO: 17264 - DNA, 385 bp, synthetic construct
  source 1..385: mol_type = other DNA
gtatacgagattagctaaagtactcgtatacggattggacgtcaacaaattttgaattggtaacgtagggaaccttcccctcagcgaaggccgaaaagaggctagccatgcccttagtaggactagcaaaagtaggggactagcggtagcagtgagttcgttggatggccgaacccctgagtacaggggagtcgtcaatggttcgacactccattagtcgaggagtctcgagatgccatgtggacgagggcatgcccacggcacatcttaacccatgcgggggttgcatgggtgaaagcgctattcgtggcgttatggacacagcctgatagggtgtggcagagacctgctactccgctagtaaaaactctgctgtacatggcac

SEQ ID NO: 17265 - DNA, 370 bp, synthetic construct; identical to SEQ ID NO: 348
  source 1..370: mol_type = other DNA

SEQ ID NO: 17266 - DNA, 385 bp, synthetic construct
  source 1..385: mol_type = other DNA
gtatacgagattagctaaagtactcgtatacggattggacgtcaacaaattttgaattggcaacgtagggaaccttccccttagcgaaggccgaaaagaggctagccatgcccttagtaggactagcaaaaggaggggactagcggtagcagtgagttcgttggatggccgaacccctgagtacaggggagtcgtcaatggttcgacactccatcagtcgaggagtctcgagatgccatgtggacgagggcatgcccacggcacatcttaacccatgcgggggttgcatgggtgaaagcgctattcgtggcgttatggacacagcctgatagggtgtagcagagacctgctactccgctagtaaaaactctgctgtacatggcac

SEQ ID NO: 17267 - DNA, 385 bp, synthetic construct
  source 1..385: mol_type = other DNA
gtatacgagattagctaaagtactcgtatacggattggacgtcaacaaattttgaattggcaacgtagggaaccttcccctcagcgaaggccgaaaagaggctagccatgcccttagtaggactagcaaaaggaggggactagcggtagcagtgagttcgttggatggccgaacccctgagtacaggggagtcgtcaatggttcgacactccattagtcgaggagtctcgagatgccatgtggacgagggcatgcccacggcacatcttaacccacgcgggggttgcatgggtgaaagcgctattcgtagcgttacggacacagcctgatagggtgtagcagagacctgctattccgctagtaaaaactctgctgtacatggcac

SEQ ID NO: 17268 - DNA, 385 bp, synthetic construct
  source 1..385: mol_type = other DNA
gtatacgagattagctaaagtactcgtatatggattggacgtcaacaaatttttaattggcaacgtagggaaccttcccctcagcgaaggccgaaaagaggctagccatgcccttagtaggactagcaaaagtaggggactagcggtagcagtgagttcgttggatggccgaacccctgagtacaggggagtcgtcaatggttcgacactccattagtcgaggagtctcgagatgccatgtggacgagggcatgcccacggcacatcttaacccatgcgggggttgcatgggtgaaagcgctattcgtggcgttatggacacagcctgatagggtgtagcagagacctgctattccgctagtaaaaactctgctgtacatggcac

SEQ ID NO: 17269 - DNA, 385 bp, synthetic construct
  source 1..385: mol_type = other DNA
gtatacgagattagctaaagtactcgtatacggattggacgtcaacaaattttgaattggcaaagtagggaatcttccccttagcgaaggccgaaaagaggctagccatgcccttagtaggactagcaaaaggaggggactagcagtagcagtgagttcattggatggccgaacccctgagtacaggggagtcgtcaatggttcgacactccttcagttgaggagtctcgagatgccatgtggacgagggcatgcccacggcacatcttaacctatgcgggggctgcatgggtgaaagcgccattcttggtgttatggacacagcctgatagggtgtagcagagacctgctattctgctagtaaaaactctgctgtacatggcac

SEQ ID NO: 17270 - DNA, 385 bp, synthetic construct
  source 1..385: mol_type = other DNA
gtatacgagattagctaaagtactcgtatacggattggacgtcaacaaatttttaatcggcaacgtagggaaccttcccctcagcgaaggccgaaaagaggctagccatgcccttagtaggactagcaaaaggaggggactagcggtagcagtgagttcgttggatggccgaacccctgagtacaggggagtcgtcaatggttcgacactccattagtcgaggagtctcgagatgccatgtggacgagggcatgcccacggcacatcttaacccatgcgggggttgcatgggtgaaagcgccattcgtggcgtcatggacacagcctgatagggtgtagcagagacctgctattccgctagtaaaaactctgctgtacatggcac

SEQ ID NO: 17271 - DNA, 385 bp, synthetic construct
  source 1..385: mol_type = other DNA
gtatacgagattagctaaagtactcgtatacggattggacgtcaacaaattttgaattggtaacgtagggaaccttcccctcagcgaaggccgaaaagaggctagccatgcccttagtaggactagcaaaacgaggggactagcggtagcagtgagttcgttggatggccgaacccctgagtacaggggagtcgtcaatggttcgacactccattagtcgaggagtctcgagatgccatgtggacgagggcatgcccacggcacatcttaacccgtgcgggggttgcatgggtgaaagcgctattcgtggcgttatggacacagcctgatagggtgtagcagagacctgctactccgctagtaaaaactctgctgtacatggcac

SEQ ID NO: 17272 - DNA, 385 bp, synthetic construct
  source 1..385: mol_type = other DNA
gtatacgagattagctaaagtactcgtatacggattggacgtccacaaactttgaattggcaacacagggaaccttcccctcggcgaaggccgaaaagaggctagccatgcccttagtaggactagcaaaaggaggggactagcggtagcagtgagtccattggatggccgaacccctgagtacaggggagtcgtcaatggttcgacactcctttagtcgaggagtctcgagatgccatgtggacgagggcatgcccacggcacatcttaacccacgcgggggttgcgtgggtgaaagcgccattcgtggcgtcatggacacagcctgatagggtgtagcagagacctgctactccgctagtaaaaactctgctgtacatggcac

SEQ ID NO: 17273 - DNA, 385 bp, synthetic construct
  source 1..385: mol_type = other DNA
gtatacgagattagctaaagtactcgtatacggattggacgtcaacaaattttgaattggcaacgtagggaaccttccacttagcgaaggccgaaaagaggctagccatgcccttagtaggactagcaaaaggaggggactagcggtagcagtgagttcgttggatggccgaacccctgagtacaggggagtcgtcaatggttcgacactccattagttgaggagtctcgagatgccatgtggacgagggcatgcccacggcacatcttaacccatgcgggggttgcatgggtgaaagcgctattcgtggcgttatggacacagcctgatagggtgtagcagagacctgctactccgctagtaaaaactctgctgtacatggcac

SEQ ID NO: 17274 - DNA, 360 bp, synthetic construct
  source 1..360: mol_type = other DNA
agttcattctcgtgtacatgattggacaaatcaaaatctcaatttggttcagggcctccctccagcgacggccgagctgggctagccatgcccacagtaggactagcaaacggagggactagccgtagtggcgagctccctgggtggtctaagtcctgagtacaggacagtcgtcagtagttcgacgtgagcagaagcccacctcgagatgctatgtggacgagggcatgcccaagacacaccttaacctagcgggggtcgttagggtgaaatcacaccatgtgatgggagtacgacctgatagggtgctgcagaggcccactattaggctagtataaaaatctctgctgtacatggcac

SEQ ID NO: 17275 - DNA, 384 bp, synthetic construct
  source 1..384: mol_type = other DNA
gtatacgagattagctaaagtactcgtatacggattggacgtcgacaaattttaattggcaatgtagggaactatcccctcagcgaaggccgaaaagaggctagccatgcccttagtaggactagcaaaaggaggggactagcggtagcagtgagttcattggatggccgaatccctgagtacagggaagtcgtcaatggttcgacactccatcagctgaggagtctcgagatgccatgtggacgagggcatgcccacggcacatcttaacctatgcgggggttgcatgggtgaaagcgccattcgtggtgctatgaacacagcctgatagggtgtagcagagacctgctattccgctagtaaaaactctgctgtacatggcac

SEQ ID NO: 17276 - DNA, 383 bp, synthetic construct
  source 1..383: mol_type = other DNA
gtatacgcccagttagctcatgtcggcgtatatgattgggtatcccaaattaataatttggtttagggattaattcccctggcgaaggccgaaataggttaaccataccttcagtaggacgagcgtaatgggggactagtggtagcagtgagctccttggattaccgaagccccgagcacggggtagtcgtcaatggttcgacgcatcaaggaatgcctcgagatgccatgtggacgagggcgtgcccacggtgaatcttaacccaagcgggggtcgcttgggtgaaagagggtcattatatggctctttgggagtacagcctgatagggtgttgcagagacctgctacatcactagtataaaaactctgctgtacatggcac

SEQ ID NO: 17277 - DNA, 386 bp, synthetic construct
  source 1..386: mol_type = other DNA
gtatacgagattagctaaagtactcgtatacggattggatgtcgacaaatattgaattggcaaagtagggaattttcccctcagcgaaggccgaaaagaggctagccatgcccttagtaggactagcaaaagaaggggactagcggtagcagtgagttcattggatggccgaatccctgagtacagggaagtcgtcaatggttcgacactccatcagtcgaggagtctcgagatgccatgtggacgagggcatgcccacggcacatcttaacctatgcgggggttgcatgggtgaaaacgccaaccgtggtgttatggacacagcctgatagggtgtagcagagacctgctattccgctagtaaaaaactctgctgtacatggcac

SEQ ID NO: 17278 - DNA, 375 bp, synthetic construct; identical to SEQ ID NO: 368
  source 1..375: mol_type = other DNA

SEQ ID NO: 17279 - DNA, 380 bp, synthetic construct
  source 1..380: mol_type = other DNA
tacgccgacgtgagctaaccggacgtatatgattgggtatcccaaattaataatttggtttagggactaattcccctggcgaaggccgaaataggttagccataccttcagtaggacgagcgtaatgggggactagtggtagcagtgagctccttggattaccgaagccccgagtacggggtagtcgtcaatggttcgacgcatcaatgaatgcctcgagatgccatgtggacgagggcgtgcccacggtgaatcttaactcaagcgggggccgcttgggtgaaagagggtcattatgtggctctttgggagtacagcctgatagggtgttgcagagacctgctacatcactagtataaaaactctgctgtacatggcac

SEQ ID NO: 17280 - DNA, 381 bp, synthetic construct
  source 1..381: mol_type = other DNA
acgagactagctaaagtactcgtatacggattggatgttgacaaattttgaattggcaaagtaggtaactttcccctcagcgaaggccgaaaagaggctagccatgcccttagtaggactagcaaaaggaggggactagcggtagcagtgagttcattggatggccgaacccctgagtacaggggagtcgtcaatggttcgacactccatcgttcatggagtctcgagatgccatgtggacgagggcatgcccacggcacatcttaacctatgcgggggttgcatgggtgaaagcgccattcgtggcgttatggacacagcctgatagggtgtagcagagacctgctattccgctagtaaaaactctgctgtacatggcac

SEQ ID NO: 17281 - DNA, 385 bp, synthetic construct
  source 1..385: mol_type = other DNA
gtatacgagattagctaaagtactcgtatacggattggacgtcgacaaatttttaattggcaatacagggaaccttcccctcagcgaaggccgaaaagaggctagccatgcccatagtaggactagcaaaaggaggggactagcggtagcagtgagttcattggatggccgaatccctgagtacagggaagtcgtcaatggttcgacactccatcagtcgaggagtctcgagatgccatgtggacgagggcatgcccacggcacatcttaacctatgcgggggttgcataggcgaaagcgccattcgtggtgttatggacacagcctgatagggtgtagcagagacctgctattccgctagtaaaaactctgctgtacatggcac

SEQ ID NO: 17282 - DNA, 353 bp, synthetic construct
  source 1..353: mol_type = other DNA
ctcgtatacacgattggacaaatcaaaattataatttggttcagggcctccctccagcgacggccgaactgggctagccatgcccatagtaggactagcaaacggagggactagccatagtggcgagctccctgggtggtctaagtcctgagtacaggacagtcgtcagtagttcgacgtgagcagaagcccacctcgagatgctacgtggacgagggcatgcccaagacacaccttaaccctagcgggggtcgctagggtgaaatcacaccacgtgatgggagtacgacctgatagggtgctgcagaggcccactattaggctagtataaaaatctctgctgtacatggcac

SEQ ID NO: 17283 - DNA, 378 bp, synthetic construct
  source 1..378: mol_type = other DNA
aggttagttaaagttatcgtatacagattggacgttcacaaaacgagaattgacaaaatagggaaccttcccctcagcgaaggccgaaaagaggctagccatgcccttagtaggactagcaaaaagaggggactagcggtagcagtgagttcattggatggccgaatccctgagtacagggaagtcgtcaatggttcgacgctctagcaattgcagagcctcgagatgccatgtggacgagggcatgcccacggcacaccttaacctatgcgggggttgcgtaggtgaaagcaccatttgtggtgttatgaacacagcctgatagggcgtagcagagacctgctactccgctagtaaaaactctgctgtacatggcac

SEQ ID NO: 17284 - DNA, 374 bp, synthetic construct; identical to SEQ ID NO: 365
  source 1..374: mol_type = other DNA

SEQ ID NO: 17285 - DNA, 360 bp, synthetic construct
  source 1..360: mol_type = other DNA
ctcgtatacatattgggcactctaaaaatgaattaggcctgagggacaaatcctccttagcgaaggccgaaaagaggctagccatgcccttagtaggactagcaaaacaaggagggtagcaacagtggtgagttcgttggatggctgaagccctgagtacagggtagtcgtcagtggttcgacgctttgtgcgacaagcctcgagatgccacgtggacgagggcatgcccacagcacatcttaacctgagcgggggtcgttcaggtgaaaacggtttaaccaaccgctacgaatacagcctgatagggtgctgcagaggcccactgtatcgctactaaaaatctctgctgtacatggcat

SEQ ID NO: 17286 - DNA, 382 bp, synthetic construct
  source 1..382: mol_type = other DNA
gtatacgagaatttgcctaggacctcgtatacatattggacattctaaaaataattaggcctaagggacaaatcctctttagcgaaggccgaaaagaggctagccatgcccatagtaggactagcaaaataaggggggtagcaacagtggtgagttcgttggatggctgaagccctgagtacagggtagtcgtcagtggttcgacgcttcggaggacaagcctcgagatgccacgtggacgagggcatgcccacagcacatcttaacctgagcgggggtcgttcaggtgaaaacggtttaaccaaccgctacgaatacagcctgatagggtgctgcaggggcctactgtattgctactaaaaatctctgctgtacatggcac

SEQ ID NO: 17287 - DNA, 355 bp, synthetic construct
  source 1..355: mol_type = other DNA
acatattggacaacagaaaataactattaggcctagggaatgaatccctctcagcgaaggccgaaaggaggctagccatgcccttagtaggactagcataacgagaggggtagcaacggtggtgagttcgttggatggcttaagccctgagtacagggtagtcgtcagtggttcgacacctcggcataaaggtctcgagatgccacgtggacgagggcacgcccaaagcacatcttaacctgagcgggggtcgcttaggcaaaagcagattgaccaatctgttacgaatacagcctgatagggtgctgcagaggcccaccgtattgctactaaaaatctctgctgtacatggcac

SEQ ID NO: 17288 - DNA, 375 bp, synthetic construct
  source 1..375: mol_type = other DNA
tcagctaaagtactcgtatacggatcggacgtcaacaaattttgaattggcaacgtagggaaccttcccctcagcgaaggccgaaaagaggctagccatgcccttagtaggactagcaaaaggaggggactagcggtagcagtgagttcattggatggccgaacccctgagtacaggggagtcgtcaatggttcgacactccatcagtcgaggagtctcgagatgccatgtggacgagggcatgcccacggcacatcttaacccatgcgggggttgcatgggtgaaagcgccattcgtggcgttatggacacagcctgatagggtgtagcagagacctgctactccgctagtaaaaactctgctgtacatggcac

SEQ ID NO: 17289 - DNA, 369 bp, synthetic construct; identical to SEQ ID NO: 345
  source 1..369: mol_type = other DNA

SEQ ID NO: 17290 - DNA, 373 bp, synthetic construct
  source 1..373: mol_type = other DNA
gctaaaacgctcgtatacagattggacgttgacaaagtattgaattgacaaggtagggaattttcccctcagcgaaggccgaaaggaggctagccatgcccttagtaggactagcaaaaggaggggactagcggtagcagtgagttcattggatggcctaacccctgagtacaggggagtcgtcaatggttcgacactccatcagttaaggagtctcgagatgccatgtggacgagggcatgcccaaggcacatcttaacctatgcgggggttgcataggcgaaagcaccattcacggtgttatggacacagcctgatagggtgtagcagagacctgctattctgctagtaaaaactctgctgtacatggcac

SEQ ID NO: 17291 - DNA, 386 bp, synthetic construct; identical to SEQ ID NO: 408
  source 1..386: mol_type = other DNA

SEQ ID NO: 17292 - DNA, 375 bp, synthetic construct
  source 1..375: mol_type = other DNA
taggtaaagtgctcgtatacagattggatattgacaaatattgaattggcaaggtagggaatttttcccctcagcgaaggccgaaaagaggctagccatgcccttagtaggactagcagaaggaggggactagcggtagcagtgagttcattggatggcctaatccctgagtacagggaagtcgtcaatggttcgacactccatcagttgaggagtctcgagatgccatgtggacgagggcatgcccaaggcacatcttaacctatgcgggggttgcataggcaaaagcaccactcacggtgttatggacacagcctgatagggtgtagcagagacctgctattccgctagtaaaaactctgctgtacatggcac

SEQ ID NO: 17293 - DNA, 375 bp, synthetic construct
  source 1..375: mol_type = other DNA
agctaaagtactcgtatacggattggacgttgacaaaaatattgaattggaaatgtagggaattttcccctcagcgaaggccgaaaagaggttagccatacccttagtaggactagcaaaaggaggggactagcagtagcagtgagttcattggatggccgaacccctgagtacaggggagtcgtcaatggttcgacactccttcagttgaggagcctcgagatgccatgtggacgagggcatgcccacggcacatcttaacctatgcgggggctgcatgggtgaaagcgccatttttggtgttatggacacagcctgatagggtgtagcagagacctgctattctgctagtaaaaactctgctgtacatggcac

SEQ ID NO: 17294 - DNA, 373 bp, synthetic construct
  source 1..373: mol_type = other DNA
agctaaagtactcgtatacggattggacgttaacaaattttaaattggcaacgtagggaaccttcccctcagcgaaggccgaaaagaggctagccatgcccttagtaggactagcaaaaggaggggactagcggtagcagtgagttcgttggatggccgaacccctgagtacaggggagtcgtcaatggttcgacactccattaattgaggagtctcgagatgccatgtggacgagggcatgcccacggcacatcttaacccatgcgggggttgcatgggtgaaagcgctattcgtggcgttatggacacagcctgatagggtgtagcagagacctgctactccgctagtaaaaactctgctgtacatggcac

SEQ ID NO: 17295 - DNA, 386 bp, synthetic construct; identical to SEQ ID NO: 409
  source 1..386: mol_type = other DNA

SEQ ID NO: 17296 - DNA, 385 bp, synthetic construct
  source 1..385: mol_type = other DNA
gtatacgagattagctaaagtactcgtatacggattggacgtcaacaaattttgaattggcaaagtagggaatcttccccttagcgaaggccgaaaagaggctagccatgcccttagtaggactagcaaaacgaggggactagcggtagcagtgagttcgttggatggccgaacccctgagtacaggggagtcgtcaatggttcgacactccattagtcgaggagtctcgagatgccatgtggacgagggcatgcccacggcacatcttaacccatgcgggggttgcatgggtgaaagcgctattcgtggcgttatggacacagcctgatagggtgtagcagagacctgctactccgctagtaaaaactctgctgtacatggcac

SEQ ID NO: 17297 - DNA, 388 bp, synthetic construct; identical to SEQ ID NO: 422
  source 1..388: mol_type = other DNA

SEQ ID NO: 17298 - DNA, 386 bp, synthetic construct; identical to SEQ ID NO: 410
  source 1..386: mol_type = other DNA

SEQ ID NO: 17299 - DNA, 373 bp, synthetic construct
  source 1..373: mol_type = other DNA
agttaaagtactcgtatacggattggacgacaacaaattttgaattggcaacgtagggaaccttcccctcagcgaaggccgaaaagaggctagccatgcccttagtaggactagcaaaatgaggggactagcggtagcagtgagttcgttggatggccgaacccctgagtacaggggagtcgtcaatggttcgacactccattagtcgaggagtctcgagatgccatgtggacgagggcatgcccacggcacatcttaacccgtgcgggggttgcatgggtgaaagcgccattcgtggcgttatggacacagcctgatagggtgtagcagagacctgctactccgctagtaaaaactctgctgtacatggcac

SEQ ID NO: 17300 - DNA, 372 bp, synthetic construct
  source 1..372: mol_type = other DNA
agctaaagtactcgtatacggattgggtgttaacaaaatttaattggctaagtagggaattttcccctcagcgaaggccgaaaagaggctagccatgcccttagtaggactagcaaaaggaggggactagcggtagcagtgagttcattggatggccgaatccctgagtacagggaagtcgtcaatggttcgacactccatcaactgaggagtctcgagatgccatgtggacgagggcatgcccacggcacatcttaacctatgcgggggttgcatgggtgaaagcaccattcgtggtgtgatggacacagcctgatagggtgtagcagagacctgctattccgctagtaaaaactctgctgtacatggcac

SEQ ID NO: 17301 - DNA, 372 bp, synthetic construct
  source 1..372: mol_type = other DNA
gctaaagtactcgtatacagattggacgtcaacaaatttttaattggcaacatagggaaccttcccctcagcgaaggccgaaaagaggctagccatgcccttagtaggactagcaaaaggaggggactagcggtagcagtgagttcgttggatggccgaacccctgagtacaggggagtcgtcaatggttcgacactccattagtcgaggggtctcgagatgccatgtggacgagggcatgcccacggcacatcttaacccatgcgggggttgcatgggtgaaagcgctattcgtggcgttatggacacagcctgatagggtgtagcagagacctgctattccgctagtaaaaactctgctgtacatggcac

SEQ ID NO: 17302 - DNA, 371 bp, synthetic construct
  source 1..371: mol_type = other DNA
ctaaagtactcgtatacggattggacgttaacaaatttttaattggcaacgtagggaaccttcccctcggcgaaggccgaaaagaggctagccatgcccttagtaggactagcaaaaggaggggactagcggtagcagtgagttcgttggatggccgaacccctgagtacaggggagtcgtcaatggttcgacactccattagttgaggagtctcgagatgccatgtggacgagggcatgcccacggcacatcttaacccatgcgggggttgcatgggtgaaagcgctattcgtggcgttatggacacagcctgatagggtgtagcagagacctgctactccgctagaaaaaactctgctgtacatggcac

SEQ ID NO: 17303 - DNA, 372 bp, synthetic construct
  source 1..372: mol_type = other DNA
gtaaagtgctcgtatacagattggatattgacaaatattgaattggcaaggtagggaatttttcccctcagcgaaggccgaaaagaggctagccatgcccttagtaggactagcagaaggaggggactagcggtagcagtgagttcattggatggcctaatccctgagtacagggaagtcgtcaatggttcgacactccatcagttgaggagtctcgagatgccatgtggacgagggcatgcccaaggcacatcttaacctatgcgggggttgcataggcaaaagcaccactcacggtgttatggacacagcctgatagggtgtagcagagacctgctattccgctagtaaaaactctgctgtacatggcac

SEQ ID NO: 17304 - DNA, 382 bp, synthetic construct; identical to SEQ ID NO: 391
  source 1..382: mol_type = other DNA

SEQ ID NO: 17305 - DNA, 383 bp, synthetic construct
  source 1..383: mol_type = other DNA
gtatacgaggttaggcaagttctcgtatacatattggacattacaaaaaataattaggtctaggggacaaaaatcctccttagcgaaggccgaaaagaggctagccatgcccttagtaggactagcaaaataaggggggtagcagcagtggtgagttcgttggatggctgaagccctgagtacagggtagtcgtcagtggttcgacgctttggaggacaagcctcgagatgccacgtggacgagggcatgcccacagcacatcttaatctggacgggggtcgtccaggtgaaaacggtttgaccaaccgctacgaatacagcctgatagggtgctgcagaggcccactgtattgctactaaaaatctctgctgtacatggcac

SEQ ID NO: 17306 - DNA, 370 bp, synthetic construct
  source 1..370: mol_type = other DNA
taaagtactcgtatacggattggacgttaacaaatttttaattgtaaatgtagggaatcttcccctcagcgaaggccgaaaagaggctagccatgcccttagtaggactagcaaaaggaggggactagcggtagcagtgagttcgttggatggccgaacccctgagtacaggggagtcgtcaatggttcgacactccattagttgaggagtctcgagatgccatgtggacgagggcatgcccacggcacatcttaacccatgcgggggttgcatgggtgaaagcgctattcgtggcgttatggacacagcctgatagggtgtagcagagacctgctactccgctagaaaaaactctgctgtacatggcac

SEQ ID NO: 17307 - DNA, 356 bp, synthetic construct; identical to SEQ ID NO: 336
  source 1..356: mol_type = other DNA

SEQ ID NO: 17308 - DNA, 386 bp, synthetic construct; identical to SEQ ID NO: 411
  source 1..386: mol_type = other DNA

SEQ ID NO: 17309 - DNA, 384 bp, synthetic construct
  source 1..384: mol_type = other DNA
gtatacgagaatttgcctaggacctcgtatacgtattgggcatttaaaaataataattaggcctaagggacaaatcctccttagcgaaggccgaaaagaggctagccatgcccttagtaggactagcaaaataaggggggtagcaacagtggtgagttcgttggatggctgaagccctgagtacagggtagtcgtcagtggttcgacgcttcggaggacaagcctcgagatgccacgtggacgagggcatgcccacagcacatcttaacctggacgggggtcgttcaggtaaaaacggtttaaccaaccgctacgaatacagcctgatagggtgctgcagaggcccactgtattgctactgaaaatctctgctgtacatggcac

SEQ ID NO: 17310 - DNA, 384 bp, synthetic construct; identical to SEQ ID NO: 398
  source 1..384: mol_type = other DNA

SEQ ID NO: 17311 - DNA, 371 bp, synthetic construct
  source 1..371: mol_type = other DNA
ctaaagtactcgtgtacggattggatgtcgacaaattttgaattggtaacgtagggaaccttcccctcagcgaaggccgaaaagaggctagccatgcccttagtaggactagcaaaaggaggggactagcggtagcagtgagttcattggatggccgaacccctgagtacaggggagtcgtcaatggttcgacactccatcggtcgaggagtctcgagatgccatgtggacgagggcatgcccacggcacatcttaacccacgcgggggttgcatgggtgaaagcgtcattcgtggcgttatggacacagcctgatagggtgtagcagagacctgctattccgctagtaaaaactctgctgtacatggcac

SEQ ID NO: 17312 - DNA, 371 bp, synthetic construct
  source 1..371: mol_type = other DNA
ataaagtactcgtatacggattggacgttaacaaatttttaattggcaacgtagggaaccttcccctcagcgaaggccgaaaagaggctagccatgcccttagtaggactagcaaaaggaggggactagcggtagcagtgagttcgttggatggccgaacccctgagtacaggggagtcgtcaatggttcgacactccattagttgaggagtctcgagatgccatgtggacgagggcatgcccacggcacatcttaacccatgcgggggttgcatgggtgaaagcgctattcgtggcgttatggacacagcctgatagggtgtagcagagacctgctactccgctagaaaaaactctgctgtacatggcac

SEQ ID NO: 17313 - DNA, 387 bp, synthetic construct; identical to SEQ ID NO: 417
  source 1..387: mol_type = other DNA

SEQ ID NO: 17314 - DNA, 370 bp, synthetic construct
  source 1..370: mol_type = other DNA
tagctcatgtcggcgtatatgattggatatcccaaattaataatttggtctagggactaattcccctagcgaaggccgaaaaaggttaaccatacctttagtaggacgagcataatgggggactagtggtagcagtgagctccttggattaccgaagccccgagtacggggtagtcgtcaatggttcgacgcatcaaggaatgcctcgagatgccatgtggacgagggcgtgcccacggtgaatcttaactcaagcgggggccgcttgggtgaaagagggtcattatgtggctctttgggagtacagcctgatagggtgttgcagagacctgctacatcactagtataaaaactctgctgtacatggcac

SEQ ID NO: 17315 - DNA, 360 bp, synthetic construct
  source 1..360: mol_type = other DNA
gctcatcctcgtgtacaatattggacaaacaaaattccgacttggcttagggcacccctccagcgacggccgaactgggctagccatgcccacagtaggactagcagatggagggactagccgtagtggcgagctccctgggtggtctaagtcctgagcacaggacagtcgtcagtagttcgacgtgagcaggagcccacctcgagatgctatgtggacgagggcacgcccaagacacaccttaaccctggcgggggtcaccagggtgaaatcacaccatgtgatgggggtacgacctgatagggtgctgcagaggcccactaacaggctagtataaaaaatctctgctgtacatggcac

SEQ ID NO: 17316 - DNA, 367 bp, synthetic construct
  source 1..367: mol_type = other DNA
ctcatgtcggcgtatatgattggctatcccaaattaataatttggtttagggactaactcccctagcgaaggccgaaatgggttaaccataccttcagtaggacgagcataatgggggactagtggtagcagtgagctccttggattaccgaagccccgagtacggggtagtcgtcaatggttcgacgcatcaaggaatgcctcgagatgccatgtggacgagggcgtgcccacggtgaatcttaactcaagcgggggccgcttgggtgaaagagggtcattatatggctctttgggagtacagcctgatagggtgttgcagagacctgctacatcactagtataaaaactctgctgtacatggcac

SEQ ID NO: 17317 - DNA, 380 bp, synthetic construct
  source 1..380: mol_type = other DNA
gtatacgaggttaggcaagttctcgtatacatattggacactctaaaaataattaggtctaggggacaaaatcctccttagcgaaggccgaaaagaggctagccatgcccttagtaggactagcaaaataaggggggtagcaacagtggtgagttcgttggatggctgaagccctgagtacagggtagtcgtcagtggttcgacgctttggggacaagcctcgagatgccacgtggacgagggcatgcccacagcacatcttagcctggacgggggtcgttcaggtgaaaacggtttaaccaaccgctacgaatacagtctgataggatgctgcagaggcccactgtattgctactgaaaatctctgctgtacatggcac

SEQ ID NO: 17318 - DNA, 367 bp, synthetic construct
  source 1..367: mol_type = other DNA
gtactcgtatacagattggctattgacaaatattgaattgacaaggtagggaacttttcccctcagcgaaggccgaaaagaggctagccatgcccttagtaggactagcaaaaggaggggactagcggtagcagtgagttcattggatggcctaatccctgagtacagggaagtcgtcaatggttcgacactccatcagttgaggagtctcgagatgccatgtggacgagggcatgcccaaggcacatcttaacctatgcgggggttgcataggcaaaagcaccactcacggtgttatggacacagcctgatagggtgtagcagagacctgctattccgctagtaaaaactctgctgtacatggcac

SEQ ID NO: 17319 - DNA, 381 bp, synthetic construct; identical to SEQ ID NO: 389
  source 1..381: mol_type = other DNA

SEQ ID NO: 17320 - DNA, 381 bp, synthetic construct
  source 1..381: mol_type = other DNA
gtatacgagaatttgcctaacctcgtatacacattgggcactctaaaaataaattaggcctaagggacgaatcctccttagcgaaggccgaaaagaggctagccatgcccttagtaggattagcaaaacaaggagggtagcaacagtggtgagttcgttggatggctgaagccctgagtacagggtagtcgtcagtggttcgacgctttgtgtgacaagcctcgagatgccacgtggacgagggcatgcccacagcacatcttaacctgagcgggggtcgcttaggtgaaaacggtttaaccgaccgctacgaatacagcctgatagggtgctgcagaggcccactgtactgctactaaaaatctctgctgtacatggcac

SEQ ID NO: 17321 - DNA, 383 bp, synthetic construct; identical to SEQ ID NO: 395
  source 1..383: mol_type = other DNA

SEQ ID NO: 17322 - DNA, 370 bp, synthetic construct
  source 1..370: mol_type = other DNA
aagtactcgtatacagattggatattgacaaaatattgaattggcaaggtagggaacttttcccctcagcgaaggccgaaaagaggctagccatgcccttagtaggacgagcaaaaggaggggactagcggtagcagtgagttcattggatggcctaatccctgagtacagggaagtcgtcaatggttcgacactccatcagttgaggagtctcgagatgccatgtggacgagggcatgcccaaggcacatcttaacctatgcgggggttgcataggcaaaagcactactcatggtgttatggacacagcctgatagggtgtagcagagacctgctatcccgctagtaaaaactctgctgtacatggcac

SEQ ID NO: 17323 - DNA, 356 bp, synthetic construct
  source 1..356: mol_type = other DNA
attctcgtatatgatattggatacactaaatttcaatttggcctagggcacccctccagcgacggccgaaatgggctagccatgcccatagtaggactagcaaacggagggactagccatagtggcgagctccctgggtggtctaagtcctgagtacaggacagtcgtcagtagttcgacgtgggcactagcccacctcgagatgctacgtggacgagggcatgcccaagacacaccttaaccctggcgggggtcgctagggtgaaatcacattatgtgatgggggtacgacctgatagggtgctgcagaggcccactagcaggctagtataaaaaatctctgctgtacatggcac

SEQ ID NO: 17324 - DNA, 369 bp, synthetic construct
  source 1..369: mol_type = other DNA
taaaaatactcgtatacacattgggcaattaaaagtaataattaggcctagggaacgaatcctcctccgcgaaggccgaaaagaggctagccacgcccttagtaggactagcatagcgaggggggtagcaacagtggtgagttcgttggatggcttaagccctgagtacagggtagtcgtcagtggttcgacgccttaacatgaaggtctcgagatgccacgtggacgagggcacgcccaaagcacatcttagcccgagcgggggtcgctcggacgaaaacagtttgatcaactgctacgaatacagcctgatagggtgctgcagaggcccactgtattgctactaaaaatctctgctgtacatggcac

SEQ ID NO: 17325 - DNA, 362 bp, synthetic construct
  source 1..362: mol_type = other DNA
gatatcagattgggtgttggcaaacagttaattagtgaagtagggaatcttcccccctctgcgaaggccgaaaagaggctaaccatgcccttagtaggactagcaaaaagagggggctagcggtagcagtgagtttattggatggccgaatccctgagtacagggaagtcgtcaatggttcgacactctggtgatataagagtctcgagatgccatgtggacgagggcatgcccacggcacatcttaacctatgcgggggttgcatgggtgaaagcaccatttatggtgttataaacacagcctgatagggtgtagcagagacctgctatcccgctagtaaaaactctgctgtacatggcac

SEQ ID NO: 17326 - DNA, 362 bp, synthetic construct
  source 1..362: mol_type = other DNA
ggtatcagattgggtgttggcaaacagttaattagtgaagtagggaaccttcccccctctgcgaaggccgaaaagaggctaaccatgcccttagtaggactagcaaaaagagggggctagcggtagcagtgagtttattggatggccgaatccctgagtacagggaagtcgtcaatggttcgacactctggtgatataagagtctcgagatgccatgtggacgagggcatgcccacggcacatcttaacctatgcgggggttgcatgggtgaaagcaccatttatggtgttataaacacagcctgatagggtgtagcagagacctgctatcccgctagtaaaaactctgctgtacatggcac

SEQ ID NO: 17327 - DNA, 372 bp, synthetic construct
  source 1..372: mol_type = other DNA
agatttagttcaacctctcgtatgcgtattgggcaaactaaataataattaggcctagggaacaaatcctcctcagcgaaggccgaaaagaggctagccatgcccttagtaggactagcatattggggagggtagcaacagtggtgagttagttggatggctgaagccctgagtacagggtagtcgtcagtggttcgacgccttaggatataggcctcgagatgccacgtggacgagggcatgcccacagcacatcttaacctgagcaggggtcgcccaggtgaaagcggatataccgttactaacacagcctgatagggtgctgcagaggcccactgcactgctactaaaaatctctgctgtacatggcac

SEQ ID NO: 17328 - DNA, 360 bp, synthetic construct; identical to SEQ ID NO: 339
  source 1..360: mol_type = other DNA

SEQ ID NO: 17329 - DNA, 376 bp, synthetic construct; identical to SEQ ID NO: 372
  source 1..376: mol_type = other DNA

SEQ ID NO: 17330 - DNA, 355 bp, synthetic construct
  source 1..355: mol_type = other DNA
cggattggatgtcgacaaatattgaattggcaacgtagggaaccttcccctcagcgaaggccgaaaagaggctagccatgcccttagtaggactagcaaaaggaggggactagcggtagcagtgagttcattggatggccgaacccctgagtacaggggagtcgtcaatggttcgacactccattagtcgaggagtctcgagatgccatgtggacgagggcatgcccacggcacatcttaacccacgcgggggttgcatgggtgaaagcgctattcgtggcgttatggacacagcctgatagggtgtagcagagacctgctattccgctagtaaaaactctgctgtacatggcac

SEQ ID NO: 17331 - DNA, 356 bp, synthetic construct
  source 1..356: mol_type = other DNA
aggttgggtgttggcaaacagttaattagtgaagtagggaactttcccccctctgcgaaggccgaaaagaggctaaccatgccctcagtaggactagcaaaaagagggggctagcggtagcagtgagtttattggatggccgaatccctgagtacagggaagtcgtcaatggttcgacactctggtaatataagagtctcgagatgccatgtggacgagggcatgcccacggcacatcttaacctatgcgggggctgcatgggtgaaagcactatttacggtgttataaacacagcctgatagggtgtagcagagacctgctatcccgctagtaaaaactctgctgtacatggcac

SEQ ID NO: 17332 - DNA, 356 bp, synthetic construct
  source 1..356: mol_type = other DNA
ggattgggtgttggcaaacagttaattagtgaagtagggaaccttcccccctctgcgaaggccgaaaagaggctaaccatgcccttagtaggactagcaaaaagagggggctagcggtagcagtgagtttattggatggccgaatccctgagtacagggaagtcgtcaatggttcgacactctggtaatataagagtctcgagatgccatgtggacgagggcatgcccacggcacatcttaacctatgcgggggttgcatgggtgaaagcaccatttacggtgttataaacacagcctgatagggtgtagcagagacctgctatcccgctagtaaaaactctgctgtacatggcac

SEQ ID NO: 17333 - DNA, 374 bp, synthetic construct
  source 1..374: mol_type = other DNA
attagaaaaagctcctgtatacagattgggcaattaaaaattgaagattaggcctagggaaaaatccctctcagcgaaggccgaaaagaggctagccatgcccttagtaggactagcaaaatgagaggggtagcaacagtggtgagttcattggatggctgaagccctgagtacagggtagtcgtcagtggttcgacacctcggaaagaaggtctcgagatgccacgtggacgagggcatgcccacagcacatcttaacctggacgggggtcgcccaggtaaaagcagtttaattaactgttatggacacagcctgatagggtgctgcagaggcccactgcattgctactaaaaatctctgctgtacatggcac

SEQ ID NO: 17334 - DNA, 352 bp, synthetic construct
  source 1..352: mol_type = other DNA
gattggatgttgacaaatttgatttggctaagtagggaattttcccctcagcgaaggccgaaaagaggctagccatgcccttagtaggactagcaaaaggaggggactagcagtagcagtgagttcattggatggccgaatccctgagtacagggaagtcgtcaatggttcgacactccattaaccgaggagtctcgagatgccatgtggacgagggcatgcccacggcacttcttaacctatgcgggggttgcatgggtgaaagcaccattcgtggtgttatggacacagcctgatagggtgtagcagagacctgctattctgctagtaaaaactctgctgtacatggcac

SEQ ID NO: 17335 - DNA, 384 bp, synthetic construct
  source 1..384: mol_type = other DNA
tagtatacgaggttaggcaagccctcgtatacatattggacacactaaaaaaataattaggtctagggaaaaaatcctccttagcgaaggccgaaaagaggctagccatgcccttagtaggactagcaaaataaggggggtagcaacagtggtgagttcgttggatggctgaagccctgagtacagggtagtcgtcagtggttcgacgcttaggagaacaagcctcgagatgccacgtggacgagggcatgcccacagcacatcttaatctggacgggggtcgttcaggtgaaaacggtttaaccaaccgctacgaatacagcctgatagggtgctgcagaggcccactgtattgctactaaaaatctctgctgtacatggcac

SEQ ID NO: 17336 - DNA, 377 bp, synthetic construct; identical to SEQ ID NO: 375
  source 1..377: mol_type = other DNA

SEQ ID NO: 17337 - DNA, 367 bp, synthetic construct
  source 1..367: mol_type = other DNA
ggtaaattctcgtatacatattggacactctaaaaacaaattaggcctaggggacaaatcctccttagcgacggccgaaaagaggctagccatgcccttagtaggactagcaaacaaggagggtagcaacagtggtgagttcgttggatggctgaagccctgagtacagggtagtcgtcagtggttcgacgcttaacatgataagcctcgagatgccacgtggacgagggcatgcccacagcacatcttaacctgagcgggggtcgctcaggcaaaaacggtttaaccaaccgctacgaatacagcctgatagggtgctgcagaggcccactgtattgctactaaaaatctctgctgtacatggcac

SEQ ID NO: 17338 - DNA, 349 bp, synthetic construct
  source 1..349: mol_type = other DNA
ggacgtcaacaaattttgaattggcaacgtagggaaccttcccctcagcgaaggccgaaaagaggctagccatgcccttagtaggactagcaaaaggaggggactagcggtagcagtgagttcgttggatggccgaacccctgagtacaggggagtcgtcaatggttcgacactccattagtcgaggagtctcgagatgccatgtggacgagggcatgcccacggcacatcttaacccatgcgggggttgcatgggtgaaagcgctattcgtggcgttatggacacagcctgatagggtgtagcagagacctgctactccgctagtaaaaactctgctgtacatggcac

SEQ ID NO: 17339 - DNA, 378 bp, synthetic construct
  source 1..378: mol_type = other DNA
ggttagctaaagtactcgtatacagattgggtgttaacaaaacattgaatcggcaatgtagggaactttcccctcagcgaaggccgaaaagaggctagccatgcccttagtaggactagcaaaaggaggggactagcggtagcagtgagttcattggatggccgaatccctgagtacagggaagtcgtcaatggttcgacactccatcagttgaggagtctcgagatgccatgtggacgagggcatgcccacggcacatcttagcctgtgcgggggttgcataggtgaaagcgccattcatggtgctatggacacagcctgatagggtgtagcagagacctgctatcccgctagtaaaaactctgctgtacatggcac

SEQ ID NO: 17340 - DNA, 310 bp, synthetic construct
  source 1..310: mol_type = other DNA
tcctagcgacggccgaaccgggttagccatacccgtagtaggactagcatatgggaggactagctttcgtggtgaggttcctgagtggtctaagtcctgagtacaggatagtcgtcagtagttcgacacaaacggagtttttctcttgtctcgagatgctacgtggacgagggcatgcccaagacccactttaatcctggcgggggtcgccagggtgaaaacgcccaatggcgttgggactacagcctgatagggtgctgcagaggcccacgcaacagctagtataaaaaatctctgctgtacatggcac

SEQ ID NO: 17341 - DNA, 384 bp, synthetic construct
  source 1..384: mol_type = other DNA
gtatacgcccggttagctcatgtcggcgtatatgattgggtatcccaaattaatgatttggtttagggactaaattcccctagcgaaggccgaaataggttaaccatgccttcagtaggacgagcataatgggggactagtggtagcagtgagctccttggattaccgaagccccgagtacggggtagtcgtcaatggttcgacgcatcaaggaatgcctcgagatgccatgtggacgagggcgtgcccacggtgaatcttaactcaagcgggggccgcttgggtgaaagagggtcattatgtggctctttgggagtacagcctgatagggtgttgcagagacctgctacatcactagtataaaaactctgctgtacatggcac

SEQ ID NO: 17342 - DNA, 384 bp, synthetic construct
  source 1..384: mol_type = other DNA
gtatacgcccggttagctcatgtcggcgtatatgattgggtatcccaaattaatgatttggtttagggactaaattcccctagcgaaggccgaaataggttaaccatgcccatagtaggactagcataatgggggactagtggtagcagtgagctccttggattaccgaagccccgagtacggggtagtcgtcaatggttcgacgcatcaaggaatgcctcgagatgccatgtggacgagggcgtgcccacggtgaatcttaactcaagcgggggccgcttgggtgaaagagggtcattatgtggctctttgggagtacagcctgatagggtgttgcagagacctgctacatcactagtataaaaactctgctgtacatggcac

SEQ ID NO: 17343 - DNA, 372 bp, synthetic construct
  source 1..372: mol_type = other DNA
tggcaaattctcgtatacaaaattggacactcaaaaaaaataattagaactagggaacgaaatcctccttagcgaaggccgaaaagaggctagccatgcccttagtaggactagcaaaacaaggggggtagcaacagtggtgagttcgttggatggctgaagccctgagtacagggtagtcgtcagtggttcgacgctttggaggacaagcctcgagatgccacgtggacgagggcatgcccacagcacatcttagcctggacgggggtcgttcaggtaaaaacggtttaaccaaccgctacgaatacagcctgatagggtgctgcagaggcccactgtactgctactgaaaatctctgctgtacatggcac

SEQ ID NO: 17344 - DNA, 365 bp, synthetic construct; identical to SEQ ID NO: 341
  source 1..365: mol_type = other DNA

SEQ ID NO: 17345 - DNA, 372 bp, synthetic construct
  source 1..372: mol_type = other DNA
ctaaagtactcgtatacggattggacgttaacaaatcttttaattggcaacgtagggaaccttcccctcagcgaaggccgaaaagaggctagccatgcccttagtaggactagcaaaaggaggggactagcggtagcagtgagttcgttggatggccgaacccctgagtacaggggagtcgtcaatggttcgacactccattagttgaggagtctcgagatgccatgtggacgagggcatgcccacggcacatcttaacccatgcgggggttgcatgggtgaaagcgctattcgtggcgttatggacacagcctgatagggtgtagcagagacctgctactccgctagtaaaaactctgctgtacatggcac

SEQ ID NO: 17346 - DNA, 340 bp, synthetic construct
  source 1..340: mol_type = other DNA
cccaaattaataatttggtctagggactaattcccctagcgaaggccgaaataggttaaccatacctttagtaggacgagcataatgggggactagtggtagcagtgagctccttggattaccgaagccccgagtacggggtagtcgtcaatggttcgacgcatcaaggaatgcctcgagatgccatgtggacgagggcgtgcccacggtgaatcttaacccaagcgggggccgcttgggtgaaagagggtcattatatggctctttgggagtacagcctgatagggtgttgcagagacctgctacatcactagtataaaaactctgctgtacatggcac

SEQ ID NO: 17347 - DNA, 373 bp, synthetic construct
  source 1..373: mol_type = other DNA
cgctaaagtactcgtatacagattggacgttgacaaatattgaattgacaaggtagggaactttcccctcagcgaaggccgaaaagaggctagccatgcccttagtaggactagcaaaaggaggggactagcggtagcagtgagttcattggatggcctaatccctgagtacagggaagtcgtcaatggttcgacactccatcagttgaggagtctcgagatgccatgtggacgagggcatgcccaaggcacatcttaacctatgcgggggttgcataggcgaaagcactattcacggtgttatggacacagcctgatagggtgtagcagagacctgctattccgctagtaaaaactctgctgtacatggcac

SEQ ID NO: 17348 - DNA, 337 bp, synthetic construct
  source 1..337: mol_type = other DNA
attttaaattggcaacacagggaaccttcccctcggcgaaggccgaaaagaggctagccatgcccttagtaggactagcaaaaggaggggactagcggtagcagtgagttcattggatggccgaacccctgagtacaggggagtcgtcaatggttcgacactcctttagtcgaggagtctcgagatgccatgtggacgagggcatgcccacggcacatcttaacccacgcgggggttgcatgggtgaaagcgccattcgtggcgtcatggacacagcctgatagggtgtagcagagacctgctactccgctagtaaaaactctgctgtacatggcac

SEQ ID NO: 17349 - DNA, 372 bp, synthetic construct
  source 1..372: mol_type = other DNA
ctaaagtactcgtatacagattggatgttgacaaaatattgaattggctaagtagggaattctcccctcagcgaaggccgaaaagaggctagccatgcccttagtaggactagcaaaaggaggggactagcggtaacagtgagttcattggatggccgaatccctgagtacagggaagtcgtcaatggttcgacactccatcaaccgaggagtctcgagatgccatgtggacgagggcatgcccacggcacatcttaacctatgcgggggttgcatgggtgaaagcaccattcgtggtgttatggacacagcctgatagggtgtagcagagacctgttattccgctagtaaaaactctgctgtacatggcac

SEQ ID NO: 17350 - DNA, 325 bp, synthetic construct
  source 1..325: mol_type = other DNA
ggccgagggaatgaatcccccttagcgaaggccgaaaggaggctagccatgcccttagtaggactagcaaaatgaggggggtagcaacagtggtgagtttgctggatggcttaagccctgagtacagggcagtcgtcagtggttcgacgcctcagtagggaggtctcgagatgccacgtggacgagggcatgcccaaagcacatcttaacctgggcgggggtcgctcaggtgaaagcggttttattaactgctgcaaatacagcctgatagggtgctgcagaggcccactgtactgctactaaaaatctctgctgtacatggcac

SEQ ID NO: 17351 - DNA, 374 bp, synthetic construct
  source 1..374: mol_type = other DNA
attcgcccttctcgtatacgtattggggcaattaaaataataattaggcctagggaacaaaagtccccctcagcgaaggccgaaaagaggctagccatgcccttagtaggactagcataaagaggggggtagcagcagtggtgagttcgttggatggcttaagccctgagtacagggtagtcgtcagtggttcgacgccttggaataaaggtctcgagatgccacgtggacgagggcatgcccaaagcacatcttaacctgagcgggggtcgcccaggtaaaagcagttctaaccgactgttacggatacagcctgatagggtgctgcagaggcccactgttctgctactaaaaatctctgctgtacatggcac

SEQ ID NO: 17352 - DNA, 372 bp, synthetic construct
  source 1..372: mol_type = other DNA
tatacgaggttagctcgtcctcgtgtacaacattggacaaactaaaattccgatttggcctagggtacccctccagcgacggccgaactgggctagccatgcccacagtaggactagcaaacggagggactagccgtagtggcgagctccctgggtggtctaagtcctgagtacaggacagtcgtcagtagttcgacgtgagcaggagcccacctcgagatgctatgtggacgagggcatgcccaagacacaccttaaccctggcgggggtcgccagggtgaaatcacaccatgtgatgggggtacgacctgatagggtgctgcagaggcccactaacaggctagtataaaaatctctgctgtacatggcac

SEQ ID NO: 17353 - DNA, 278 bp, synthetic construct
  source 1..278: mol_type = other DNA
gccatgcccttagtaggactagcaaaaggggggactagccatcgtggtgagatccctgagctgtctaagccctgagtacagggcagtcgtcagtagttcgactcaatcaccgggttgactcgagatgctacgtggacgagggcatgcccaagacaagttttaatcctggcaggggtcgccagggtgaaagtgccgaatggcattggggttacaacctgatagggtgctgcagaggcccacgtataggctagtataaaaatctctgctgtacatggcac

SEQ ID NO: 17354 - DNA, 373 bp, synthetic construct
  source 1..373: mol_type = other DNA
aaggaaagttctcgtatacatattggacactcaaaaaaaaataattaggtctaggggacagaatcctccttagcgaaggccgaaaagaggctagccatgcccttagtaggactagcaaaataaggggggtagcaacagtggtgagttcgttggatggctgaagccctgagtacagggtagtcgtcagtggttcgacgcttcggaggacaagcctcgagatgccacgtggacgagggcatgcccacagcacatcttaacctggacaggggtcgttcaggtgaaaacggtttaaccaaccgctacgaatacagcctgatagggtgctgcagaggcccactgtattgctactaaaaatctctgctgttcatggcac

SEQ ID NO: 17355 - DNA, 375 bp, synthetic construct; identical to SEQ ID NO: 369
  source 1..375: mol_type = other DNA

SEQ ID NO: 17356 - DNA, 371 bp, synthetic construct
  source 1..371: mol_type = other DNA
aagttctcgtatacatattggacactctaaaaaaaaataattaggtataggggacaaaaatcctccttagcgaaggccgaaaagaggctagccatgcccttagtaggactagcaaaataaggggggtagcaacagtggtgagttcgttggatggctgaagccctgagtacagggtagtcgtcagtggttcgacgctttggaggacaagcctcgagatgccacgtggacgagggcatgcccacagcacatcttaacctggacaggggtcgttcgggtgaaaacggttttaaccaaccgctacgaatacagcctgatagggcgctgcagaggcccactgtattgctactaaaaatctctgctgtacatggcac

SEQ ID NO: 17357 - DNA, 377 bp, synthetic construct
  source 1..377: mol_type = other DNA
gtggttaggcaagttctcgtatacatattggacactctaaaaaataattaggtctaggggacaaaaatcctccttagcgaaggccgaaaagaggctagccatgcccttagtaggactagcaaaataaggggggtagcaacagtggtgagttcgttggatggctgaagccctgagtacagggtagtcgtcagtggttcgacgcttcggaggaagagcctcgagatgccacgtggacgagggcatgcccacagcacatcttaacctggacgggggtcgttcaggtgaaagcggtttaaccaaccgctacgaatacagcctgatagggtgctgcagaggcccactgtattgctactaaaaatctctgctgtacatggcac

SEQ ID NO: 17358 - DNA, 371 bp, synthetic construct
  source 1..371: mol_type = other DNA
gcaagttctcgtatacatattggacactcataaaaaaaataattaggtccagggaatcaaatcctccttagcgaaggccgaaaagaggctagccatgcccttagtaggactagcaaaataaggggggtagcaacagtggtgagttcgttggatggctgaagccctgagtacagggtagtcgtcagtggttcgacgctttggagaccaagcctcgagatgccacgtggacgagggcatgcccacagcacatcttaacctgagcgggggtcgttcaggtgaaaacggtttaatcaaccgctacggatacagcctgatagggtgctgcagaggcccactgtattgctactaaaaatctctgctgtacatggcac

SEQ ID NO: 17359 - DNA, 337 bp, synthetic construct
  source 1..337: mol_type = other DNA
taaataattaggcctagggagcgaaattcctccttagcgaaggccgaaaagaggctagccatgcccttagtaggactagcaaaataaggggggtagcaacagtggtgagttcgttggatggctgaagccctgagtacagggtagtcgtcagtggttcgacgctttggaggacaagcctcgagatgccacgtggacgagggcatgcccacagcacatcttaacctggacgggggtcgttcaggtaaaaacggtttaaccaaccgctacgaatacagcctgatagggtgctgcagaggcccactgtattgctactaaaaatctctgctgtacatggcac

SEQ ID NO: 17360 - DNA, 370 bp, synthetic construct
  source 1..370: mol_type = other DNA
gaaaaagctcctgtatacagattgggcaattaaaaattgaagattaggcctagggaaaaatccctctcagcgaaggccgaaaagaggctagccatgcccttagtaggactagcaaaatgagaggggtagcaacagtggtgagttcattggatggctgaagccctgagtacagggtagtcgtcagtggttcgacacctcggaaagaaggtctcgagatgccacgtggacgagggcatgcccacagcacatcttaacctggacgggggtcgcccaggtaaaagcagtttaactaactgttatggacacagcctgatagggtgctgcagaggcccactgcattgctactaaaaatctctgctgtacatggcac

SEQ ID NO: 17361 - DNA, 376 bp, synthetic construct
  source 1..376: mol_type = other DNA
gaattagaaaaagctcctgtatacagattgggcaattaaaaattgaagattaggcctagggaaaaatccctctcagcgaaggccgaaaagaggctagccatgcccttagtaggactagcaaaatgagaggggtagcaacagtggtgagttcattggatggctgaagccctgagtacagggtagtcgtcagtggttcgacacctcggaaagaaggtctcgagatgccacgtggacgagggcatgcccacagcacatcttaacctggacgggggtcgcccaggtaaaagcagtttaactaactgttatggacacagcctgatagggtgctgcagaggcccactgcattgctactaaaaatctctgctgtacatggcac

SEQ ID NO: 17362 - DNA, 322 bp, synthetic construct
  source 1..322: mol_type = other DNA
ggtagggaactttcccctcagcgaaggccgaaaagaggctagccatgcccttagtaggactagcaaaaggaggggactagcggtagcagtgagttcattggatggccgaatccctgagtacagggaagtcgtcaatggttcgacactccgtaagtcgaggagtctcgagatgccatgtggacgagggcttgcccacggcacatcttaacctatgtgggggttgcataggtgaaagcaccatccgtggtgttatggacacagcctgatagggtgtagcagagacctgctattccgctagtaaaaactctgctgtacatggcac

SEQ ID NO: 17363 - DNA, 329 bp, synthetic construct
  source 1..329: mol_type = other DNA
aattaggcatagggaaaatcctcctcagcgaaggccgaaaagaggctagccatgcccttagtaggactagcaaattggggggggtagcagcagtggcgagttcattggatggctgaagccctgagtacagggtagtcgtcagtggttcgacgccttaggatctgaggcctcgagatgccacgtggacgagggcatgcccacagcacatcctattccggacgagggtcgcccggaagaaagcggttgtactaaccgttatggacacggcctgataggatgctgcagaggcccactgtgttgctactaaaaatctctgctgtacatggcac

SEQ ID NO: 17364 - DNA, 330 bp, synthetic construct
  source 1..330: mol_type = other DNA
attaggcctagggaacaaatcctcctcagcgaaggccgaaaagaggctagccatgcccttagtaggactagcacaaagaggggggtagcaacagtggtgagttcgttggatggcttaagccctgagtacagggtagtcgtcagtggttcgacgccttagcatgaaggtctcgagatgccacgtggacgagggcacgcccaaagcacatcttagcctgagcgggggtcgctcaggtaaaagcaggtctaaacaactgctacgaatacagcctgatagggtgctgcagaggcccactgtattgctactaaaaatctctgctgtacatggcac

SEQ ID NO: 17365 - DNA, 374 bp, synthetic construct
  source 1..374: mol_type = other DNA
attagaaaaagctcctgtatacagattgggcaattaaaaattgaagattaggcctagggaaaaatccctctcagcgaaggccgaaaagaggctagccatgcccttagtaggactagcaaaatgagaggggtagcaacagtggtgagttcattggatggctgaagccctgagtacagggtagtcgtcagtggttcgacacctcggaaagaaggtctcgagatgccacgtggacgagggcatgcccacagcacatcttaacctggacgggggtcgcccaggtaaaagcagtttaactaactgttatggacacagcctgatagggtgctgcagaggcccactgcattgctactaaaaatctctgctgtacatggcac

SEQ ID NO: 17366 - DNA, 337 bp, synthetic construct
  source 1..337: mol_type = other DNA
aaaaatgaattaggcctgagggacaaatcctccttagcgaaggccgaaaagaggctagccatgcccttagtaggactagcaaaacaaggagggtagcaacagtggtgagttcgttggatggctgaagccctgagtacagggtagtcgtcagtggttcgacgctttgtgcgacaagcctcgagatgccacgtggacgaggatacgcccacagcacatcttaacctgagcgggggtcgttcaggtgaaaacggtttaaccaaccgctacgaatacagcgtgatagggtgctgcagaggcccactgtatcgctactaaaaatctctgctgtacatggcat

SEQ ID NO: 17367 - DNA, 373 bp, synthetic construct
  source 1..373: mol_type = other DNA
gaggttaggcaagttctcgtatacatattggatactctaaaagataattaggcctagggaaaatcctccttagcgaaggccgaaaagaggctagccatgcccttagtaggactagcaaaataaggggggtagcaacagtggtgagttcgttggatagctgaagccctgagtacagggtagtcgtcagtggttcgacgccttggaggacaggcctcgagatgccacgtggacgagggcatgcccacagcatatcttaacctggacgggggtcgttcaggtgaaagcagtctaactaactgctacgaatacagcctgatagggtgctgcagaggcccactgtattgctactgaaaatctctgctgtacatggcac

SEQ ID NO: 17368 - DNA, 288 bp, synthetic construct
  source 1..288: mol_type = other DNA
aggctagccatgcccttagtaggactagcgatgaggagggactagcaacagtggtgagtttgctggatggtcaaagccctgagtacagggtagtcgtcagtggttcgacacttgaaataacgagtctcgaggtgccacgtggacgagggcatgcccatgacacatcttagcctgagtgggggtcgcccaggcaaatgctcttccctgagaggagttgcaagcacagcctgatagggtgctgcagaggcccactgatttgctagtaaaaatctctgctgtacatggcac

SEQ ID NO: 17369 - DNA, 367 bp, synthetic construct
  source 1..367: mol_type = other DNA
ggcaagttctcgtatacatattggacactctaaaaaataattaggtctagggaaaaatcctccttagcgaaggccgaaaagaggctagccatgcccttagtaggactagcaaaataaggggggtagcaacagtggtgagttcgttggatggctgaagccctgagtacagggtagtcgtcagtggttcgacgcttcggaggacaagcctcgagatgccacgtggacgagggcatgcccacagcacatcttaacctggacgggggtcgttcaggtgaaaacggtttaaccaaccgctacgaatacagcctgatagggtgctgcagaggcccactgtattgctactgaaaatctctgctgtacatggcac

SEQ ID NO: 17370 - DNA, 396 bp, synthetic construct; identical to SEQ ID NO: 432
  source 1..396: mol_type = other DNA

SEQ ID NO: 17371 - DNA, 347 bp, synthetic construct; identical to SEQ ID NO: 329
  source 1..347: mol_type = other DNA

SEQ ID NO: 17372 - DNA, 297 bp, synthetic construct
  source 1..297: mol_type = other DNA
ggccgaaaagaggctagccatgcccttagtaggactagcaaaaggaggggactagcggtagcagtgagttcattggatggcctaatccctgagtacagggaagtcgtcaatggttcgacactccatcagttgaggagtctcgagatgccatgtggacgagggcatgcccaaggcacatcttaacctatgcgggggttgcataggcaaaagcaccactcacggtgttatggacacagcctgatagggtgtagcagagacctgctattccgctagtaaaaactctgctgtacatggcac

SEQ ID NO: 17373 - DNA, 371 bp, synthetic construct; identical to SEQ ID NO: 352
  source 1..371: mol_type = other DNA

SEQ ID NO: 17374 - DNA, 278 bp, synthetic construct
  source 1..278: mol_type = other DNA
tgcccttagtaggactagcataatggaaggggtagcaacagtggtgagttcgttggatggcttaagccctgagtacagggtagtcgtcagtggttcgacaccttggaagaacaaggcctcgagataccacgtggacgagggcatgcccaaagcacaccttagcctgggcgggggtcgctcaggtgaaaacagtctaaacgactgctacgaatacagcctgatagggtgctgcagaggcccactgtattgctactaaaaatctctgctgtacatggcac

SEQ ID NO: 17375 - DNA, 359 bp, synthetic construct
  source 1..359: mol_type = other DNA
gtatacatattggacactctaaaaaataattaggtctaggggacaagaatcccccttagcgaaggccgaaaagaggctagccatgcccttagtaggactagcaaaataaggggggtagcaacagtggtgagttcgttggatggctgaagccctgagtacagggtagtcgtcagtggttcgacgctttggaggacaagcctcgagatgccacgtggacgagggcatgcccacagcacatcttaacctggacgggggtcgttcaggtgaaaacggtttaaccaaccgctacgaatacagcctgatagggtgctgcagaggcccactgtattgctactgaaaatctctgctgtacatggcac

SEQ ID NO: 17376 - DNA, 372 bp, synthetic construct
  source 1..372: mol_type = other DNA
ggttaggcaagttctcgtatacatattggacactctaaaaaataattaggtctagggaaaaatcctccttagcgaaggccgaaaagaggctaaccatgcccttagtaggactagcaaaataaggggggtagcaacagtggtgagttcgttggatggctgaagccctgagtacagggtagtcgtcagtggttcgacgcttcggaggacaagcctcgagatgccacgtggacgagggcatgcccacagcacatcttaacctgggcgggggtcgctcaggtgaaaacggtttaaccaaccgctacgaatacagcctgatagggtgctgcagaggcccactggattgctactaaaaatctctgctgtacatggcac

SEQ ID NO: 17377 - DNA, 277 bp, synthetic construct
  source 1..277: mol_type = other DNA
atgcccttagtaggactagcataatgaagggggtagcaacagtggtgagttcgttggatggcttaagccctgagtacagggtagtcgtcagtggttcgacaccttggtttaaaggtctcgagatgccacgtggacgagggcatgcccaaagcacatcttaacctgagcgggggtcgcccaggtgaaaacagtttaactaactgttacgaatacagcctgatagggtgctgcagaggcccactgatttgctactaaaaatctctgctgtacatggcac

SEQ ID NO: 17378 - DNA, 305 bp, synthetic construct
  source 1..305: mol_type = other DNA
tcagcgaaggccgaaaagaggctagccatgcccttagtaggactagcaaattgaggggggtagcagcagtggcgagttcattggatggctgaagccctgagtacagggtagtcgtcagtggttcgacgccttaggatctaaggcctcgagatgccacgtggacgagggcatgcccacagcacatcttaatccgggcgggggtcgctcgggtgaaagcggttgtattaactgttatgaacacggcctgatagggcgctgcagaggcccactgtgttgctactaaaaatctctgctgtacatggcac

SEQ ID NO: 17379 - DNA, 277 bp, synthetic construct
  source 1..277: mol_type = other DNA
atgcccttagtaggactagcataaagaggggggtagcaacagtggtgagttcgttggatggcttaagccctgagtacagggtagtcgtcagtggttcgacgccttggtataaaggtctcgagatgccacgtggacgagggcacgcccaaagcacatcttaacctgagcgggggtcgctcaggcgaaaacagtttgatcaactgctacgaatacagcctgatagggtgctgcagaggcccactgtattgctactaaaactctctgctgtacatggcac

SEQ ID NO: 17380 - DNA, 361 bp, synthetic construct
  source 1..361: mol_type = other DNA
ttctcgtatacatattggacactctaaaaataaattaggcccaggggacaaatcctccttagcgacggccgaaaagaggctagccatgcccttagtaggactagcaaacgaggagggtagcaacagtggtgagttcgttggatggctgaagccctgagtacagggtagtcgtcagtggttcgacgcttagtatgacgagcctcgagatgccacgtggacgagggcatgcccacagcacatcttaacctgagcgggggtcgctcaggcgaaaacggtttaaccaaccgctacgaatacagcctgatagggtgctgcagaggcccactgtattgctactaaaaatctctgctgtacatggcac

SEQ ID NO: 17381 - DNA, 334 bp, synthetic construct
  source 1..334: mol_type = other DNA
gtttgtgtttggtttagggactaactcccctagcgaaggccgaaatgggttaaccataccttcagtaggacgagcgtaatgggggactagtggtagcagtgagctccttggattaccgaagccccgagtacggggtagtcgtcaatggttcgacgcatcaaggaatgcctcgagatgccatgtggacgagggcgtgcccacggtgaatcttaactcaagcgggggccgcttgggtgaaagagggtcattatatggctctttgggagtacagcctgatagggtgttgcagagacctgctacattactagtataaaaactctgctgtacatggcac

SEQ ID NO: 17382 - DNA, 343 bp, synthetic construct
  source 1..343: mol_type = other DNA
ggcaaaacattgaattgataaggtagggaactttcccctcagcgaaggccgaaaagaggctagccatgcccttagtaggactagcaaaaggaggggactagcggtagcagtgagttcattggatggccgaatccctgagtacagggaagtcgtcaatggttcgacactccatcagtcgaggagtctcgagatgccatgtggacgagggcttgcccacggcacatcttaacctatgcgggggttgcataggtgaaagcaccattcatggtgttatggacacagcctgatagggtgtagcagagacctgctattccgctagtaaaaactctgctgtacatggcac

SEQ ID NO: 17383 - DNA, 361 bp, synthetic construct
  source 1..361: mol_type = other DNA
ctcgtatgcatattgggcaatctaaaataataattagacctagggaacaatccctctcagcgaaggccgaaaggaggctagccatgcccttagtaggactagcaaaatgaggggggtagcatcagtggtgagttcgttggatggctgaagccctgagtacagggcagtcgtcagtggttcgacacctaggatgataggtctcgagatgccacgtggacgagggcatgcccacagcacatcttagcccgagcgggggtcgcccgggtgaaaacggtaaatacagaccgctacgaatacagcctgatagggtgctgcagaggcccactgtaatgctactaaaaatctctgctgtacatggcac

SEQ ID NO: 17384 - DNA, 300 bp, synthetic construct; identical to SEQ ID NO: 279
  source 1..300: mol_type = other DNA

SEQ ID NO: 17385 - DNA, 351 bp, synthetic construct
  source 1..351: mol_type = other DNA
ctcgtatacaaaattgggcatataaatttctgattcgattagggaatccctctagcgacggccgaactgggctagccatgcccatagtaggactagcaaatggagggactagccgtagcggtgagctccctgggtagtctaagccctgagtacagggtagtcgtcagtagttcgacgtggacgagagtccatctcgagatgctacgtggacgagggcatgcccaagacataccttaacccaggcgggggtcgtctgggtgaaatcacttagcgtgatgggggtacaacctgatagggtgctgcagaggcccgctattaggctagtataaaaatctctgctgtacatggcac

SEQ ID NO: 17386 - DNA, 351 bp, synthetic construct
  source 1..351: mol_type = other DNA
ctcgtgtacaaaattgggcatataaatttctgattcgattagggaatccctctagcgacggccgaactgggctagccatgcccatagtaggactagcaaacggagggactagccgtagcggtgagctccctgggaagtctaagccctgagtacagggtagtcgtcagtagttcgacgtggacgagagtccatctcgagatgctacgtggacgagggcatgcccaagacataccttaacccaggcgggggtcgtctgggtgaaatcacttagcgtgatgggggtacaacctgatagggtgctgcagaggcccgctattaggctagtataaaaatctctgctgtacatggcac

SEQ ID NO: 17387 - DNA, 290 bp, synthetic construct
  source 1..290: mol_type = other DNA
aaagaggctagccatgcccttagtaggactagcataaagaggggggtagcaacagtggtgagttcgttggatggcttaagccctgagtacagggtagtcgtcagtggttcgacgccttggcataaaggtctcgagatgccacgtggacgagggcacgcccaaagcacatcttaacctgagcgggggtcgctcgggcgaaaacagtttgatcaactgctacgaatacagcctgatagggtgctgcagaggcccactgtattgctactaaaaatctctgctgtacatggcac

SEQ ID NO: 17388 - DNA, 252 bp, synthetic construct
  source 1..252: mol_type = other DNA
actggttgagcaggtgagtgtgctgcagcggctaagcggtgagtacaccgtattcgtcaacaggtgctactggaaaggatcacccactagcgatgcctgtgtggacgaggacatgtccaagccaatgttatcagtagcgggggtcgttactgagaaagctgcccagattgggtagttgcacatacagtctgataggatgccggcggatgccctgtattttgaccagtataaatattatccgttgtaaagcat

SEQ ID NO: 17389 - DNA, 347 bp, synthetic construct
  source 1..347: mol_type = other DNA
aattccaaaacagaaatcaggcctagggaacaaaatccccctcagcgaaggccgaaaagaggctagccatgcccttagtaggactagcaaatcggggggggtagcaacagtggtgagttcattggatggcagaagccctgagtacagggtagtcgtcagtggttcgacgccttaaggtaactaggtctcgagatgccacgtggacgagggcatgcccactgcatatcttaacctgcgcgggggtcgctcaggtgaaagcggcataaacaaccgttatggacacagcctgatagggtgctgcagaggcccactgtattgctactgaaaatctctgctgtacatggcac

SEQ ID NO: 17390 - DNA, 370 bp, synthetic construct; identical to SEQ ID NO: 349
  source 1..370: mol_type = other DNA

SEQ ID NO: 17391 - DNA, 318 bp, synthetic construct; identical to SEQ ID NO: 303
  source 1..318: mol_type = other DNA

SEQ ID NO: 17392 - DNA, 365 bp, synthetic construct
  source 1..365: mol_type = other DNA
ctcgtatacagattggatattgacaaaatattgaattgacaaggtagggaatatttcccctcagcgaaggccgaaaagaggctagccatgcccttagtaggactagcaaaaggaggggactagcggtagcagtgagttcattggatggcctaatccctgagtacagggaagtcgtcaatggttcgacgctccaccagttgaggagtctcgagatgccatgtggacgagggcatgcccaaggcacatcttaacctatgcgggggttgcataggcaaaagcaccactcacggtgttatggacacagcctgatagggtgtagcagagacctgctattccgctagtaaaaactctgctgtacatggcac

SEQ ID NO: 17393 - DNA, 310 bp, synthetic construct
  source 1..310: mol_type = other DNA
gggcctccctccagcgacggccgaactgggctagccatgcccgcagtaggactagcaaacggagggactagccgtagtggcgagctccctgggtggtctaagtcctgagtacaggacagtcgtcagtagttcgacgtgagcagaagcccacctcgatatgctatgtggacgagggcatgcccaagacacaccctaaccctagcgggggtcgctagggtgaaatcacaccacgtgatgggagtacgacctgatagggtgctgcagaggcccactattaggctagtataaaaatctctgctgtacatggcac

SEQ ID NO: 17394 - DNA, 307 bp, synthetic construct
  source 1..307: mol_type = other DNA
cctccctccagcgacggccgaactgggctagccatgcccgcagtaggactagcaaacggagggactagccgtagtggcgagctccctgggtggtctaagtcctgagtacaggacagtcgtcagtagttcgacgtgagcagaagcccatctcgatatgctatgtggacgagggcatgcccaagacacaccttaaccctagcgggggtcgctagggtgaaatcacaccacgtgatgggagtacgacctgatagggtgctgcagaggcccactattaggctagtataaaaatctctgctgtacatggcac

SEQ ID NO: 17395 - DNA, 307 bp, synthetic construct
  source 1..307: mol_type = other DNA
cctccctccagcgacggccgaactgggctagccatgcccgcagtaggactagcaaacggagggactagccgtggtggcgagctccctgggtggtctaagtcctgagtacaggacagtcgtcagtagttcgacgtgagcagaagcccacctcgatatgctatgtggacgagggcatgcccaagacacaccttaaccctagcgggggtcgctagggtgaaatcacaccacgtgatgggagtacgacctgatagggtgctgcagaggcccactattaggctagtataaaaatctctgctgtacatggcac

SEQ ID NO: 17396 - DNA, 296 bp, synthetic construct
  source 1..296: mol_type = other DNA
cgacggccgaactgggctagccatgcccgcagtaggactagcaaacggagggactagccgtagtggcgagctccctgggtggtctaagtcctgagtacaggacagtcgtcagtagttcgacgtgagcagaagcccacctcgatatgctatgtggacgagggcatgcccaagacacaccttaaccctagcgggggtcgctagggtgaaatcacaccacgtgatgggagtacgacctgatagggtgctgcagaggcccactattaggctagtataaaaatctctgctgtacatggcac

SEQ ID NO: 17397 - DNA, 348 bp, synthetic construct
  source 1..348: mol_type = other DNA
ttgacaaaacattgaattggcgaagtagggaacttttttcccctcagcgaaggccgaaaagaggctagccatgcccttagtaggacgagcaaaatgaggggactagcggtagcagtgagttcattggatggcctaatccctgagtacagggaagtcgtcaatggttcgacactccatcagttgaggagtctcgagatgccatgtggacgagggcatgcccaaggcacatcttaacctatgcgggggttgcataggcaaaagcaccactcacggtgttgtggacacagcctgatagggtgtagcagagacctgctattccgctagtaaaaactctgctgtacatggcac

SEQ ID NO: 17398 - DNA, 254 bp, synthetic construct
  source 1..254: mol_type = other DNA
ggggactagtggtagcagtgagctccttggattaccgaagccccgagtacggggtagtcgtcaatggttcgacgcatcacgtgaatgcctcgagatgccatgtggacgagggcgtgcccacggtgaatcttaactcaagcgggggccgcttgggtgaaagagggtcattatgtggctctttgggagtacagcctgatagggtgttgcagagacctgctacatcactagtataaaaactctgctgtacatggcat

SEQ ID NO: 17399 - DNA, 300 bp, synthetic construct
  source 1..300: mol_type = other DNA
ccagcgacggccgaactgggctagccatgcccgcagtaggactagcaaacggagggactagccgtagtggcgagctccctgggtggtctaagtcctgagtacaggacagtcgtcagtagttcgacgtgagcagaagcccacctcgatatgctatgtggacgagggcatgcccaagacacaccttaaccctagcgggggtcgctagggtgaaatcacaccacgtgatgggagtacgacctgatagggtgctgcagaggcccactattaggctagtataaaaatctctgctgtacatggcac

SEQ ID NO: 17400 - DNA, 291 bp, synthetic construct
  source 1..291: mol_type = other DNA
aaagaggctagccatgcccttagtaggactagcaaaaggaggggactagcggtagcagtgagttcattggatggccgaacccctgagtacaggggagtcgtcaatggttcgacactccattagtcgaggagtctcgagatgccatgtggacgagggcatgcccacggcacatcttaacccatgcgggggttgcatggatgaaagcgctattcgtggcgttatggacacagcctgatagggtgtagcagagacctgctactccgctagtaaaaactctgctgtacatggcac

SEQ ID NO: 17401 - DNA, 297 bp, synthetic construct
  source 1..297: mol_type = other DNA
gcgacggccgaactgggctagccatgcccgcagtaggactagcaaacggagggactagccgtagtggcgagctccctgggtggtctaagtcctgagtacaggacagtcgtcagtagttcgacgtgagcagaagcccacctcgatatgctatgtggacgagggcatgcccaagacacaccttaaccctagcgggggtcgctagggtgaaatcacaccacgtgatgggagtacgacctgatagggtgctgcagaggcccactatcaggctagtataaaaatctctgctgtacatggcac

SEQ ID NO: 17402 - DNA, 311 bp, synthetic construct
  source 1..311: mol_type = other DNA
attcccctagcgaaggccgaaataggttaaccatacctttagtaggacgagcataatgggggactagtggtagcagtgagctccttggattaccgaagccccgagtacggggtagtcgtcagtggttcgacgcattaaggaatgcctcgagatgccatgtggacgagggcgtgcccacggtgaatcttaacccaagcgggggccgcttgggtgaaagggagtcattatatggctctttgggagtacagcctgatagggtgctgcagagacctgctacatcactagtataaaaactctgctgtacatggcac

SEQ ID NO: 17403 - DNA, 376 bp, synthetic construct
  source 1..376: mol_type = other DNA
gtataaagttactcgtatacagattggatattgacaaaacattgaattggcgaagtagggaacttttcccctcagcgaaggccgaaaagaggctagccatgcccttagtaggacgagcaaaatgaggggactagcggtagcagtgagttcattggatggcctaatccctgagtacagggaagtcgtcaatggttcgacactccatcagttgaggagtctcgagatgccatgtggacgagggcatgcccaaggcacatcttaacctatgcgggggttgcatgggcaaaagcaccactcacggtgttgtggacacagcctgatagggtgtagcagagacctgctattccgctagtaaaaactctgctgtacatggcac

SEQ ID NO: 17404 - DNA, 374 bp, synthetic construct
  source 1..374: mol_type = other DNA
gataaagtactcgtatacagattggatattgacaaaacattgaattggcgaagtagggaacttttcccctcagcgaaggccgaaaagaggctagccatgcccttagtaggacgagcaaaatgaggggactagcggtagcagtgagttcattggatggcctaatccctgagtacagggaagtcgtcaatggttcgacactccatcagttgaggagtctcgagatgccatgtggacgagggcatgcccaaggcacatcttaacctatgcgggggttgcataggcaaaagcaccactcacggtgttgtggacacagcctgatagggtgtagcagagacctgctattccgctagtaaaaactctgctgtacatggcac

SEQ ID NO: 17405 - DNA, 379 bp, synthetic construct; identical to SEQ ID NO: 383
  source 1..379: mol_type = other DNA

SEQ ID NO: 17406 - DNA, 276 bp, synthetic construct
  source 1..276: mol_type = other DNA
cctttagtaggacgagcataatgggggactagtggtagcagtgagctccttggattaccgaagccccgagtacggggtagtcgtcaatggttcgacgcatcaaggaatgcctcgagatgccatgtggacgagggcgtgcccacggtgaatcttaactcaagcgggggccgcttgggtgaaagagggtcattatgtggctctttgggagtacagcctgatagggtgttgcagagacctgctacatcactagtataaaaactctgctgtacatggcac

SEQ ID NO: 17407 - DNA, 277 bp, synthetic construct
  source 1..277: mol_type = other DNA
atgcccttagtaggactagcatattggggggggtagcaacagtggtgagttcgttggatggctgaagccctgagtacagggtagtcgtcagtggttcgacgcccaaaaaatgaggtctcgagatgccacgtggacgagggcatgcccacagcacatcttaatctgggcgggggtcgctcagacgaaagcggttgtttcaaccgttgcgaatacagcctgatagggtgctgcagaggcccactgatttgctactaaaaatctctgctgtacatggcac

SEQ ID NO: 17408 - DNA, 290 bp, synthetic construct
  source 1..290: mol_type = other DNA
aaagaggctagccatgcccttagtaggactagcaaaataaggggggtagcaacggtggtgagttcgttggatggctgaagccctgagtacagggtagtcgtcagtggttcgacgccttggaggacaggcctcgagatgccacgtggacgagggcacgcccacagcacatcttaacctggacgggggtcgttcaggtgaaagcggttaaattgaccgctacgaatacagcctgatagggtgctgcagaggcccactgtattgctactaaaaatctctgctgtacatggcac

SEQ ID NO: 17409 - DNA, 284 bp, synthetic construct
  source 1..284: mol_type = other DNA
ctagccatgcccttagtaggactagcaaaatgaggggggtagcagcagtggccagttcgttggatggctgaagccctgagtacagggtagtcgtcagtggttcgacgccttaggatctagggcctcgagatgccacgtggacgagggcatgcccacagcacatcctaatccgggcgggggtcgctcggatgaaagcggttgtattgaccgttatggacacggcctgatagggcgctgcaggggctcactgtgttgctactaaaaatctctgctgtacatggcac

SEQ ID NO: 17410 - DNA, 276 bp, synthetic construct
  source 1..276: mol_type = other DNA
cctttagtaggacgagcataatgggggactagtggtagcagtgagctccttggattaccgaagccccgagtacggggtagtcgtcaatggttcgacgcatcaaggaatgcctcgagatgccatgtggacgagggcgtgcccacggtgaatcttaactcaagcgggggccgcttgggtgaaagagggtcattatgtggctctttgggagtacagcctgatagggtgttgcagagacttgctacaccactagtataaaaactctgctgtacatggcac

SEQ ID NO: 17411 - DNA, 290 bp, synthetic construct
  source 1..290: mol_type = other DNA
cgaaatgggctagccatgcccatagtaggactagcaaacggagggactagccatagtggcgagctccctgggtggtctaagtcctgagtacaggacagtcgtcagtagttcgacgtgagcactagcccacctcgagatgctacgtggacgagggcatgcccaagacacaccttaaccctggcgggggtcgctagggtgaaatcacattatgtgatgggggtacgacctgatagggtgctgcagaggcccactagcaggctagtataaaaaatctctgctgtacatggcac

SEQ ID NO: 17412 - DNA, 290 bp, synthetic construct
  source 1..290: mol_type = other DNA
cgaaatgggctagccatgcccatagtaggactagcaaacggagggactagccatagtggcgagctccctgggtggtctaagtcctgagtacaggacagtcgtcagtagttcgacgtgagcactagcccacctcgagatgctacgtggacgagggcatgcccaagacacaccttaaccctggcgggggtcgctagggtaaaatcacattatgtgatgggggtacgacctgatagggtgctgcagaggcccactagcaggctagtataaaaaatctctgctgtacatggcac

SEQ ID NO: 17413 - DNA, 290 bp, synthetic construct
  source 1..290: mol_type = other DNA
cgaaatgggctagccatgcccatagtaggactagcaaacggagggactagccatagtggcgagctccctgggtggtctaagtcctgagtacaggacagtcgtcagtagttcgacgtgagcactagcccacctcgagatgctacgtggacgagggcatgcccaagacacaccttaaccctggcgggggtcgctagggtaaaatcacattatgtgatgggggtacgacctgatagggtgctgcagaggcccactagcaggctagtataaaaagtctctgctgtacatggcac

SEQ ID NO: 17414 - DNA, 290 bp, synthetic construct
  source 1..290: mol_type = other DNA
cgaaatgggctagccatgcccatagtaggactagcaaacggagggactagccatagtggcgagctccctgggtggtctaagtcctgagtacaggacagtcgtcagtagttcgacgtgagcactagcccacctcgagatgctacgtggacgagggcatgcccaagacacaccttaaccctggcgggggtcgctagggtgaaatcacattatgtgaggggggtacgacctgatagggtgctgcagaggcccactagcaggctagtataaaaaatctctgctgtacatggcac

SEQ ID NO: 17415 - DNA, 346 bp, synthetic construct
  source 1..346: mol_type = other DNA
gggtatcccaaattaataatttggtttagggactaatccccctggcgaaggccgaaataggttaaccataccttcagtaggacgagcataatgggggactagtggtagcagtgagctccttggattaccgaagccccgagtacggggtagtcgtcaatggttcgacgcatcaaggaatgcctcgagatgccatgtggacgagggcgtgcccacggtgaatcttaacccaagcgggggccgcttgggtgaaagagggccattgtatggctctttgggagtacagcctgatagggtgttgcagagacctgctacatcactagtataaaaactctgctgtacatggcac

SEQ ID NO: 17416 - DNA, 253 bp, synthetic construct
  source 1..253: mol_type = other DNA
gatggagggactagccgtagtggcgagctccctgggtggtttaagtcctgagtacaggacagtcgtcagtagttcgacgtgagcaggagcccacctcgagatgctatgtggacgagggcatgcccaaaacacaccttaaccctggcgggggtcgccagggtgaaatcacatcatgtgatgggggtacggcctgatagggtgctgcagaggcccactaacaggctagtataaaaatctctgctgtacatggcac

SEQ ID NO: 17417 - DNA, 255 bp, synthetic construct
  source 1..255: mol_type = other DNA
aataaggggggtagcaacagtggtgagttcgttggatggctgaagccctgagtacagggtagtcgtcagtggttcgacgctttgaagaacaagcctcgagatgccacgtggacgagggcatgcccacagcacatcttaatctggacgggggtcgttcaggtgaaaacggtttaaccaaccgctacgaatacagcctgatagggtgctgcagaggcccactgtattgctactaaaaatctctgctgtacatggcac

SEQ ID NO: 17418 - DNA, 382 bp, synthetic construct; identical to SEQ ID NO: 392
  source 1..382: mol_type = other DNA

SEQ ID NO: 17419 - DNA, 256 bp, synthetic construct
  source 1..256: mol_type = other DNA
ttgtgaggggggtagcaacagtggtgagttcgttggatggcttaagccctgagtacagggtagtcgtcagtggttcgacgccttggcgtaaaggtctcgagatgccacgtggacgagggcacgcccaaagcacatcttaacctgagcgggggtcgctcaggcgaaaacagtcagaccgactgctacgaatacagcctgatagggtgctgcagaggcccactgtattgctactaaaaatctctgctgtacatggcac

SEQ ID NO: 17420 - DNA, 277 bp, synthetic construct
  source 1..277: mol_type = other DNA
accttcagtaggacgagcgtaatgggggactagtggtagcagtgagctccttggattaccgaagccccgagtacggggtagtcgtcaatggttcgacgcatcaaggaatgcctcgagatgccatgtggacgagggcgtgcccacggtgaatcttaactcaagcgggggccgcttgggtgaaagagggtcattatgtggctctttgggagtacagcctgatagggtgttgcagagacctgctacaccactagtataaaaactctgctgtacatggcac

SEQ ID NO: 17421 - DNA, 391 bp, synthetic construct; identical to SEQ ID NO: 427
  source 1..391: mol_type = other DNA

SEQ ID NO: 17422 - DNA, 382 bp, synthetic construct
  source 1..382: mol_type = other DNA
gtatacacaaggttagctcaatccattgtgtgtacgattggatgttgcaaatttataatttgagatatagggacccattcatcacagcgaaggccgaacaagggtagccaatcccttcattaggactagcacaagtgatggactggagacgtggatgagtgagctgtagagaggaagtggtgagtacaccacagtcgtcaagagtactaccggtaaggatcacccgctagttatgctctgtggacgagggcatgcccaccttctctactagataccccgggggttggggtgtcgaaagtcgaaatgtcgattgctcacacagtctgataggatgccggcggatgctccacgtataccagtataaaaatccgttgaatagcac

SEQ ID NO: 17423 - DNA, 382 bp, synthetic construct
  source 1..382: mol_type = other DNA
gtatacacaaggttagctcaatccattgtgtgtacgattggatgttgcaaatttataatttgagacatagggacccattcatcacagcgaaggccgaacaagggtagccaatcccttcattaggactagcacaagtgatggactggagacgtggatgagtgagctgtagagaggaagtggtgagtacaccacagtcgtcaagagtactaccggtaaggatcacccgctagttatgctctgtggacgagggcatgcccaccttttctactagataccccgggggttggggtgtcgaaagtcgaaatatcgattgctcacacagtctgataggatgccggcggatgctccacgtataccagtataaaaatccgttgaatagcac

SEQ ID NO: 17424 - DNA, 253 bp, synthetic construct
  source 1..253: mol_type = other DNA
aacggagggactagccgtagtggcgagctccctgggtgttctaagtcctgagtacaggacagtcgtcagtagttcgacgtgagctgaagcccacctcgagatgctatgtggacgagggcatgcccaagacacaccttaaccctagcgggggtcgctagggtgaaatcacaccacgtgatgggagtacgacctgatagggtgctgcagaggctcactattaggctagtataaaaatctctgctgtacatggcac

SEQ ID NO: 17425 - DNA, 367 bp, synthetic construct; identical to SEQ ID NO: 343
  source 1..367: mol_type = other DNA

SEQ ID NO: 17426 - DNA, 378 bp, synthetic construct
  source 1..378: mol_type = other DNA
gcataatgctttgattggctgcattatgtgtgggacatcctaaattgttataagccctgcggtgagtgggggaaaggggttaaccaggcctctagtaccacaggcacctatggacagggcaactcaaacctgagagagaggtaccgaactcttaagtcccgagtacggggcagacgtcaccgagtagtacacccaaagaccaccatttctaggtgtagggtctactgaggctcgggtggacgtgggcgtgcccaaagagaaatcggtggtggacctgggggtcggggccaccataccccgttatggggtagaccttactgcttgatagagtgccggcggatgcctcgggtaagagtataaaatccgttgtctattaac

SEQ ID NO: 17427 - DNA, 377 bp, synthetic construct; identical to SEQ ID NO: 376
  source 1..377: mol_type = other DNA

SEQ ID NO: 17428 - DNA, 378 bp, synthetic construct
  source 1..378: mol_type = other DNA
gcataatgctttgattggctgcattatgtgtgggacatcctaaattaccatgcgccctgcggtgagtgggggaaaggggttaaccaggcctctagtaccacaggcaccaatagacagggcaactcgaacctgagagagaggtaccgaactcttaagtcccgagtacggggcagacgtcaccgagtagtacacccaaagaccaccacttctaggtgtagggtctactgaggctcgggtggacgtgggcatgcccaaagagaaatcggtggtggacctgggggtcgggcccaccatactcctttatggggtagaccttactgcttgatagagtgccggcggatgcctcgggtaagagtataaaatccgttgtttattaac

SEQ ID NO: 17429 - DNA, 376 bp, synthetic construct
  source 1..376: mol_type = other DNA
cataatgcttagattggctgcattatgtgtgggacatcctaaatttttatgagccctgtggtgagtgggggaaaggggttaaccaggcctctagtaccacaggcaccaatggacagggcaactcgaacctgagagagaggtaccgaactcttaagtcccgagtacggggcagacgtcaccgagtagtacacccaaagaccaccacttttaggtgtagggtctactgaggctcgggtggacgtgggcgtgcccaaagagaaatcggtggtggacccgggggtcgggaccaccatgcccttcacggggcagaccttactgcttgatagagtgccggcggatgcctcgggtgagagtataaaatccgttgtttattaac

SEQ ID NO: 17430 - DNA, 379 bp, synthetic construct; identical to SEQ ID NO: 384
  source 1..379: mol_type = other DNA

SEQ ID NO: 17431 - DNA, 378 bp, synthetic construct; identical to SEQ ID NO: 378
  source 1..378: mol_type = other DNA

SEQ ID NO: 17432 - DNA, 375 bp, synthetic construct
  source 1..375: mol_type = other DNA
ataatgcttagattggctgcattatgtgtgggacatcctaaatttttatgagccctgtggtgagtgggggaaaggggttaaccaggcctctagtaccacaggcaccaatggacagggcaactcgaacctgagagagaggtaccgaactcttaagtcccgagtacggggcagacgtcaccgagtagtacacccaaagaccaccacttttaggtgtagggtctactgaggctcgggtggacgtgggcgtgcccaaagagaaatcggtggtggacccgggggtcgggaccaccatgccctccacggggcagaccttactgcttgatagagtgccggcggatgcctcgggtgagagtataaaatccgttgtttattaac

SEQ ID NO: 17433 - DNA, 377 bp, synthetic construct
  source 1..377: mol_type = other DNA
gcataatgcttagattggctgcattatgtgtgggacatcctaaatttttatgagccctgtggtgagtgggggaaaggggttaaccaggcctctagtaccacaggcaccaatggacagggcaactcgaacctgagagagaggtaccgaactcttaagtcccgagtacggggcagacgtcaccgagtagtacacccaaagaccaccacttctaggtgtagggtctactgaggctcgggtggacgtgggcgtgcccaaagagaaatcggtggtggacccgggggtcgggaccaccatgcccttcacggggcagaccttactgcttgatagagtgccggcggatgcctcgggtgagagtataaaatccgttgtttattaac

SEQ ID NO: 17434 - DNA, 378 bp, synthetic construct
  source 1..378: mol_type = other DNA
gcataatgctttgattggctgcattatgtatgggacatcctaaattgttgtgagccctgtggtgagtgggggaaaggggttaaccaggcctctagtaccacaggcaccaacagacagggcaactcgaacctgagagagaggtaccgagctcttaagccccgagtacggggcagacgtcaccgagtagtacacccaaagaccaccacttctaggtgtagggtctactgaggctcgggtggacgtgggcgtgcccaaagagaaatcggtggtgggcctgggggtcggggccaccatgcccctttatggggtagaccttactgcttgatagagtgccggcggatgcctcgggtaagagtataaaatccgttgtctattaac

SEQ ID NO: 17435 - DNA, 376 bp, synthetic construct
  source 1..376: mol_type = other DNA
taatgctttgattggctgcattatgtgtgggacatcctaaattgttaagcgccctgcggtgagtgggggaaaggggttaaccaggcctctagtaccacaggcaccattggacagggcaactcgaacctgagagagaggtaccgaactcttaagctccgagtacggggcagacgtcaccgagtagtacacccaacgaccaccatgtttaggtgtagggtctactgaagctcgggtggacgtgggcgtgcccaaagagaaatcggtggtggacctgggggtcgggcccaccatgcccctcttacggggtagacctcactgcttgatagagtgccggcggatgcctcaggtgagagtataaaatccgttgttcgttaac

SEQ ID NO: 17436 - DNA, 368 bp, synthetic construct
  source 1..368: mol_type = other DNA
ttagattggctgcattatgtgtgggacatcctaaatttttatgagccctgtggtgagtgggggaaaggggttaaccaggcctctagtaccacaggcaccaatggacagggcaactcgaacctgagagagaggtaccgaactcttaagtcccgagtacggggcagacgtcaccgagtagtacacccaaagaccaccacttttaggtgtagggtctactgaggctcgggtggacgtgggcgcgcccaaagagaaatcggtggtggacccgggggtcgggaccaccatgcccttcacggggcagaccttactgcttgatagagtgccggcggatgcctcgggtgagagtataaaatccgttgtctatcaac

SEQ ID NO: 17437 - DNA, 369 bp, synthetic construct; identical to SEQ ID NO: 346
  source 1..369: mol_type = other DNA

SEQ ID NO: 17438 - DNA, 357 bp, synthetic construct
  source 1..357: mol_type = other DNA
gcattatgtgtgggacatcctaaatttttatgagccctgtggtgagtgggggaaaggggttaaccaggcctctagtaccacaggcaccaatggacagggcaactcgaacctgagagagaggtaccgaactcttaagtcccgagtacggggcagacgtcaccgagtagtacacccaaagaccaccacttctaggtgtagggtctactgaggctcgggtggacgtgggcgtgcccaaagagaaatcggtggtggccccgggggttgggaccaccatgcccttcacggggcagaccttactgcttgatagagtgccggcggatgcctcgggtgagagtataaaatccgttgtttattaac

SEQ ID NO: 17439 - DNA, 359 bp, synthetic construct
  source 1..359: mol_type = other DNA
agcattatgcgtgggacatcctaaattgttactagtcctgcggtgagtgggggaaggggttaaccaggcctctagtaccacaggcaccaatgaacagggcaactcgaacctgagagagaggtaccgaactcttaagtcccgagtacggggcagacgtcactgagtagtacacccaaagaccaccgctcctaggtgtagggtctactgaggctcaggtggacgtgggcgtgcccaaagagaaatcggtggtggacctgggggtcgggtccaccatgcccctttaggggggtagaccttactgcttgatagagtgccggcggatgcctcaggtaagagtataaaatccgttgtttatcaac

SEQ ID NO: 17440 - DNA, 359 bp, synthetic construct
  source 1..359: mol_type = other DNA
gcattatgtgtgggacatcctaaattgttaagcgccctgcggtgagtgggggaaaggggttaaccaggcctctagtaccacaggcaccattggacagggcaactcgaacctgagagagaggtaccgaactcttaagctccgagtacggggcagacgtcaccgagtagtacacccaacgaccaccatgttcaggtgtagggtctactgaagctcgggtggacgtgggcgtgcccaaagagaaatcggtggtggacctgggggtcgggcccaccatacccccttaacggggtagacctcactgcttgatagagtgccggcggatgcctcaggtgagagtataaaatccgttgttcgttaac

SEQ ID NO: 17441 - DNA, 348 bp, synthetic construct
  source 1..348: mol_type = other DNA
tgggacatcctaaattgtcgtgagccctgcggtgagtgggggaaaggggttaaccaggcctctagtaccacaggcaccaatggacagggcaactcgaacctgagagagaggtaccgaactcttaagccccgagtacggggcagacgtcaccgagtagtacacccaacgaccaccacttctaggtgtagggtctactgaggctcgggtggacgtgggcgtgcccaaagagaaatcggtggtggacctgggggtcgggcccaccatgcccctttacggggtagaccttactgcttgatagagtgccggcggatgcctcaggtaagagtataaaatccgttgttcattaac

SEQ ID NO: 17442 - DNA, 385 bp, synthetic construct; identical to SEQ ID NO: 403
  source 1..385: mol_type = other DNA

SEQ ID NO: 17443 - DNA, 385 bp, synthetic construct
  source 1..385: mol_type = other DNA
atatggggcataatgcatagattggctgcattatgtgtataacatcccaaattgccataggctctgtggtgagtgggggaaaggggttaaccaggcctctagtaccacaggcaccatttaacagggcaactcgaacctgagagagaggtaccgaactcttaagcctcgagtacggggcagacgtcaccgagtagtacacccaacgaccaccacatttaggtgtagggtctactgaggctcgggtggacgtgggcatgcccaaagagaaaacggtgggggacctgggggtcgggtccgccatgcccctcaatggggtagaccttactgcttgatagagtgccggcggatgcctcaggtaagagtataaaatccgttgtttattaac

SEQ ID NO: 17444 - DNA, 385 bp, synthetic construct
  source 1..385: mol_type = other DNA
atatggggcataatgcatagattggctgcattatgtgtataacatcccaaattgccaaaggctctgtggtgagtgggggaaaggggttaaccaggcctctagtaccacaggcaccatttaacagggcaactcaaacctgagagagaggtaccgaactcttaagcctcgagtacggggcagacgtcaccgagtagtacacccaacgaccaccacatttaggtgtagggtctactgaggctcgggtggacgtgggcatgcccaaagagaaaacggtgggggacctgggggtcgggtccgccatgcccctcaatggggtagaccttactgcttgatagagtgccggcggatgcctcaggtaagagtataaaatccgttgtttattaac

SEQ ID NO: 17445 - DNA, 385 bp, synthetic construct
  source 1..385: mol_type = other DNA
atatggggcataatgcatagattggctgcattatgtgtataacatcccaaattgccataggctctgtggtgagtgggggaaaggggttaaccaggcctctagtaccacaggcaccatttaacagggcaactcaaacctgagagagaggtaccgaactcttaagcctcgagtacggggcagacgtcaccgagtagtacacccaacgaccaccacatttaggtgtagggtctactgaggctcgggtggacgtgggcatgcccaaagagaaaacggtgggggacctgggggtcgggtccgccatgcccctcaatggggtagaccttactgcttgatagagtgccggcggatgcctcaggtaagagtataaaatccgttgttcattaac

SEQ ID NO: 17446 - DNA, 320 bp, synthetic construct
  source 1..320: mol_type = other DNA
ggtgagtgggggaaaggggttaaccaggcctctagtaccacaggcaccattggacagggcaactcgaacctgagagagaggtaccgaactcttaagctccgagtacggggcagacgtcaccgagtagtacacccaacgaccaccatgtttaggtgtagggtctactgaagctcgggtggacgtgggcgtgcccaaagagaaatcggtggtggacctgggggtcgggcccaccatgcccccctttacggggtagacctcactgcttgatagagtgccggcggatgcctcaggtgagagtataaaatccgttgttcgttaac

SEQ ID NO: 17447 - DNA, 313 bp, synthetic construct
  source 1..313: mol_type = other DNA
agtgggggaaggggttaaccaggcctctagtaccacaggcaccaataaacagggcaactcgaacctgagagagaggtaccgaactcttaagtcccgagtacggggcagacgtcactgagtagtacacccaaagaccaccacatctaggtgtagggtctactgaggctcaggtggacgtgggcgtgcccaaagagaaatcggtggtggacctgggggtcgggtccaccatgcccctttagggggtagaccttactgcttgatagagtgccggcggatgcctcgggtaagagtataaaatccgttgttcattaac

SEQ ID NO: 17448 - DNA, 347 bp, synthetic construct
  source 1..347: mol_type = other DNA
tgggacatcctaaatttttatgagccctgtggtgagtgggggaaaggggttaaccaggcctctagtaccacaggcaccaatggacagggcaactcgaacctgagagagaggtaccgaactcttaagtcccgagtacggggcagacgtcaccgagtagtacacccaaagaccaccatttttaggtgtagggtctactgaggctcgggtggacgtgggcgcgcccaaagagaaatcggtggtggacccgggggtcgggaccaccatgcccttcacggggcagaccttactgcttgatagagtgccggcggatgcctcgggtgagagtataaaatccgttgtctatcaac

SEQ ID NO: 17449 - DNA, 299 bp, synthetic construct
  source 1..299: mol_type = other DNA
ttaaccaggcctctagtaccacaggcaccaatttgcagggcaactcgaacctgagagagaggtaccgaactcttaagcctcgagtacggggcagacgtcaccgagtagtacacccaacgaccaccacatttaggtgtagggtctactgaggctcgggtggacgtgggcttgcccaaagagaaaacggtgggggacctgggggtcgggtccgccatgcccctcaatggggtagaccttactgcttgatagagtgccggcggatgcctcaggtaagagtataaaatccgttgtttattaac

SEQ ID NO: 17450 - DNA, 380 bp, synthetic construct; identical to SEQ ID NO: 385
  source 1..380: mol_type = other DNA

SEQ ID NO: 17451 - DNA, 378 bp, synthetic construct; identical to SEQ ID NO: 379
  source 1..378: mol_type = other DNA

SEQ ID NO: 17452 - DNA, 377 bp, synthetic construct
  source 1..377: mol_type = other DNA
gcataatgctttgattggctgcattatgtgtcggacacctcaaattaccacgcgccctgcggtgagtgggggaaaggggttaaccaggcctctagtaccacaggcaccaatttgcagggcaactcgaacctgagagagaggtaccgaactcttaagccccgagtacggggcagacgtcaccgagtagtacacccaaagaccaccatatttaggtgtagggtctactgaggcttgggtggacgtgggcgtgcccaaagagaaatcggtggtggacctgggggtcgggcccaccacacccctttatagggtggaccttactgcttgatagagtgccggcggatgcctcaggtaagagtataaaatccgttgtttttaac

SEQ ID NO: 17453 - DNA, 370 bp, synthetic construct
  source 1..370: mol_type = other DNA
tcaaagcattatgcattatgtatgggacatcctaaattgctgtgagccccgtggtgagtgggggaaaggggttaaccaggcctctagtaccacaggcaccgatagacggggcaactcgaacctgagagagaggtaccgaactcttaagtcccgagtacggggcagacgtcaccgagtagtacacccaacgaccaccactcctaggtgtagggtctactgaggctcgggtggacgtgggcgcgcccaaagagaaatcggtggtggacctgggggccggggccaccatgccccttcacggggtagaccttactgcttgatagagtgccggcggatgcctcgggtaagagtataaaatccgttgtctattaat

SEQ ID NO: 17454 - DNA, 371 bp, synthetic construct
  source 1..371: mol_type = other DNA
ttcaaagcattatgcattatgtatgggacatcctaaattgctacgagccctgcggtgagtgggggaaaggggttaaccaggcctctagtaccacaggcaccaataaacagggcaactcgaacctgagagagaggtaccgaactcttaagtcccgagtacggggcagacgtcactgagtagtacacccaaagaccaccacatctaggtgtagggtctactgaggctcaggtggacgtgggcgtgcccaaagagaaatcggtggtggacctgggggtcgggtccaccatgcccctttaaggggtagaccttactgcttgatagagtgccggcggatgcctcgggtaagagtataaaatccgttgttcattaac

SEQ ID NO: 17455 - DNA, 280 bp, synthetic construct
  source 1..280: mol_type = other DNA
cacaggcaccaacagacagggcaactcgaacctgagagagaggtaccgaactcttaagccccgagtacggggcagacgtcaccgagtagtacacccaaagaccaccatatttaggtgtagggtctactgaggcttgggtggacgtgggcatgcccaaagagaaatcggtggtggacctgggggtcgggcccaccacacccccacatggggtggaccttactgcttgatagagtgccggcggatgcctcaggtaagagtataaaatccgttgtttatcaac

SEQ ID NO: 17456 - DNA, 358 bp, synthetic construct
  source 1..358: mol_type = other DNA
gcattatgtatgggacatcctaaattgttataagccctgcggtgagtgggggaaaggggttaaccaggcctctagtaccacaggcacctatggacagggcaactcaaacctgagagagaggtaccgaactcttaagtcccgagtacggggcagacgtcaccgagtagtacacccaaagaccaccatttctaggtgtagggtctactgaggctcgggtggacgtgggcgtgcccaaagagaaatcggtggtggacctgggggtcggggccaccataccccgttatggggtagaccttactgcttgatagagtgccggcggatgcctcgggtaagagtataaaatccgttgtctattaac

SEQ ID NO: 17457 - DNA, 355 bp, synthetic construct; identical to SEQ ID NO: 335
  source 1..355: mol_type = other DNA

SEQ ID NO: 17458 - DNA, 349 bp, synthetic construct
  source 1..349: mol_type = other DNA
ttaggacatcctaaattgttataagccctgcggtgagtgggggaaaggggttaaccaggcctctagtaccacaggcacctatggacagggcaactcaaacctgagagagaggtaccgaactcttaagtcccgagtacggggcagacgtcaccgagtagtacacccaaagaccaccatttctaggtgtagggtctactgaggctcgggtggacgtgggcgtgcccaaagagaaatcggtggtggacctgggggtcggggccaccataccccgttatggggtagaccttactgcttgatagagtgccggcggatgcctcgggtaagagtataaaatccgttgtctattaac

SEQ ID NO: 17459 - DNA, 355 bp, synthetic construct
  source 1..355: mol_type = other DNA
gcattatgtatgggacatcctaaattgtagtgagccccgtggtgagtgggggaaaggggttaaccaggcctctagtaccacaggcaccaatgaacggggcaactcgaacccgagagagaggtaccgaactcttaagccccgagtacggggcagacgtcaccgagtagtacacccaaagaccaccactaggtgtagggtctactgaggctcgggtggacgtgggcgtgcccaaagagaaatcggtggtggacctgggggtcggggccaccatacccctaaacagggtagaccttactgcttgatagagtgccggcggatgcctcgggcaagagtataaaatccgctgcctgttaac

SEQ ID NO: 17460 - DNA, 299 bp, synthetic construct
  source 1..299: mol_type = other DNA
ttaaccaggcctctagtaccacaggcaccaatttgcagggcaactcgaacctgagagagaggtaccgaactcttaagcctcgagtacggggcagacgtcaccgagtagtacacccaacgaccaccacatttaggtgtagggtctactgaggctcgggtggacgtgggcttgcccaaagagaaaacggtgggggacctgggggtcgggtccgccatgcccctcaatggggtagaccttactgcttgatagagtgccggcggatgcctcaggtaagagtataaaatccgttgtttattaat

SEQ ID NO: 17461 - DNA, 298 bp, synthetic construct
  source 1..298: mol_type = other DNA
taaccaggcctctagtaccacaggcaccagtggacagggcaactcgaacctgagagagaggtaccgaactcttaagtcccgagtacggggcagacgtcaccgagtagtacacccaacgaccaccatttttaggtgtagggtctacttaggctcgggtggacgtgggcgcgcccaaagagaaatcggtggtggacctgggggacggggccaccatgcccttttacggggtagaccttactgcttgatagagtgccggcggatgcctcgggtaagagtataaaatccgttgcttatcaac

SEQ ID NO: 17462 - DNA, 326 bp, synthetic construct
  source 1..326: mol_type = other DNA
agccccgtggtgagtgggggaaaggggttaaccaggcctctagtaccacaggcaccaataaacagggcaactcgaacctgagagagaggtaccgaactcttaagtcccgagtacggggcagacgtcactgagtagtacacccaaagaccaccacatctaggtgtagggtctactgaggctcaggtggacgtgggcgtgcccaaagagaaatcggtggtggacctgggggtcgggtccgccatgcccctttagggggtagaccttactgcttgatagagtgccggcggatgcctcgggtaagagtataaaatccgttgtatattaac

SEQ ID NO: 17463 - DNA, 358 bp, synthetic construct; identical to SEQ ID NO: 337
  source 1..358: mol_type = other DNA

SEQ ID NO: 17464 - DNA, 326 bp, synthetic construct
  source 1..326: mol_type = other DNA
agctctgcagtacgtgggggaaaggggttaaccaggcctctagtaccacaggcaccaattgacagggcaactcgagcctgggagagaggtaccgaactcttaagtcccgagtacggggcagacgtcaccgagtagtacacccaaagaccaccatgtttaggtgtagggtctactgaggcttgggtggacgtgggcatgcccaaagagaaatcggtggtggacctgggggtcgggcccaccgcacccctttatggggtggacctcactgcttgatagagtgccggcggatgcctcaggtaagagtataaaatccgttgtttattaac

SEQ ID NO: 17465 - DNA, 387 bp, synthetic construct
  source 1..387: mol_type = other DNA
gtatacgagattagctaaagtactcgtatacggattggacgttgacaaaaatattgaattggaaatgtagggaattttcccctcagcgaaggccgaaaagaggctagccatgcccttagtaggactagcaaaaggaggggactagcagtagcagtgagttcattggatggccgaacccctgagtacaggggagtcgtcaatggttcgacactccttcagttgaggagtctcgagatgccatgtggacgagggcatgcccacggcacatcttaacctatgcgggggctgcatgggtgaaagcgccattcttggtgttatggacacagcctgatagggtgtagcagagacctgctattctgctagtaaaaactctgctgtacatggcac

SEQ ID NO: 17466 - DNA, 254 bp, synthetic construct
  source 1..254: mol_type = other DNA
gaagaggggactagccgtcgtggtgagatccctgagtggtctaagtcctgagtacaggacagtcgtcagtagttcgacacaatcacagtattgtctcgagatgctacgtggacgagggcatgcccaagacacactttagccctgacgggggtcgccagggtgaaaacgcctaatggcgttggggttacagcctgatagggtgctgcagaggcccacgcataggctagtataaaaatctctgctgtacatggcac

SEQ ID NO: 17467 - DNA, 260 bp, synthetic construct
  source 1..260: mol_type = other DNA
agcaaaataaggggggtagcagcagtggtgagttcgttggatggctgaagccctgagtacagggtagtcgtcagtggttcgacgctttggaggataagcctcgagatgccacgtggacgagggcatgcccacagcacatcttaacctggacgggggtcgttcaggtgaaaacggtttaaccaaccgctacgaatacagcctgatagggtgctgcagaggcccactgtgttgctactaaaaatctctgctgtacatggcac

SEQ ID NO: 17468 - DNA, 327 bp, synthetic construct
  source 1..327: mol_type = other DNA
gagccctgcggtgagtgggggaaaggggttaaccaggcctctagtaccacaggcaccaataaacagggcaactcgaacctgagagagaggtaccgaactcttaagtcccgagtacggggcagacgtcactgagtagtacacccaaagaccaccacatctaggtgtagggtctactgaggctcaggtggacgtgggcgtgcccaaagagaaatcggtggtggacctgggggtcgggtccgccatgcccctttagggggtagaccttactgcttgatagagtgccggcggatgcctcgggtaagagtataaaatccgttgtatattaac

SEQ ID NO: 17469 - DNA, 281 bp, synthetic construct
  source 1..281: mol_type = other DNA
atgcccatagtaggactagcaaaaagaggggactagcggtagcacgtgagttcattggatggccgaatccctgagtacagggaagtcgtcaatggttcagcactctggcagtgacagagtcctgagatgccatgtggacgagggcatgcccacggcacatcttaatctacgcgggggttgcgtaggtgaaagcaccacttttgtggtgttatgaacacagcctgatagggtgtagcagagacctgctattccgctagtaaaaactctgctgtacatggcac

SEQ ID NO: 17470 - DNA, 257 bp, synthetic construct
  source 1..257: mol_type = other DNA
aaaaggaggggactagcggtacagtgagttcattggatggcctaatccctgagtacagggaagtcgtcaatggttcgacactccatcagttgaggagtctcgagatgccatgtggacgagggcatgcccaaggcacatcttaacctatgcgggggttgcataggcaaaagcaccactcacggtgttatggacacagcctgatagggtgtagcagagacctgctattccgctagtaaaaactctgctgtacatggcac

SEQ ID NO: 17471 - DNA, 379 bp, synthetic construct
  source 1..379: mol_type = other DNA
tgcataatgctttgattggctgcattatgtatgggacatcctaaattgttgtgagccctgtggtgagtgggggaaaggggttaaccaggcctctagtaccacaggcaccaacagacagggcaactcgaacctgagagagaggtaccgagctcttaagccccgagtacggggcagacgtcaccgagtagtacacccaaagaccaccacttctaggtgtagggtctactgaggctcgggtggacgtgggcgtgcccaaagagaaatcggtggtgggcctgggggtcggggccaccatgcccctttatggggtagaccttactgcttgatagagtgccggcggatgcctcgggtaagagtataaaatccgttgtctattaac

SEQ ID NO: 17472 - DNA, 377 bp, synthetic construct
  source 1..377: mol_type = other DNA
cataatgctttgattggctgcattatgtatgggacatcctaaattgttgtgagccctgtggtgagtgggggaaaggggttaaccaggcctctagtaccacaggcaccaacagacagggcaactcgaacctgagagagaggtaccgaactcttaagtcccgagtacggggcagacgtcactgagtagtacacccaaagaccaccacttctaggtgtagggtctactgaggctcaggtggacgtgggcgtgcccaaagagaaatcggtggcggacctgggggtcgggtccaccatgcccctttagggggtagaccttactgcttgatagagtgccggcggatgcctcgggtaagagtataaaatccgttgtttgttaac

SEQ ID NO: 17473 - DNA, 367 bp, synthetic construct
  source 1..367: mol_type = other DNA
tgattggctgcattatgtatgggacatcttaaattgctatgagccccgtggtgagtgggggaaaggggttaaccaggcctctaggtccacaggcaccgatagacggggcaactcaagcctgagagagaggtaccgaactcttaagtcccgagtacggggcagacgtcaccgagtagtacacccaacgaccaccacttctaggtgtagggtctactgaggctcgggtggacgtgggcgcgcccaaagagaaatcggtggtggacctgggggtcggggccaccatgcccctttacggggtagaccttactgcttgatagagtgccggcggatgcctcaggtaagagtataaaatccgttgtctattaac

SEQ ID NO: 17474 - DNA, 367 bp, synthetic construct
  source 1..367: mol_type = other DNA
tgattggctgcattatgtatgggacatcctaaattgttgtgagccctgtggtgagtgggggaaaggggttaaccaggcctctagtaccacaggcaccaacagacagggcaactcgaacctgagagagaggtaccgagctcttaagccccgagtacggggcagacgtcaccgagtagtacacccaaagaccaccacttctaggtgtagggtctactgaggctcgggtggacgtgggcgtgcccaaagagaaatcggtggtgggcctgggggtcggggccaccatgcccctttatggggtagaccttactgcttgatagagtgccggcggatgcctcgggtaagagtataaaatccgttgtctattaac

SEQ ID NO: 17475 - DNA, 290 bp, synthetic construct
  source 1..290: mol_type = other DNA
cctctagtaccacaggcaccgatagacggggcaactcgaacctgagagagaggtaccgaactcttaagtcccgagtacggggcagacgtcaccgagtagtacacccaacgaccaccactcctaggtgtagggtctactgaggctcgggtggacgtgggcgtgcccaaagagaaatcggtggtggacctgggggccggggccaccatgctcctttacggggtagaccttactgcttgatagagtgccggcggatgcctcgggtaagagtataaaatccgttgtctattaat

SEQ ID NO: 17476 - DNA, 378 bp, synthetic construct; identical to SEQ ID NO: 380
  source 1..378: mol_type = other DNA

SEQ ID NO: 17477 - DNA, 333 bp, synthetic construct; identical to SEQ ID NO: 319
  source 1..333: mol_type = other DNA

SEQ ID NO: 17478 - DNA, 326 bp, synthetic construct
  source 1..326: mol_type = other DNA
agccccgtggtgagtgggggaaaggggttaaccaggcctctagtaccacaggcacctatggacagggcaactcaaacctgagagagaggtaccgaactcttaagccccgagtacggggcagacgtcaccgagtagtacacccaaagaccaccatttctaggtgtagggtctactgaggctcgggtggacgtgggcgcgcccaaagagaaatcggtggtggacctgggggtcggggccaccataccccgttatggggtagaccttactgcttgatagagtgccggcggatgcctcaggtaagagtataaaatccgttgtctattaac

SEQ ID NO: 17479 - DNA, 327 bp, synthetic construct
  source 1..327: mol_type = other DNA
gagccctgcggtgagtgggggaaaggggttaaccagacctctagtaccacaggcaccaaaggacagggcaactcgaacctgagagagaggtaccgaactcttaagccccgagtacggggcagacgtcaccgagtagtacacccaaagaccaccacttttaggtgtagggtctactgaggctcgggtggacgtgggcgtgcccaaagagaaatcggtggtggacctgggggtcgggaccaccatgcccatttacggggtagacctcactgcttgatagagtgccggcggatgcctcgggtaagagtataaaatccgttgtttactaac

SEQ ID NO: 17480 - DNA, 359 bp, synthetic construct
  source 1..359: mol_type = other DNA
gttcattctcgtgtacatgattggacaaattaaaatttcaatttggatcagggcctccctccagcgacggccgaactgggctagccatgcccacagtaggactagcaaacggagggactagccgtagtggcgagctccctgggtggtctaagtcctgagtacaggacagtcgtcagtagttcgacgtgagcagaagcccacctcgatatgctatgtggacgagggcatgccaagacacaccttaaccctagcgggggtcgctagggtgaaatcacaccacgtgatgggagtacgacctgatagggtgctgcagaggcccactattaggctagtataaaaatctctgctgtacatggcac

SEQ ID NO: 17481 - DNA, 337 bp, synthetic construct
  source 1..337: mol_type = other DNA
cttaaaattaggcctagggaatgaatccccttcagcgaaggccgaaaagaggctagccatgcccttagtaggactagcataatggagggggtagcaacagtggtgagttcgttggatggcttaagccctgagtacagggcagtcgtcagtggttcgacaccttggaagaacaaggcctcgagatgccacgtggacgagggcgtgcccaaagcacatcttaacctgggcgggggtcgctcaggtgaaagcagtctaatcaactgttacgaatacagcctgatagggtgctgcagaggcccactgtattgctactaaaaatctctgctgtacatggcac

SEQ ID NO: 17482 - DNA, 284 bp, synthetic construct
  source 1..284: mol_type = other DNA
ctagccatgcccttagtaggactagcatagtgaggggggtagcaacagtggtgagttcgttggatggcttaagccctgagtacagggtagtcgtcagtggttcgacgccttggtataaaggtctcgagatgccacgtggacgagggcacgcccaaagcacatcttaacctgagcgggggtcgctcaggctaaagcagattgaccaatctgttacgaatacagcctgatagggtgctgcagaggcccactgtattgctactaaaaatctctgctgtacatggcac

SEQ ID NO: 17483 - DNA, 266 bp, synthetic construct
  source 1..266: mol_type = other DNA
gactagcacaatggagggggtagcaacagtggtgagttcgttggatggcttaagccctgagtacagggcagtcgtcagtggttcgacaccttggaagaacaaggtctcgagatgccacgtggacgagggcatgcccaaagcacatcttagcctgggcgggggtcgctcaggtgaaagcagtttgaacaactgttacgaatacagcctgatagggtgctgcagaggcccactgtattgctactgaaaatctctgctgtacatggcac

SEQ ID NO: 17484 - DNA, 310 bp, synthetic construct; identical to SEQ ID NO: 297
  source 1..310: mol_type = other DNA

SEQ ID NO: 17485 - DNA, 275 bp, synthetic construct
  source 1..275: mol_type = other DNA
atgcccatagtaggactagcagaaggggggactagccgtcgtggtgaaatccctgagtggtctaagtcctgagtacaggacagccgtcagtagttcgacgcagccaccgcgctgtctcgagatgctatgtggacgagggcatgcccaagatacactttaactctggcgggggttgccagggtgaaaacgccttgtggcgttgggattacaacctgatagggtgctgcagaggcccacgatgaggctagtataaaaatctctgctgtacatggcac

SEQ ID NO: 17486 - DNA, 258 bp, synthetic construct
  source 1..258: mol_type = other DNA
ataattggggcatgtggtagcagtgagctccttggattaccgaagccccgagtacggggtagtcgtcaatggttcgacgcatcaaggaatgcctcgagatgccatgtggacgagggcgtgcccacggtgaatcttaacccaagcgggggccgcttgggtgaaagagggtcgttatatggctctttgggagtacaacctgatagggtgttgcagggacctgctacatcactagtataaaaactctgctgtacatggcac

SEQ ID NO: 17487 - DNA, 354 bp, synthetic construct
  source 1..354: mol_type = other DNA
ggattggatgtcgacaaatattgaattggcaacgtagggaaccttcccctcagcgaaggccgaaaagaggctagccatgcccttagtaggagtagcaaaaggaggggactagcggtacgagtgagttcattggatggccgaacccctgagtacaggggagtcgtcaatggttcgacactccattagtcgaggagtctcgagatgccatgtggacgagggcatgcccacggcacatcttaacccacgcgggggttgcatgggtgaaagcgctattcgtggcgttatggacacagcctgatagggtgttgcagaggcccactattccgctagtaaaaactctgctgtacatggcac

SEQ ID NO: 17488 - DNA, 276 bp, synthetic construct
  source 1..276: mol_type = other DNA
tgcccttagtaggactagcaaaatgagaggggtagcaacagtggtgagttcattggatggctgaagccctgagtacagggtagtcgtcagtggttcgacacctcggaaagaaggtctcgagatgccacgtggacgagggcatgcccacagcacatcttaacctggacgggggtcgcccaggtaaaagcagtttaactaactgttatggacacagcctgatagggtgctgcagaggcccactgcattgctactaaaaatctctgctgtacatggcac

SEQ ID NO: 17489 - DNA, 257 bp, synthetic construct
  source 1..257: mol_type = other DNA
aaagaggggactagcggtagcagtgagttcattggatggccgaatccctgagtacagggaagtcgtcaatggttcgacgctctgacaacgaaagggcctcgagatgccatgtggacgagggcatgcccacggcacatcttaacctatgcgggggctgcgtaggtgaaagcaccaacttacggtgttatgagcacagcctgatagggtgtagcagagacctgctattccgctagtaaaaactctgctgtacatggcac

SEQ ID NO: 17490 - DNA, 336 bp, synthetic construct
  source 1..336: mol_type = other DNA
aaaaataaattaggcctaggggacaaatcctccttagcgacggccgaaaagaggctagccatgcccttagtaggactagcaaacaaggagggtagcaacggtggtgagttcgttggatggctgaagccctgagtacagggtagtcgtcagtggttcgacgcttagcatgataagcctcgagatgccacgtggacgagggcatgcccacagcacatcttaacctgagcgggggtcgctcaggcaaaaacggtttaaccaaccgctacgaatacagcctgatagggtgctgcagaggcccactgtattgctactaaaaatctctgctgtacatggcac

SEQ ID NO: 17491 - DNA, 276 bp, synthetic construct
  source 1..276: mol_type = other DNA
ccttcagtaggacgagcataatgggggactagtggtagcagtgagctccttggattaccgaagccccgagtacggggtagtcgtcaatggttcgacgcatcaaggaatgcctcgagatgccatgtggacgagggcgtgcccacggtgaatcttaactcaagcgggggccgcttgggtgaaagagggtcattatgtggctctttgggagtacagcctgatagggtgttgcagagacctgctacatcactagtataaaaactctgctgtacatggcac

SEQ ID NO: 17492 - DNA, 1000 bp, synthetic construct; identical to SEQ ID NO: 1454
  source 1..1000: mol_type = other DNA

SEQ ID NO: 17493 - DNA, 255 bp, synthetic construct
  source 1..255: mol_type = other DNA
aaaacaaggagggtagcagcagtggtgagttcgttggatggctgaagcctgagtacagggtagtcgtcagtggtttgacgctttgtgtgacaagcctcaagatgccacgtggacgagggcatgcccacagcacatcttaacctgggcgggggtcgttcaggtgaaacggtttaaccaaccgccacgaatacagcctgatagggtgctgcagaggcccactgtattgctactaaaaatctctgctgtacatggcac

SEQ ID NO: 17494 - DNA, 385 bp, synthetic construct; identical to SEQ ID NO: 404
  source 1..385: mol_type = other DNA

SEQ ID NO: 17495 - DNA, 255 bp, synthetic construct
  source 1..255: mol_type = other DNA
aaaacaaggagggtagcagcagtggtgaattcgttggatggctgaagcctgagtacggggtagtcgtcagtggtttgacgctttgtgtgacaagcctcaagatgccacgtggacgagggcatgcccacagcacatcttaacctgggcgggggtcgttcaggtgaaacggtttaaccaaccgccacgaatacagcctgatagggtgctgcagaggcccactgtattgctactaaaaatctctgctgtacatggcac

SEQ ID NO: 17496 - DNA, 264 bp, synthetic construct
  source 1..264: mol_type = other DNA
taggactagcaaacggagggactagccatagtggcgagctccctgggtggtctaagtcctgagtacaggacagtcgtcagtagttcgacgtgagcactagcccacctcgagatgctacgtggacgagggcatgcccaagacacaccttaaccctggcgggggtcgctagggtgaaatcacattatgtgatgggggtacgacctgatagggcgctgcagaggcccactagcaggctagtataaaaatctctgctgtacatggcac

SEQ ID NO: 17497 - DNA, 636 bp, synthetic construct; identical to SEQ ID NO: 762
  source 1..636: mol_type = other DNA

SEQ ID NO: 17498 - DNA, 302 bp, synthetic construct
  source 1..302: mol_type = other DNA
ggttaaccaggcctctagtaccacaggcaccattggacagggcaactcgaacctgagagagaggtaccgaactcttaagctccgagtacggggcagacgtcaccgagtagtacacccaacgaccaccatgttcaggtgtagggtctactgaagctcgggtggacgtgggcgtgcccaaagagaaatcggtggtggacctgggggtcgggcccaccatacccccttaacggggtagacctcactgcttgatagagtgccggcggatgcctcaggtgagagtataaaatccgttgttcgttaac

SEQ ID NO: 17499 - DNA, 382 bp, synthetic construct
  source 1..382: mol_type = other DNA
gtatacacaaggttagctcaatccgttgtgtgtacgattggatgttgcaaatttataatttgagacatagggacccattcatcacagcgaaggccgaacaagggtagccaatcccttcattaggactagcacaagtgatggactggagacgtggatgagtgagctgtagaaaggaagtggtgagtacaccacagtcgtcaagagtactaccggtaaggatcacccgctagttatgctctgtggacgagggcatgcccaccttctctactagataccccgggggttggggtgtcgaaagtcgaaatgtcgattgctcacacagtctgataggatgccggcggatgctccacgtataccagtataaaaatccgttgaatagcac

SEQ ID NO: 17500 - DNA, 382 bp, synthetic construct
  source 1..382: mol_type = other DNA
gtatacacaaggttagctcaatccattgtgtgtacgattggatgttgcaaatttatgatttgagacatagggacccattcatcacagcgaaggccgaacaagggtagccaatcccttcattaggactagcacaagtgatggactggagacgtggatgagtgagctgtagagaggaagtggtgagtacaccacagtcgtcaagagtactaccggtaaggatcacccgctagttatgctctgtggacgagggcatgcccaccttctttactagacaccccgggggttggggtgtcgaaagtcgaaatgtcgattgctcacacagtctgataggatgccggcggatgctccacgtataccagtataaaaatccgttgaatagcac

SEQ ID NO: 17501 - DNA, 381 bp, synthetic construct
  source 1..381: mol_type = other DNA
gtatacacaaggttagctcaatcccttgtgtatgcgattggatattgcaaatttatgatttggataaagggactcattcatcacagcgaaggccgaacgagggtagccaatcccttcattaggactagcgtaagtgatggactggagacgtggatgagtgagctgtagaaaggaagtggtgagtacaccacagtcgtcaagagtactaccggtaaggatcacccgctagttatgctctgtggacgagggcatgcccaccttctctactagacaccccgggggttggggtgtcgaaagtcgatatgtcgattgctcacacagtctgataggatgccggcggatgctccacgtgtaccagtataaaaatccgttgaatagcac

SEQ ID NO: 17502 - DNA, 275 bp, synthetic construct
  source 1..275: mol_type = other DNA
catgcccttagtaggactagcaaacggagggactagccgtagtggcgagctccctgggtggtctaagtcctgagtacaggacagtcgtcagtagttcgacgtgggcagaagcccacctcgagatgctacgtggacgagggcatgcccaagacacaccttaaccctggcgggggtcgctagggtgaaatcacacaacgtgatgggagtacgacctgatagggtgctgcagaggcccactaacaggctagtataaaaatctctgctgtacatggcac

SEQ ID NO: 17503 - DNA, 275 bp, synthetic construct
  source 1..275: mol_type = other DNA
catgcccttagtaggactagcaaacggagggactagccgtagtggcgagctccctgggtggtctaagtcctgagtacaggacagtcgtcagtagttcgacgtgggcagaagcccacctcgagatgctacgtggacgagggcatgcccaagacacaccttaaccctggcgggggtcgctagggtgaaatcacacaacgtgatgggagtacgacctgatagggtgctgcagaggcccactgacaggctagtataaaaatctctgctgtacatggcac

SEQ ID NO: 17504 - DNA, 274 bp, synthetic construct
  source 1..274: mol_type = other DNA
atgcccttagtaggactagcaaacggagggactagccgtagtggcgagctccctgggtggtctaagtcctgagtacaggacagtcgtcagtagttcgacgtgggcagaagcccacctcgagatgctatgtggacgagggcatgcccaagacacaccttaaccctggcgggggtcgctagggtgaaatcacacaacgtgatgggggtacgacctgatagggtgctgcagaggcccactaacaggctagtataaaaatctctgctgtacatggcac

SEQ ID NO: 17505 - DNA, 275 bp, synthetic construct
  source 1..275: mol_type = other DNA
catgcccttagtaggactagcaaacggagggactagccgtagtggtgagctccctgggtggtctaagtcctgagtacaggacagtcgtcagtagttcgacgtgggcagaagcccacctcgagatgctacgtggacgagggcatgcccaagacacaccttaaccctggcgggggtcgctagggtgaaatcacacaacgtgatgggagtacgacctgatagggtgctgcagaggcccactaacaggctagtataaaaatctctgctgtacatggcac

SEQ ID NO: 17506 - DNA, 275 bp, synthetic construct
  source 1..275: mol_type = other DNA
catgcccttagtaggactagcaaacggagggactagccgtagtggcgagctccctgggtggtctaagtcctgagtacaggacagtcgtcagtagttcgacgtgggcagaagcccacctcgagatgctacgtggacgagggcatgcccaagacacaccttaaccctggcgggggtcgctagggtgaaatcactcaacgtgatgggagtacgacctgatagggtgctgcagaggcccactaacaggctagtataaaaatctctgctgtacatggcac

SEQ ID NO: 17507 - DNA, 255 bp, synthetic construct
  source 1..255: mol_type = other DNA
aaaacaaggagggtagcagcagtggtgagttcgttggatggctgaagcctgagtacagggtagtcgtcagtggtttgacgctttgtgtgacaagcctcaagatgccacgtggacgagggcatgcccacagcacatcttaacctgggcgggggtcgttcaggtgaaacggtttaaccaaccgctacgaatacagcctgatagggtgctgcagaggcccactgtattgctactaaaaatctctgctgtacatggcac

SEQ ID NO: 17508 - DNA, 259 bp, synthetic construct
  source 1..259: mol_type = other DNA
aaacggagggactagccatcatggtgagcttcctgagaggtctaagtcctgagtacaggacagtcgtcaatagttcgacacgcgcaagtcgcacgtctcgagatgctatgtggacgagggcatgcccaagacactttctctagcctgggcgggggtcgcccaggtgaaagcacctgagtggtgttggaagtacagcctgatagggtgctgcagaggcccatgcataggctagtataaaaatctctgccgtacatggaac

SEQ ID NO: 17509 - DNA, 259 bp, synthetic construct
  source 1..259: mol_type = other DNA
agacggagggactagccatcatggtgagcttcctgaggggtctaagtcctgagtacaggacagtcgtcaatagttcgacacgtgcgagtcgcacgtctcgagatgctatgtggacgagggcatgcccaagacactttctctagcctgggcgggggtcgcccaggtgaaagcacctgataggtgttgggagtacagcctgatagggtgctgcagaggcccatgcataggctagtataaaaatctctgctgtacatggcac

SEQ ID NO: 17510 - DNA, 256 bp, synthetic construct
  source 1..256: mol_type = other DNA
aattggggagggtagcagcagtggtgagttcgttggatggctgaagccctgagtacagggtagtcgtcagtggttcgacacctcaaggttgaggtctcgagatgccacgtggacgagggcatgcccacagcacatcctagtctgggcaggggtcgctcagatgaaagcggttgagtcaaccgttacggacacagcctgatagggtgctgcagaggcccactgtgttgctactaaaaatctctgctgtacatggcac

SEQ ID NO: 17511 - DNA, 258 bp, synthetic construct
  source 1..258: mol_type = other DNA
tgatggagggggtagcaacggtggtgagttcgttggatggcttaagccctgagtacagggcagtcgtcagtggttcgacaccttggaagaacaaggcctcgagatgccacgtggacgagggcatgcccaaagcacatcttagcctgggcgggggtcgctcaggtgaaagcagtctaatcaactgttgcgaatacagcctgatagggtgctgcagaggcccactgtattgctactaaaaatctctgctgtacatggcac

SEQ ID NO: 17512 - DNA, 258 bp, synthetic construct
  source 1..258: mol_type = other DNA
atacggagggggtagcaacagtggtgagttcgttggatggcttaagccctgagtacagggcagtcgtcagtggttcgacaccttgggagaacaaggcctcgagatgccacgtggacgagggcatgcccaaagcacatcttaacctgggcgggggtcgcctaggcgaaagcagtttaactaactgttacgaatacagcctgatagggtgctgcagaggcccactgtattgctactaaaaatctctgctgtacatggcac

SEQ ID NO: 17513 - DNA, 257 bp, synthetic construct
  source 1..257: mol_type = other DNA
aattgaggggggtagcaacagtggtgagttcgttggatggctgaagccctgagtacagggtagtcgtcagtggttcgacacctatggtgcgtaggtctcgagatgccacgtggacgagggcatgcccacagcacatcttagcctgggcgggggtcgctcaggtgaaagcggtttaaccaactgctacgaatacagcctgatagggtgctgcaggggcccactggactgctactaaaaatctctgctgtacatggcac

SEQ ID NO: 17514 - DNA, 257 bp, synthetic construct
  source 1..257: mol_type = other DNA
aattgaggggggtagcaacagtggtgagttcgttggatggctgaagccctgagtacagggtagtcgtcagtggttcgacacctacggcgtgtaggtctcgagatgccacgtggacgagggcatgcccacagcacatcttagcctgggcgggggtcgctcaggtgaaagcggtttaaccaactgctacgaatacagcctgatagggtgctgcaggggcccactggactgctactaaaaatctctgctgtacatggcac

SEQ ID NO: 17515 - DNA, 257 bp, synthetic construct
  source 1..257: mol_type = other DNA
aaaggaggggactagcggtagcagtgagttcattggatggcctaatccctgagtacagggaagtcgtcaatggttcgacactccatcagttgcggagtctcgagatgccatgtggacgagggcatgcccaaggcacatcttaacctatgcgggggttgcataggcgaaagcaccattcgtggtgttatggacacagcctgatagggtgtagcagagacctgctattccgctagtaaaaactctgctgtacatggcac

SEQ ID NO: 17516 - DNA, 256 bp, synthetic construct
  source 1..256: mol_type = other DNA
taatgaggggggtagcaacagtggtgagttcgttggatggcttaagccctgagtacagggtagtcgtcagtggttcgacgccttagtataaaggtctcgagatgccacgtggacgagggcacgcccaaagcacatcttaacctgagcgggggtcgctcaggcgaaagcagtttaaccaactgctacgaatacagcctgatagggtgctgcagaggcccactgtattgctactaaaaatctctgctgtacatggcac

SEQ ID NO: 17517 - DNA, 256 bp, synthetic construct
  source 1..256: mol_type = other DNA
aaataaggggggtagcaacagtggtgagttcgttggatggctgaagccctgagtacagggtagtcgtcagtggttcgacgctttggaggacaagcctcgagatgccacgtggacgagggcacgcccacagcacatcttaacctgagcgggggtcgttcaggtgaaaacggtttaaccaaccgctacgaatacagcctgatagggtgctgcagaggcccactgtattgctactgaaaatctctgctgtacatggcac

SEQ ID NO: 17518 - DNA, 256 bp, synthetic construct
  source 1..256: mol_type = other DNA
aaatgagaggggtagcaacagtggtgagttcattggatggctgaagccctgagtacagggtagtcgtcagtggttcgacacctcggaaagaaggtctcgagatgccacgtggacgagggcatgcccacagcacatcttaacctggacgggggtcgcccaggtaaaagcagtttaactaactgttatggacacagcctgatagggtgctgcagaggcccactgcattgctactaaaaatctctgctgtacatggcac

SEQ ID NO: 17519 - DNA, 256 bp, synthetic construct
  source 1..256: mol_type = other DNA
aaatgagaggggtagcaacagtggtgagttcattggatggctgaagccctgagtacagggtattcgtcagtggttcgacgcctcggaaagaaggtctcgagatgccacgtggacgagggcatgcccacagcacatcttaacctggacgggggtcgcccaggtaaaagcagtttaactaactgttatggacacagcctgatagggtgctgcagaggcccactgtgtagctactaaaaatctctgctgtacatggcac

SEQ ID NO: 17520 - DNA, 257 bp, synthetic construct
  source 1..257: mol_type = other DNA
aaaggaggggactagcggtagcagtgagttcattggatggccgaatccctgagtacagggaagtcgtcaatggttcgacactccaccagttgaggagtctcgagatgccatgtggacgagggcatgcccacggcacatcttaacctatgcgggggttgcatgggtgaaaacgccatttgtggcgctatgaacacagcctgatagggtgtagcagagacctgctattccgctagtaaaaactctgctgtacatggcat

SEQ ID NO: 17521 - DNA, 281 bp, synthetic construct
  source 1..281: mol_type = other DNA
gccatgcccttagtaggactagcaaaaggaggggactagcggtagcagtgagttcattggatggccgaatccctgagtacagggaagtcgtcaatggttcgacactccatcaatcgaggagtctcgagatgccatgtggacgagggcatgcccacggcacatcttaacctatgcgggggttgcatgggtgaaagcaccattcgtggtgttatggacacagcctgatagggtgtagcagagacctgctattccgctagtaaaaactctgctgtacatggcac

SEQ ID NO: 17522 - DNA, 378 bp, synthetic construct
  source 1..378: mol_type = other DNA
gcataatgctttgattggccgcattatgtatgggacatcctaaattgtcgtgagccctgtggtgagtgggggaaaggggtttaccaggcctctagtaccacaggcaccaatggacagggcaactcgaacctgagagagaggtaccgagctcttaagccccgagtacggggcagacgtcaccgagtagtacacccaaagaccaccacttctaggtgtagggtctactgaggctcgggtagacgtgggcgtgcccaaagagaaatcggtggtggacctgggggtcggggccaccatgcccctttatggggtagaccttactgcttgatagagtgccggcggatgcctcaggtaagagtataaaatccgttgtctattaac

SEQ ID NO: 17523 - DNA, 402 bp, synthetic construct
  source 1..402: mol_type = other DNA
gtgtgtgtatgtgtgtgggtgaatgtgtgtgcgtgtgtctgtgtgtgtgtgcgtgtgcgtgtgtgagtgagtgtgtgtgagtgagtgagtgtatgtaggtgtgtgtgtgtgcgtgtgcgtgtgtgtgtgtgttattctgacacgccaatttagtcgctaccaacatttaggtcgctacacagtttaaccactggttcaacgtttcagaatattgttaaattacaccaattcagaattgaacaacacccaatattgaatggtattataaaacaaacacaatataacataatataataaattataataaacaaaaaacacacacatagaacaaacaaacaaaaaacaaaacactcaaacaacatacttagaagaataacccggctgggtccacttctcaagaca

SEQ ID NO: 17524 - DNA, 343 bp, synthetic construct; identical to SEQ ID NO: 325
  source 1..343: mol_type = other DNA

SEQ ID NO: 17525 - DNA, 317 bp, synthetic construct; identical to SEQ ID NO: 302
  source 1..317: mol_type = other DNA

SEQ ID NO: 17526 - DNA, 768 bp, synthetic construct; identical to SEQ ID NO: 1228
  source 1..768: mol_type = other DNA

SEQ ID NO: 17527 - DNA, 891 bp, synthetic construct; identical to SEQ ID NO: 1289
  source 1..891: mol_type = other DNA

SEQ ID NO: 17528 - DNA, 779 bp, synthetic construct; identical to SEQ ID NO: 1239
  source 1..779: mol_type = other DNA

SEQ ID NO: 17529 - DNA, 442 bp, synthetic construct; identical to SEQ ID NO: 484
  source 1..442: mol_type = other DNA

SEQ ID NO: 17530 - DNA, 393 bp, synthetic construct; identical to SEQ ID NO: 429
  source 1..393: mol_type = other DNA

SEQ ID NO: 17531 - DNA, 384 bp, synthetic construct; identical to SEQ ID NO: 399
  source 1..384: mol_type = other DNA

SEQ ID NO: 17532 - DNA, 621 bp, synthetic construct; identical to SEQ ID NO: 723
  source 1..621: mol_type = other DNA

SEQ ID NO: 17533 - DNA, 1000 bp, synthetic construct; identical to SEQ ID NO: 136
  source 1..1000: mol_type = other DNA

SEQ ID NO: 17534 - DNA, 519 bp, synthetic construct; identical to SEQ ID NO: 16
  source 1..519: mol_type = other DNA

SEQ ID NO: 17535 - DNA, 870 bp, synthetic construct
  source 1..870: mol_type = other DNA
tgttacccacctaatttggtggtaccccccggtcccttccctctccccccatacagccggaacggaccacacacctccgggtttgtggcccaaccccgactcggggttgtggcggtggtcacagctccggctgtgacttcctaaccactcctttcacccacccctttcttacatttacttaagtttatgtttgccctctcatcccaaggccttggctcatgtcctttgaggctatctggcacaaacactctttgtttggcgtccggagacccactgagccaccacttatccgcgctcaatgcaacccccattagtaaccacgcaaatctaatagtggttctgcctcggcagcacctaagtgcccagggagcccaactggtgacagttgccctggggcccgaaaggctaggtggtaagggtctggccaagcaaggggcccccaccccaagctgaacccatggccccgaagccaccctttaggtggaggttatgtacccgatcgctattctatttgtttggcgaacctggccggaaacatttagtttgtggattcgttggtttgtggtgattagtagaccccctggaggtacccgttttggatctgaccagggacccgtgactataccgctccggtaattcgggtttaaaaccatgaacgtcaccacttgtcttcttttcccattttattcttcttatagtggtctgtttaaatgctcttagaatttctgttggtgactacggcacttgccatagtggttctttcccccagtgagttgcatcagctgcttgctatttgcgtatataattttgcattaattttcctctggttgctcggaattttggagctgcctagttaccccgctatacagc

SEQ ID NO: 17536 - DNA, 717 bp, synthetic construct; identical to SEQ ID NO: 115
  source 1..717: mol_type = other DNA

SEQ ID NO: 17537 - DNA, 633 bp, synthetic construct; identical to SEQ ID NO: 758
  source 1..633: mol_type = other DNA

SEQ ID NO: 17538 - DNA, 460 bp, synthetic construct; identical to SEQ ID NO: 498
  source 1..460: mol_type = other DNA

SEQ ID NO: 17539 - DNA, 639 bp, synthetic construct; identical to SEQ ID NO: 765
  source 1..639: mol_type = other DNA

SEQ ID NO: 17540 - DNA, 672 bp, synthetic construct; identical to SEQ ID NO: 812
  source 1..672: mol_type = other DNA

SEQ ID NO: 17541 - DNA, 906 bp, synthetic construct; identical to SEQ ID NO: 1295
  source 1..906: mol_type = other DNA

SEQ ID NO: 17542 - DNA, 407 bp, synthetic construct; identical to SEQ ID NO: 444
  source 1..407: mol_type = other DNA

SEQ ID NO: 17543 - DNA, 373 bp, synthetic construct; identical to SEQ ID NO: 360
  source 1..373: mol_type = other DNA

SEQ ID NO: 17544 - DNA, 428 bp, synthetic construct; identical to SEQ ID NO: 472
  source 1..428: mol_type = other DNA

SEQ ID NO: 17545 - DNA, 370 bp, synthetic construct; identical to SEQ ID NO: 350
  source 1..370: mol_type = other DNA

SEQ ID NO: 17546 - DNA, 970 bp, synthetic construct; identical to SEQ ID NO: 1301
  source 1..970: mol_type = other DNA

SEQ ID NO: 17547 - DNA, 380 bp, synthetic construct; identical to SEQ ID NO: 386
  source 1..380: mol_type = other DNA

SEQ ID NO: 17548 - DNA, 640 bp, synthetic construct; identical to SEQ ID NO: 768
  source 1..640: mol_type = other DNA

SEQ ID NO: 17549 - DNA, 975 bp, synthetic construct; identical to SEQ ID NO: 1302
  source 1..975: mol_type = other DNA

SEQ ID NO: 17550 - DNA, 557 bp, synthetic construct; identical to SEQ ID NO: 600
  source 1..557: mol_type = other DNA

SEQ ID NO: 17551 - DNA, 620 bp, synthetic construct; identical to SEQ ID NO: 60
  source 1..620: mol_type = other DNA

SEQ ID NO: 17552 - DNA, 533 bp, synthetic construct; identical to SEQ ID NO: 570
  source 1..533: mol_type = other DNA

SEQ ID NO: 17553 - DNA, 347 bp, synthetic construct; identical to SEQ ID NO: 330
  source 1..347: mol_type = other DNA

SEQ ID NO: 17554 - DNA, 560 bp, synthetic construct; identical to SEQ ID NO: 605
  source 1..560: mol_type = other DNA

SEQ ID NO: 17555 - DNA, 604 bp, synthetic construct; identical to SEQ ID NO: 656
  source 1..604: mol_type = other DNA

SEQ ID NO: 17556 - DNA, 843 bp, synthetic construct; identical to SEQ ID NO: 1286
  source 1..843: mol_type = other DNA

SEQ ID NO: 17557 - DNA, 504 bp, synthetic construct
  source 1..504: mol_type = other DNA
gtctctttagtgtctatgcttcagagagcggtgaactgacaccgttgcttcttgcacagcccttcgtgccggtctttccggttctcgacagcgttgggcatcatggctagttaggctaagatagtggatgatctagtgaacagttttggattgtttggagttttgtagcgatgctagtagtgtgtgtggacctccccacgtggtaacacgtgccccacaggccaaaagccaaggtgttgaaagcacccctactagtcccagactcacccatctgggaactcctctcatgaaaaatcttagtaacttttgattcggctattcatcaacctctctagtcaagggctgaaggatgcccggaaggtacccgcaggtaacgataagctcactgtggatctgatccggggctttggtgcgaccgtctgtccggcgtagccagagttaaaaaacgtctaggcccttccaccccaagggattggggtttccccaatcatttgaaagttcact

SEQ ID NO: 17558 - DNA, 752 bp, synthetic construct; identical to SEQ ID NO: 1208
  source 1..752: mol_type = other DNA

SEQ ID NO: 17559 - DNA, 702 bp, synthetic construct
  source 1..702: mol_type = other DNA
tactatcatcattatcattattttcattataaaattcattttaaatatcaaaattcaaaatataaaatttagaaaaacccaaaaatattataaaatttaataaaatacaaaaatattacaaaattagaaaaacccaaaaatattattaaaatttgaatctcgtcaatatcatttcatacatattctttataatgtcttatttaaactgtctggagaaatcttactgtaaaacttgatacactttgcagtattgtatttttctttggcgggagatgttataaagtcttatgattcaatatttaatccaactcaagttagtagcttgttttacagcatttgtgcttattagatagtggtttacgagagagctaatgccataggaagaggtgtccattgataccatggtgctccgttgttaatcaaactccttatgagtccacaaattatttgataagtataatatgcaatactcaggattaaatgaatcaaatttggaagaaattagaatctcaaatttgaaaccctggttttatcatatttattacctataaattaaatatggctgtgtgataacagtataaactaatctacgtactcacaataatacgtacaaattactgtggctagatacaactagtataaacaatattggtttttctattatgttaccaatcaaataaacataatgagcactaatttaaa

SEQ ID NO: 17560 - DNA, 828 bp, synthetic construct; identical to SEQ ID NO: 1283
  source 1..828: mol_type = other DNA

SEQ ID NO: 17561 - DNA, 644 bp, synthetic construct; identical to SEQ ID NO: 777
  source 1..644: mol_type = other DNA

SEQ ID NO: 17562 - DNA, 721 bp, synthetic construct; identical to SEQ ID NO: 896
  source 1..721: mol_type = other DNA

SEQ ID NO: 17563 - DNA, 713 bp, synthetic construct; identical to SEQ ID NO: 114
  source 1..713: mol_type = other DNA

SEQ ID NO: 17564 - DNA, 704 bp, synthetic construct
  source 1..704: mol_type = other DNA
cgccgcgtgtgtcttgacaccgcgctgctcaggatgcttctgccccgtgctttggacgcctaccagggcgttaaactggtcccccccttaccctttccccgtaactaagtttgtacctcccccacataggctgctaagacgcttgttgctacagcatatgcggatcagggagttctccatgagtaatcttttccaccctctttagtgtctatgctattgagggcgggttggagccccgttgacctagtgtcagagtgtgtcggtagcaggctttctgctctcgccccgtgccggccacacctcccgtcagtaatgtgaagactgcaagttgcatgtgaagaggtttctagtatttgagctgaatgtagcgattacccaaggtgagcggatttccccacgtggtaacacgtgcctctcaggccaaaagccaaggtgttaaaagcaccccttgggtagaccactaccccgtggtctcagttctcttagtagattcacttagtaatgtgcacactggcagctcccaagcagagctggcgagtgggctaaggatgccctgaaggtacccgcaggtaacgttaagacactgtggatctgatcaggggctcgagtgctgaagctttacagaggcagctcgagttaaaaaacgtctatgcccctcccccacgggagtgggggttcccccacaccaattttcagattgcact

SEQ ID NO: 17565 - DNA, 703 bp, synthetic construct
  source 1..703: mol_type = other DNA
cgccacgtgtgtctcgacaccgtgttgctcaggatgcttctgccccgtgctttggacgcctaccagggcgttaaactggtcccccccttgccctttccccgtaacaaagtttgtaccccccccatataggctgccaagacgcttgttgctacagcatatgtggatcagggagttctccataagtaatcttttccaccatctttagtgtctatgctaacgatgacgggttggagccccgttgacctagtgtcagagtgtgtcggtagcaggctttctgctctcgccccatgccggccacacctcccgtcagcaatgtgaagactgcaggttgcacgtgaaaaggtttctgatatttgaactgaatgtagcgattacccaaggtgagcggacttccccacgtggtaacacgtgcctctcaggccaaaagccaaggtgttaaaagcaccccttgggtagaccactaccccgtggtctcagctctcttagaagattcacttagtaatgtgcacactggcagctcccaagcagagctggcgagcgggctaaggatgccctgaaggtacccgcaggtaacgttaagacactgtggatctgatcaggggctcgagtgctgaagctttacagaggtagctcgagttaaaaaacgtctatgcccctcccccacgggagtgggggttcccccacaccaattttagactgcact

SEQ ID NO: 17566 - DNA, 692 bp, synthetic construct
  source 1..692: mol_type = other DNA
tcgacgagtcaccgcccaggattctctctgcccttgctttgaacgcccgccatggcgttaaactggcacttcccctacccctaccccgtaactaagtttgcacctcgcccagacaggctgctaagacgcttgttgctacagtatgtctggaatcgcgagttctccctaagaaatcttttccacctccgccggtgcctatgccggtcgagacgggttaggaccccgttggctcaggccagagacagtcggtagtagtctttctactctcgcccatgccggctgtcacaccctcactagctttatcaagattgtaagctgtctgtgaaagctttgcttgaactttgctgtgttgtagcgatggatgtgttgtgagcggactcccccacgtggtaacacgtgcctctcagaccaaaagtcacggtgttaacagcacccgcacatctggccgcctcccccgcggcccacagctctgtgattgcttagttagtaatggaacaattggcaactctgaattaaagctagtgcaacggctaaggatgccctgaaggtacccgcaggtaacgttaagacactgtggatctgatcaggggccctcggtgcgcgtgctttacacgcgtagccagggttaaaaaacgtctatgccgtttcccccccgggagggggggttccttacccccatcacaattgacatc

SEQ ID NO: 17567 - DNA, 667 bp, synthetic construct
  source 1..667: mol_type = other DNA
cttctgccccgtgttttggacgcccggcatggcgttaaactgtcattccccctaccctttccctatttgtaactaagttgtacctcgcccagacaggctgctaagacgcttgttgctacagcatgtttggactagcgagctctccataagtaaacttttccacccccttgggtgtctttgcccttggggacggtctggagccccgttgtcttagacagagtgtgtcggtgcaggctttctgctctggacccatgccggccacaaactcccatcagtgttgtgaagacggcaggacacaagtgaacaggtacagggaactttcttggaatgtagcgattactgcaagtgagcggacctcccctggtggtaacaccagcctctcaggccaaaagccacggtgttaacagcacccttgcagtaggccactgccccgtggtctccaggatctttctctttactcctagtaatttgtgagtctagctgttctgaagcatactggtgcaaaggctaaggatgccctgaaggtacccacaggtaacgttaagacactgtggatctgatcaggggcctgaatactgaagctttacagaggtagttcaggttaaaaaacgtctatgcctttcccccacgggagtgggggttcccccacacttttatcacaggcact

SEQ ID NO: 17568 - DNA, 776 bp, synthetic construct; identical to SEQ ID NO: 1237
  source 1..776: mol_type = other DNA

SEQ ID NO: 17569 - DNA, 588 bp, synthetic construct
  source 1..588: mol_type = other DNA
tgtgatcctcccccgcccagcgtctaccgttcccccatccccactcctctccgcgcagaacctagtaagactcttgaaagtgatgtagttttgaccccaccatcaatcccggatggaagaaacatgtgatgaggctcgcccactcacctatggtaacataggggcttgcctgcgtggcacatggaacgaccagtcttgtgggaaaaccgctaccctgtctccgaggagactgatgggatatgtttgtacctatgtattggaagttatactacacattagtaaggatatgaagagtcgagtgccgttggagtgtatcctccggacccgtgaatgcggctaactccctccctcaagctcgcaaccagaatccactggtgctgttctccgtttaactacgtggggcacgcgagtcgtaacgcgtaagttgaggacgagaccgactactttcggtgttccgtgtttctataaaatttttattattattgtatggtgacaaattgtgatatatagttttattgctgttcctttgctatttataaaattacaaaaagagtatatagagaaaatttctactacaaatcttttaca

SEQ ID NO: 17570 - DNA, 900 bp, synthetic construct; identical to SEQ ID NO: 1292
  source 1..900: mol_type = other DNA

SEQ ID NO: 17571 - DNA, 899 bp, synthetic construct; identical to SEQ ID NO: 1290
  source 1..899: mol_type = other DNA

SEQ ID NO: 17572 - DNA, 894 bp, synthetic construct; identical to SEQ ID NO: 134
  source 1..894: mol_type = other DNA

SEQ ID NO: 17573 - DNA, 897 bp, synthetic construct; identical to SEQ ID NO: 135
  source 1..897: mol_type = other DNA

SEQ ID NO: 17574 - DNA, 904 bp, synthetic construct; identical to SEQ ID NO: 1293
  source 1..904: mol_type = other DNA

SEQ ID NO: 17575 - DNA, 905 bp, synthetic construct; identical to SEQ ID NO: 1294
  source 1..905: mol_type = other DNA

SEQ ID NO: 17576 - DNA, 667 bp, synthetic construct; identical to SEQ ID NO: 807
  source 1..667: mol_type = other DNA

SEQ ID NO: 17577 - DNA, 982 bp, synthetic construct
  source 1..982: mol_type = other DNA
agttatggctatgcctttgtgcatatgctcgatgtctctcccttttatgaccttttcccgaccaacatctcatgtcggattaaactggatgatcttttaagactccctaacccagaattcctccggggtactcctgtggatctagcttatactggattcccgcccggcgttgttcgatctgaacggcgttagtttcacctgtggtagcctctgcggagggcccacggcgtttagtggttctgcctaaggacaaccacctaacctacccatgtctctatcgtccctactagttttaggcagtattgtacgctctttatacaaatctgtcaaccctttgtataactctaagccgaacaattatagctaggctttttattatataacattaattaggcattagcgttgtcgccaatctcttggtaatcctaaggatacctttcctgttgactaagatgaagcgccttcggttaccgatgcccggtgtccacgaagccatcgtggtcggccgcgtcccccacctctcccaacttggactccatgttttcagtaggtgtaatgattagtattattgattctgctcgttcaatgtgtttatcttcacgatctgggacccaacacatgcttcactcatgtttaaatgttggttccctcattttgaagacacccaaaccatagagtgcgagaatgaggatttctacttccattctggtaacagaaatgaattcctgcgtgtgtctcgtaaatggaatctttaagaacttcagataaatcgaacaatacactaatacaagttgttttctaccaacatgttcaatgcggctaatctgaccgtggagctgtgaagcgctcaaacccgagtgttgtatacagtcgtaatgcgtaagtccatgaggaaccgactactgttacctctgttggtgtgtttctcctttattctcttttattattatttgttattgcaaatactacaactttgatcaac

SEQ ID NO: 17578 - DNA, 588 bp, synthetic construct; identical to SEQ ID NO: 638
  source 1..588: mol_type = other DNA

SEQ ID NO: 17579 - DNA, 584 bp, synthetic construct; identical to SEQ ID NO: 635
  source 1..584: mol_type = other DNA

SEQ ID NO: 17580 - DNA, 982 bp, synthetic construct
  source 1..982: mol_type = other DNA
agttatggctatgcctttgtgcatatgctcgatgtctctcccttttatgaccttttcccgaccaacatctcatgtcggattaaactggatgatcttttaagactccctaacccagaattcctccggggtattcctgtggatctagcttatactggattcccgcccggcgttgttcgatctgaacggcgttagtttcacctgtggtagcctctgcggagggcccacggcgtttagtggttctgcctaaggacaaccacctaacctacccatgtctctatcgtccctactagttttaggcagtattgtacgctctttatacaaatctgtcaaccctttgtataactctaagccgaacaattatagctaggctttttattatataacattaattaggcattagcgttgtcgccaatctcttggtaatcctaaggatacctttcctgttgactaagatgaagcgccttcggttaccgatgcccggtgtccacgaagccatcgtggtcggccgcgtcccccacctctcccaacttggactccatgttttcagtaggtgtaatgattagtattattgattctgctcgttcaatgtgtttatcttcacgatctgggacccaacacatgcttcactcatgtttaaatgttggttccctcattttgaagacacccaaaccatagagtgcgagaatgaggatttctacttccattctggtaacagaaatgaattcctgcgtgtgtctcgtaaatggaatctttaagaacttcagataaatcgaacaatacactaatacaagttgttttctaccaacatgttcaatgcggctaatctgaccgtggagctgtgaagcgctcaaacccgagtgttgtatacagtcgtaatgcgtaagtccatgaggaaccgactactgttacctctgttggtgtgtttctcctttattctcttttattattatttgttattgcaaatactacaactttgatcaac

SEQ ID NO: 17581 - DNA, 588 bp, synthetic construct
  source 1..588: mol_type = other DNA
gttcgtatgccaacggatcgatttccctgttacagcctctttgcttccccaccccactcctctctgtggagagcctagtaggattcttgaaagcaaatatctgttgaccccaccttcaatcccggaaggaagaaaccgagaatgagactcgtctattcccccatggtgacatggagacttgtctgcgtgtgtctcgggctcccttatgagtattgtgggagaaccgctaccctgactccgaggagtctgatgggatatgttagtacctatgaaaataaggtgacaggttttgttagtatggatacgaagagccgactgccgttggagtgtatcctccggacccgtgaatgcggctaaccctaaccctggatcaagtgctcacaaaccagtgagtggcttgtcgtaacgcgcaagtctgggatgggaccgactactttcggtgttccgtgtttctatttattttatcaataaagttttatggtgacaatcttgtgatattaagatataaagcttttatccttttgtttattgattatcttaaatagattgcttggtggtgatttaaaatagagatagttattattagag

SEQ ID NO: 17582 - DNA, 516 bp, synthetic construct; identical to SEQ ID NO: 541
  source 1..516: mol_type = other DNA

SEQ ID NO: 17583 - DNA, 481 bp, synthetic construct; identical to SEQ ID NO: 13
  source 1..481: mol_type = other DNA

SEQ ID NO: 17584 - DNA, 566 bp, synthetic construct; identical to SEQ ID NO: 615
  source 1..566: mol_type = other DNA

SEQ ID NO: 17585 - DNA, 538 bp, synthetic construct; identical to SEQ ID NO: 576
  source 1..538: mol_type = other DNA

SEQ ID NO: 17586 - DNA, 530 bp, synthetic construct; identical to SEQ ID NO: 562
  source 1..530: mol_type = other DNA

SEQ ID NO: 17587 - DNA, 538 bp, synthetic construct
  source 1..538: mol_type = other DNA
cagggagttctccataagtaatcttttccaccatctttagtgtctatgctaacgatgacgggttggagccccgttgacctagtgtcagagtgtgtcggtagcaggctttctgctctcgccccatgccggccacacctcccgtcagcaatgtgaagactgcaggttgcacgtgaaaaggtttctgatatttgaactgaatgtagcgattacccaaggtgagcggacttccccacgtggtaacacgtgcctctcaggccaaaagccaaggtgttaaaagcaccccttgggtagaccactaccccgtggtctcagctctcttagaagattcacttagtaatgtgcacactggcagctcccaagcagagctggcgagcgggctaaggatgccctgaaggtacccgcaggtaacgttaagacactgtggatctgatcaggggctcgagtgctgaagctttacagaggtagctcgagttaaaaaacgtctatgcccctcccccacgggagtgggggttcccccacaccaattttagactgcact

SEQ ID NO: 17588 - DNA, 301 bp, synthetic construct; identical to SEQ ID NO: 280
  source 1..301: mol_type = other DNA

SEQ ID NO: 17589 - DNA, 470 bp, synthetic construct
  source 1..470: mol_type = other DNA
ctgacaccgttgcttcttgcacagcccttcgtgccggtctttccggttctcgacagcgttgggcatcatggctagttaggctaaggtagtaaatgatctagtgaaaagttttggattgtttggagttttgtagcgatgctagtagtgtgtgtggatctccccacgtggtaacacgtgccccacaggccgaaagccaaggtgttaaaagcacccctactagtcccagaccatcccatctgggagctcctctcatgaaaaatcctagtaacttttgatttggctactcatcaacctctctagtcaagggctgaaggatgcccggaaggtacccgcaggtaacgataagctcactgtggatctgatccggggccttggtgcgaccgtctgtccggcgtagccagggttaaaaaacgtctaggcccttctaccccaagggattggggtttccccaatcattttagaggttcaat

SEQ ID NO: 17590 - DNA, 341 bp, synthetic construct; identical to SEQ ID NO: 324
  source 1..341: mol_type = other DNA

SEQ ID NO: 17591 - DNA, 833 bp, synthetic construct; identical to SEQ ID NO: 133
  source 1..833: mol_type = other DNA

SEQ ID NO: 17592 - DNA, 706 bp, synthetic construct; identical to SEQ ID NO: 102
  source 1..706: mol_type = other DNA

SEQ ID NO: 17593 - DNA, 1000 bp, synthetic construct; identical to SEQ ID NO: 1455
  source 1..1000: mol_type = other DNA

SEQ ID NO: 17594 - DNA, 1000 bp, synthetic construct
  source 1..1000: mol_type = other DNA
ccgtgcgtctactaacacagctctcacagaatacttgcccccatccattcaaatccaaacatttcatgatacggatggcgtaactgcatgggaagtgcctggggccctagacatggtgacatgttccccagggtccaaaagactagtgggtcaaaactcacctttcctgacctctttgaggcatccgtatcatgaaatgtttggatttgaatggatgggggcaagtattctgtgagagctgtgttagtagacgcacgggaggtacccttctaggatctgactcgtgttacacttgggtctatccccatgatgtattcaagaaccaacgcacagctctcacagaatacttgcccccatccattcaaatccaaacatttcatgatacggatgcctcaaagaggtcaggaaaggtgagttttgacccactagtcttttggaccctggggaacatgtcaccatgtctagggccccaggcacttcccatgcagttacgccatccgtagcactactaagaatggttcaaacttttgtaagggctttctcccggtttgactgcctgctgaatctgatgttaactttggtgactagacgtgtagcttagcacgagactgggtcttatttataccagtataagccgggagaaagcccttacaaaagtttgaaccattcttagtagtgctacggatggcgtaactgcatgggaagtgcctggggccctagacatggtgacatgttccccagggtccaaaagactagtgggtcaaaactcacctttcctgacctctttgaggcatccgtatcatgaaatgtttggatttgaatggatgggggcaagtattctgtgagagctgtgttagtagacgcacgggaggtacccttctaggatctgactcgtgttacacttgggtctatccccatgatgtattcaagaaccaacgcacagctcgcctcttttttctttattttattctactaattgtgcacttgattgaatctgact

SEQ ID NO: 17595 - DNA, 761 bp, synthetic construct; identical to SEQ ID NO: 1224
  source 1..761: mol_type = other DNA

SEQ ID NO: 17596 - DNA, 624 bp, synthetic construct; identical to SEQ ID NO: 735
  source 1..624: mol_type = other DNA

SEQ ID NO: 17597 - DNA, 1000 bp, synthetic construct; identical to SEQ ID NO: 1456
  source 1..1000: mol_type = other DNA

SEQ ID NO: 17598 - DNA, 651 bp, synthetic construct; identical to SEQ ID NO: 786
  source 1..651: mol_type = other DNA

SEQ ID NO: 17599 - DNA, 1000 bp, synthetic construct
  source 1..1000: mol_type = other DNA
ggtttggatcttggatctctctccttccttcccccgtcttcaatttagcttcgtgattgaagcatctcactgtctctagtatttatgtcgaactgacgattgagtacgttcagattgtgtttgggaggcccaagggaccgatggacaacacttcgaaagagtcacttgtccaccgctcctttcccctaccctagcaactctggatttgctcacgtggagttcgaggtctatactttaactctgacttgcttttcttaccttgctatcttgctgacgtggattggttgtagactggttcacgttcccgttagatgctgacgtggagtacgatcgctgtacattccactactgccaattagctcccccttcccgttgctcccctctataaggagagccttctcttgcaaaggtgaagccttcacccccggtcgaagccgcttggaataagacagggttattttctcctcttctcggcgcttgccttttctaagctgaataggtcctatctattcaggcggatggtctggtccgttcctccttggacagagtgtgtatctgggttttccggatctcgaccgcacactcaccagagctcaggagtgactaagtcaaggcccgatctgcggcgaaaaggaaatgaagtattttgcagctgtagcgacctctcaaggccagcggatctccccacctggtaacaggtgcctctggggccaaaagccacgtgttaatagcacccttgagagcggtggtaccccaccaccctgcaaactatggatttgacttagtaaccaaaagattgacttggcatacctcaacctgagcggcggctaaggatgccctgaaggtacccgtgttgaaatcgcttcggcgaccatggatctgatcaggggccctgcctggagtggttctgtcccacacagcgtagggttaaaaaacgtctaaccgccccacaatgaccccggcagggatgccggtttcctttttaccaaatcttgacact

SEQ ID NO: 17600 - DNA, 797 bp, synthetic construct; identical to SEQ ID NO: 1241
  source 1..797: mol_type = other DNA

SEQ ID NO: 17601 - DNA, 750 bp, synthetic construct; identical to SEQ ID NO: 1201
  source 1..750: mol_type = other DNA

SEQ ID NO: 17602 - DNA, 820 bp, synthetic construct; identical to SEQ ID NO: 1270
  source 1..820: mol_type = other DNA

SEQ ID NO: 17603 - DNA, 712 bp, synthetic construct; identical to SEQ ID NO: 866
  source 1..712: mol_type = other DNA

SEQ ID NO: 17604 - DNA, 712 bp, synthetic construct; identical to SEQ ID NO: 1348
  source 1..712: mol_type = other DNA

SEQ ID NO: 17605 - DNA, 712 bp, synthetic construct; identical to SEQ ID NO: 1349
  source 1..712: mol_type = other DNA

SEQ ID NO: 17606 - DNA, 606 bp, synthetic construct; identical to SEQ ID NO: 41
  source 1..606: mol_type = other DNA

SEQ ID NO: 17607 - DNA, 717 bp, synthetic construct; identical to SEQ ID NO: 1336
  source 1..717: mol_type = other DNA

SEQ ID NO: 17608 - DNA, 735 bp, synthetic construct
  source 1..735: mol_type = other DNA
ggggggcctcggccccctcaccctcttttccggtggtctggtcccggaccaccgttactccattcagcttcttcggaacctgttcggaggaattaaacgggcacccactcatccctacctccccctgtaacttgaagtgtgtgctcgtgaccttgactcctgcgggcttcaccgacccgtccagtgaacaaactgctaggtgatttcttcccctcccctgacctggatgttccacatccaggtcttcctcccccagcccgacatgtcatgggctgtttggaatccccgcgaaagctgctaacgtggcaattgtgggtcccccttccaacaagacaccgagtctttctcccttaaggctagccccgtgtggtgaattccaccgggcaactagtgatgtcaatgcatgcctccgacctcggccgcggagtgctgccccccaagttgcgaaactgaccaaggattgtgctgcctggcaagcatagtctgaggagatgttccgctgtggctgccaaacctggtaacaggtgccccagtgcgcgtagtctccttccggttcgtccggctgtcctttggtaaagacacaatgtaaggggcgtgtgccaacgccctggaaagagtgaacttctactgccctaggaatgccacgcaggtacccctggtctcctaccagggatctgagcgtgggctaattgtctaacgggtagtttcatttctctcctcccttttgttgacacc

SEQ ID NO: 17609 - DNA, 720 bp, synthetic construct; identical to SEQ ID NO: 895
  source 1..720: mol_type = other DNA

SEQ ID NO: 17610 - DNA, 727 bp, synthetic construct; identical to SEQ ID NO: 1308
  source 1..727: mol_type = other DNA

SEQ ID NO: 17611 - DNA, 533 bp, synthetic construct
  source 1..533: mol_type = other DNA
acatgggtaggacctttcactccaaatccctttcccctttttctacttcttagtacgcctcggcttgctcatccgttgtgtgctcaaactcccttctcccacaccctttttccctccccctcccgagtgactcgcacttagtcgtaggtttggtgtctttcaccatttctgtgcctatctatgtgtcctttggatccgccctcgaatgccctctagggtcttctgcgaaagcttgcaaagccgcgccccccctccactgttcttggggaccgtgcgcagccggaacttttgacatctgactgaacagtacagcaatgtagcatgtctcttgtctttgccggttagcccttgtggtcaaactttgtaagttagtacacttaagtactctcctgtggtttctcttgggaccttccaattgtaggaatccttggtatgccttcgaatagggacggacgctctaaatgccccgttcgcgaagtcgacgcctgaatgaccaaggtttttccacctttcctcaaaacccctctttttta

SEQ ID NO: 17612 - DNA, 710 bp, synthetic construct; identical to SEQ ID NO: 1309
  source 1..710: mol_type = other DNA

SEQ ID NO: 17613 - DNA, 710 bp, synthetic construct; identical to SEQ ID NO: 1311
  source 1..710: mol_type = other DNA

SEQ ID NO: 17614 - DNA, 712 bp, synthetic construct; identical to SEQ ID NO: 1306
  source 1..712: mol_type = other DNA

SEQ ID NO: 17615 - DNA, 712 bp, synthetic construct; identical to SEQ ID NO: 1305
  source 1..712: mol_type = other DNA

SEQ ID NO: 17616 - DNA, 677 bp, synthetic construct; identical to SEQ ID NO: 1314
  source 1..677: mol_type = other DNA

SEQ ID NO: 17617 - DNA, 677 bp, synthetic construct; identical to SEQ ID NO: 1312
  source 1..677: mol_type = other DNA

SEQ ID NO: 17618 - DNA, 677 bp, synthetic construct; identical to SEQ ID NO: 1315
  source 1..677: mol_type = other DNA

SEQ ID NO: 17619 - DNA, 664 bp, synthetic construct; identical to SEQ ID NO: 1316
  source 1..664: mol_type = other DNA

SEQ ID NO: 17620 - DNA, 577 bp, synthetic construct
  source 1..577: mol_type = other DNA
tttgaaaagggggtgggggggcctcggccccctcaccctcttttccggtggccactcgcccgggccaccgttactccactccactccttcgggactggtttggaggaacacaacagggcttcccatccctgttcaccctacactccacataccctttccctcaaccaaccctatccaaaccccactgaccgactcccttggattttgacctcagaatgcctacttgacctcccacttgcctctcccttctcggattgccggtggtgcctggcggaaaaagcacaagtgtgttgcaggctatcaaacttctacccgacaaaggcgcgtgtccgcgtgctgagtaatgggataggagatgcctacaacaggctcgcccatgagtagagcatggactgcggtgcatgtgacttcggtcaccacgggcatagcattgctcacccgtgaatcaagtcatcgagatttctctgacctctgaagtgcactgtggttgcgtggctgggaatccatgcttgaccatgtactgcttgatagagtcgcggctggccgactcatgggttaaagtcagttgacaagacac

SEQ ID NO: 17621 - DNA, 679 bp, synthetic construct; identical to SEQ ID NO: 1307
  source 1..679: mol_type = other DNA

SEQ ID NO: 17622 - DNA, 646 bp, synthetic construct; identical to SEQ ID NO: 1350
  source 1..646: mol_type = other DNA

SEQ ID NO: 17623 - DNA, 576 bp, synthetic construct
  source 1..576: mol_type = other DNA
tttgaaaagggggtgggggggcctcggccccctcaccctcttttccggtggccactcgcccgggccaccgttacttcactccactccttcgggactggtttggaggaacacaacagggcttcccaacccctgttacccttactctaattcccttttccctcaaccaaccctttccactccccactgactgactcccttggattttgacctcagaatgcctacttgacctcccacttgcctttcccttctcggattgccggtggtgcctggcggaaaaagcacaagtgtgttgcaggctaccaaactcctacccgacaaaggtgcgtgtccgcgtgctgagtaatgggataggagatgcctacaacaggctcgcccatgagtagagcatggactgcggtgcatgtgacttcggtcaccacgggcatagcattgctcacccgtgaatcaagtcatcgagatttctctgacctctgaagtgcactgtggttgcgtggctgggaatccacgcttgaccatgtactgcttgatagagtcgcggctggccgactcatgggttaaagtcagttgacaagacac

SEQ ID NO: 17624 - DNA, 576 bp, synthetic construct
  source 1..576: mol_type = other DNA
tttgaaaagggggtgggggggcctcggccccctcaccctcttttccggtggccacccgcccgggccaccgttactccactccactccttcgggactggtttggaggaacataacagggcttcccatccctgtttacccttactccactcacccttccccttgaccaaccctatccacaccccactgactgactcctttggatcttgacctcggaatgcctacttgacctcccacttgcctctcccttttcggattgccggtggtgcctggcggaaaaagcacaagtgtgttgttggctaccaaactcctacccgacaaaggtgcgtgtccgcgtgctgagtaatgggataggagatgccaataacaggctcgcccatgagtagagcatggactgcggtgcatgtgacttcggtcaccaggggcatagcattgctcacccctgaatcaagtcatcgagatttctctgacctctgaagtgcactgtggttgcgtggctgggaatccacgcttgaccatgtactgcttgatagagtcgcggctggccgactcatgggttaaagtcagttgacaagacac

SEQ ID NO: 17625 - DNA, 576 bp, synthetic construct
  source 1..576: mol_type = other DNA
tttgaaaagggggtgggggggcctcggccccctcaccctcttttccggtggccacccgcccgggccaccgttactccactccactccttcgggactggtttggaggaacataacagggcttcccatccctgtttacccttactccactcacccctccccttgaccaaccctatccacaccccactgactgactcctttggatcttgacctcggaatgcctacttgacctcccacttgcctctcccttttcggattgccggtggtgcctggcggaaaaagcacaagtgtgttgttggctaccaaactcctacccgacaaaggtgcgtgtccgcgtgctgagtaatgggataggagatgccaataacaggctcgcccatgagtagagcatggactgcggtgcatgtgacttcggtcaccaggggcatagcattgctcacccctgaatcaagtcatcgagatttctctgacctctgaagtgcactgtggttgcgtggctgggaatccacgcttgaccatgtactgcttgatagagtcgcggctggccgactcatgggttaaagtcagttgacaagacac

SEQ ID NO: 17626 - DNA, 576 bp, synthetic construct
  source 1..576: mol_type = other DNA
tttgaaaagggggtgggggggcctcggccccctcaccctcttttccggcggccactcgcccgggccaccgttacttcactccactccctcgggactggtttggaggaacataacagggcttcccatccctgtttacccttactctgacaacccttccccttaatcaaccctatccacaccccactgactgactcctttggattttgacctcagaatgcctacttgacctcccacttgcctctccctcctcggattgccggtggtgcctggcggaaaaagcacaagtgtgttgcaggctaccaaactcctacccgacaaaggtgcgtgtccgcgtgctgagtaatgggataggagatgcctacaacaggctcgcccatgggtagagcatggactgcggtgcatgtgacttcggtcaccacgggcatagcattgctcacccgtgaatcaagtcatcgagatttctctgacctctgaagtgcactgtggttgcgtggctgggaatccacgcttgaccatgtactgcttgatagagtcgcggctggccgactcatgggttaaagtcagttgacaagacac

SEQ ID NO: 17627 - DNA, 576 bp, synthetic construct
  source 1..576: mol_type = other DNA
tttgaaaagggggtgggggggcctcggccccctcaccctcttttccggtggccactcgcccgggccaccgttacttcactccactccttcgggactggtttggaggaacataacagggcttcccatccctgtttaccctcattccactcaccccttccctaaaccaaccctatccacaccccactgactgactcctttggattttgacctcagaatgcctacctgacctcccacttgcctctcccttctcggattgccggtggtgcctggcggaaaaagcacaagtgtgttgcaggctaccaaactcctacccgacaaaggtgcgtgtccgcgtgctgagtaatgggataggagatgtctacaacaggctcgcccatgagtagagcatggactgcggtgcatgtgacttcggtcaccacgggcatagcattgctcacccgtgaatcaagtcatcgagatttctctgacctctgaagtgcactgtggttgcgtggctgggaatccacgcttgaccatgtactgcttgatagagtcgcggctggccgactcatgggttaaagtcagttgacaagacac

SEQ ID NO: 17628 - DNA, 576 bp, synthetic construct
  source 1..576: mol_type = other DNA
tttgaaaagggggtgggggggcctcggccccctcaccctcttttccggtggccacccgcccgggccaccgttactccactccactccttcgggactggtttggaggaacataacagggcttcccatccctgtttacccttactccactcacccttctccttgaccaaccctatccacaccccactgactgactcctttggattttgacctcagaatgcctacctgacctcccacttgcctctcccatctcggactgccggtggtgcctggcggaaaaagcacaagtgtgttgatggctaccaaactcctacccgacaaaggtgcgtgtccgcgtgctgagtaatgggataggagatgccattgacaggctcgcccatgagtagagcatggactgcggtgcatgtgacttcggtcaccaggggcatagcattgctcacccctgaatcaagtcatcgagatttctctgacctctgaagtgcactgtggttgcgtggctgggaatccacgcttgaccatgtactgcttgatagagtcgcggctggccgactcatgggttaaagtcagttgacaagacac

SEQ ID NO: 17629 - DNA, 576 bp, synthetic construct
  source 1..576: mol_type = other DNA
tttgaaaagggggtgggggggcctcggccccctcaccctcttttccggtggccattcgcccgggccaccgttactccactccactccttcgggactggtttggaggaacacaacagggcttcccatccctgtttaccctttattccatcatcctttccccaagtttaccctatccacaccccactgactgactcctttggattttgacctcagaatgcctatttgacctcccactcgcctctcccttttcggattgccggtggtgcctggcggaaaaagcacaagtgtgttgcaggctaccaaactcctacccgacaaaggtgcgtgtccgcgtgctgagtaatgggataggagatgcctacaacaggctcgcccatgagtagagcatggactgcggtgcatgtgacttcggtcaccacgggcatagcattgctcacccgtgaatcaagtcatcgagatttctctgacctctgaagtgcactgtggttgcgtggctgggaatccacgcttgaccatgtactgcttgatagagtcgcggctggccgactcatgggttaaagtcagttgacaagacac

SEQ ID NO: 17630 - DNA, 576 bp, synthetic construct
  source 1..576: mol_type = other DNA
tttgaaaagggggtgggggggcctcggccccctcaccctcttttccggtggccacccgcccgggccaccgttactccactccactccttcgggactggtttggaggaacataacagggcttcccatccctgtttacccttattccacttaccctttcccttaaccaaccctatccacaccccactgactgattcctttggattttgacctcagaatgcctacttgacctcccacttgtctctcccttctcggattgccggtggtgcctggcggaaaaagcacaagtgtgttgcaggctaccaaactcctacccgacaaaggtgcgtgtccgcgtgctgagtaatgggataggagatgcctacaacaggctcgcccatgagtagagcatggactgcggtgcatgtgacttcggtcaccacgggcatagcattgctcacccgtgaatcaagtcatcgagatttctctgacctctgaagtgcactgtggttgcgtggctgggaatccacgcttgaccatgtactgcttgatagagtcgcggctggccgactcatgggttaaagtcagttgacaagacac

SEQ ID NO: 17631 - DNA, 576 bp, synthetic construct
  source 1..576: mol_type = other DNA
tttgaaaagggggtggttgggcctcggccccctcaccctcttttccggtggccacacgcccgggccaccgttactccactccactccctcgggactggtttggaggaacacaacagggcttcccatccctgtttaccctaacttcactcacccttatccttaaccaaccctatccacaccccactgactgattcctttggattttgacctcagaatgcctacctgacctcccacttgcctctcccttttcggattgccggtggtgcctggcggaaaaagcacaagtgtgttgatggctaccaaactcctacccgacaaaggtgcgtgtccgcgtgctgagtaatgggataggagatgccattgacaggctcgcccatgagtagagcatggactgcggtgcatgtgacttcggtcaccaggggcatagcattgctcacccctgaatcaagtcatcgagatttctctgacctctgaagtgcactgtggttgcgtggctgggaatccacgcttgaccatgtactgcttgatagagtcgcggctggccgactcatgggttaaagtcagttgataagacac

SEQ ID NO: 17632 - DNA, 576 bp, synthetic construct
  source 1..576: mol_type = other DNA
tttgaaaagggggtgggggggcctcggccctctcaccctcttttccggtggccattcgcccgggccaccgttactccactccactccctcgggactggtttggaggaacacaacagggcttcccacccctgtttacccttactccacttaccaccccccttaaccaatcctatccacaccccactgactgattcctttggattttgatctcagaatgcctacttgacctcccacttgcctctcccttctcggattgccggtggtgcctggcggaaaaagcacaagtgtgttgttggctaccaaactcctacccgacaaaggtgcgtgtccgcgtgctgagtaatgggataggagatgccaatgacaggctcgcccatgagtagagcatggactgcggtgcatgtgacttcggtcaccaggggcatagcattgctcacccctgaatcaagtcatcgagatttctctgacctctgaagtgcactgtggttgcgtggctgggaatccacgcttgaccatgtactgcttgatagagtcgcggctggccgactcatgggttaaagtcagttgacaagacac

SEQ ID NO: 17633 - DNA, 576 bp, synthetic construct
  source 1..576: mol_type = other DNA
tttgaaaagggggtgggggggcctcggccctctcaccctcttttccggtggccactcgcccgggccaccgttactccactccactccttcgggactggtttggaggaacataacagggcttcccatccctgtttaccctcattccacttacccttttccttaaccaaccctatccacaccccactgactgattcctttggattttgacctcagaacgcctacttgacctcccacttgcttctcccttcccggattgccggtggtgcctggcggaaaaagcacaagtgtgttgttggctaccaaactcctacccgacaaaggtgcgtgtccgcgtgctgagtaatgggataggagatgccaataacaggctcgcccatgagtagagcatggactgcggtgcatgtgactccggtcaccgggggcatagcattgctcacccccgaatcaagtcatcgagatttctctgacctctgaagtgcactgtggttgtgtggctgggaatccacacttgaccatgtactgcttgatagagtcgcggctggccgactcatgggttaaagtcagttgacaagacac

SEQ ID NO: 17634 - DNA, 576 bp, synthetic construct
  source 1..576: mol_type = other DNA
tttgaaaagggggtgggggggcctcggccctctcaccctcttttccggtggccacccgcccgggccaccgttactccactccactccttcgggactggtttggaggaacacaacagggcttcccacccctgtttacctttactccacttacctttctcctaaaccaatcctatccacaccccactgactgattcctttggattttgacctcagaatgcctacatgacctcccactcgtctctcccttcccggattgccggtggtgcctggcggaaaaagcacaagtgtgttgatggctaccaaactcctacccgacaaaggtgcgtgtccgcgtgctgagtaatgggataggagatgccattgacaggctcgcccatgagtagagcatggactgcggtgcatgtgacttcagtcaccaggggcatagcattgctcacccctgaatcaagtcatcgagatttctctgacctctgaagtgcactgtggttgcgtggctgggaatccacgcttgaccatgtactgcttgatagagtcgcggctggccgactcatgggttaaagtcagttgataagacac

SEQ ID NO: 17635 - DNA, 576 bp, synthetic construct
  source 1..576: mol_type = other DNA
tttgaaaagggggtgggggggcctcggccctctcaccctcttttccggtggccacccgcccgggccaccgttactccactccactccttcgggactggtttggaggaacataacagggcttcccacccctgtttacccttattccactcacccttccccttaatcaaccctatccacaccccactgactgactcctttggtttttgacctcagaatgcctacctgacctcccacttacctctcccttttcggattgccggtggtgcctggtggaaaaagcacaagtgtgttgttggctactaaactcctacccgacaaaggtgcgtgtccgcgtgctgagtaatgggataggagatgccaataacaggctcgcccatgagtagagcatggactgcggtgcgtgtgacttcggtcaccaggggcatagcattgctcacccctgaatcaagtcatcgagatttctctgacctctgaagtgcactgtggttgcgtggctgggaatccacgcttgaccatgtactgcttgatagagtcgcggctggccgactcatgggttaaagtcagttgacaagacac

SEQ ID NO: 17636 - DNA, 576 bp, synthetic construct
  source 1..576: mol_type = other DNA
tttgaaaagggggtgggggggcctcggccctctcaccctcttttccggtggccactcgcccgggccaccgttactccactccactccttcgggactggtttggaggaacacaacagggcttcccacccctgtttacccttactccactcacccttccccataaccaaccctatccacaccccactgactgactcctttggattttgacctcagaatgcctatttaacctcccacttgcctctcccctctcggattgccggtggtgcctggcggaaaaagcacaagtgtgttgttggctaccaaactcctacccgacaaaggtgcgtgtccgcgtgctgagtaatgggataggagatgccaatgacaggctcgcccatgagtagagcatggactgtggtgcatgtgacctcggtcaccaggggcatagcattgctcacccctgaatcaagtcatcgagatttctctgacctctgaagtgcactgtggttgcgtggctgggaatccacgcttgaccatgtactgcttgatagagtcgcggctggccgactcatgggttaaagtcagttgacaagacac

SEQ ID NO: 17637 - DNA, 576 bp, synthetic construct
  source 1..576: mol_type = other DNA
tttgaaaagggggtgggggggcctcggccctctcaccctcttttccggtggccactcgcccgggccaccgttactccactccactccttcgggactggtttggaggaacataacagggcttcccacccctgttcaccctaactccacttaccctttcccttaaccaaccctatccacaccccactgattgactcccttggattttgacctcggaatgcctacttgacctcccacttgcctttcccttcccggattgccggtggtgcctggcggaaaaagcacaagtgtgttgttggctaccaaactcctacccgacaaaggtgcgtgtccgcgtgctgagtaatgggataggagatgccaatgacaggctcgcccatgagtagagcatggactgcggtgcatgtgacttcggtcaccaggggcatagcattgctcacccctgaatcaagtcatcgagatttctctgacctctgaagtgcactgtggttgcgtggctgggaatccacgcttgaccatgtactgcttgatagagtcgcggctggccgactcatgggttaaagtcagttgacaagacac

SEQ ID NO: 17638 - DNA, 576 bp, synthetic construct
  source 1..576: mol_type = other DNA
tttgtaaggggggtggggggccctcggccccctcaccctcttttccggtgcccacccgcccgggccaccgttactccactccactccttcgggactggtttggaggaacataacagggcttcccacccctgtttacccttattccactcacccttctccttaatcaaccctatccacaccccattgactgactcctttggattttgacctcagaatgcctacctgacctcccacttgcctctcccttctcggactgccggtggtgcctggcggaaaaagcacaagtgtgttgatggctaccaaactcttacccgacaaaggtgcgtgtccgcgtgctgagtaatgggataagagatgccattgacaggctcgcccatgagtagagcatggactgcggtgcatgtgacttcggtcaccaggggcatagcattgctcacccctgaatcaagtcatcgagatttctctgacctctgaagtgcactgtggttgcgtggctgggaatccacgcttgaccatgtactgcttgatagagtcgcggctggccgactcatgggttaaagtcagttgacaagacac

SEQ ID NO: 17639 - DNA, 576 bp, synthetic construct
  source 1..576: mol_type = other DNA
tttgaaaagggggtgggggggcctcggccctctcaccctcttttccggtggccactcgcccgggccaccgttactccactccactccttcgggactggtttggaggaacataacagggcttcccatccctgtttaccctcattccacttacccttccccttaaccaaccctatccacaccccactgactgattcctttggattttgacctcagaatgcctacctgacctcccacttgcttctcccctctcggattgccggtggtgcctggcggaaaaagcacaagtgtgttgttggctaccaaactcctacccgacaaaggtgcgtgtccgcgtgctgagtaatgggataggagatgccaataacaggctcgcccatgagtagagcatggactgcggtgtatgtgacttcggtcaccaggggcatagcattgctcacccctgaatcaagtcatcgagatttctctgacctctgaagtgcactgtggttgcgtggctgggaatccacgcttgaccatgtactgcttgatagagtcgcggctggccgactcatgggttaaagtcagttgacaagacac

SEQ ID NO: 17640 - DNA, 576 bp, synthetic construct
  source 1..576: mol_type = other DNA
tttgaaaagggggtgggggggcctcggccctctcaccctcttttccggtggccactcgcccgggccaccgttactccattccactccttcgggactggtttggaggaacataacagggcttcccatccctgtttatcctaattccacttacctttctccataattaaccctatccacaccccactgaccgatccctttggattttgacctcagaatgcctacctgacctcccacttgcctttcccttttcggattgccggtggtgcctggcggaaaaagcacaagtgtgttgatggctaccaaactcctacccgacaaaggtgcgtgtccgcgtgctgagtaatgggataggagatgccattgacaggctcgcccatgagtagagcatggactgcggtgcatgtgacttcggtcaccaggggcatagcattgctcacccctgaatcaagtcatcgagatttctctgacctctgaagtgcactgtggttgcgtggctgggaatccacgcttgaccatgtactgcttgatagagtcgcggctggccgactcatgggttaaagtcagttgacaagacac

SEQ ID NO: 17641 - DNA, 576 bp, synthetic construct
  source 1..576: mol_type = other DNA
tttgaaaagggggtggttgggcctcggccccctcaccctcttttccggtggccacacgcccgggccaccgttactccactccactccctcgggactggtttggaggaacacaacagggcttcccatccctgtttaccctcactccacttacccttctccttaaccaaccctatccacacctcactgactgattcctttggattttgacctcagaatgcctacttgacctcccacttgcctttcccttctcggattgccggtggtgcctggcggaaaaagcacaagtgtgttgttggctactaaactcctacccgacaaaggtgcgtgtccgcgcgctgagtaatgggataggagatgccaataacaggctcgcccatgagtagagcatggactgcggtgcatgtgacttcggtcaccaggggcatagcattgctcacccctgaatcaagtcatcgagacttctctgacctctgaagtgcactgtggttgcgtggctgggaatccacgcttgaccatgtactgcttgatagagtcgcggctggccgactcatgggttaaagtcagttgacaagacac

SEQ ID NO: 17642 - DNA, 576 bp, synthetic construct
  source 1..576: mol_type = other DNA
tttgaaaagggggtgggggggcctcggccctctcaccctcttttccggtggccactcgcccgggccaccgttactccactccactccttcgggactggtttggaggaacataacagggcttcccatccctgtttacccttattccacttacccttctcctcaaccaaccctatccacaccccactgactgattcctttggattttgacctcagaatgcctacctgacctcccacttgcctctcccctctcggattgccggtggtgcctggcggaaaaagcacaagtgtgttgttggctaccaaactcctacccgacaaaggtgcgtgtccgcgtgctgagtaatgggataggagatgccaataacaggctcgcccatgagtagagcatggactgcggtgcatgtgacttcggtcaccaggggcatagcattgctcacccctgaatcaagtcatcgagatttctctgacctctgaagtgcactgtggttgcgtggctgggaatccacgcttgaccatgtactgcttgatagagtcgcggctggccgactcatgggttaaagtcagttgacaagacac

SEQ ID NO: 17643 - DNA, 576 bp, synthetic construct
  source 1..576: mol_type = other DNA
tttgaaaagggggtgggggggcctcggccctctcaccctcttttccggtggccactcgcccgggccaccgttactccactccactccttcgggactggtttggaggaacataacagggcttcccacccctgttcacccttactccactcacccttatccttaaccaaccctatccacaccccactgactgattcctttggattttgacctcagaatgcccacctgacctcccacttgcttctcccttctcggattgccggtggtgcctggcggaaaaagcacaagtgtgttgttggctaccaaactcctacccgacaaaggtgcgtgtccgcgtgctgagtaatgggataggagatgccaatgacaggctcgcccatgagtagagcatggactgcggtgcatgtgacttcggtcaccaggggcatagcattgctcacccctgaatcaagtcatcgagacttctctgacctctgaagtgcactgtggttgcgtggctgggaatccacgcttgaccatgtactgcttgatagagtcgcggctgaccgactcatgggttaaagtcagttgacaagacac

SEQ ID NO: 17644 - DNA, 576 bp, synthetic construct; identical to SEQ ID NO: 626
  source 1..576: mol_type = other DNA

SEQ ID NO: 17645 - DNA, 576 bp, synthetic construct
  source 1..576: mol_type = other DNA
tttgaaaagggggtgggggggcctcggccctctcaccctcttttccggtggccactcgcccgggccaccgttactccactccactccttcgggactggtttggaggaacataacagggcttcccacccctgtttaccctcactccacttatccttctcctcaactaaccctatccacaccccactgattgattcctttggatttcgacctcagaatgcctacttgacctcccacttgcctctcccctctcggattgccggtggtgcctggcggaaaaagcacaagtgtgttgttggctaccaaactcctacccgacaaaggtgcgtgtccgcgtgctgagtaatgggatgggagatgccaataacaggctcgcccatgagtagagcatggactgcggtgcatgtgacttcggtcaccaggggcatagcattgctcacccctgaatcaagtcatcgagatttctctgacctctgaagtgcactgtggttgcgtggctgggaatccacgcttgaccatgtactgcttgatagagtcgcggctggccgactcatgggttaaagtcagttgacaagacac

SEQ ID NO: 17646 - DNA, 576 bp, synthetic construct
  source 1..576: mol_type = other DNA
tttgaaaagggggtggttgggcctcggccccctcaccctcttttccggtggccacacgcccgggccaccgttactccactccactccctcgggactggtttggaggaacacaacagggcttcccatccctgtttaccctcactccacccatccttctccttaaccaaccctatccacaccccactgactgactccattggattttgacctcagaatgcctacctgacctcccacttgcctctcccttctcggattgccggtggtgcctggcggaaaaagcacaagtgtgttgttggctaccaaactcctacccgacaaaggtgcgtgtccgcgtgctgagtaatgggataggagatgccaatgacaggctcgcccatgagtagagcatggactgcggtgcatgtgactttggtcaccaggggcatagcattgctcacccctgaatcaagtcatcgagatttctctgacctctgaagtgcgctgtggttgcgtggctgggaatccacgcttgaccatgtactgcttgatagagtcgcggctggccgactcatgggttaaagtcagttgacaagacac

SEQ ID NO: 17647 - DNA, 574 bp, synthetic construct
  source 1..574: mol_type = other DNA
aaaagggggtgggggggcttcggccctctcaccctcttttccggtggccactcgcccgggccaccgttactccactccactccctcgggactggtttggaggaacataacagggcttcctacccctgttcttccctcaattccactcacccttcccctcaaccacccctatccacaccccactgactgattcctttggattttgacctcagaatgcctacttgacctcccacttgcctctcccttttcggactgccggtggtgcctggtggaaaaagcacaagtgtgttgttggctaccaaactcctacccgacaaaggtgcgtgtccgcgtgctgagtaatgggataggagatgcctacaacaggctcgcccatgagtagagcatggactgcggtgcatgtgacttcggtcaccacgggcatagcattgctcacccgtgaatcaagtcatcgagatttctctgacctctgaagtgcactgtggttgcgtggctgggaatccacgcttgaccatgtactgcttgatagagtcgcggctggccgactcatgggttaaagtcagttgataagacac

SEQ ID NO: 17648 - DNA, 591 bp, synthetic construct; identical to SEQ ID NO: 641
  source 1..591: mol_type = other DNA

SEQ ID NO: 17649 - DNA, 625 bp, synthetic construct; identical to SEQ ID NO: 740
  source 1..625: mol_type = other DNA

SEQ ID NO: 17650 - DNA, 506 bp, synthetic construct; identical to SEQ ID NO: 530
  source 1..506: mol_type = other DNA

SEQ ID NO: 17651 - DNA, 567 bp, synthetic construct
  source 1..567: mol_type = other DNA
gggtgggggggcttcggccctctcaccctcttttccggtggccactcgcccgggccaccgttactccactccactccttcgggactggtttggaggaacataacagggcttcccatccctgtttacccttattccactcacccttcccctacaaccaaccctatccacaccccactgactgattcctttggattttgacctcagaatgcctacctgacctcccacttgcctctcccttctcggattgccggtggtgcctggcggaaaaagcacaagtgtgttgttggctaccaaactcctacccgacaaaggtgcgtgtccgcgtgctgagtaatgggataggagatgccaatgacaggctcgcccatgagtagagcatggactgcggtgcatgtgacctcggtcaccaggggcatagcattgctcacccctgaatcaagtcatcgagatttctctgacctctgaagtgcactgtggttgcgtggctgggaatccacgcttgaccatgtactgcttgatagagtcgcggctggccgactcatgggttaaagtcagttgacaagacac

SEQ ID NO: 17652 - DNA, 773 bp, synthetic construct; identical to SEQ ID NO: 1232
  source 1..773: mol_type = other DNA

SEQ ID NO: 17653 - DNA, 558 bp, synthetic construct; identical to SEQ ID NO: 1402
  source 1..558: mol_type = other DNA

SEQ ID NO: 17654 - DNA, 1000 bp, synthetic construct; identical to SEQ ID NO: 1457
  source 1..1000: mol_type = other DNA

SEQ ID NO: 17655 - DNA, 549 bp, synthetic construct; identical to SEQ ID NO: 1434
  source 1..549: mol_type = other DNA

SEQ ID NO: 17656 - DNA, 641 bp, synthetic construct; identical to SEQ ID NO: 770
  source 1..641: mol_type = other DNA

SEQ ID NO: 17657 - DNA, 494 bp, synthetic construct; identical to SEQ ID NO: 520
  source 1..494: mol_type = other DNA

SEQ ID NO: 17658 - DNA, 561 bp, synthetic construct; identical to SEQ ID NO: 1358
  source 1..561: mol_type = other DNA

SEQ ID NO: 17659 - DNA, 576 bp, synthetic construct
  source 1..576: mol_type = other DNA
tttgaaaagggggtgggggggcctcggccccctcaccctcttttccggtggccacccgcccgggccaccgttacttcactccactccctcgggactggtttggaggaacataacagggcttcccatccctgtttacccttatttccaattaccctttcctaaaccaaccctatccacaccccactgactgactcctttggattttgacttcagaatgcctacctgacctcccacttgcctctcccttctcggactgccggtggtgcctggcggaaaaagcacaagtgtgttgttggctaccaaactcctacccgacaaaggtgcgtgtccgcgtgctgagtaatgggataggagataccaataacaggctcgcccatgagtagagcatggactgcggcgcatgtgacctcggtcaccaggggcatagcattgctcacccctgaatcaagtcatcgagacttctctgacctctgaagtgcgctgtggttgcgtggctgggaatccacgcttgaccatgtactgcttgatagagtcgcggctggccgactcatgggttaaagtcagttgacaagacac

SEQ ID NO: 17660 - DNA, 579 bp, synthetic construct; identical to SEQ ID NO: 632
  source 1..579: mol_type = other DNA

SEQ ID NO: 17661 - DNA, 1000 bp, synthetic construct
  source 1..1000: mol_type = other DNA
gacggttggactttcgttcacccacctacggctggactcacggcaccgtgtggctacttgctggactgtgcggacgaacgccgcttgcgcatctcgcgtgaccggttagtactcttaccactttccgccaattggtcgtttgcgctgtcttgggcactcccgttgggggccgttcgacgctccaccgttcaccctgtctgttggactacggtgatggggccgtctcgcgcgggtttgtcgcctgtcgtctaggcgaatacccgaagcctgcctttcacccttacagccctagtaataccgtcttgtccgacgttaaaggactgtaaccacatgcttattaccgtcttgtccgacgttaaagggctgtaaccataagctaccaacgtcttgtccgacgttaaagggctgtaaccacaagaacaaccttcacccggaagtaaaacggcaacgtacacacttttgcccgttttgaagaaatgggacgtcagcgcacgaaacgcgccgtcacttgaggatgacttgtacaaacacgattcacgcaggtatccacaactgacacaaaaccgtgcaacttgaaatcccgcctggtctttccaggtctggaggggtgacactttgtactgtgtttgactccacgctcggtccactagcgggtgttagtagtggtatcgttgtttcgtagcggagcatagtggccgcgggaactcccccttggtgacaaggacccgcggggccgaaagccacgtcctaacggacccactatgtgtgcaatcccagcacggcaactttaccacgaaaaccactttaaggtgacactgaaactggtactcaaccactggtgacaggctaaggatgcccttcaggtaccccgaggtaacaagcgacactcaggatctgagaagggggctggggcttctttaaaagcgcccagtttaaaaagcttctatgcctgaataggcgaccggaggccggcgcctttcctttaaccactactcaccat

SEQ ID NO: 17662 - DNA, 577 bp, synthetic construct
  source 1..577: mol_type = other DNA
tttgaaaagggggtgggggggcctcggccccctcaccctcttttccggtggccacccgcccgggccaccgttacttcactccactccttcgggactggtttggaggaacataacagggcttcccaatcccctgttatccttattccaattaccctttcccttaaccaaccctatccacaccccactgactgactcctttggattttgacctcagaatgcctacctgacctcccacttgcctctcccctctcggattgccggtggtgcctggcggaaaaagcacaagtgtgttgcaggctaccaaactcctacccgacaaaggtgcgtgtccgcgtgctgagtaatgggataggagatgcctacaacaggctcgcccatgagtagagcatggactgcggtgcatgtgacttcggtcaccacgggcatagcattgctcacccgtgaatcaagtcatcgagatttctctgacctctgaagtgcactgtggttgcgtggctgggaatccacgcttgaccatgtactgcttgatagagtcgcggctggccgactcatgggttaaagtcagttgacaagacac

SEQ ID NO: 17663 - DNA, 1000 bp, synthetic construct; identical to SEQ ID NO: 1458
  source 1..1000: mol_type = other DNA

SEQ ID NO: 17664 - DNA, 513 bp, synthetic construct; identical to SEQ ID NO: 1446
  source 1..513: mol_type = other DNA

SEQ ID NO: 17665 - DNA, 578 bp, synthetic construct; identical to SEQ ID NO: 630
  source 1..578: mol_type = other DNA

SEQ ID NO: 17666 - DNA, 665 bp, synthetic construct; identical to SEQ ID NO: 803
  source 1..665: mol_type = other DNA

SEQ ID NO: 17667 - DNA, 509 bp, synthetic construct; identical to SEQ ID NO: 1451
  source 1..509: mol_type = other DNA

SEQ ID NO: 17668 - DNA, 315 bp, synthetic construct; identical to SEQ ID NO: 299
  source 1..315: mol_type = other DNA

SEQ ID NO: 17669 - DNA, 816 bp, synthetic construct; identical to SEQ ID NO: 132
  source 1..816: mol_type = other DNA

SEQ ID NO: 17670 - DNA, 647 bp, synthetic construct; identical to SEQ ID NO: 1351
  source 1..647: mol_type = other DNA

SEQ ID NO: 17671 - DNA, 741 bp, synthetic construct; identical to SEQ ID NO: 968
  source 1..741: mol_type = other DNA

SEQ ID NO: 17672 - DNA, 577 bp, synthetic construct
  source 1..577: mol_type = other DNA
tttgaaaagggggtgggggggcttcggccctctcaccctcttttccggtggccactcgcccgggccaccgttacttcactccactccctcgggactggtttggaggaacataacagggcttcccacccctgtttacccttaattccacttacccttccccttaaccaaccctatccacaccccactgactgattcctttggattttgacctcagaatgcctacttgacctcccacttgcctctcccttctcggattgccggtggtgcctggcggaaaaagcacaagtgtgttgcaggctaccaaactcctacccgacaaaggtgcgtgtccgcgtgctgagtaatgggataggagatgcctacaacaggctcgcccatgagtagagcatggactgcggtgcatgtgacttcggtcaccacgggcatagcattgctcacccgtgaatcaagtcatcgagatttctctgacctctgaagtgcactgtggttgcgtggctgggaatccacgcttgaccatgtactgcttgatagagtcgcggctggccgactcatgggttaaagtcagttgacaagacac

SEQ ID NO: 17673 - DNA, 576 bp, synthetic construct
  source 1..576: mol_type = other DNA
tttgaaaagggggtgggggggcctcggccccctcaccctcttttccggtggccactcgcccgggccaccgttacttcactccactccttcgggactggtttggaggaacataacagggcttcccatccctgtttacccttatttccacttaactttttcccaatctactctaaccacaccccactgactgactcctttggattttgacctcagaatgcctacctggcctcccactcgcctcatccttttcggattgccggtggtgcctggcggaaaaagcacaagtgtgttgcaggctaccaaactcctacccgacaaaggtgcgtgtccgcgtgctgagtaatgggataggagatgcctacaacaggctcgcccatgagtagagcatggactgcggtgcatgtgacttcggtcaccacgggcatagcattgctcacccgtgaatcaagtcatcgagatttctctgacctctgaagtgcactgtggttgcgtggctgggaatccacgcttgaccatgtactgcttgatagagtcgcggctggccgactcatgggttaaagtcagttgacaagacac

SEQ ID NO: 17674 - DNA, 577 bp, synthetic construct
  source 1..577: mol_type = other DNA
tttgaaaagggggtgggggggcctcggccccctcaccctcttttccggtggccactcgcccgggccaccgttactccactccactccttcgggactggtttggaggaacataacagggcttcccatccctgtttacccttaattccatttaccttctcccccaactaaccctatccacaccccactgactgactcctttggattttgacctcagaatgcctacttgacctcccacttgcctctcccttctcggattgccggtggtgcctggcggaaaaagcacaagtgtgttgcaggctaccaaactcctacccgacaaaggtgcgtgtccgcgtgctgagtaatgggataggagatgcctacaacaggctcgcccatgagtagagcatggactgcggtgcatgtgacttcggtcaccacgggcatagcattgctcacccgtgaatcaagtcatcgagatttctctgacctctgaagtgcactgtggttgcgtggctgggaatccacgcttgaccatgtactgcttgatagagtcgcggctggccgactcatgggttaaagtcagttgacaagacac

SEQ ID NO: 17675 - DNA, 577 bp, synthetic construct
  source 1..577: mol_type = other DNA
tttgaaaagggggtgggggggcttcggccctctcaccctcttttccggtggccattcgcccgggccaccgttactccactccactccctcgggactggtttggaggaacacaacagggcttcccatccctgtttacccttaactccactcaccctttcctacaccaaccctatccacaccctactgattgattcctttggattttgacctcagaatgcctacccgacctcccactcgttttcctccttctcggattgccggtggtgcctggcggaaaaagcacaagtgtgttgttggctaccaaactcctacccgacaaaggtgcgtgtccgcgtgctgagtaatgggataggagatgccaataacaggctcgcccatgagtagagcatggactgcggtgcatgtgacttcggtcaccaggggcatagcattgctcacccctgaatcaagtcatcgagatttctctgacctctgaagtgcactgtggttgcgtggctgggaatccacgcttgaccatgtactgcttgatagagtcgcggctggccgactcatgggttaaagtcagttgacaagacac

SEQ ID NO: 17676 - DNA, 1000 bp, synthetic construct; identical to SEQ ID NO: 1459
  source 1..1000: mol_type = other DNA

SEQ ID NO: 17677 - DNA, 576 bp, synthetic construct
  source 1..576: mol_type = other DNA
tttgaaaagggggtgggggggcctcggccccctcaccctcttttccggtggccacacgcccgggccaccgttactccactccactccttcgggactggtttggaggaacacaacagggcttcccatccctgtttaccctttattccatcatcctttccccaagtttaccctatccacaccccactgactgactcctttggattttgacctcagaatgcctatttgacctcccactcgcctctcccttttcggattgccggtggtgcctggcggaaaaagcacaagtgtgttgcaggctaccaaactcctacccgacaaaggtgcgtgtccgcgtgctgagtaatgggataggagatgcctacaacaggctcgcccatgagtagagcatggactgcggtgcatgtgacttcggtcaccacgggcatagcattgctcacccgtgaatcaagtcatcgagatttctctgacctctgaagtgcactgtggttgcgtggctgggaatccacgcttgaccatgtactgcttgatagagtcgcggctggccgactcatgggttaaagtcagttgacaagacac

SEQ ID NO: 17678 - DNA, 577 bp, synthetic construct
  source 1..577: mol_type = other DNA
tttgaaaagggggtggggcggcctcggcccactcaccctctttaccggtggccacccgcccgggccaccgttacttcactccactccttcgggactggtttggaggaacataacagggcttcccatccctgttcaccccttattccaattaccctcacccttgattaaccctacccacaccccactgactgattcctttggattttgacctcagaatgcctacttgacctcctacttgcttctcccttctcggattgccggtggtgcctggcggaaaaagcacaagtgtgttgcaggctaccaaactcctacccgacaaaggtgcgtgtccgcgtgctgagtaatgggataggagatgcctacaacaggctcgcccatgagtagagcatggactgcggtgcatgtgacttcggtcaccacgggcatagcattgctcacccgtgaatcaagtcatcgagatttctctgacctctgaagtgcactgtggttgcgtggctgggaatccacgcttgaccatgtactgcttgatagagtcgcggctggccgactcatgggttaaagtcagttgacaagacac

SEQ ID NO: 17679 - DNA, 576 bp, synthetic construct
  source 1..576: mol_type = other DNA
tttgaaaagggggtgggggggcctcggccccctcaccctcttttccggtggccactcgcccgggccaccgttactccactccactccttcgggactggtttggaggaacacaacagggcttcccatccctgtttacccttactccactcacccttcccttcaaccaaccctatccacaccccactgactgactcttttggactatgacctcagaacgcctacttgacctcccactcgcctctcccttctcggattgccggtggtgcctggcggaaaaagcacaagtgtgttgttggctaccaaactcctacccgacaaaggtgcgtgtccgcgtgctgagtaatgggataggagatgccaataacaggctcgcccatgagtagagcatggactgcggtgcatgtgacctcggtcaccaggggcatagcattgctcacccctgaatcaagtcatcgagacttctctgacctctgaagtgcactgtggttgcgtggctgggaatccacgcttgaccatgtactgcttgatagagtcgcggctggccgactcatgggttaaagtcagttgacaagacac

SEQ ID NO: 17680 - DNA, 576 bp, synthetic construct
  source 1..576: mol_type = other DNA
tttgaaaagggggtgggggggcctcggccccctcaccctcttttccggcggccactcgcccgggccaccgttacttcactccactccttcgggactggtttggaggaacataacagggcttcccatccctgtttacccttcactccaattacccttcccccaatcaaccctatccacaccccattgactgattcctttggattttgacctcagaatgcctacttgacctcccacttgccttccccttctcggactgccggtggtgcctggcggaaaaagcacaagtgtgttgcaggctaccaaactcctacccgacaaaggtgcgtgtccgcgtgctgagtaatgggataggagatgcctacaacaggctcgcccatgagtagagcatggactgcggtgcatgtgacttcggtcaccacgggcatagcattgctcacccgtgaatcaagtcatcgagatttctctgacctctgaagtgcactgtggttgcgtggctgggaatccacgcttgaccatgtactgcttgatagagtcgcggctggccgactcatgggttaaagtcagttgacaagacac

SEQ ID NO: 17681 - DNA, 571 bp, synthetic construct
  source 1..571: mol_type = other DNA
aagggggtgggggggcttcggccctctcaccctcttttccggtggccacccgcccgggccaccgttactccactccactccttcgggactggtttggaggaacataacagggcttcccaatccctgttaccctttactccatttccccatcccccaaacttaccctatccacaccccactgactgattcctttggattttgacctcagaatgcctacttgacctcccactcgcctctccctctccggactgccggtggtgcctggcggaaaaagcacaagtgtgttgcaggctactaaactcctacccgacaaaggtgcgtgtccgcgtgctgagtaatgggataggagatgcctacaacaggctcgcccatgagtagagcatggactgcggtgcatgtgacttcggtcaccacgggcatagcattgctcacccgtgaatcaagtcatcgagaattctctgacctctgaagtgcactgtggttgcgtggctgggaatccacgcttgaccatgtactgcttgatagagtcgcggctggccgactcatgggttaaagtcagttgacaagacac

SEQ ID NO: 17682 - DNA, 564 bp, synthetic construct
  source 1..564: mol_type = other DNA
gtgggggggcttcggccctctcaccctcttttccggtggccactcgcccgggccaccgttactccactccactccttcgggactggtttggaggaacataacagggcttcccatccctgtttaccctcattccactcaccccttcccttgaccaaccccatccacaccccactgactgattcctttggattttgacctcagaatgcctacctgacctcccactcgcctctccctcttcggattgccggtggtgcctggcggaaaaagcacaagtgtgttgctggctaccaaactcctacccgacaaaggtgcgtgtccgcgtgctgagtaatgggataggagatgctaacaacaggctcgcccatgagtagagcatggactgcggtgcatgtgacttcggtcaccacgggcatagcattgctcacccgtgaatcaagtcatcgagatttctctgacctctgaagtgcactgtggttgcgtggctgggaatccacgcttgaccatgtactgcttgatagagtcgcggctggccgactcatgggttaaagtcagttgacaagacac

SEQ ID NO: 17683 - DNA, 569 bp, synthetic construct; identical to SEQ ID NO: 618
  source 1..569: mol_type = other DNA

SEQ ID NO: 17684 - DNA, 570 bp, synthetic construct
  source 1..570: mol_type = other DNA
gggggtgggggggcttcggccctctcaccctcttttccggtggccactcgcccgggccaccgttactccactccactccctcgggactggtctggaggaacacaacagggcttcccatccctgtttaccctcattccaatttacccttcccttacaaccaaccctatccacaccccactgaatgattcctttggattttgacctcagaatgcctacctgaccccccacttgcttctccctcctcggattgccggtggtgcctggcggaaaaagcacaagtgtgttgttggctaccaaactcctacccgacaaaggtgcgtgtccgcgtgctgagtaatgggataggagatgccaataacaggctcgcccatgagtagagcatggactgcggtgcatgtgacttcggtcaccagggacatagcattgctcacccctgaatcaagttattgagatttctctgacctctgaagtgcactgtggttgcgtggccgggaatccacgcttgaccatgtactgcttgatagagtcgcggctggccgactcatgggttaaagtcagttgacaagacac

SEQ ID NO: 17685 - DNA, 568 bp, synthetic construct
  source 1..568: mol_type = other DNA
ggggtgggggggcttcggccctctcaccctcttttccggtggccactcgcccgggccaccgttactccactccactccctcgggactggtttggaggaacataacagggcttcccatccctgtttacccttggttccactcaccctttcccctcaccaaccttatccacaccccactgactgactcctttggattttgacctcagaatgcctacttgacctcccactcgcctctcccttctcggactgccggtggtgcctggcggaaaaagcacaagtgtgttgttggctaccaaactcctacccgacaaaggtgcgtgtccgcgtgccgagtaatgggataggagatgccaataacaggctcgcccatgagtagagcatggactgcggtgcatgtgacttcggtcaccagggacatagcattgctcacccctgaatcaagtcatcgagaattctctgacctctgaagtgcactgtggttgcgtggctgggaatccacgcttgaccatgtactgcttgatagagtcgcggctggccgactcatgggttaaagtcagttgacaagacac

SEQ ID NO: 17686 - DNA, 563 bp, synthetic construct
  source 1..563: mol_type = other DNA
gggggggcttcggccctctcaccctcttttccggtggccacccgcccgggccaccgttactccactccactccttcgggactggtttggaggaacataacagggcttcccaatccctgttaccctttactccatttccccatcccccaaacttaccctatccacaccccactgactgattcctttggattttgacctcagaatgcctacttgacctcccactcgcctctccctctccggactgccggtggtgcctggcggaaaaagcacaagtgtgttgcaggctactaaactcctacccgacaaaggtgcgtgtccgcgtgctgagtaatgggataggagatgcctacaacaggctcgcccatgagtagagcatggactgcggtgcatgtgacttcggtcaccacgggcatagcattgctcacccgtgaatcaagtcatcgagaattctctgacctctgaagtgcactgtggttgcgtggctgggaatccacgcttgaccatgtactgcttgatagagtcgcggctggccgactcatgggttaaagtcagttgacaagacac

SEQ ID NO: 17687 - DNA, 566 bp, synthetic construct
  source 1..566: mol_type = other DNA
tgggggggcttcggccctctcaccctcttttccggtggccactcgcccgggccaccgttactccactccactccctcgggactggtttggaggaacacaacagggcttcccacccctgttctttccttaattccactcaccctttccctttaccaaccctatccacaccccactgactgattcctttggattttgacctcagaatacccatttgacctcccacttgcctctccctttttcggattgccggtggtgcctggcggaaaaagcacaagtgtgttgttggctaccaaactcctacccgacaaaggtgcgtgtccgcgtgccgagtaatgggataggagatgcctacaacaggctcgcccatgagtagagcatggactgcggtgcatgtgacttcggtcaccacgggcatagcattgctcacccgtgaatcaagtcatcgagatttctctgacctctgaagtgcactgtggttgcgtggctgggaatccacgcttgaccatgtactgcttgatagagtcgcggctggccgactcatgggttaaagtcagttgataagacac

SEQ ID NO: 17688 - DNA, 566 bp, synthetic construct
  source 1..566: mol_type = other DNA
ggtgggggggcttcggccctctcaccctcttttccggtggctactcgcccgggccaccgttactccactccactccctcgggactggtttggaggaacataacagggcttcccatccctgtttacccttaattctgcttaccctctccttttaccaaccctgtccacaccccactgactgattcctttggattttgacctcagaatacctacctgacctcccacttgcctctcccttctcggattgccggtggtgcctggcggaaaaagcacaagtgtgttgttggctaccaaactcttacccgacaaaggtgcgtgtccgcgtgctgagtaatgggataggagatgccaatgacaggctcgcccatgagtagagcatggactgcggtgcatgtgacttcggtcaccaggggcatagcgttgctcacccctgaatcaagtcatcgagatttctctgacctctgaagtgcactgtggttgcgtggttgggaatccacgcttgaccatgtactgcttgatagagtcgcggctggccgactcatgggttaaagtcagttgacaagacac
